United States Patent Application Publication US 2011/0214205 A1 - sequence listing, part 24

SEQ ID NO: 108072 - protein, 170 aa, Setaria italica
  misc_feature (55)..(55): Xaa can be any naturally occurring amino acid
  Transcript Sequence Number=SeqID_42098
  Gene Ontology: Mol. function=metal ion binding
  Homolog annotation: Hit_ID=B9SFM4; Match level="QueryCoverage=92%, HitCoverage=22%, E-value=4e-11, Identity=30%"; Hit description =Nutrient reservoir, putative
MQTTWVPKERKRRLALELVQRLGELKLEVKVWTDWANERVMQSTNRLVNERSILXLLKKDKADVEEPDVFNRKKLEETQRALDSTSDELNRVNSCVQELTDKVSHSRREKKAVQLQGKKADERLANLLSKENELMDGLKSMETEKSFLQEELVAERSKLSNLSCKKFFVV

SEQ ID NO: 108073 - protein, 135 aa, Setaria italica
  Transcript Sequence Number=SeqID_42099
  Homolog annotation: Hit_ID=B6TG33; Match level="QueryCoverage=86%, HitCoverage=45%, E-value=2e-57, Identity=89%"; Hit description=DnaJ domain containing protein
FVQYQPCGHVLSTSSDKLQLLMSTAGCPYSCVKRAPHVFSFSDDIGTARAVSQGNGEDDLVQLAVGQCPRKCIYYVTPCQRTILEDVLASVLMAPYDLAEAAVLDSLLTKAKFENNRYTKPKRGAKSSSDYVDWM

SEQ ID NO: 108074 - protein, 87 aa, Setaria italica
  Transcript Sequence Number=SeqID_42100
NRPGSIRSSSNYSHELSGQEKFLRQPRPFFLCIQLNQKTNYYTMLSALLHLSSFIHHLIQYHIKFLLMWKRENDEKRRLLFRETTTS

SEQ ID NO: 108075 - protein, 266 aa, Setaria italica
  Transcript Sequence Number=SeqID_42101
  Gene Ontology: Mol. function=protein serine/threonine kinase activity; Cellular component=plasma membrane; Biological process =protein amino acid phosphorylation
  Homolog annotation: Hit_ID=B6SY15; Match level="QueryCoverage=85%, HitCoverage=37%, E-value=1e-111, Identity=81%"; Hit description =Protein kinase
  Pfam annotation: Domain name=Pkinase; Domain location=50-259; Score =28.6; E_value=3.4e-10; Accession=PF00069.17; Description=Protein kinase domain
  Pfam annotation: Domain name=Pkinase_Tyr; Domain location=50-262; Score=-4.1; E_value=1.9e-13; Accession=PF07714.9; Description =Protein tyrosine kinase
  Pfam module annotation: Pfam domain module=Pkinase::Pkinase_Tyr; Domain location=50-259::50-262
MELRQLESPLTCRSGSSLLDLPQVLPPHLLAPVDLAGLTFAELAKATNGFAERNLVSCGGFGAVYRGVLADGSVVAVKKMLDSDPDRNLVPLRGCCIATDDIEEGKQRFLVYDFMPNGALEDFIYRDKDLHYGVPPLTWAQRRSIILDVARGLEYLHYGVKPAIYHRDIKATNILLDGEMRARVADFGLARRSRDGQSHLTTRVAGTHGYLAPEYALYGQLTEKSDVYSFGVLLLEIMSARRVLDMTSPAGPVLITDWAWTLVKAG

SEQ ID NO: 108076 - protein, 153 aa, Setaria italica
  misc_feature (13)..(13): Xaa can be any naturally occurring amino acid
  misc_feature (28)..(28): Xaa can be any naturally occurring amino acid
  Transcript Sequence Number=SeqID_42102
  Gene Ontology: Mol. function=protein serine/threonine kinase activity; Biological process=protein amino acid phosphorylation
  Homolog annotation: Hit_ID=B6SY15; Match level="QueryCoverage=74%, HitCoverage=17%, E-value=3e-52, Identity=80%"; Hit description =Protein kinase
  Pfam annotation: Domain name=Pkinase_Tyr; Domain location=52-153; Score=-165.7; E_value=0.01; Accession=PF07714.9; Description=Protein tyrosine kinase
  Subcellular localization annotation: CTP_CleavageSite=23; ConfidenceScore=5.03e-01
TLDFLLLWRKRRXDTKMRSIQISESSRXSRPRPNTGSVMFDVRELAKATNGFAERNLIGRGGFGAVYRGVLADGTVVAVKKMLDPDVEGGDEEFTNEVEIISLLRHRNLVPLRGCCIADDDPDEGKQMFLVYDYMPKGSLDQYIFEDGGDGRR

SEQ ID NO: 108077 - protein, 162 aa, Setaria italica
  Transcript Sequence Number=SeqID_42103
  Gene Ontology: Cellular component=plasma membrane
  Homolog annotation: Hit_ID=Q9SRX5; Match level="QueryCoverage=75%, HitCoverage=74%, E-value=1e-21, Identity=40%"; Hit description =F22D16.19 protein
  Pfam annotation: Domain name=DUF538; Domain location=39-148; Score =170.1; E_value=6.7e-48; Accession=PF04398.4; Description=Protein of unknown function, DUF538
MAATTYPLLLLLLLAATAVAAKAAAAAAAGTGGNGTTPTAYEMLERYNFPRGILPAGVQGYALHPDGTFEVYFPRPCEFLLARRWLVRYEARVSGSVAAGSLTALQGISVKVVFLWLGVGEVDRAGDNLSFYIGPVATSFPLRDFAESPRCRGYDVAGAASS

SEQ ID NO: 108078 - protein, 73 aa, Setaria italica
  Transcript Sequence Number=SeqID_42104
SSSSRAGRGGRSQAQPTGDSEPRKDARHLRRLAGAGLSAHHASPTRHVHRNSDSNKVNTELGNLPCRIEQCCH

SEQ ID NO: 108079 - protein, 110 aa, Setaria italica
  Transcript Sequence Number=SeqID_42105
WYLLCATSQRGSNVHPSGLLNETDKCVCEGLGLGSGYRFEPTWKHLSFGSGGLTPPITLMPQPTMFPESMSLDNSMGRAQKRLRLFGVDIDVPPRASGDDSCNGWTNGVA

SEQ ID NO: 108080 - protein, 116 aa, Setaria italica
  Transcript Sequence Number=SeqID_42106
  Gene Ontology: Mol. function=heat shock protein binding; Biological process=response to stress
  Homolog annotation: Hit_ID=Q8LQ03; Match level="QueryCoverage=99%, HitCoverage=15%, E-value=2e-50, Identity=80%"; Hit description=DNAJ heat shock N-terminal domain-containing protein-like
IFPKKGEIWAMYKNWKITLNSTDIDKCEPRMVEILSDYSDENGVNVCSLVRVKGCLTFFHRVVMEDFHLTRWIPRSEMLSFSHRVPAFIVVEIKDLAIPKGSWHLEPSALPTRIIH

SEQ ID NO: 108081 - protein, 270 aa, Setaria italica
  Transcript Sequence Number=SeqID_42107
  Gene Ontology: Mol. function=heat shock protein binding; Biological process=response to stress
  Homolog annotation: Hit_ID=Q8LQ03; Match level="QueryCoverage=91%, HitCoverage=57%, E-value=8e-97, Identity=53%"; Hit description=DNAJ heat shock N-terminal domain-containing protein-like
MFELEHSAVPENLRQETALACISPLLLSGLHDDTNSFHEAAVAQSSNPSTSKMDSGAPLQAMMSCDNKLSPKNFLEGQIWAVFDSRDRMPRSYVRIIRVVSSTSVFVLKLEPHPMLNEEIRWVEDSLPVASGVFRAGTETTYKDVWEFSHPVECDWSAKRSFYRIFPKKGEIWAMYKNWKITLNSTDIDKCEPRMVEILSDYSDENGVNVCSLVRVKGCLTFFHRVVMEDFHLTRWIPRVSKISLSVLDNSIEMICLDIRMMFADVETRE

SEQ ID NO: 108082 - protein, 95 aa, Setaria italica
  Transcript Sequence Number=SeqID_42108
  Gene Ontology: Mol. function=aspartic-type endopeptidase activity; Cellular component=chromatin; Biological process=chromatin assembly or disassembly
  Homolog annotation: Hit_ID=Q6UUS2; Match level="QueryCoverage=98%, HitCoverage=12%, E-value=1e-32, Identity=75%"; Hit description =Putative gag-pol protein
  Pfam annotation: Domain name=RVP_2; Domain location=1-84; Score= -14.6; E_value=1.6e-05; Accession=PF08284.3; Description=Retroviral aspartyl protease
GRLGLFVERIGEAIVVSSARGLVSSSIVCPGCVVTLADEDFIANLVVIPLEPFDVILGMDWLSQYKAVISCFWKTITLQAPSGREMIFQGSGLEL

SEQ ID NO: 108083 - protein, 181 aa, Setaria italica
  Transcript Sequence Number=SeqID_42109
  Gene Ontology: Mol. function=acid phosphatase activity; Cellular component=plasma membrane
  Homolog annotation: Hit_ID=B6T003; Match level="QueryCoverage=100%, HitCoverage=66%, E-value=1e-76, Identity=76%"; Hit description=Stem 28 kDa glycoprotein
  Pfam annotation: Domain name=Acid_phosphat_B; Domain location=19-181; Score=128.7; E_value=1.9e-35; Accession=PF03767.6; Description=HAD superfamily, subfamily IIIB (Acid
MPSSEVIDDGMPLIHMLRPLLSSGGHLGRRGRVPCDSWRFAVETNNKRGWKTIPARCERYVGNYMMGGHYRSDSRAVVNEAIAYAEGLELSGKGNEVWVFDIDETALSNLPYYAKHGFGAEPYNWTTFGAYAKQANAPALPETLRLYKRLQALGIKPVILTGRREDKREATVRNLASAGYN

SEQ ID NO: 108084 - protein, 67 aa, Setaria italica
  Transcript Sequence Number=SeqID_42110
QLFPSTSAPLTSSPRLRQKYLLDFLISGIDISHQISYDVRGPCIDAFFEDDFLSSETESMPTEDMSL

SEQ ID NO: 108085 - protein, 35 aa, Setaria italica
  misc_feature (25)..(25): Xaa can be any naturally occurring amino acid
  Transcript Sequence Number=SeqID_42111
SYIIFRARLKTPNFSPGSESLECAXFALDDIPFDS

SEQ ID NO: 108086 - protein, 55 aa, Setaria italica
  Transcript Sequence Number=SeqID_42112
  Gene Ontology: Mol. function=nucleic acid binding
  Homolog annotation: Hit_ID=B9RGI1; Match level="QueryCoverage=96%, HitCoverage=5%, E-value=3e-18, Identity=84%"; Hit description=DNA repair helicase rad5,16, putative
PVTVSRLTVKDTVEDRILALQEEKRAMVSSAFGEDKSGGHATRLTVEDLRFLFKI

SEQ ID NO: 108087 - protein, 58 aa, Setaria italica
  Transcript Sequence Number=SeqID_42113
LGYNLCSYTIYFDHACIFILIKMVYHFCRFHQKDLTPKEKSLCGGQSYASCLSLFLFL

SEQ ID NO: 108088 - protein, 89 aa, Setaria italica
  Transcript Sequence Number=SeqID_42114
  Subcellular localization annotation: CTP_CleavageSite=55; ConfidenceScore=5.06e-01
PARKRKAPDDESSGAAAAPAPAPKRSSGSPGAPAPPSTELQCPHCGTHLVVTLKRPETKSETEIAKDEPAPGASDAPPTRGDARGSPEK

SEQ ID NO: 108089 - protein, 137 aa, Setaria italica
  Transcript Sequence Number=SeqID_42115
  Gene Ontology: Mol. function=potassium ion transmembrane transporter activity; Cellular component=integral to membrane; Biological process=potassium ion transport
  Homolog annotation: Hit_ID=Q84MS3; Match level="QueryCoverage=100%, HitCoverage=16%, E-value=2e-57, Identity=80%"; Hit description =Probable potassium transporter 16
FRCVARYGYRDTLEMANDFVKVLVEYLQYYVRDLNLYGVGDEPLKIIFHSARGDDSFTWERKPSGHAIYAEEMLTPAQSFSELTMHPVSMSSRLAHFQTGKMNLEEMLKIEEDQKIIQREVDNGVVYIVGESEVVAR

SEQ ID NO: 108090 - protein, 68 aa, Setaria italica
  Transcript Sequence Number=SeqID_42116
SQIYTTRGEAASHGVDVIPEHGARFPCTQEEAKDSESISLATITRPLFLYNYTRPPVACNLRYFSVDL

SEQ ID NO: 108091 - protein, 202 aa, Setaria italica
  misc_feature (44)..(44): Xaa can be any naturally occurring amino acid
  misc_feature (92)..(92): Xaa can be any naturally occurring amino acid
  Transcript Sequence Number=SeqID_42117
  Gene Ontology: Mol. function=oxidoreductase activity; Cellular component=mitochondrial respiratory chain; Biological process =carotenoid biosynthetic process
  Homolog annotation: Hit_ID=O82522; Match level="QueryCoverage=96%, HitCoverage=55%, E-value=3e-96, Identity=86%"; Hit description =Alternative oxidase
MLLILLQDSVIMVLNGVYRDRSYARFFVLETIARVPYFVCLVVXAFISVLHLYETFGWSRRADYIKVHFAESWNEFHHLLIMEELGGNALFXDRFLARFMAYFYYFMTVGMYMLSPRMAYHFSECVERHAYSTYDKFLKLHEEELKRLPAPEAALNYYLNEDLYLFDEFQTARVPCSRRPKIDNLYDVFVNIRDDEASSLLV

SEQ ID NO: 108092 - protein, 363 aa, Setaria italica
  misc_feature (48)..(48): Xaa can be any naturally occurring amino acid
  misc_feature (348)..(348): Xaa can be any naturally occurring amino acid
  Transcript Sequence Number=SeqID_42118
  Gene Ontology: Mol. function=oxidoreductase activity; Cellular component=mitochondrial respiratory chain; Biological process =carotenoid biosynthetic process
  Homolog annotation: Hit_ID=O82522; Match level="QueryCoverage=83%, HitCoverage=89%, E-value=1e-151, Identity=84%"; Hit description =Alternative oxidase
  Pfam annotation: Domain name=AOX; Domain location=70-331; Score= -150.6; E_value=0.0043; Accession=PF01786.9; Description=Alternative oxidase
  Subcellular localization annotation: CTP_CleavageSite=72; ConfidenceScore=5.54e-01
APRGSHIPFPLPQTKPPKTHTESRARAWRWPPPPSRPSPWRCPPPPPXFLPLRGRRAADPRLGPVATWRRFRAEAIKTQREKQQTEVPVEESFPAREAAPLDGADDPMVPSDEGWVVKLEQSVNILLTDSVIMVLNGVYRDRSYARFFVLETIARVPYFAFISVLHLYETFGWSRRADYIKVHFAESWNEFHHLLIMEELGGNALFFDRFLARFMAFFYYFMTVGMYMLSPRMAYHFSECVERHAYSTYDKFLKLHEEELKRLPAPEAALNYYLNEDLYLFDEFQTARVPCSRRPKIDNLYDVFVNIRDDEAEHCKTMKACQTDGSLRSPHSTQNCLEADTEGVIPEXDCEGIVDCVKKSLTK

SEQ ID NO: 108093 - protein, 70 aa, Setaria italica
  Transcript Sequence Number=SeqID_42119
AVSATETNGNTSSTKKQDNYNKIACNKTEWDDQKFIEGIHSKMHTTQIMQLLMVLRPLGAAVATMSVSPS

SEQ ID NO: 108094 - protein, 84 aa, Setaria italica
  Transcript Sequence Number=SeqID_42120
  Subcellular localization annotation: CTP_CleavageSite=55; ConfidenceScore=5.37e-01
DFNLHRFIPINCVSSKSFFIKKPKWRGTKNILFTDKKVAYSTSVMYMFRVQTIYTASSGSSFPISMSPSMRMGNMNRIGWQPVR

SEQ ID NO: 108095 - protein, 183 aa, Setaria italica
  Transcript Sequence Number=SeqID_42121
PVNSKERVVEDSSSSLSSSEDEPDSKPVDSKEIENNSGSVSASASASMEPLRRQAARERAIRLAPKFAFFKADKDEHSEDDEEEELEPGAAPQDWPGPFATAARIYEEREAKLRARELNSSKVDKSANKAIVWSPSKDKRNPFPARAAPSLTSLCLNTLAEHSEGIESLGGIPEELKHKLLKI

SEQ ID NO: 108096 - protein, 59 aa, Setaria italica
  Transcript Sequence Number=SeqID_42122
ACRMFSLTDIETDVHYMMICIMEVAGIVDQHPPKCFIDLGIRCPFILDSTKTCLNCDCI

SEQ ID NO: 108097 - protein, 136 aa, Setaria italica
  Transcript Sequence Number=SeqID_42123
CNPIIAKMYQGAGADMGGAAGMDEDAPAGSGGPRPQDRGGRLSDSFLSRLRWRQVEVAAASYLCSVLSHLIYGRFGWHFVVVKQSKDNSRQQPPPGATADDSETSRLVDLLDLGAGPPLPAGASSSIPAAPPMSAP

SEQ ID NO: 108098 - protein, 75 aa, Setaria italica
  Transcript Sequence Number=SeqID_42124
  Gene Ontology: Mol. function=nucleotide binding; Cellular component =cytoplasm; Biological process=response to stress
  Homolog annotation: Hit_ID=Q5EBY7; Match level="QueryCoverage=92%, HitCoverage=18%, E-value=2e-18, Identity=68%"; Hit description=Heat shock protein 70 (Fragment)
EGPTRTNAAFSWLDANQLAEADEFEDKMKELESLCNPIIAKMYQGAGADMGGAAGMDEDAPAGSGGPGPKIEEVD

SEQ ID NO: 108099 - protein, 126 aa, Setaria italica
  Transcript Sequence Number=SeqID_42125
  Gene Ontology: Mol. function=nucleotide binding; Cellular component =cytoplasm; Biological process=response to stress
  Homolog annotation: Hit_ID=Q5EBY7; Match level="QueryCoverage=89%, HitCoverage=30%, E-value=2e-34, Identity=67%"; Hit description=Heat shock protein 70 (Fragment)
DQYERLDQYVRSTEHKKKVESKNSLENYAYNMRNTIRDEKIASKLAADDKKKIEDAIDAAISWLDANQLAEADEFEDKMKELESLCNPIIAKMYQGAGADMGGAAGMDEDAPAGSGGPGPKIEEVD

SEQ ID NO: 108100 - protein, 68 aa, Setaria italica
  Transcript Sequence Number=SeqID_42126
  Homolog annotation: Hit_ID=B3VTC5; Match level="QueryCoverage=61%, HitCoverage=4%, E-value=5e-12, Identity=73%"; Hit description =Cf2/Cf5-like disease resistance protein
DPGRLLRSWRGQDCCLWYGVRCSTRTGHVVKLDLYNKFVTENYYGPIDNLLGLSGQISSSLLALMPSH

SEQ ID NO: 108101 - protein, 124 aa, Setaria italica
  Transcript Sequence Number=SeqID_42127
  Gene Ontology: Mol. function=nucleotide binding
  Subcellular localization annotation: CTP_CleavageSite=33; ConfidenceScore=5.22e-01
TEGSFSSCSSTDGAPNDTTNATRDSFIREKRMRVNEASTHSAASNTRPWNKAGLPNRIRQIVFELQDSRGNVCDFLKDSIACSIQSQSNNSDTRTTTSSCVPREVHGRDVEKDYIIRVITAAES

SEQ ID NO: 108102 - protein, 172 aa, Setaria italica
  Transcript Sequence Number=SeqID_42128
  Gene Ontology: Mol. function=nucleotide binding; Biological process =defense response
  Homolog annotation: Hit_ID=Q01JX4; Match level="QueryCoverage=98%, HitCoverage=12%, E-value=7e-22, Identity=36%"; Hit description =B0809H07.6 protein
QKCKYCGKEVKCGGTTGTNGLNKHIRSKKCLSKRPAAEEPTNTTSSTDGAPNDTTNATRDSFIREKRMRVNEASTHSAASNTRPWNKAGLPNRIRQIVFELQDSRGNVCDFLKDSIACSIQSQSNNSDTRTTTSSCVPREVHGRDVEKDYIIRVITAAESNVITVLPIVGIV

SEQ ID NO: 108103 - protein, 48 aa, Setaria italica
  Transcript Sequence Number=SeqID_42129
THCWLSYNPTFTTGENAIEMECFVSQVNTGAGIPTRRRTHRFGRFPWQ

SEQ ID NO: 108104 - protein, 94 aa, Setaria italica
  Transcript Sequence Number=SeqID_42130
  Gene Ontology: Mol. function=transcription factor activity; Cellular component=chromatin; Biological process=regulation of transcription, DNA-dependent
  Homolog annotation: Hit_ID=Q9UHT1; Match level="QueryCoverage=80%, HitCoverage=89%, E-value=2e-22, Identity=73%"; Hit description =PRO1902
  Subcellular localization annotation: CTP_CleavageSite=80; ConfidenceScore=5.10e-01
LCLFSLRRSLTLDAQARVQWHDLGSLQPLPPGLKQFSCLSLPSSWDYRRTPPRRSNFFLYFSRDGVSPCCPGWSQTPELRQSARLGLPKGPWVF

SEQ ID NO: 108105 - protein, 80 aa, Setaria italica
  Transcript Sequence Number=SeqID_42131
DDAASTWGHYRTQVLCRVPGALGKTRNTLGNDFAECYTRHLALGKFCVGKVIFAECFRSGTRHSFRRVPRKHSANLFLKK

SEQ ID NO: 108106 - protein, 109 aa, Setaria italica
  Transcript Sequence Number=SeqID_42132
  Gene Ontology: Mol. function=nucleic acid binding; Cellular component= intracellular; Biological process=RNA processing
  Homolog annotation: Hit_ID=B6T4S9; Match level="QueryCoverage=100%, HitCoverage=26%, E-value=1e-29, Identity=63%"; Hit description=Gamma response I protein
  Pfam annotation: Domain name=Surp; Domain location=58-103; Score =59.7; E_value=1.1e-14; Accession=PF01805.12; Description=Surp module
AIAPVFAPEDDDEEGAADVEREEPAKRQKSVKADTPAVAAPTGAVAPLPNDITVRQVADKLASFVAKNGRQFENITRQRNPGDTPFKFLFDKHCPDYKYYEFRLAEEEK

SEQ ID NO: 108107 - protein, 180 aa, Setaria italica
  Transcript Sequence Number=SeqID_42133
  Homolog annotation: Hit_ID=B6T4S9; Match level="QueryCoverage=61%, HitCoverage=26%, E-value=2e-23, Identity=56%"; Hit description=Gamma response I protein
MDKGLFANDGSFMERFKQMQQEQEKEKAAAAAASSAPPKPANPKQGFTVAANKRPFELKKAGPVATGGKLAFSLKKAKVAIAPVFAPEDDDEEGAADVEREEPAKRQKSVKADTPAVAAPTGAVGNHLFISCCYSVIFLVLQHYLTWFYWHSVGCTWHPMIEYNCVIRHSIQCCYALEHQ

SEQ ID NO: 108108 - protein, 72 aa, Setaria italica
  Transcript Sequence Number=SeqID_42134
  Gene Ontology: Mol. function=nucleic acid binding; Cellular component= intracellular; Biological process=RNA processing
  Homolog annotation: Hit_ID=B6T4S9; Match level="QueryCoverage=100%, HitCoverage=17%, E-value=4e-27, Identity=80%"; Hit description=Gamma response I protein
  Pfam annotation: Domain name=G-patch; Domain location=1-34; Score =16.7; E_value=0.002; Accession=PF01585.15; Description=G-patch domain
GWREGEGLGSERRGRADPVMAGDVKKDHLGVGAVQPGEVTSEDDIYEQYKKRMMLGYRYRPNPLNNPRKAYY

SEQ ID NO: 108109 - protein, 86 aa, Setaria italica
  Transcript Sequence Number=SeqID_42135
  Gene Ontology: Mol. function=nucleic acid binding; Cellular component= intracellular; Biological process=RNA processing
  Homolog annotation: Hit_ID=B6T4S9; Match level="QueryCoverage=100%, HitCoverage=20%, E-value=4e-35, Identity=81%"; Hit description=Gamma response I protein
  Pfam annotation: Domain name=G-patch; Domain location=3-48; Score =64.1; E_value=5.4e-16; Accession=PF01585.15; Description=G-patch domain
IQADNIGHKLLSKMGWREGEGLGSERRGRADPIMAGDVKKDHLGVGAVKPGEVTSEDDIYEQYKKRMMLGYRYRPNPLNNPRKQYY

SEQ ID NO: 108110 - protein, 176 aa, Setaria italica
  Transcript Sequence Number=SeqID_42136
  Gene Ontology: Mol. function=nucleic acid binding; Cellular component= intracellular; Biological process=RNA processing
  Homolog annotation: Hit_ID=B6T4S9; Match level="QueryCoverage=94%, HitCoverage=40%, E-value=1e-61, Identity=75%"; Hit description=Gamma response I protein
  Pfam annotation: Domain name=Surp; Domain location=65-110; Score =53.8; E_value=6.4e-13; Accession=PF01805.12; Description=Surp module
LAFSLKKAKVAVAPIFAADEEEEDVEREEPAKRHKSVQADAPVAATPAGAVAPPPPNDMTVKQVADKLASFVAKNGRQFENITRQRNPGDTPFKFLFDKHCPDYKYYEFQLAEEEKALGQSKDAEASKNASSSTASFKAPSGLYKSSFEQKSNYQTPASALYGAYEGSSSQGSSSS

SEQ ID NO: 108111 - protein, 295 aa, Setaria italica
  Transcript Sequence Number=SeqID_42137
  Gene Ontology: Mol. function=nucleic acid binding; Cellular component= intracellular; Biological process=RNA processing
  Homolog annotation: Hit_ID=B6T4S9; Match level="QueryCoverage=97%, HitCoverage=69%, E-value=1e-105, Identity=70%"; Hit description =Gamma response I protein
  Pfam annotation: Domain name=G-patch; Domain location=212-257; Score =63.2; E_value=9.8e-16; Accession=PF01585.15; Description=G-patch domain
  Pfam annotation: Domain name=Surp; Domain location=15-60; Score=59.7; E_value=1.1e-14; Accession=PF01805.12; Description=Surp module
  Pfam module annotation: Pfam domain module=G-patch::Surp; Domain location=212-257::15-60
HAAPLPNDITVRQVADKLASFVAKNGRQFENITRQRNPGDTPFKFLFDKHCPDYKYYEFRLAEEEKILAQSKEAEAAKNANIASSKALVGLHRSSFEQKSNYQTPASALYGAYEGSSSQGSSSYGDTSAPSDPVALMEFYMKKAAQEERKRPPRQSKDEMPPPPSLQGSPKKGHHMGDFIPPEELEKFMARCNDAEAQKATKEAAEKAKIQADNIGHKLLSKMGWREGEGLGSERRGRADPVMAGDVKKDHLGVGAVQPGEVTSEDDIYEQYKKRMMLGYRYRPNPLNNPRKAYY

SEQ ID NO: 108112 - protein, 301 aa, Setaria italica
  misc_feature (78)..(78): Xaa can be any naturally occurring amino acid
  Transcript Sequence Number=SeqID_42138
  Gene Ontology: Mol. function=nucleic acid binding; Cellular component= intracellular; Biological process=RNA processing
  Homolog annotation: Hit_ID=B6T4S9; Match level="QueryCoverage=97%, HitCoverage=69%, E-value=1e-120, Identity=73%"; Hit description =Gamma response I protein
  Pfam annotation: Domain name=G-patch; Domain location=218-263; Score =64.1; E_value=5.4e-16; Accession=PF01585.15; Description=G-patch domain
  Pfam annotation: Domain name=Surp; Domain location=16-61; Score=53.8; E_value=6.4e-13; Accession=PF01805.12; Description=Surp module
  Pfam module annotation: Pfam domain module=G-patch::Surp; Domain location=218-263::16-61
HAAPPPPNDMTVKQVADKLASFVAKNGRQFENITRQRNPGDTPFKFLFDKHCPDYKYYEFQLAEEEKALGQSKDAEAXKNASSSTASFKAPSGLYKSSFEQKSNYQTPASALYGAYEGSSSQGSSSSYGDHNTSAPSDPVALMEFYAKKAAQEERKRPLRQSKDEMPPPPSLQGPPKKGHHMGDFIPQEELEKFMARCNDAEAQKATKEAAEKAKIQADNIGHKLLSKMGWREGEGLGSERRGRADPIMAGDVKKDHLGVGAVKPGEVTSEDDIYEQYKKRMMLGYRYRPNPLNNPRKQYY

SEQ ID NO: 108113 - protein, 127 aa, Setaria italica
  Transcript Sequence Number=SeqID_42139
  Homolog annotation: Hit_ID=B6T4S9; Match level="QueryCoverage=84%, HitCoverage=26%, E-value=9e-22, Identity=59%"; Hit description=Gamma response I protein
MDKELFANDGSFMERFKQMQQEMQEKEKAAATEASSAPKHGSSKPGFAVAANKRPFELKKAGPVATGGKLAFSLKKAKVAVAPIFAADEEEEDVEREEPAKRHKSVQADAPVAATPAGAVGNHLFIN

SEQ ID NO: 108114 - protein, 66 aa, Setaria italica
  Transcript Sequence Number=SeqID_42140
IHDKQCYIFSISTHHVSRFCMHTFLINLHVSTNVRAKLISFLHACISILVSSYTNMASKIVHDLPE

SEQ ID NO: 108115 - protein, 71 aa, Setaria italica
  Transcript Sequence Number=SeqID_42141
KAIFLKQHDSSFENQSRRTSWDFMERTITSSRSHFMEVFGGGSVTSEVSSSLWTLHCAQQVFLLERNQALH

SEQ ID NO: 108116 - protein, 61 aa, Setaria italica
  Transcript Sequence Number=SeqID_42142
LLSYQGLFWPNLMLDLNHTTMSSSLMTYHKLYLLFISSPLARGKMIILHDSSYIIATDQAL

SEQ ID NO: 108117 - protein, 59 aa, Setaria italica
  Transcript Sequence Number=SeqID_42143
KFRWHRRDHYILNGIEGMGISLDGIEGIYSFFLICSNKNIMNAIIPNSLLMMIKSISFR

SEQ ID NO: 108118 - protein, 89 aa, Setaria italica
  Transcript Sequence Number=SeqID_42144
GEDAVKYCATATAVSRSYLSIHSQKTLVPENAKKNLPKFCAGETSMKKAIIKKGIENLPGEYLPQRKTLSGETLNQGPYKELQEEAKES

SEQ ID NO: 108119 - protein, 157 aa, Setaria italica
  Transcript Sequence Number=SeqID_42145
RKLLDGSDLPAVESGDEDLEEDFVILADQSDEEQQNEEEEKNIGEGKGNSQQLHHEQFDSLALEECAGGEDAVKYCATATAVSRSYLSIHSQKTLVPENAKKNLPKFCAGETSMKKAIIKKGIENLPGEYLPQRKTLSGETLNQGPYKELQEEAKES

SEQ ID NO: 108120 - protein, 106 aa, Setaria italica
  Transcript Sequence Number=SeqID_42146
  Gene Ontology: Mol. function=transporter activity; Cellular component= membrane; Biological process=oligopeptide transport
  Homolog annotation: Hit_ID=Q5N732; Match level="QueryCoverage=94%, HitCoverage=33%, E-value=9e-37, Identity=76%"; Hit description =Oligopeptide transporter-like protein
LADVFTMVGLQEFFYDQVPDGLRSLGLALYLSIFGIGSFISSFLLYAIDKVTSRGGDSWFSNNLNRGHLDYFYWLLAVLNVFGLAAYLYFSQVYAHKKKGQGLLVQ

SEQ ID NO: 108121 - protein, 99 aa, Setaria italica
  Transcript Sequence Number=SeqID_42147
  Subcellular localization annotation: CTP_CleavageSite=81; ConfidenceScore=5.66e-01
LIAAFLNPLMAPFFFLANLRLGCYSSKRSSPFVYFFSWTTMDFATLLVGLSTSTDSSTSVRNILDRYRPSSYHVHPAAVLLASSRTHIAAGVRLPLLLR

SEQ ID NO: 108122 - protein, 85 aa, Setaria italica
  Transcript Sequence Number=SeqID_42148
LQSLFHELNVFKHTAIVDYQVQCANNFTTPHNPITRIQLSTYISTNSTSIPLKVEAVAIYYNQNLGCSMHASSGIKQLDKSKLPN

SEQ ID NO: 108123 - protein, 482 aa, Setaria italica
  Transcript Sequence Number=SeqID_42149
  Gene Ontology: Mol. function=protein serine/threonine kinase activity; Biological process=protein amino acid phosphorylation
  Homolog annotation: Hit_ID=Q8RVT2; Match level="QueryCoverage=92%, HitCoverage=65%, E-value=1e-104, Identity=47%"; Hit description =Protein kinase
  Pfam annotation: Domain name=EGF_CA; Domain location=68-105; Score =15.0; E_value=0.0059; Accession=PF07645.7; Description=Calcium binding EGF domain
  Pfam annotation: Domain name=Pkinase; Domain location=173-454; Score =89.0; E_value=1.7e-23; Accession=PF00069.17; Description=Protein kinase domain
  Pfam annotation: Domain name=Pkinase_Tyr; Domain location=169-454; Score=62.3; E_value=7.2e-18; Accession=PF07714.9; Description =Protein tyrosine kinase
  Pfam module annotation: Pfam domain module=EGF_CA::Pkinase::Pkinase _Tyr; Domain location=68-105::173-454::169-454
TGEMAYNVRVGHRSAPLVLDWAIDVSRDGACVSSNSYRVTVRDDQGYLCNCSKGYKGNPYVKDGCKNIDECESPELYPCPSGSNCKDTEGSYMCPCKFGLRGKDCRPIFPAPAAAVLATTVASLFLALLLWSIHKDRKRRIKTVFFDQNGGKILKGAAGINIFTEKQLIKFTNHYDTLIGRGAFGMVFMGTTDEEQRVAVKRSIIEDKELHGRGNLQHGEDIVNEITFQFRNSHPNLVRLVGCCLETNIPVLVFEFISNGNLYNLLHVSTHKVVPLRTRIKIAIGSAEALAYIHSHGDHDCVVHGDVKSANILLDDNLMPKVSDFGSSKLLSIDRYARAVAADMSYVDPVYMKTERFVKKSDVYSFGMVLLELITRKTVKYGKSKINSLPMDFVRCCKEMGSGREMYDIAISSHGDTQCHHCIDCLDKIGALAVRCLKEDVDERPTMAEVVDELKLASEAVEKCKHHVNLIAYDRSCYLEVC

SEQ ID NO: 108124 - protein, 61 aa, Setaria italica
  Transcript Sequence Number=SeqID_42150
LQYLLLKFLKLMDFRSNIDQFGKILKRVKIVHLVVSALNTNSIHMENSYYANCLVIIFAIT

SEQ ID NO: 108125 - protein, 144 aa, Setaria italica
  Transcript Sequence Number=SeqID_42151
  Gene Ontology: Mol. function=nucleic acid binding; Cellular component= cytoplasm; Biological process=RNA processing
  Homolog annotation: Hit_ID=B6TMU5; Match level="QueryCoverage=80%, HitCoverage=60%, E-value=6e-46, Identity=77%"; Hit description=RNA -binding protein 8A
  Pfam annotation: Domain name=RRM_1; Domain location=36-106; Score =68.2; E_value=3.1e-17; Accession=PF00076.14; Description=RNA recognition motif. (a.k.a. RRM, RBD, o
DCSPSVLAPSRDRFDSLTDEGDNGYGPQRSIEGWTILVCGVKEDAEEEDLHNVFGEFGRVKDLHLNLERRTGYAKGYALIEYESFEEAQAAIRAMNGTQLLTKTVYVDWAFSRGPIKNAMSTRPPRPRSRTPPRRLNALMLTPY

SEQ ID NO: 108126 - protein, 83 aa, Setaria italica
  Transcript Sequence Number=SeqID_42152
  Subcellular localization annotation: CTP_CleavageSite=24; ConfidenceScore=5.05e-01
VFCTTFGMGAWLSQQSLAASPSFRAKAEQAKHRYKKPNRVEVQVTKDTFTLFSCCSSPKHNQLELTHNPSHHSPLNMASASRH

SEQ ID NO: 108127 - protein, 55 aa, Setaria italica
  Transcript Sequence Number=SeqID_42153
  Gene Ontology: Mol. function=nucleic acid binding; Cellular component= cytoplasm; Biological process=RNA processing
  Homolog annotation: Hit_ID=B6TMU5; Match level="QueryCoverage=80%, HitCoverage=22%, E-value=2e-14, Identity=79%"; Hit description=RNA -binding protein 8A
LLAKEGWTILVCGVKEDAEEEDLHNVFGEFGRVKDLHLNLERRTGYAKVNFVALL

SEQ ID NO: 108128 - protein, 78 aa, Setaria italica
  Transcript Sequence Number=SeqID_42154
SSQVMFTVLALFVSVLISIRNYECTNRHVHGIFLQSAVLFFRHYSYRRVLIIYSCQSIILNQLEPTLAWNFLFLLHQR

SEQ ID NO: 108129 - protein, 150 aa, Setaria italica
  misc_feature (90)..(90): Xaa can be any naturally occurring amino acid
  Transcript Sequence Number=SeqID_42155
  Homolog annotation: Hit_ID=Q10RT4; Match level="QueryCoverage=98%, HitCoverage=59%, E-value=5e-62, Identity=81%"; Hit description=(RAP Annotation release2) Galactose-binding like domain containing protein
  Pfam annotation: Domain name=DUF1997; Domain location=1-150; Score =60.4; E_value=6.6e-15; Accession=PF09366.2; Description=Protein of unknown function (DUF1997)
QQLARPLAEYMSLPASQYSVLDAERIERVDDSTFRCYVYRFRFFALEVCPVLLVRVDEEPNGCCIRLLSCKLEGSPLVEAQNDKFSGYHXHDLLWDAASMVNRVFCSSTLQGSTLQQLTSDTTIEVTIDIPFHFEQYQVTAIESSGQTSA

SEQ ID NO: 108130 - protein, 233 aa, Setaria italica
  Transcript Sequence Number=SeqID_42156
  Homolog annotation: Hit_ID=Q10RT4; Match level="QueryCoverage=81%, HitCoverage=82%, E-value=2e-97, Identity=91%"; Hit description=(RAP Annotation release2) Galactose-binding like domain containing protein
  Pfam annotation: Domain name=DUF1997; Domain location=47-221; Score =229.9; E_value=6.5e-66; Accession=PF09366.2; Description=Protein of unknown function (DUF1997)
  Subcellular localization annotation: CTP_CleavageSite=71; ConfidenceScore=6.00e-01
MAASLRSPPPVPAAFRRSRAVVRASSQSSSSSSSAVSSSSSAPKARFVARRSESVSVQQLARPLAEYMSLPASQYSVLDAERIERVDDSTFRCYVYRFRFFALEVCPVLLVRVDEEPNGCCIRLLSCKLEGSPLVEAQNDKFSASMVNRVFCSSTLQGSTLQQLTSDTTIEVTIDIPFPFRAIPVTAIESSGRQVLEQLLGVMLPRFLNQLVKDYQAWASGDSSRKPLGTGEI

SEQ ID NO: 108131 - protein, 186 aa, Setaria italica
  misc_feature (159)..(159): Xaa can be any naturally occurring amino acid
  Transcript Sequence Number=SeqID_42157
  Gene Ontology: Mol. function=zinc ion binding; Cellular component =intracellular
  Pfam annotation: Domain name=zf-C2H2; Domain location=65-87; Score =19.9; E_value=0.01; Accession=PF00096.18; Description=Zinc finger, C2H2 type
MNASRKSSHVTTKDNAETARDIISTSSQIQSMKVPDAVAAIAQAAAKANDLPGWPLFSPPKVQLDKCTKCSREFCSSINFRRHTRVHRRTLKVDKDFPKNRDHLAAFWNKLTVDDASTILSLSDVVVEGVTGSSILTALSSWMCKPGYASLPMAYARAXAVELLDLIQTKVSMQLPVSSNELFSVL

SEQ ID NO: 108132 - protein, 290 aa, Setaria italica
  Transcript Sequence Number=SeqID_42158
  Gene Ontology: Cellular component=chloroplast envelope
  Homolog annotation: Hit_ID=B4FGF1; Match level="QueryCoverage=90%, HitCoverage=81%, E-value=1e-121, Identity=81%"; Hit description=Non -green plastid inner envelope membrane protein
  Pfam annotation: Domain name=Tmemb_14; Domain location=171-274; Score= -21.4; E_value=0.064; Accession=PF03647.5; Description=Transmembrane proteins 14C
  Subcellular localization annotation: CTP_CleavageSite=39; ConfidenceScore=5.20e-01
ATVSLRLARPSSSSRRRLEASFRALSAGHRFAGRPRRVVAAFAGEETEGSGVGDEKDNSKEEIKPEEAQEAWKVMLEQFKAEALRMQALSVQAYDVYSKRTREVLLEASEKLKIQADKAQKDLSVIASEVGQEGQEYLTMAAQNSPDSIKDITTTFRALGKLNWPSEYEDYHVGIPFGTFLTVGGFLNFMLTGSTSAIRFGIVLGFALLALGISSLRSQRQGGRRPRLLLKGQAAIATIIFFREFSVLLQYGWFPKIFMVLLSGVVAAFYFYRMATGAPKDLSSKSDSVN

SEQ ID NO: 108133 - protein, 382 aa, Setaria italica
  Transcript Sequence Number=SeqID_42159
  Homolog annotation: Hit_ID=Q8VYM7; Match level="QueryCoverage=100%, HitCoverage=100%, E-value=3e-22, Identity=31%"; Hit description =Putative proline-rich protein
MAAKQAAAGEGTWAQVNAMSRSEMYDMMSKMKTLIDHDQETVRRMLVDNPDVTRALFRAQVVLGMVKTPKTAQPSDTVQPTAAPTAPSSVKATAPDHVSLPPPLLPANQQSVAQHSTPFPSGPSNVGSTMDLPTMSANPPQAAQAKGYPIHQMPSSIPQSSQHPMTLPHAPPQYSNLPSHMPIVHSQPQQPLQNPGMFNQQFQPPLPQMPRPQSMQSFSHQMHPQVPNSFGLTHGNAPQHILQQQMFHPGGNPQTLQPGGNPQTSFLAGQPPLPSQPPPQLYPASSHYNTQSTTPMQVDRSAPWGRGPEAPAAGSHFPGQLPGLPGQMAQGIGGIQAGQAPLTPEMEKMLVQQVLGMSAEQINMLPPEQRQQVLQLRDMLRQ

SEQ ID NO: 108134 - protein, 149 aa, Setaria italica
  misc_feature (134)..(134): Xaa can be any naturally occurring amino acid
  Transcript Sequence Number=SeqID_42160
  Gene Ontology: Mol. function=diacylglycerol kinase activity; Cellular component=plasma membrane; Biological process=activation of protein kinase C activity
  Homolog annotation: Hit_ID=B9SIF7; Match level="QueryCoverage=81%, HitCoverage=24%, E-value=2e-35, Identity=58%"; Hit description =Diacylglycerol kinase, alpha, putative
GLRAAPSPQAIRILPATPRLQISMENNVDRNNMLKEFYIPTYIFVPESPVEHVSQIPTCPVIVFINTKSGGQLGRNLIVTYRKLLNHAQVFDLLDEAPDKVLHKLYSNLERLKHGGDALASEIHRRLRLIVAGXDGTAGWLLWSLYLIL

SEQ ID NO: 108135 - protein, 72 aa, Setaria italica
  Transcript Sequence Number=SeqID_42161
FLILIHATMLLGFLFRTHGSSSTIHELWNYCVYFIMVIRMAIDDLHDWLVVVVLSWCCWAMHISRFELYCYI

SEQ ID NO: 108136 - protein, 60 aa, Setaria italica
  Transcript Sequence Number=SeqID_42162
FYHVFNLYDSTGNLAGCCQYISWHLSMAVLGNNRESCLTWFRRLFVMFSSYTYINMLQKV

SEQ ID NO: 108137 - protein, 217 aa, Setaria italica
  Transcript Sequence Number=SeqID_42163
  Gene Ontology: Mol. function=N-acetylglucosaminylphosphatidylinositol deacetylase activity; Cellular component=endoplasmic reticulum membrane; Biological process=preassembly of GPI anchor in ER membrane
  Homolog annotation: Hit_ID=B6TKR0; Match level="QueryCoverage=88%, HitCoverage=79%, E-value=8e-93, Identity=84%"; Hit description=N -acetylglucosaminyl-phosphatidylinositol de-N-acetylase
  Pfam annotation: Domain name=PIG-L; Domain location=7-131; Score =136.7; E_value=7.4e-38; Accession=PF02585.9; Description=GlcNAc-PI de-N-acetylase
QRSRGRLLVVAHPDDESMFFTPTILFLKSKGHNIHVLCMSQGNADGLGVTRKEELYHACDTLKIPREQVKVLDHPKLQDGFHEKWDHGLLAELTMEHVQLWAIDTIVTFDSYGVSGHPNHQDVHQGICKLLHVNGQGNIEAWELASLNILRKYSGPVDIWLSSLISSSSKQPIYTLVNSSPSRSYEAMAAHRSQWVWFRRLFFTIATSTYINMLQKV

SEQ ID NO: 108138 - protein, 73 aa, Setaria italica
  Transcript Sequence Number=SeqID_42164
KIVCHVLKLHVHKYATESLAFDVISEQVICQPCLPPIVPGSAHATISKAASEEQRLVPPEQGFQEHYGRYTRT

SEQ ID NO: 108139 - protein, 161 aa, Setaria italica
  misc_feature (110)..(110): Xaa can be any naturally occurring amino acid
  misc_feature (140)..(140): Xaa can be any naturally occurring amino acid
  misc_feature (152)..(152): Xaa can be any naturally occurring amino acid
  Transcript Sequence Number=SeqID_42165
  Gene Ontology: Mol. function=metal ion binding
  Homolog annotation: Hit_ID=B6U7V9; Match level="QueryCoverage=91%, HitCoverage=49%, E-value=6e-69, Identity=81%"; Hit description=DNA binding protein
  Pfam annotation: Domain name=zf-C3HC4; Domain location=15-50; Score =4.2; E_value=0.033; Accession=PF00097.17; Description=Zinc finger, C3HC4 type (RING finger)
LTKNEVQCLLAGIGCWKQLEGQAITTTCGHLLCTEDAKKILSNDGACPICDQVLSKSHMKPMDVDPSDDWTNMAMAGISPQILMKSAYRSVMFYIGQKELEMQYKMNHIXVGQCRQKIELMQGKFTEKLEELHAAYQKMXKKCQLMEQEIEXLTKDKQELQ

SEQ ID NO: 108140 - protein, 75 aa, Setaria italica
  Transcript Sequence Number=SeqID_42166
  Gene Ontology: Mol. function=electron carrier activity; Biological process=oxidation reduction
KSRICSVITLLNICRFLPTKNNRRMREINREIHKILREIIGKREKAMKNGETNNDDLLGLLLESNMRQSNWELQS

SEQ ID NO: 108141 - protein, 41 aa, Setaria italica
  Transcript Sequence Number=SeqID_42167
HIFHACFRVTIHFCTNHNTNRNTLVKACASCACSNAAWLIL

SEQ ID NO: 108142 - protein, 82 aa, Setaria italica
  Transcript Sequence Number=SeqID_42168
  Gene Ontology: Mol. function=electron carrier activity; Biological process=oxidation reduction
  Homolog annotation: Hit_ID=Q9ATU3; Match level="QueryCoverage=95%, HitCoverage=14%, E-value=4e-34, Identity=85%"; Hit description =Putative cytochrome P450
MYAQVTMILYEVLRLYPPATFLTRRTYKDMELGGIRYPAGVNLLLPILFIHHDPDIWGKDASEFNPARFSDGISNATKHLGS

SEQ ID NO: 108143 - protein, 88 aa, Setaria italica
  Transcript Sequence Number=SeqID_42169
QDVSVASMRWSWSRRAWSRRGNHCAQSHNGSEISDAVVTLQTICVAAKFEGSTVYKNTNITSHWEKQVYISKSMIILVTIKFLTQNLT

SEQ ID NO: 108144 - protein, 88 aa, Setaria italica
  Transcript Sequence Number=SeqID_42170
FPLRLQARRLQDHLMLATLTSCYAYVAPHPAFECFCSCHEVIVPFLLLLTGHKHSFLISDSNQVAYPVITISKDFVGKCLRRRKIRND

SEQ ID NO: 108145 - protein, 137 aa, Setaria italica
  misc_feature (31)..(31): Xaa can be any naturally occurring amino acid
  misc_feature (106)..(106): Xaa can be any naturally occurring amino acid
  Transcript Sequence Number=SeqID_42171
  Gene Ontology: Mol. function=electron carrier activity; Biological process=oxidation reduction
  Homolog annotation: Hit_ID=Q8LL74; Match level="QueryCoverage=94%, HitCoverage=24%, E-value=3e-48, Identity=72%"; Hit description =Cytochrome P450 monooxygenase CYP72A16
AAIRREENFQLQGELAERLVQSFQTIFIPGXWFLPTKNNRRMREIDREIRTILHEIIGKREKAMKNGETNNDDLLGLLLESNMKQSNGNAKLGLTTEDVIEECKLXYFAGMETTSVLLTWTLVVLSMHPEWQERARD

SEQ ID NO: 108146 - protein, 101 aa, Setaria italica
  Transcript Sequence Number=SeqID_42172
KERTCGGNWLIPWLILVDLTWYLIQLGGHCYPYEKMPFFSILVSSQIRMNLYFSRAARKTNILVYASFVLIVSSIHWQITTGKRENCIALFFVFVLLINVL

SEQ ID NO: 108147 - protein, 295 aa, Setaria italica
  misc_feature (238)..(238): Xaa can be any naturally occurring amino acid
  Transcript Sequence Number=SeqID_42173
  Gene Ontology: Mol. function=electron carrier activity; Biological process=oxidation reduction
  Homolog annotation: Hit_ID=Q8LL74; Match level="QueryCoverage=100%, HitCoverage=55%, E-value=1e-132, Identity=78%"; Hit description =Cytochrome P450 monooxygenase CYP72A16
  Pfam annotation: Domain name=p450; Domain location=1-291; Score= -18.3; E_value=9e-11; Accession=PF00067.14; Description=Cytochrome P450
GRRIFQLQGELAERLIQSFQAIFIPGYWFLPTKNNRRMREINREIHKILREIIGKREKAMKNGETNNDDLLGLLLESNMRQSNGNAKLGLTTEHVIEECKLFYFAGMETTSVLLTWTLVVLSMHPEWQEQAREEVLNHFGRARPDFESLNRLKIVTMILYEVLRLYPPVVLLSRRTYKGMELGGIKYPAGVNLLLPIIFIHHDPNIWGKDAGMFNPERFADGISNATKHQAAFFPFGXGPRICIGQNFALLEAKMALCTILQRFSFELSPSYTHAPYTVITLHPQHGAPIRLKKL

SEQ ID NO: 108148 - protein, 239 aa, Setaria italica
  Transcript Sequence Number=SeqID_42174
  Gene Ontology: Mol. function=electron carrier activity; Biological process=oxidation reduction
  Homolog annotation: Hit_ID=Q8LL74; Match level="QueryCoverage=98%, HitCoverage=44%, E-value=1e-102, Identity=74%"; Hit description =Cytochrome P450 monooxygenase CYP72A16
MSYLQRMLPVFSTCCDETITRWENSMPSEGSSEIDVWPEFQNLTGDVISKTAFGSSYQEGRKIFQLQGELAERLVQSFQTIFIPGYWFLPTKNNRRMREIDREIRTILHEIIGKREKAMKNGETNNDDLLGLLLESNMKQSNGNAKLGLTTEDVIEECKLFYFAGMETTSVLLTWTLVVLSMHPEWQERAREEVLSHFGRAKPDFDSLSRLKTVTMILYEVLRLYPPATFLTRRTYKEQ

SEQ ID NO: 108149 - protein, 449 aa, Setaria italica
  misc_feature (251)..(251): Xaa can be any naturally occurring amino acid
  Transcript Sequence Number=SeqID_42175
  Gene Ontology: Mol. function=electron carrier activity; Biological process=oxidation reduction
  Homolog annotation: Hit_ID=Q8LL74; Match level="QueryCoverage=100%, HitCoverage=84%, E-value=0.0, Identity=78%"; Hit description =Cytochrome P450 monooxygenase CYP72A16
  Pfam annotation: Domain name=p450; Domain location=1-445; Score =210.2; E_value=5.6e-60; Accession=PF00067.14; Description=Cytochrome P450
PLPLGCHDIIPRVLPMLHKVVKENGTVSFTWFGPTPRVMIPDPESVKEVLSNKFGHFGKQQFSRAGKLLGDGVANHEGEKWAKHRRILNPAFHHEKIKKMLPVFATCCVDVINRWENSMSSEGSSEIDIWPEFQNLTGDVISRTAFGSSYQEGRRIFQLQGELAERLIQSFQAIFIPGYWFLPTKNNRRMREINREIHKILREIIGKREKAMKNGETNNDDLLGLLLESNMRQSNGNAKLGLTTEHVIEEXCLSLFCTNYSSSLSLLWYFFLFVLSMHPEWQEQAREEVLNHFGRARPDFESLNRLKIVTMILYEVLRLYPPVVLLSRRTYKGMELGGIKYPAGVNLLLPIIFIHHDPNIWGKDAGMFNPERFADGISNATKHQAAFFPFGGGPRICIGQNFALLEAKMALCTILQRFSFELSPSYTHAPYTVITLHPQHGAPIRLKKL

SEQ ID NO: 108150 - protein, 267 aa, Setaria italica
  misc_feature (20)..(20): Xaa can be any naturally occurring amino acid
  misc_feature (222)..(222): Xaa can be any naturally occurring amino acid
  Transcript Sequence Number=SeqID_42176
  Gene Ontology: Mol. function=transcription regulator activity; Cellular component=nucleus; Biological process=tapetal cell differentiation
  Homolog annotation: Hit_ID=B6TPA8; Match level="QueryCoverage=97%, HitCoverage=64%, E-value=4e-82, Identity=66%"; Hit description=Helix- loop-helix DNA-binding domain containing protein
  Pfam annotation: Domain name=HLH; Domain location=9-57; Score=28.9; E_ value=2e-05; Accession=PF00010.18; Description=Helix-loop-helix DNA -binding domain
KGDGKRQHCKNLVAERKRRXKKLNNALYKLRSLVPKITKMDRASILGDAIDYIVGLQNQVKALQDELEDPADGAPDVLLDHPPPASLVGLENDDSPRTSLQQPPASKRARVPAAAPTEEDKGHDMEPQVEVRQVEANEFFLQVLCEHKPGRFVRLMDAVNALGLDVTNVNVTSYKTLVLNVLRVVRRDNEVAVQADRVRDSLLEVTRESYGVWSAPAPVVGXSGSIDVKLDCVDVKLDGGVDVQAPAAAATTEDHYGGYNHLLQYLA

SEQ ID NO: 108151 - protein, 124 aa, Setaria italica
  Transcript Sequence Number=SeqID_42177
  Gene Ontology: Mol. function=nucleic acid binding; Cellular component= plasma membrane; Biological process=regulation of transcription, DNA -dependent
  Homolog annotation: Hit_ID=P27484; Match level="QueryCoverage=62%, HitCoverage=35%, E-value=7e-26, Identity=74%"; Hit description =Glycine-rich protein 2
  Pfam annotation: Domain name=CSD; Domain location=6-73; Score=137.7; E_value=3.6e-38; Accession=PF00313.14; Description='Cold-shock' DNA -binding domain
  Pfam annotation: Domain name=OB_RNB; Domain location=9-55; Score=0.4; E_value=0.026; Accession=PF08206.3; Description=Ribonuclease B OB domain
  Pfam module annotation: Pfam domain module=CSD::OB_RNB; Domain location=6-73::9-55
MAAAARQRGTVKWFNDTKGFGFISPEDGSEDLFVHQSSIKSEGFRSLAEGEEVEFSVTEGDDGRTKAVDVTGPDGSFVKGGSGGGGGGFGSRGGAGSGGGGRSYGGSWGGGRRSGAGVGAGACY

SEQ ID NO: 108152 - protein, 92 aa, Setaria italica
  Transcript Sequence Number=SeqID_42178
  Subcellular localization annotation: CTP_CleavageSite=16; ConfidenceScore=5.24e-01
QPQGTWSMISLFSQTSSAIASSPRPIPAIEQTPSTPPLELLVSHGPTHSLNSSFDLIYPFSRTRLPPIFEIPWLYWPLLWLHLLCDLFAECL

SEQ ID NO: 108153 - protein, 161 aa, Setaria italica
  Transcript Sequence Number=SeqID_42179
  Gene Ontology: Mol. function=galacturonate binding; Cellular component=plasma membrane; Biological process=cell-cell signaling
  Homolog annotation: Hit_ID=B6U3A9; Match level="QueryCoverage=80%, HitCoverage=71%, E-value=3e-22, Identity=47%"; Hit description =Remorin
  Pfam annotation: Domain name=Remorin_C; Domain location=69-161; Score= 63.3; E_value=9e-16; Accession=PF03763.5; Description=Remorin, C -terminal region
  Pfam annotation: Domain name=Remorin_N; Domain location=11-67; Score =30.9; E_value=5.2e-06; Accession=PF03766.5; Description=Remorin, N -terminal region
  Pfam module annotation: Pfam domain module=Remorin_C::Remorin_N; Domain location=69-161::11-67
MAAEGPKKAEAPAAKDVAEGKAVVPAPGPPAGDSKALVVVDKMADKTSAEKNAPRNSNDRDIALAKVETEKKTSLIKAWEENEKAKAEHKAAKKQSIILSWENTKKSVVEAQLKKKEEELEKKKAEYAEKMKNKKAIIHRRGEEKRAMVMAQRGEEVLKAE

SEQ ID NO: 108154 - protein, 66 aa, Setaria italica
  misc_feature (55)..(55): Xaa can be any naturally occurring amino acid
  Transcript Sequence Number=SeqID_42180
  Subcellular localization annotation: CTP_CleavageSite=39; ConfidenceScore=5.48e-01
MDTVAPRLSRSSTRYGPVSSSAASFSGPVRKWRKAWVPLAGAGAAGPGGGASRGXDNKVVLFRWTP

SEQ ID NO: 108155 - protein, 169 aa, Setaria italica
  Transcript Sequence Number=SeqID_42181
  Gene Ontology: Mol. function=lyase activity
  Homolog annotation: Hit_ID=Q2QNP9; Match level="QueryCoverage=96%, HitCoverage=50%, E-value=4e-19, Identity=39%"; Hit description=F-box domain containing protein
  Pfam annotation: Domain name=FBD; Domain location=53-105; Score=22.7; E_value=0.00032; Accession=PF08387.2; Description=FBD
TLSLMMVMRSVKIVALRTQYLSLDVVINLMTCFPCLTSLYISSVNRGDEDNNMWHAEQLGRMECINQHLKKIILSGYVMNCMSQVNFIQFFVLNARVLQLMRLEIPPVMPAEWIEMQPELLQLNDRASSDAQLDFSTDSARWLCCPVNLKWVSDLSRADPFLSSSRNWA

SEQ ID NO: 108156 - protein, 101 aa, Setaria italica
  Transcript Sequence Number=SeqID_42182
LDFLSGVCLVLCVCVGWRGGFVRLGALDGEAGAGEAAGAAVVGEAPLLHQPRTTPTQARPAAGGTDGGAERGSGTGESLAACLATRWRAVDGLQEGCPAAA

SEQ ID NO: 108157 - protein, 122 aa, Setaria italica
  misc_feature (17)..(17): Xaa can be any naturally occurring amino acid
  misc_feature (27)..(27): Xaa can be any naturally occurring amino acid
  misc_feature (44)..(44): Xaa can be any naturally occurring amino acid
  misc_feature (51)..(51): Xaa can be any naturally occurring amino acid
  Transcript Sequence Number=SeqID_42183
  Homolog annotation: Hit_ID=B9RGG4; Match level="QueryCoverage=77%, HitCoverage=8%, E-value=3e-17, Identity=47%"; Hit description =Pentatricopeptide repeat-containing protein, putative
  Pfam annotation: Domain name=PPR; Domain location=81-115; Score=28.9; E_value=2.1e-05; Accession=PF01535.12; Description=PPR repeat
KLAELDLPVVEFLVDLXAFAGKDGREXKALEVFDALRQKQYCSXGIYNIVXENLLKIQDRKKALLLFEEMQSSVHFKPDSCTYSHMIQCFVDEGNVEEACSCYNSMMKENWIPSMPAYCALS

SEQ ID NO: 108158 - protein, 131 aa, Setaria italica
  misc_feature (13)..(13): Xaa can be any naturally occurring amino acid
  misc_feature (125)..(125): Xaa can be any naturally occurring amino acid
  Transcript Sequence Number=SeqID_42184
  Homolog annotation: Hit_ID=A9LY12; Match level="QueryCoverage=72%, HitCoverage=27%, E-value=8e-10, Identity=36%"; Hit description =Putative F-box GID2 protein
KDVPVVQTKETKXFAEEWAESDYYYDDMDELENSLPSDFVSLIDVWYKDHALYSKVIWGIPNSDGANGWFYNCPFRVDLFHHSAENNENNNGEVFLSTISDLPSVPSMEQERKMEKLWRELNDGXKLSWII

SEQ ID NO: 108159 - protein, 211 aa, Setaria italica
  Transcript Sequence Number=SeqID_42185
  Gene Ontology: Mol. function=RNA binding
  Homolog annotation: Hit_ID=B9SBN7; Match level="QueryCoverage=88%, HitCoverage=24%, E-value=9e-49, Identity=50%"; Hit description=RNA binding protein, putative
  Pfam annotation: Domain name=PUF; Domain location=104-138; Score=4.5; E_value=4; Accession=PF00806.11; Description=Pumilio-family RNA binding repeat
  Pfam annotation: Domain name=PUF; Domain location=142-176; Score =20.5; E_value=0.0069; Accession=PF00806.11; Description=Pumilio -family RNA binding repeat
  Pfam annotation: Domain name=PUF; Domain location=32-66; Score=29.6; E_value=1.2e-05; Accession=PF00806.11; Description=Pumilio-family RNA binding repeat
  Pfam annotation: Domain name=PUF; Domain location=68-101; Score=16.7; E_value=0.096; Accession=PF00806.11; Description=Pumilio-family RNA binding repeat
  Pfam module annotation: Pfam domain module=PUF::PUF::PUF::PUF; Domain location=104-138::142-176::32-66::68-101
LSKQCIDSLTIQPAFYCLDTFLPEHRAFIIEAAASCYLQLARDRHGCCVLQKCIEHSNDEQRNDLLSKITSSALRLSEDQYGNYVIQFILGLKIEWATARVVDELAGHIGHLSMQKSGSHVVEHCIMQAPQLMSDRIVNELKNDPRLLQIIIHEYGNYVIQTVLRHCQGERHVAFVEAIRPYAATLRSNMYGKRVLSTTYLKNKHHRFGFC

SEQ ID NO: 108160 - protein, 69 aa, Setaria italica
  Transcript Sequence Number=SeqID_42186
LLNMQVKSPEWTSQHARYQSNVLKQIDSETRRSSMSDRSYFPGNGEVGLSATRSECIRTIGLVRLRLLQ

SEQ ID NO: 108161 - protein, 431 aa, Setaria italica
  Transcript Sequence Number=SeqID_42187
  Gene Ontology: Mol. function=cation transmembrane transporter activity; Cellular component=integral to membrane; Biological process=calcium ion transport
  Homolog annotation: Hit_ID=A4GWV0; Match level="QueryCoverage=100%, HitCoverage=93%, E-value=0.0, Identity=76%"; Hit description=Ca2+/H+- exchanging protein
  Pfam annotation: Domain name=Na_Ca_ex; Domain location=269-402; Score= 114.0; E_value=4.9e-31; Accession=PF01699.16; Description =Sodiumcalcium exchanger protein
  Pfam annotation: Domain name=Na_Ca_ex; Domain location=78-229; Score =94.2; E_value=4.5e-25; Accession=PF01699.16; Description =Sodiumcalcium exchanger protein
  Pfam module annotation: Pfam domain module=Na_Ca_ex::Na_Ca_ex; Domain location=269-402::78-229
  Subcellular localization annotation: CTP_CleavageSite=36; ConfidenceScore=5.58e-01
HSASARTAHSMSASALRKKSDASLVRKVPFAPLRPVLANLQEVFLGTKLAVLFPAVPLAIAARYAHFGQVWVFALSLLGLIPLAERVSFLTEQIAIYTGPTVGGLLNATCGNATELIIALFALMQGKIEVVKCSLLGSVLSNLLLVLGTSLFCGGIVNLNVDQPYDRKQADVSTGLLILGALCQSLPLMLRYAVGAGEHSVAADTTGLELSRACSIVMLLAYAAYLFFQLKTHTQLFEPQEIDDDGEVDQEEAVIGFASGFFWLAFKTVLIAILSEYVVGTIEPTSQSWGLSVSFISIILLPIVGNAAEHAGAIIFALKNKLDITLGVALGSATQISMFVVPLSVIVAWIAGIQMDLDFKLLETGTLFVSVIVTAFTLQDGASHYLKGILLLLCYIVIGACFFVTRQPASHANGNGGGLAVPTGTWNAQVS

SEQ ID NO: 108162 - protein, 191 aa, Setaria italica
  Transcript Sequence Number=SeqID_42188
  Gene Ontology: Mol. function=threonine-type endopeptidase activity; Cellular component=proteasome core complex; Biological process =ubiquitin-dependent protein catabolic process
  Homolog annotation: Hit_ID=Q9LST8; Match level="QueryCoverage=100%, HitCoverage=69%, E-value=3e-99, Identity=94%"; Hit description =Proteasome subunit beta type
  Pfam annotation: Domain name=Proteasome; Domain location=1-134; Score= 61.6; E_value=3.1e-15; Accession=PF00227.18; Description=Proteasome A- type and B-type
GAGTAADTEAVTDMVSSQLQLHRYATGRESRVVTALTLLKSHLFKYQGHVSAALVLGGVDCTGPHLHTVYPHGSTDTLPFATMGSGSLAAMSVFESKYKEGLTREEGIQLVCDAIRGGIFNDLGSGSNVDVCVITKGKTEYLRNHQLPNPRTYVSSKGYSFTKGQTEVLSTKITQLKQKVEVAEGSDAMEE

SEQ ID NO: 108163 - protein, 49 aa, Setaria italica
  Transcript Sequence Number=SeqID_42189
MDLNRTTQPWILMLKSARCQTVQPLHTQIRSGRNAVKLPQLYDSPHTQH

SEQ ID NO: 108164 - protein, 56 aa, Setaria italica
  Transcript Sequence Number=SeqID_42190
TLLSTLFINLPLFRTYLSQRKYVAPLILLKLLHFYSADALVNTGLAKLGYEYVNIE

SEQ ID NO: 108165 - protein, 139 aa, Setaria italica
  misc_feature (129)..(129): Xaa can be any naturally occurring amino acid
  Transcript Sequence Number=SeqID_42191
  Gene Ontology: Mol. function=protein kinase activity; Cellular component=plasma membrane; Biological process=protein amino acid phosphorylation
  Homolog annotation: Hit_ID=Q94F17; Match level="QueryCoverage=97%, HitCoverage=73%, E-value=6e-47, Identity=66%"; Hit description =Casein kinase II alpha subunit
  Pfam annotation: Domain name=Pkinase; Domain location=1-129; Score= -102.7; E_value=0.022; Accession=PF00069.17; Description=Protein kinase domain
HRDVKPHNIMIDHEKRQLRLIDWGLAEFYHPKMEYNARVASRCYKGPELLVDLLDYDYSLDLWSLGCMFASMIFRVDPFFSGQDNYDQLVKITEVLGTEDFYNYLEKYGLQLDPQLERLVGRHNRKPWXKFVNARNIQP

SEQ ID NO: 108166 - protein, 290 aa, Setaria italica
  Transcript Sequence Number=SeqID_42192
  Gene Ontology: Mol. function=protein serine/threonine kinase activity; Cellular component=plasma membrane; Biological process =protein amino acid phosphorylation
  Homolog annotation: Hit_ID=B9SGY9; Match level="QueryCoverage=97%, HitCoverage=58%, E-value=1e-110, Identity=67%"; Hit description =Casein kinase II, alpha chain, putative
  Pfam annotation: Domain name=APH; Domain location=35-216; Score=-8.8; E_value=0.0082; Accession=PF01636.15; Description=Phosphotransferase enzyme family
  Pfam annotation: Domain name=Pkinase; Domain location=33-284; Score =201.1; E_value=3.1e-57; Accession=PF00069.17; Description=Protein kinase domain
  Pfam annotation: Domain name=Pkinase_Tyr; Domain location=33-266; Score=-87.6; E_value=6.7e-08; Accession=PF07714.9; Description =Protein tyrosine kinase
  Pfam module annotation: Pfam domain module=APH::Pkinase::Pkinase_Tyr; Domain location=35-216::33-284::33-266
LGPRVYADANAQRPKEYWDYESLDIQWGEQDGYEVLRKVGRGKYSEVFEGFRPGSDDRCIIKILKPVKKKKIKREIKILQNLYGGPNIVKLLDVVRDEESKTPSLIFEYVNNTDFKVLYPALSDYDIRYYIFELLKALDYCHSRGIMHRDVKPHNIMIDHEKRQLRLIDWGLAEFYHPKMEYNARVASRCYKGPELLVDLLDYDYSLDLWSLGCMFASMIFRVDPFFSGQDNYDQLVKITEVLGTEDFYNYLEKYGLQLDPQLERLVGRHNRKPWTKFVNARNIHLVSSG

SEQ ID NO: 108167 - protein, 165 aa, Setaria italica
  Transcript Sequence Number=SeqID_42193
  Gene Ontology: Mol. function=protein serine/threonine kinase activity; Cellular component=plasma membrane; Biological process =protein amino acid phosphorylation
  Homolog annotation: Hit_ID=Q8VX01; Match level="QueryCoverage=95%, HitCoverage=38%, E-value=5e-52, Identity=60%"; Hit description =Casein kinase II alpha subunit
  Pfam annotation: Domain name=Pkinase; Domain location=1-151; Score= -94.2; E_value=0.007; Accession=PF00069.17; Description=Protein kinase domain
KLLVLPNTIHPKLEYNARVASRCYKGPELLVDLLDYDYSLDLWSLGCMFASMIFRVDPFFSGQDNYDQLVKITEVLGTEDFYNYLEKYGLQLDPQLERLVGRHNRKPWTKFVNARNIHLVSSEAIDLVDKLLRYDHQERPTAKETMAHPYFNPIRSSESSRTNSQ

SEQ ID NO: 108168 - protein, 79 aa, Setaria italica
  Transcript Sequence Number=SeqID_42194
SHHSILLIPTTRILLLLILRRRPHEWRLVVRIHWKGDVHWKGDLAGCRLQRWRWRQNSIPVCLLLRRSDIHQEIKHLVG

SEQ ID NO: 108169 - protein, 63 aa, Setaria italica
  Transcript Sequence Number=SeqID_42195
SYHRLSGKLVTFVSRACLLAVLAQAASATLGHPTAGSQNRRPGPTACTRQQDAGSKQANKPQV

SEQ ID NO: 108170 - protein, 63 aa, Setaria italica
  Transcript Sequence Number=SeqID_42196
GGGGEEEDGSSCDEELFELATKPGPEVDDEEEVEDEVDRKADEFIAKFREQIRKQRVEPATRR

SEQ ID NO: 108171 - protein, 112 aa, Setaria italica
  Transcript Sequence Number=SeqID_42197
  Subcellular localization annotation: CTP_CleavageSite=51; ConfidenceScore=5.66e-01
MAAVASPALRFHPRAAYPSAPASSGSPRCRFGAVAYSCSKFARPFPIQRVNGSTTQNFGALKGQVLSSISNYDGRLHIKHPICFAATDKQEPVVSLTLDTPVLQESASGNEV

SEQ ID NO: 108172 - protein, 195 aa, Setaria italica
  misc_feature (86)..(86): Xaa can be any naturally occurring amino acid
  Transcript Sequence Number=SeqID_42198
  Gene Ontology: Mol. function=molecular_function; Cellular component =cellular_component; Biological process=biological_process
  Homolog annotation: Hit_ID=B4FRR0; Match level="QueryCoverage=97%, HitCoverage=99%, E-value=2e-95, Identity=87%"; Hit description =Cation transport protein chaC
  Pfam annotation: Domain name=ChaC; Domain location=8-188; Score =288.4; E_value=1.6e-83; Accession=PF04752.4; Description=ChaC-like protein
MAAAASPTWVFGYGSLIWNPGFAYDARVVGFVRDYRRVFYQGSTDHRGTPQFPGRTVTLEHQSGATCWGIAYKIREEDKQTALEFXLQYLEVREKQYDEKVYLDLYTDSSPKVPAVANVMVYFATTNKESNKNYLGPAPLEEMTRQIYLAEGPSGPNKEYLFKLEDALNKLGVVDPHVQELANAVREYSDAKLSE

SEQ ID NO: 108173 - protein, 60 aa, Setaria italica
  Transcript Sequence Number=SeqID_42199
  Gene Ontology: Mol. function=catalytic activity; Biological process =cellular metabolic process
  Homolog annotation: Hit_ID=B6T7H1; Match level="QueryCoverage=85%, HitCoverage=15%, E-value=2e-14, Identity=76%"; Hit description =Dihydroflavonol-4-reductase
MEETAAAARSTVCVTGAGGFLASWLVKLLLSSGRYAVRGTARDPGDGKNAHLMPLETLGR

SEQ ID NO: 108174 - protein, 176 aa, Setaria italica
  misc_feature (29)..(29): Xaa can be any naturally occurring amino acid
  Transcript Sequence Number=SeqID_42200
  Gene Ontology: Mol. function=nucleotide binding; Biological process =defense response
  Homolog annotation: Hit_ID=Q9SED7; Match level="QueryCoverage=93%, HitCoverage=14%, E-value=5e-24, Identity=39%"; Hit description=Vrga1
  Pfam annotation: Domain name=LRR_1; Domain location=115-139; Score =5.7; E_value=24; Accession=PF00560.25; Description=Leucine Rich Repeat
  Pfam annotation: Domain name=LRR_1; Domain location=141-160; Score =9.9; E_value=3.9; Accession=PF00560.25; Description=Leucine Rich Repeat
  Pfam annotation: Domain name=LRR_1; Domain location=18-39; Score=1.2; E_value=1.8e+02; Accession=PF00560.25; Description=Leucine Rich Repeat
  Pfam annotation: Domain name=LRR_1; Domain location=41-64; Score=1.8; E_value=1.4e+02; Accession=PF00560.25; Description=Leucine Rich Repeat
  Pfam annotation: Domain name=LRR_1; Domain location=66-90; Score=3.8; E_value=56; Accession=PF00560.25; Description=Leucine Rich Repeat
  Pfam annotation: Domain name=LRR_1; Domain location=92-113; Score =2.9; E_value=84; Accession=PF00560.25; Description=Leucine Rich Repeat
  Pfam module annotation: Pfam domain module=LRR_1::LRR_1::LRR_1::LRR _1::LRR_1::LRR_1; Domain location=115-139::141-160::18-39::41-64::66 -90::92-113
LLQAYCAKGSYYQKHLEATEVLNMRGCGXLELAEGFQLLASLRKLRLSQCNMDGEQLSLCLEYLNGLASLDIVDCQNITSLLLPVGSRHFKTLQALCFQDCQMLSSLANLESFVDLKSLIIERCIRVTTASLPAELKGMESLNKLSISHCPGLQSLPNNMPLSLEFLHFVFGLSYS

SEQ ID NO: 108175 - protein, 85 aa, Setaria italica
  Transcript Sequence Number=SeqID_42201
RSFRTWTSSLDMFTPLASMHHLPAQGGCDIHCIIQVRNEGNQNISVFICSSVTSLFLRSLCFSVTVNPDMQTFRKVYSRQLQYIF

SEQ ID NO: 108176 - protein, 142 aa, Setaria italica
  Transcript Sequence Number=SeqID_42202
  Homolog annotation: Hit_ID=C0ZW69; Match level="QueryCoverage=88%, HitCoverage=30%, E-value=4e-17, Identity=38%"; Hit description =Putative phage portal protein
VVGNLPGVGIESEPLNLTPEQMWRTQPHLRTVVDFLARNIAHLGLHVFDTSTDDRVRDRKSVLAALMSQPNMHMTTFELIYDLVGNLALHNRAYWFVYESAETPSGWAIQPFPASWVKTSYGTYWEPTQYVVSPPDSPDKAV

SEQ ID NO: 108177 - protein, 69 aa, Setaria italica
  misc_feature (37)..(37): Xaa can be any naturally occurring amino acid
  Transcript Sequence Number=SeqID_42203
  Gene Ontology: Mol. function=polyribonucleotide nucleotidyltransferase activity; Cellular component=chloroplast; Biological process=mRNA catabolic process
  Homolog annotation: Hit_ID=O24288; Match level="QueryCoverage=100%, HitCoverage=7%, E-value=2e-23, Identity=71%"; Hit description =Polynucleotide phosphorylase
WVFSYDGIHSPDCLAITAAGIAVALSEIPNKQTIAGXRVGLINGQFVINPTTEQMENSELDLMMAGTDS

SEQ ID NO: 108178 - protein, 260 aa, Setaria italica
  Transcript Sequence Number=SeqID_42204
  Gene Ontology: Mol. function=amino acid transmembrane transporter activity; Cellular component=integral to membrane; Biological process=amino acid transport
  Homolog annotation: Hit_ID=B6SYL4; Match level="QueryCoverage=99%, HitCoverage=49%, E-value=1e-130, Identity=87%"; Hit description =Amino acid permease
TKGADKNGPIAILSSIGIISVFGWAYILALTFSIQDFSYLYDPNNETAGAFVPAQILYDAFHGRYHNSAGAIVLLFVIWGSFFFGGLSITTSAARVVYALSRDRGIPFSSVWRRIHPRRKVPANAVWLCAAVCALLGLPILRINVVFTAITSVATIGWVGGYAVPIFARMVMREEDFRPGPFYLGAASRPVCLVAFLWICYTCAVFLLPTSYPIRMDTFNYAPIALGVCLGLIMLWWALDARKWFKGPVRNIDEHNNGKV

SEQ ID NO: 108179 - protein, 376 aa, Setaria italica
  Transcript Sequence Number=SeqID_42205
  Gene Ontology: Cellular component=chloroplast
  Homolog annotation: Hit_ID=Q9S7A6; Match level="QueryCoverage=94%, HitCoverage=85%, E-value=4e-37, Identity=33%"; Hit description =F21O3.2 protein
  Pfam annotation: Domain name=DUF760; Domain location=1-376; Score =608.1; E_value=8.9e-180; Accession=PF05542.3; Description=Protein of unknown function (DUF760)
  Subcellular localization annotation: CTP_CleavageSite=25; ConfidenceScore=5.32e-01
SQPLVSSAFGSKLNSRTKRRSSVVRASWLESLPPSSSIAPLRMESPAGQLLSQILHTHPHLLPAAAEQQLQQLQTDREAEKDKDKESGAGEKPAPASGDLVLYRRIAEVKEKERRRALEEILYALVVQKFVEAGVSLVPALSHSIDSSGRVDQWAETVEERLQRLHSPEAYEMIENHLDLILGQRQGDATIAAISKLRVGQVYAASVMYGYFLKRVDQRFQLEKSMKSLPWGSEEEDDALNQVMTTDSMPSTQASSSHPEMASWTSPNFSTGGPSQSIKPCRLRSYVMSFDSDTLQRYATVRSKEAFGIIEKHTEALFGKPEVVITPEGTVDSSKDEHIRISFAGLRRLILEAVTFGSFLWDVESFVDSRYHFVTN

SEQ ID NO: 108180 - protein, 223 aa, Setaria italica
  Transcript Sequence Number=SeqID_42206
  Gene Ontology: Mol. function=nucleotidyltransferase activity
  Homolog annotation: Hit_ID=Q10Q39; Match level="QueryCoverage=98%, HitCoverage=16%, E-value=4e-44, Identity=48%"; Hit description =Nucleotidyltransferase domain containing protein, expressed
GVFQRYGEDAPRYHGGTGTYLPTPKVSFKDRHSSSRNYRGSYNSEQVDHNDKEGNWANSKQRNMGCSYGRGQSEKSGGRHDRQISDENQSERHWQPYRSDSYRREAGGSSSVQSQSFENTTSTHDPVNKAYGVPSQSSTVASGTRASTEPVMVYSYDQSVDYGAPSKPIEFGSFGAIPMDSSEIQQAHEVHTNGFYKQRHALYKGTSSRSSPDQPSMPHLRRS

SEQ ID NO: 108181 - protein, 58 aa, Setaria italica
  Transcript Sequence Number=SeqID_42207
KLFMPFHFPLELPKKGFSAKLLRRIYKILKGEQVLILLCNLLFMGVRGKKIDLSWCYE

SEQ ID NO: 108182 - protein, 464 aa, Setaria italica
  Transcript Sequence Number=SeqID_42208
  Gene Ontology: Mol. function=phosphoribosylformylglycinamidine synthase activity; Cellular component=chloroplast; Biological process='de novo' IMP biosynthetic process
  Homolog annotation: Hit_ID=Q84XV9; Match level="QueryCoverage=100%, HitCoverage=35%, E-value=0.0, Identity=71%"; Hit description =Phosphoribosylformylglycinamidine synthase
  Pfam annotation: Domain name=AIRS_C; Domain location=1-127; Score =65.5; E_value=1.9e-16; Accession=PF02769.14; Description=AIR synthase related protein, C-terminal domain
SALAQAFDQIGNDCPDVDDVGYLKKVFEAIQELITQRLISAGHDISDGGLIVSVLEMAFAGNCGFKLDIDLEGRSLLEGLFAEELGLVIEVHSEYLDIVKQKLEAAGVSANVIGEVTSSPEIKVFVDGNLHLKEKTSDLRDLWEETSFQLEELQRLKACVKLEKEGLKIRTSPSWSLSFTPKFTDEKLLIASSKPKVAIIREEGSNGDREMAAAFHAAGFEPWDITMSDLLAGKSSLTEFRGIAFVGGFSYADVLDSAKGWAASIRFNQPLIQQFQDFYHRPDTFSLGVCNGCQLMALLGWVPGSDVGGSLGIGGDMSQPRFIHNESGRFECRFTSVSIGNSPAIMFKGMEGSTLGVWSAHGEGRAFFPDENVLATVVQSNLAPVRYCDDANNITETYPFNPNGSPLGIAALCSPDGRHLAMMPHPERCFMMWQYPWYPKEWQVEESGPSPWLRMFQNAREWCS

SEQ ID NO: 108183 - protein, 45 aa, Setaria italica
  Transcript Sequence Number=SeqID_42209
  Homolog annotation: Hit_ID=B6T6D2; Match level="QueryCoverage=100%, HitCoverage=27%, E-value=2e-16, Identity=91%"; Hit description =Disease resistance response protein 206
RDDVGTPVRELSVVGGTGQFRMARGYVLWKTVTPEILDLEIFVNP

SEQ ID NO: 108184 - protein, 161 aa, Setaria italica
  Transcript Sequence Number=SeqID_42210
  Gene Ontology: Cellular component=cell wall
  Homolog annotation: Hit_ID=B6T6D2; Match level="QueryCoverage=83%, HitCoverage=81%, E-value=2e-66, Identity=91%"; Hit description =Disease resistance response protein 206
  Pfam annotation: Domain name=Dirigent; Domain location=7-159; Score =138.2; E_value=2.5e-38; Accession=PF03018.6; Description=Dirigent -like protein
MACCKLFSIMLLAAVLAAGPAVAAATSAHLHFYMHDVTGGPSPTAVRVVNGPRGYFGNTVVIDDKLTEGTSQSSATVGRAQGYYMVASVANLELLVSMNVVLTSGPYAGSSLTVVGRDDVGTPVRELSVVGGTGQFRMARGYVLWKTITPEILDLEIFVNP

SEQ ID NO: 108185 - protein, 443 aa, Setaria italica
  misc_feature (15)..(15): Xaa can be any naturally occurring amino acid
  misc_feature (49)..(49): Xaa can be any naturally occurring amino acid
  misc_feature (160)..(160): Xaa can be any naturally occurring amino acid
  misc_feature (188)..(188): Xaa can be any naturally occurring amino acid
  misc_feature (208)..(208): Xaa can be any naturally occurring amino acid
  Transcript Sequence Number=SeqID_42211
FNRQRLKWLMVWNKXAKQLNDITISYLKASPGSSSYDVLHQFFCYPFFXFLYPGGLSIPWNAENSSCAPVMQDLEVELAIEVYRSLCTSSCNSKAAPKVFFEGFYDYLVNIIDEHTALFQANLEHCPEKFENTAILSALGEVVIGLLENDQILAYANYLXYEANEDFTGSRHLNLFLSCLNLANRFIXFSRFGFKANPAGQHQVTSRXFSSLSNFVRHVVLKKDILLLFEIIGDQLTEWLSLSATLYCEMQQGKIIYQLEKLWLKILKCLNMSQLISDGPLSQKQQLLQVALSHPHDAISVATASACRAEANIKISLHSGCLVSKLDGLLMDRRKDHNSCSSSADKALAREEIDISSRLALATSKKVTKHTDRDAGSLKISAGLGRKRLKIMKYSTKPKELNKNAVRIGDLSARVDGVFSPRCMESKECRKPELILEMLKRKR

SEQ ID NO: 108186 - protein, 66 aa, Setaria italica
  Transcript Sequence Number=SeqID_42212
YWSSLLLLFDAATNANTDGGTSVTHTQKPGTEGFILLSVFSLSFLRISLLALHYQYICHGAITFSF

SEQ ID NO: 108187 - protein, 159 aa, Setaria italica
  misc_feature (25)..(25): Xaa can be any naturally occurring amino acid
  Transcript Sequence Number=SeqID_42213
YLDKKQLLRKPSEQQRLLEEVPRVXPEMEDSKDTEVQVTTRDRSTKKSTVAFQGTNGTRASFFKSTAEEKFKGTGGERELSLKSLSEEKSEATNANTDGGTSVTHTQKPANNVCGIPSVQNLDNNAADKGAEVSVDGDTAGAIVQRQSIEATELNLELV

SEQ ID NO: 108188 - protein, 643 aa, Setaria italica
  Transcript Sequence Number=SeqID_42214
  Gene Ontology: Mol. function=zinc ion binding; Cellular component =nucleus; Biological process=transcription initiation
  Homolog annotation: Hit_ID=B9SS21; Match level="QueryCoverage=91%, HitCoverage=95%, E-value=4e-56, Identity=39%"; Hit description =Protein binding protein, putative
  Pfam annotation: Domain name=GYF; Domain location=574-628; Score =27.6; E_value=5e-05; Accession=PF02213.8; Description=GYF domain
  Pfam annotation: Domain name=Plus-3; Domain location=181-288; Score =115.5; E_value=1.8e-31; Accession=PF03126.10; Description=Plus-3 domain
  Pfam annotation: Domain name=SWIB; Domain location=54-129; Score =34.7; E_value=3.8e-07; Accession=PF02201.10; Description=SWIBMDM2 domain
  Pfam module annotation: Pfam domain module=GYF::Plus-3::SWIB; Domain location=574-628::181-288::54-129
LPDEERNSDAEFVGHSDDSDEELSSRAKLNGMTMKIKSFRKGAKSMRNGFVGWGSKELIEFLSSIGKDTSETLDQYGVADVVKNYIRQNDLLQKDKKKLVICDEKLQPLFRKSKVRYNKIHYLLERHIAANMILEDEALASSEDNRDSVMTKKARIASYQPSAPKCTPEINKRCFASLVCDNINLIYLRRSLVVHLLKEPDTFESKVIGCFVRIKNDRKDYSFHMHKKLYQLGQVTGIRKTTEEDKIKDISNVLLCIFNMPDISISMLSDEDFDEEECQDLHLLAQNKSFKRYTVGDLEEKARSLRRDIMSHWINRELQRLDRLIDMANEKGWRKAKDEYLDKKQLLRKPSEQQRLLEEVPRVIPEMEDSKDTEVQVTTRDRSTKKSTVAFQGTNAGSTVSLKRCSEEKYKGTNGTRASFFKSTAEEKFKGTGGERELSLKSLSEEKSEATNANTDGGTSVTHTQKPGTEANNVCGIPSVQNLDNNAADKGAEVSVDGDTAGAIVQRQSIEATDVITIDDDDDDHPCEKSGQATVDLDADDAGDTHHAEHKTNNISRRGHRNVKVKRGASLHMRMWHYIDPQGDEQGPFTMEHLRNWWNNGYFRDDFRVWRTGQTSDTAIKLIDALQLIDEVVAVTVPHVVDD

SEQ ID NO: 108189 - protein, 248 aa, Setaria italica
  misc_feature (197)..(197): Xaa can be any naturally occurring amino acid
  Transcript Sequence Number=SeqID_42215
  Gene Ontology: Mol. function=transporter activity; Cellular component= mitochondrial inner membrane; Biological process=transport
  Homolog annotation: Hit_ID=B6TCI3; Match level="QueryCoverage=100%, HitCoverage=75%, E-value=1e-121, Identity=85%"; Hit description=ADP ,ATP carrier protein
  Pfam annotation: Domain name=Mito_carr; Domain location=146-236; Score=82.8; E_value=1.2e-21; Accession=PF00153.19; Description =Mitochondrial carrier protein
  Pfam annotation: Domain name=Mito_carr; Domain location=47-142; Score= 89.7; E_value=1e-23; Accession=PF00153.19; Description=Mitochondrial carrier protein
  Pfam module annotation: Pfam domain module=Mito_carr::Mito_carr; Domain location=146-236::47-142
EGAAALWRGNQANVIRYFPTQAFNFAFKGYFKSFFGYDREKNGNWKWLAGNVASGSAAGATTSLLLYHLDYARTRLATDAIESRGNKRQFRGLLDVYKKTLTTDGISGLYRGFSVSIVGITLYRGLYFGIYDTMKPLVLVGPLEGNFFASFALGWAITTFSGACAYPFDTVRRRMMLTSGQPFKYRNGFHAVKQIVXTEGFFTLFRGVGANILSGMAGAGVLSGYDQLQQFASRHGHNFERKMKGVLK

SEQ ID NO: 108190 - protein, 100 aa, Setaria italica
  Transcript Sequence Number=SeqID_42216
SLLLPFRIWSQINNRVSAPNFIGHYSAASNYVTHSLSEDGISLSEHSVGKSLYLTAAECINSDTKQYLFQIDIDHIIIHRPALIFKKKIIGQHLSPLTLL

SEQ ID NO: 108191 - protein, 116 aa, Setaria italica
  Transcript Sequence Number=SeqID_42217
  Gene Ontology: Cellular component=integral to membrane; Biological process=photosynthesis
  Homolog annotation: Hit_ID=B6SX34; Match level="QueryCoverage=87%, HitCoverage=79%, E-value=2e-40, Identity=84%"; Hit description =Photosystem I reaction center subunit psaK
  Pfam annotation: Domain name=PSI_PSAK; Domain location=50-116; Score =85.9; E_value=1.4e-22; Accession=PF01241.10; Description=Photosystem I psaG  psaK
  Subcellular localization annotation: CTP_CleavageSite=45; ConfidenceScore=5.46e-01
MASQLSAAASMSAAVPRFHGYASLRSVAALPPVRAGGRKRAQGIRCDYIGSATNQIMVLSTTLMLFAGRFGLAPSANRKATAGLKLESRDSGLQTGDPAGFTLADTLACGAVGHII

SEQ ID NO: 108192 - protein, 42 aa, Setaria italica
  Transcript Sequence Number=SeqID_42218
MARGDGELELTVGVRGAGGGGAAADAPVPISLGRLILAGMVA

SEQ ID NO: 108193 - protein, 60 aa, Setaria italica
  Transcript Sequence Number=SeqID_42219
EEGWHLLPKASFRSLKLLKDPRPFPGKGGHRGRSRGPANQQIYLGPHLLQDVPVNRETSK

SEQ ID NO: 108194 - protein, 102 aa, Setaria italica
  Transcript Sequence Number=SeqID_42220
  Gene Ontology: Mol. function=metal ion binding; Cellular component =plasma membrane
  Homolog annotation: Hit_ID=B9T7C4; Match level="QueryCoverage=86%, HitCoverage=15%, E-value=7e-13, Identity=40%"; Hit description =Protein binding protein, putative
MLSANPLDELPVFRTPESAVFDDDEQLNPQSEFHDGDETPASLEITTHTEFPAVQETVAQENFAILIHLKAPPASASIGTRAPLDLVTVLDVSGSMADYSTE

SEQ ID NO: 108195 - protein, 83 aa, Setaria italica
  Transcript Sequence Number=SeqID_42221
  Homolog annotation: Hit_ID=A2Q269; Match level="QueryCoverage=92%, HitCoverage=23%, E-value=3e-19, Identity=54%"; Hit description=Trp repressor/replication initiator (Fragment)
MELPGESEGPTVREYIVGDPSYPLLPWLMTPYQELGLSSEKVEFNKRHAATRTVVQGALANLKERWQVLKGEVWRPDKHRLPR

SEQ ID NO: 108196 - protein, 150 aa, Setaria italica
  Transcript Sequence Number=SeqID_42222
  Gene Ontology: Mol. function=transferase activity, transferring glycosyl groups; Cellular component=cell wall
  Homolog annotation: Hit_ID=Q7XZZ4; Match level="QueryCoverage=100%, HitCoverage=14%, E-value=7e-81, Identity=95%"; Hit description=C2 domain-containing protein, putative, expressed
RWNEQYAWDVFDPCTVLTIAVFDNVRYKAADAGGDPGKLPKDSRIGKLRIRLSTLDTNRVYANTFALTAVHPVGVRKMGELELAIRFTCPSWLTLMQAYGSPLLPRMHYVKPLGPAQQDVLRHTAMRIVSGRLARSEPPLGPEVVQYLLD

SEQ ID NO: 108197 - protein, 64 aa, Setaria italica
  Transcript Sequence Number=SeqID_42223
NAERNRKRSSPTCLLFFITLKSPGKLLFRKIKNADVVFIASIFLKWFSLSPQSHQHESIYKVVY

SEQ ID NO: 108198 - protein, 61 aa, Setaria italica
  Transcript Sequence Number=SeqID_42224
SLRPHRRWCACLWAIMALDWARWIGGGGGSEEGLVYGLSDVIGLREEAVLPGGIGYCGNAR

SEQ ID NO: 108199 - protein, 194 aa, Setaria italica
  misc_feature (55)..(55): Xaa can be any naturally occurring amino acid
  misc_feature (60)..(60): Xaa can be any naturally occurring amino acid
  misc_feature (62)..(62): Xaa can be any naturally occurring amino acid
  misc_feature (151)..(151): Xaa can be any naturally occurring amino acid
  Transcript Sequence Number=SeqID_42225
  Gene Ontology: Mol. function=NAD-dependent histone deacetylase activity; Cellular component=chromatin silencing complex; Biological process=regulation of transcription, DNA-dependent
  Homolog annotation: Hit_ID=Q0Z9W4; Match level="QueryCoverage=76%, HitCoverage=48%, E-value=1e-58, Identity=66%"; Hit description=SIR2 -family protein HDAC1
WFAECHLVYSLKFCNFINYIGWVNTFLQDALPPEEMNSAKEHCRSADLVLCLGTXATPKXKXASLVIHGLVDKVIAGVMTKLNLRIPPYIRTDLVQLTLRHSLKKKCVRWTLRVTSTHGLRAPLPFIQSIEVSFPERPDMKPVVLKEQPFXLQRETSMNRSFFMMLKLNFSDGCSCLSSSIGWPVDFQKQKTAL

SEQ ID NO: 108200 - protein, 111 aa, Setaria italica
  Transcript Sequence Number=SeqID_42226
  Gene Ontology: Mol. function=NAD-dependent histone deacetylase activity; Cellular component=chromatin silencing complex; Biological process=regulation of transcription, DNA-dependent
  Homolog annotation: Hit_ID=Q0Z9W4; Match level="QueryCoverage=76%, HitCoverage=25%, E-value=2e-25, Identity=65%"; Hit description=SIR2 -family protein HDAC1
MQMRTSCIPPYIALSFLCFAEKCVRWTLRVTSTHGLRAPLPFIQSIEVVSFPERPDMKPVVLKEQPFSLQRETSMNRSFFMMLKLNFSDGCSCLSSSIGWPVDFQKQKDSF

SEQ ID NO: 108201 - protein, 50 aa, Setaria italica
  Transcript Sequence Number=SeqID_42227
GNVSQPEINFYCTDTMLQFSDSVWNFQTGIRRILSTLELDTCIKFTNKFV

SEQ ID NO: 108202 - protein, 85 aa, Setaria italica
  Transcript Sequence Number=SeqID_42228
STRFCCKMYRLEPEWARCVQKGGELQHNPVILRRDAAGTEEFYFSDHGPCHPRMPWRETFHTQQKEGSYPSVLRPIDLLEANIRM

SEQ ID NO: 108203 - protein, 80 aa, Setaria italica
  Transcript Sequence Number=SeqID_42229
APADGDAKDTDSRAEEQKKEENGLTSHESVLDKIIKAVNNAYQIQAASDMYMSCGHPVADIETFLRSATPVIEQIPHTTS

SEQ ID NO: 108204 - protein, 93 aa, Setaria italica
  Transcript Sequence Number=SeqID_42230
SGKSFHHGDQSLAVPDDSCRLVLGLGPTPNLYSADSHSFGGKRAYESGTLLTQHCATTNSGLMLDLSRCSSRNLQPAAVNGSRNFSHARKTGI

SEQ ID NO: 108205 - protein, 177 aa, Setaria italica
  misc_feature (101)..(101): Xaa can be any naturally occurring amino acid
  misc_feature (155)..(155): Xaa can be any naturally occurring amino acid
  Transcript Sequence Number=SeqID_42231
MDLNMTNLWFHGKESIAAASFSQAQPAAINCRNEEPPASAMNLGCIGSSEIAQNSGKSFHHGDQSLAVPDDSCRLVLGLGPTPNLYSADSHSFGGKRAYEXLSADWSLDSTPNLYSADSHSFGGKRAYESGTMLSEQSSRTNSGLMLDLSRCSSXRNLQPAAVNGSRNFSHARKTGI

SEQ ID NO: 108206 - protein, 113 aa, Setaria italica
  Transcript Sequence Number=SeqID_42232
GLGQLSLCLCMNCEALLLLLLIPRCKLVIPNCCSPHWRKSFSFKSKKKIMCLKSRSRWSVTVGWERYSLPSPGDLLKAIRLLQGCIITNENDGSYKVQELHLPGVVSKHKSVA

SEQ ID NO: 108207 - protein, 94 aa, Setaria italica
  Transcript Sequence Number=SeqID_42233
GLSSICTAFNCLGVISVFASRCIHEIYFSDHISSSSRLPDSNHDMHRINNLIDAIYCEEKSNPMHTLPASGTSQSEDLANTISRTIGPNLTSGE

SEQ ID NO: 108208 - protein, 217 aa, Setaria italica
  Transcript Sequence Number=SeqID_42234
  Subcellular localization annotation: CTP_CleavageSite=60; ConfidenceScore=5.89e-01
GLLLLSVRCSAPCLSPSSSPRRVCVFRFSLLASLLSVSISSRVVSSPPVDLFRRSCPCVLADSLGAIRVRASVWVWRGGASRFGRLVRFTVYFSCDSIRFLQYSRFDPRFAFSACGLQDCTDWELGLGRRSSSCRRVPSTKEVEAGQSLVRSGGILVLSLGIGGFRLKSSRCDLALWPRIIERSSPIAGSWVDEVDSILGRFLLTADHACGCLSSPS

SEQ ID NO: 108209 - protein, 70 aa, Setaria italica
  misc_feature (29)..(29): Xaa can be any naturally occurring amino acid
  Transcript Sequence Number=SeqID_42235
LLFRVRPLKGKSLDRRRYCETMDVELVKXGQIHFRLLYESFYLEKFVSLLTDIVLRHNQLGQILYCVLIN

SEQ ID NO: 108210 - protein, 94 aa, Setaria italica
  misc_feature (76)..(76): Xaa can be any naturally occurring amino acid
  Transcript Sequence Number=SeqID_42236
TIKFDKFIEASNKNRAEREKMIEIQQSLADKKIEAAKISHEAAHEQTKCKMLETYTQLLLTPHDQLNADALAERIXALESMRLALFPNVCHCPT

SEQ ID NO: 108211 - protein, 67 aa, Setaria italica
  Transcript Sequence Number=SeqID_42237
LLTTINRGATLELNQPSAGDKKGSLGFAQARFNPWVLHWVGQSVALYSVPLYSVFRIKTTIYSVITK

SEQ ID NO: 108212 - protein, 210 aa, Setaria italica
  Transcript Sequence Number=SeqID_42238
  Gene Ontology: Cellular component=vacuole
  Homolog annotation: Hit_ID=B9RG20; Match level="QueryCoverage=83%, HitCoverage=81%, E-value=8e-33, Identity=45%"; Hit description =Transferase, transferring glycosyl groups, putative
  Subcellular localization annotation: CTP_CleavageSite=74; ConfidenceScore=5.10e-01
MMWPLLLPLLAAAASAKITPPPPPAPSPTTPWPEQFHAVVITNLTSKSGRLQVIDSYYDWPRGRSVNVIRDQLSAAGEPPLRNVEWANGTSFLFDAASCWTFHFAVGLLPPDWKKARGAAYLGRGRLDGFDCHVWSNFLFARYYEDVATGRPVGWNFNGMERHVLSFEAGAVLPDSGKWQAPAYCFNGSNADAPAPSPVDQLIRRGSSCS

SEQ ID NO: 108213 - protein, 79 aa, Setaria italica
  misc_feature (55)..(55): Xaa can be any naturally occurring amino acid
  Transcript Sequence Number=SeqID_42239
IVDEQLRERVLADEPFGELQRAGADGSLALQTASAAKAAADKKARRKEGSRCPAXEMEISTKMRLPKLREVIQIMEMSS

SEQ ID NO: 108214 - protein, 617 aa, Setaria italica
  Transcript Sequence Number=SeqID_42240
  Gene Ontology: Mol. function=pyridoxal phosphate binding; Cellular component=nucleus; Biological process=ubiquitin-dependent protein catabolic process
  Homolog annotation: Hit_ID=Q0KKQ1; Match level="QueryCoverage=89%, HitCoverage=46%, E-value=0.0, Identity=48%"; Hit description=CGS1 mRNA stability 1
  Pfam annotation: Domain name=MATH; Domain location=141-272; Score =22.3; E_value=0.00078; Accession=PF00917.18; Description=MATH domain
LESKEPVVQVASGSSASALPQSGAGSGVPDGDRGCWCLFRISILNQKSGGSHIHKDSYGRFGADNASLGWGDYIKMDEFLAADSGYLVDGAVVFSASVHVIKESNSFTRSLPLVLGMGGAGGGRAGARKSDGHFGKFVWRIESFTRLKELLKKRKVTGLCIKSRRFQVGNRDCRLIVYPRGQSQPPCHLSVFLEVTDPRNTTTEWSCFVSHRLSVINQKVEEKSIMKESQNRYSKSAKDWGWREFVTLTSLFDQDAGFLVQDTVVFSAEVLILKETATMQELIDEDSEICNSTSGCQIEALPKRPSFTWKVENFLSFKEIMETRKIFSKFFQAGGCELRIGVYESFDTICIYLESDQSSGYDPDKNFWVHYKMAIVNQKNSAKTVCKESSICTKTWNNSVLQFMKISDMLDTDAGFLVRDTVIFTCEIIDCCPWFDFSDLEVWASDDDQDELSTDPDELIDSEDSEDMSGDEEDMFRNLLLRAGFSLTYGDNYTQPQVTLKEKILTDASAIAGFLTGLRVYLDNPAKVKRMLLPTKVSTKNGGKKDASKCDSSSTSLISLLMGVSALKQAIIDLLLDIMVECCQPSEESGSSASSPPELSVEGELTESACSNVCAIT

SEQ ID NO: 108215 - protein, 125 aa, Setaria italica
  Transcript Sequence Number=SeqID_42241
  Gene Ontology: Mol. function=sequence-specific DNA binding; Cellular component=nucleus
  Homolog annotation: Hit_ID=Q949F7; Match level="QueryCoverage=66%, HitCoverage=42%, E-value=9e-12, Identity=48%"; Hit description=WRKY -like DNA-binding protein
MQAYMEAGQLGACLPSFLVPDHYAFPLPLPLQLPSQPNKLLQMPFDQEESENHGVMLSSDHCGLYQLPALPLGCSGAASAVACGGKPTADFMPSTVGADEVCTSLTKGCNDSASTWWKGSAPTMA

SEQ ID NO: 108216 - protein, 33 aa, Setaria italica
  Transcript Sequence Number=SeqID_42242
  Gene Ontology: Mol. function=DNA topoisomerase (ATP-hydrolyzing) activity; Cellular component=chromosome; Biological process=DNA unwinding during replication
  Homolog annotation: Hit_ID=Q8RXI5; Match level="QueryCoverage=100%, HitCoverage=14%, E-value=1e-12, Identity=90%"; Hit description =Putative DNA topoisomerase I (Fragment)
WCKRHEVPIEKIFNKSLVAKFGWAMDVDPEFRF

SEQ ID NO: 108217 - protein, 100 aa, Setaria italica
  Transcript Sequence Number=SeqID_42243
  Gene Ontology: Mol. function=DNA topoisomerase (ATP-hydrolyzing) activity; Cellular component=chromosome; Biological process=DNA unwinding during replication
  Homolog annotation: Hit_ID=B9SSQ1; Match level="QueryCoverage=55%, HitCoverage=6%, E-value=5e-25, Identity=94%"; Hit description=DNA topoisomerase type I, putative
PFIYFVYINEEQVDNITKSTCRIEKKIAAIETKIEKMEMEKKTKEDLKTVALGTSKINYLDPRITVAWCKRHEVPIEKIFNKSLVAKFGWAMDVDPEFRF

SEQ ID NO: 108218 - protein, 158 aa, Setaria italica
  Transcript Sequence Number=SeqID_42244
  Gene Ontology: Mol. function=DNA topoisomerase (ATP-hydrolyzing) activity; Cellular component=chromosome; Biological process=DNA unwinding during replication
  Homolog annotation: Hit_ID=Q56XA9; Match level="QueryCoverage=99%, HitCoverage=32%, E-value=7e-51, Identity=66%"; Hit description=DNA topoisomerase I (Fragment)
  Pfam annotation: Domain name=Topoisom_I; Domain location=1-158; Score= 102.0; E_value=2e-27; Accession=PF01028.12; Description=Eukaryotic DNA topoisomerase I, catalytic
RSKDVAKRQIAVATYLIDKLALRAGNEKDEDEADTVGCCTLKVDNVTCLPPNKIQFDFLGKDSIRYFNTVEVEELVYKAIEGFRAGISLLFSSSFSFVLNLRYLCPHTSGLVGKKPGKDLFDQLDTTRLNAHLKDLMPGLTAKVFRTYNASITLDGIL

SEQ ID NO: 108219 - protein, 882 aa, Setaria italica
  Transcript Sequence Number=SeqID_42245
  Gene Ontology: Mol. function=DNA topoisomerase (ATP-hydrolyzing) activity; Cellular component=chromosome; Biological process=DNA unwinding during replication
  Homolog annotation: Hit_ID=B9SSQ1; Match level="QueryCoverage=81%, HitCoverage=79%, E-value=0.0, Identity=63%"; Hit description=DNA topoisomerase type I, putative
  Pfam annotation: Domain name=Topoisom_I; Domain location=553-787; Score=473.6; E_value=2.8e-139; Accession=PF01028.12; Description =Eukaryotic DNA topoisomerase I, catalytic
  Pfam annotation: Domain name=Topoisom_I_N; Domain location=338-550; Score=521.0; E_value=1.5e-153; Accession=PF02919.7; Description =Eukaryotic DNA topoisomerase I, DNA b
  Pfam module annotation: Pfam domain module=Topoisom_I::Topoisom_I_N; Domain location=553-787::338-550
  Subcellular localization annotation: CTP_CleavageSite=75; ConfidenceScore=5.64e-01
KEGTTSNSVKSSRPTPSKQEGSSGGAGVPVRSQKHVAPNQQKNGVSASVSRPMHMKPPPSSPNQRPSGSGQPNSSAAHSSKSNSNDKSKLKRPLVKEENSDDSDDDVPIGLRKKVEEKKLKRVDEKADDSDDDKPLSLKINSSKMSSNCASRPVLQKAVAKVEQPDEDSDDDKPLASRLPTNAAPKSGGNASEDSEDEKPLAARFSKVSGSGNLKLTSSSKGLNNDSNGPRNLGKRPLDNSNQTSLALKKAKPSNVSASASVKREIKADDNDNTPLAQRLKIGESSKGKPSAKNVVKKSPASMKKGIKKMKGKVKTKMMKNSQFSKTMKVPPGSGGGKKWTTLEHNGVIFPPPYKPHGVKMLYNGQPVDLTPEQEEVATMFAVMKDTDYAGKPTFIENFFTDWRTLLGKNHVIKKFELCDFTPIYEWHLREKEKKKQMTTEEKKALREEKLKQEEKYMWAVVDGVKEKVGNFRVEPPGLFRGRGEHPKMGKLKRRIKPSDITINIGEDAPVPECPIPGERWKEVKHDNTVTWLAFWNDPISQKDFKYVFLAASSSLKGQSDKEKYEKSRKLKGYIQDIRDNYTKDFRSKDVAKRQIAVATYLIDKLALRAGNEKDEDEADTVGCCTLKVDNVTCLPPNKIQFDFLGKDSIRYFNTVEVEELVYKAIEGFRAGKKPGKDLFDQLDTTRLNAHLKDLMPGLTAKVFRTYNASITLDGILHKETEDGTLLEKIAVYQRANKEVAIICNHQRSVSKSHESQMTRLNERIDDLKAQRDELKVDLSKAKKGKPLGYDKEGKQKRNLAPDAIEKKIAAIETKIEKMEMEKKTKEDLKTVALGTSKINYLDPRITVAWCKRHEVPIEKIFNKSLVAKFGWAMDVDPEFRF

SEQ ID NO: 108220 - protein, 428 aa, Setaria italica
  misc_feature (272)..(272): Xaa can be any naturally occurring amino acid
  Transcript Sequence Number=SeqID_42246
  Gene Ontology: Mol. function=electron carrier activity; Biological process=oxidation reduction
  Homolog annotation: Hit_ID=Q94EV6; Match level="QueryCoverage=100%, HitCoverage=81%, E-value=0.0, Identity=76%"; Hit description =Cytochrome P450
  Pfam annotation: Domain name=p450; Domain location=1-421; Score =209.7; E_value=7.6e-60; Accession=PF00067.14; Description=Cytochrome P450
GKVFFWWSGSRPVLCVGNYDMVKRVLSDKAGLYRKPEPGPALVALMGRGLVLTEGEDWARHRSVVHPAFAMDKLKTMARAMEACAGEVVRSWEARAAEAAGGEATVEVGHQFKELTADVISHTAFGSSFRQGKEVFLAQRELQHIAFASFNKVRVPGMEYLPTKNNVRRWQLERKVRGTLMVIIDERLAAAKEARGYGTDLLGLMLEANAGFGGGQRVMNMDEIIDECKTFFFAGHDTTAHLLTWAMFLLGTHPEWQRRLREEVLRECGGAXTPLNGDALSKLKLVMMVLYETLRLYGAVNLTMRQATADVDLCGVKVPKGTLVSLPFAMLHRDEEVWGCDAGEFNPHRFLDGVGRAAAHPRALLSFSLGPRSCIGQDFAMLEAKITLALILQRFAFEVAPEYVHAPADFLTLQPRHGLPVVLKLLGP

SEQ ID NO: 108221 - protein, 85 aa, Setaria italica
  Transcript Sequence Number=SeqID_42247
  Gene Ontology: Mol. function=ATP binding; Biological process=apoptosis
  Homolog annotation: Hit_ID=Q2R1P5; Match level="QueryCoverage=97%, HitCoverage=5%, E-value=1e-23, Identity=59%"; Hit description =Leucine Rich Repeat family protein, expressed
VCNNCLDIYLYRRNPDFHRPRRGLKRYLWWGWAFWWLREMVARHRAASQLRELKDRARDVGERRLRYGVKVSDGTPRRSSSPGAV

SEQ ID NO: 108222 - protein, 153 aa, Setaria italica
  Transcript Sequence Number=SeqID_42248
CHWIILQHPANGSDVHLCISEHFLNDEKYLEALNEALCTLAQFFYIINGRSIPLDGFGMESSLAHQGHSKKKHNDSQSRDNISLMAYLDSLEFVCKVLLQHTNAVWKNFSEGKAICYSGNLTYVLTALHQFIDSSLMAHICTKNVIGRQGETT

SEQ ID NO: 108223 - protein, 148 aa, Setaria italica
  Transcript Sequence Number=SeqID_42249
  Gene Ontology: Mol. function=cysteine-type peptidase activity; Biological process=ubiquitin-dependent protein catabolic process
  Homolog annotation: Hit_ID=Q0J0M6; Match level="QueryCoverage=63%, HitCoverage=8%, E-value=7e-20, Identity=51%"; Hit description =Ubiquitin carboxyl-terminal hydrolase
MKVIEEANNNKQGQAAQKEMPCKEAILDHIVINPELKVKTPQPLALETVEGSHRMSTNGNVIRGLPNLTNSCFFNVMLQSLLGLDTLRCKLLAHDVWRGSLSEPLQQLFIETGALNSAQGLLDPSDLFKHTCMVCPRFGSGQHEDSHE

SEQ ID NO: 108224 - protein, 416 aa, Setaria italica
  misc_feature (348)..(348): Xaa can be any naturally occurring amino acid
  Transcript Sequence Number=SeqID_42250
LGTTKSETNVQNVAVGVPVRNVQTETMESEANIHIDVNAQSVSADVPVGCVSKEATELEASLHSNKNVQGNVTGVPKRIVSKEATESGVDTSIDENVQSAFAGVPDRSVSKEATKSEANIHIVENLLGAVADAPISSGPSPMHDDMAQPQPIDENKEPGSVEVCTVQQSYASLQALVPEMLKKENTNGTDVIAMNHALKEECPKDEAPVQKVKLPAGAASNHSSGEAVNGTCPDPANPTPNKRKKKTAQHFENPAAILVEFTPGVIVPSREELLSAFGKYGYLIESQTEIVKADRSARVVFGKNTEAEAAYRNRELLGHFGAPFATLSLQYLPPIKLSVPSPSPSPFXSPSLASKPPLTDIRKNLENMIAARLSALNKATPSDGLNSVTDKLLGDMQGLLAKVDKILSEPSANTAP

SEQ ID NO: 108225 - protein, 124 aa, Setaria italica
  Transcript Sequence Number=SeqID_42251
  Homolog annotation: Hit_ID=Q2HUK9; Match level="QueryCoverage=98%, HitCoverage=18%, E-value=1e-33, Identity=56%"; Hit description =Tetratricopeptide-like helical
  Pfam annotation: Domain name=PPR; Domain location=4-38; Score=8.4; E _value=0.91; Accession=PF01535.12; Description=PPR repeat
  Pfam annotation: Domain name=PPR; Domain location=70-104; Score=8.4; E_value=0.9; Accession=PF01535.12; Description=PPR repeat
  Pfam module annotation: Pfam domain module=PPR::PPR; Domain location =4-38::70-104
PEIEHCGCMVDLLSRAGHLQEALEFINGMPVEPNSVVWGALLGGARLHRNVEVGEEATRRLAVLDPGNDGYYVVLSNIYAAAGRWEDVARVRRAMKLRGVKKTTGWSAISVGGTVPEFAAGDCA

SEQ ID NO: 108226 - protein, 309 aa, Setaria italica
  misc_feature (48)..(48): Xaa can be any naturally occurring amino acid
  misc_feature (129)..(129): Xaa can be any naturally occurring amino acid
  misc_feature (258)..(258): Xaa can be any naturally occurring amino acid
  misc_feature (278)..(278): Xaa can be any naturally occurring amino acid
  misc_feature (291)..(291): Xaa can be any naturally occurring amino acid
  Transcript Sequence Number=SeqID_42252
  Gene Ontology: Mol. function=manganese ion binding; Cellular component=nucleus; Biological process=response to DNA damage stimulus
  Homolog annotation: Hit_ID=A5YT63; Match level="QueryCoverage=99%, HitCoverage=43%, E-value=1e-173, Identity=94%"; Hit description =Mre11A
  Pfam annotation: Domain name=Mre11_DNA_bind; Domain location=156-309; Score=209.9; E_value=6.6e-60; Accession=PF04152.6; Description=Mre11 DNA-binding presumed domain
RFGQVNYEDPNFNVGLPVFTIHGNHDDPAGVDNLSAIDILSACNLVNXIFGKMDLGGSGVGQIAVYPVLLKKGMTSVALYGLGNIRDERLNRMFQTPHSVQWMRPGTQDGESVSDWFNILVLHQNRIKXNPKSAINEHFLPRFLDFVVWGHEHECLVDPQEVPGMGFHITQPGSSVATSLIDGEAKPKHVLLLEIKGNQYRPTKIPLKSVRPFEYAEVVLKDEADVDPNDQASVLEHLDKTVRNLIEKSSQPTASRSXPKLPLVRIKVDYSGFSTINXKRFGQKYVGKVAXPQDILIFSKSAKKRQATR

SEQ ID NO: 108227 - protein, 422 aa, Setaria italica
  misc_feature (102)..(102): Xaa can be any naturally occurring amino acid
  Transcript Sequence Number=SeqID_42253
  Gene Ontology: Mol. function=manganese ion binding; Cellular component=nucleus; Biological process=response to DNA damage stimulus
  Homolog annotation: Hit_ID=A5YT63; Match level="QueryCoverage=78%, HitCoverage=46%, E-value=1e-166, Identity=88%"; Hit description =Mre11A
  Pfam annotation: Domain name=Mre11_DNA_bind; Domain location=1-176; Score=236.1; E_value=9e-68; Accession=PF04152.6; Description=Mre11 DNA-binding presumed domain
LIDGEAKPKHVLLLEIKGNQYRPTKIPLKSVRPFEYAEVVLKDEADVDPNDQASVLEHLDKTVRNLIEKSSQPTASRSEPKLPLVRIKVDYSGFSTINPQRXFGQKYVGKVANPQDILIFSKSAKKRQATGDHIDDSEKLRPEELNQQTIEALVAESNLKMEILPVDDLDIALHDFVNKDDKMAFYSCLQRNLEETRNKLSSEADKSKIEEEDIIVKISECMQDRVKERSLRSKDGARFLSSSQNLDTGGKSVAAQSSLNSFSDDEDTREMLLGARSTEVGRKSSGFTRPSKDTTDVAKRGASKRGRGRGTSSMKQTTLSFSQSRSSTVIRSEEVASSSEEEADANEVVENSEEESAQQVGRKRAAPRGRGRGRGSTAKRGRKTDIASIQSMMSKDDDDSEDEPPKKAPPRAPRNYGAVRRR

SEQ ID NO: 108228 - protein, 42 aa, Setaria italica
  Transcript Sequence Number=SeqID_42254
VLSLSLSLSLSLGDISLSCTRAHTHSVLNCASIGSFLLSVQC

SEQ ID NO: 108229 - protein, 174 aa, Setaria italica
  Transcript Sequence Number=SeqID_42255
EKLEFSELQSDEKCHILLVQALRSQLKEFDSVVAIVDASCLAGIRRHWNTPVPSEITQLASRCFNHYGDENDDNIELPSPGSTDKKSWISEKPVVAVGAGGTAILGFSSLSKTVQASAFLKLAPYKSPVVLKYGLMQLQRHAAIVLSKILPHGFATAGSKASALQFTASAEKIR

SEQ ID NO: 108230 - protein, 209 aa, Setaria italica
  misc_feature (188)..(188): Xaa can be any naturally occurring amino acid
  Transcript Sequence Number=SeqID_42256
  Gene Ontology: Mol. function=zinc ion binding; Cellular component =intracellular
  Homolog annotation: Hit_ID=Q9LPJ4; Match level="QueryCoverage=91%, HitCoverage=68%, E-value=4e-36, Identity=45%"; Hit description =F6N18.8
  Pfam annotation: Domain name=PLATZ; Domain location=22-139; Score =240.9; E_value=3.2e-69; Accession=PF04640.6; Description=PLATZ transcription factor
MKRETLPSWLSLLLTTQFFLPCKNHPLSSRSECNLFCIECEAPPDAFCYHCHLDHHSNHHVIQIRRSSYHDVIKVSELEDILDISDVQTYVINSAKVVFLNERPQMRTCGPLSSSSYNCETCGRALLNEFRFCSLGCNLTGIEKDMKTPSDVANGSEYKRIEDVASGNGSDSNTRSEKEIYNENNEEXRQQKRVARHRRKGIPQRAPFF

SEQ ID NO: 108231 - protein, 56 aa, Setaria italica
  Transcript Sequence Number=SeqID_42257
  Homolog annotation: Hit_ID=B6UGX7; Match level="QueryCoverage=94%, HitCoverage=37%, E-value=6e-17, Identity=73%"; Hit description =Elicitor-responsive protein 3
RWKQLLFRKGAFPPTIYNVVKGEKYCGEIKVGLTFTPENTRQRGLPDDCGGWKQSH

SEQ ID NO: 108232 - protein, 180 aa, Setaria italica
  Transcript Sequence Number=SeqID_42258
  Gene Ontology: Mol. function=DNA binding; Biological process =regulation of transcription
  Homolog annotation: Hit_ID=Q8H045; Match level="QueryCoverage=98%, HitCoverage=27%, E-value=9e-77, Identity=83%"; Hit description=NAC protein
KKQVENLRGVRLHNNDLGEIVVEGDESGNPTECITQYPISETADNSGEAGHLTDPTDAGGLDTAPIFSQSQPDDFAIGFDDVNPNASFDLYEKVDVKHGLFVSRVGAAKTFFHRVEPSKKVSFHLNPLASDVSRAIEKFHFPISVTTKVSGRVSIFSKFKALIRDKFLVTKPSSYQRSLG

SEQ ID NO: 108233 - protein, 357 aa, Setaria italica
  misc_feature (58)..(58): Xaa can be any naturally occurring amino acid
  misc_feature (84)..(84): Xaa can be any naturally occurring amino acid
  misc_feature (110)..(110): Xaa can be any naturally occurring amino acid
  misc_feature (255)..(255): Xaa can be any naturally occurring amino acid
  misc_feature (278)..(278): Xaa can be any naturally occurring amino acid
  misc_feature (327)..(327): Xaa can be any naturally occurring amino acid
  Transcript Sequence Number=SeqID_42259
  Gene Ontology: Mol. function=transposase activity; Biological process= transposition, DNA-mediated
  Homolog annotation: Hit_ID=Q2QT97; Match level="QueryCoverage=88%, HitCoverage=42%, E-value=1e-23, Identity=28%"; Hit description =Transposon protein, putative, CACTA, En/Spm sub-class
YETKLLFRCGLPVINSHVNGKGYVEPAMSTERATWSYAYEKGLVDILKELVNIPIFKXEWTAEGWRNITNKFNDIFPMAYFTKXQVQEKEKELKGNYKIIKEVRKSGVSXNDTLGMIIAEPKGWEKLIKDNHKVVKFHKKSFPLYNSLELLYEGSATTWDLNFTSIEPTPQRTKPTPQRTELRAESNSQRSELRAEPTPQRSISEQSNHSMAYIDRNPLNFGLGGVESIEVQCAPASRNSEDQDVTGGKKCKQSXDGNKTWDYIDFRKDQIEKILENXKRREEDYSIEKCIDIVNAMERLSDEQKVDANEVFQSETIRKILVGAKNXSVRLIWLKKKIARICSLSQFCTLLKYRLNP

SEQ ID NO: 108234 - protein, 52 aa, Setaria italica
  Transcript Sequence Number=SeqID_42260
LNSENSCALPNKQHSLIGYYLFRPLKLKNNKISFDSILFVTVLTLTTATLEL

SEQ ID NO: 108235 - protein, 118 aa, Setaria italica
  Transcript Sequence Number=SeqID_42261
TRASTTALDLELCRWLESKSFGQHSARIFLQSTCPSPTMPIATSMDALNYIVVICEIRPSELCLLRSNSVVSHMEISRTNVHYHHGVNLESAVANVKSQFTTRMCLKQPILDQIFVVE

SEQ ID NO: 108236 - protein, 119 aa, Setaria italica
  Transcript Sequence Number=SeqID_42262
QEIKHQEGERQMTNVPSNTEMVKEEQKNQEGEIAVTHVQGNTEIAEKEPNHHETELSKANIPDSLLMAEQTEQEHKQPSGEFAKTHVSGSPVTIPVTMATTDGNSSNIPKKPESAQGFL

SEQ ID NO: 108237 - protein, 40 aa, Setaria italica
  Transcript Sequence Number=SeqID_42263
KLQEETSRIRLLSNNFNYGWCSIVMAHFDLKTLHQSVSSW

SEQ ID NO: 108238 - protein, 47 aa, Setaria italica
  misc_feature (27)..(27): Xaa can be any naturally occurring amino acid
  Transcript Sequence Number=SeqID_42264
  Homolog annotation: Hit_ID=B9SC17; Match level="QueryCoverage=89%, HitCoverage=5%, E-value=2e-11, Identity=73%"; Hit description=Lipid binding protein, putative
FSIFTLQSEAAKKIPFILVINLQVPAXKPNYNLVMYYAAERPVNKDS

SEQ ID NO: 108239 - protein, 565 aa, Setaria italica
  Transcript Sequence Number=SeqID_42265
  Homolog annotation: Hit_ID=B9SC17; Match level="QueryCoverage=99%, HitCoverage=71%, E-value=0.0, Identity=63%"; Hit description=Lipid binding protein, putative
  Pfam annotation: Domain name=DUF1336; Domain location=352-558; Score =412.8; E_value=5.5e-121; Accession=PF07059.4; Description=Protein of unknown function (DUF1336)
  Pfam annotation: Domain name=START; Domain location=18-231; Score= -22.0; E_value=0.0084; Accession=PF01852.11; Description=START domain
  Pfam module annotation: Pfam domain module=DUF1336::START; Domain location=352-558::18-231
KGTKENRLLRQSSDLRNQERVNTNLGGDTGDAFEAHEWRYVRTFNGIRIFEDIANPKGGKGILLKSVGVVGANPDTVFEVVLNLDKHKRYEWDMLTADLELVETIDGYCDVVYGTYEPKYLNWWKGKKDFVFSRQWFRGQDGAYTILQSPVGHNERPPKHGYERTKINPLTWEIRRLNTSGSSPNCVVTLMLEISPSFWGRWKRRHSSNFDKSIPFALLSQVAGLREYFAANPALTSDLPSTVVKSKASEPLMIQSELEDSEPGDEFYDALARGESFEDEDSDDDDDAATPKAGKVKLKNVSWAIAGLALKTTKALAETSELVTSSSPVTVDPSQFHGTLRRAKSENDPNSWSAPGGEKFMIRGKTYLTDYTKVVGGDPLLKLIAVDWFKVNERFDSVALHPKSLVQSEAAKKIPFILVINLQVPAKPNYNLVMYYAAERPVNKDSLLGRFIDGNDAFRDARFKLIPSIVEGYWMVKRAVGTKACLLGKAVTCNYLRQDNFLEIDVDIGSSSVARSIIGLVLGYVTSIVVDLAILIEAKEEKELPEYILGTVRLNRVNPDSAVSI

SEQ ID NO: 108240 - protein, 129 aa, Setaria italica
  misc_feature (77)..(77): Xaa can be any naturally occurring amino acid
  misc_feature (117)..(117): Xaa can be any naturally occurring amino acid
  Transcript Sequence Number=SeqID_42266
  Gene Ontology: Mol. function=RNA-directed DNA polymerase activity
  Homolog annotation: Hit_ID=Q7XMG7; Match level="QueryCoverage=99%, HitCoverage=21%, E-value=2e-22, Identity=44%"; Hit description =OSJNBa0028I23.15 protein
GIGKVTLRERYTSLYNIARRKDDTVAKICGSVPLSVSFRRALTGHRLNKWLELVTEIATHGIDEQEDKFIWNLNKNXFTVKLMYMKIMQAEGVPSMCVTWKLKLPLKIKIFLWYLKXGVILTKDNLAKR

SEQ ID NO: 108241 - protein, 108 aa, Setaria italica
  Transcript Sequence Number=SeqID_42267
  Homolog annotation: Hit_ID=Q9S9P3; Match level="QueryCoverage=97%, HitCoverage=16%, E-value=6e-23, Identity=51%"; Hit description =T24D18.1 protein
  Pfam annotation: Domain name=XH; Domain location=1-106; Score=104.2; E_value=4.5e-28; Accession=PF03469.6; Description=XH domain
TKAAKLVESWQGELKKPSWHPFVAVQVNGEHKEVLDEDDAKLKLLRFEYGDDVCNAVKTALMEINEYNPSERHVVPVFWNFRKGRKATMKEVLYLYGQMEMITKRRRG

SEQ ID NO: 108242 - protein, 87 aa, Setaria italica
  Transcript Sequence Number=SeqID_42268
  Gene Ontology: Mol. function=transferase activity, transferring groups other than amino-acyl groups
  Homolog annotation: Hit_ID=Q9FVY9; Match level="QueryCoverage=98%, HitCoverage=15%, E-value=3e-40, Identity=94%"; Hit description =Benzoyl-CoA:benzyl alcohol/phenylethanol benzoyltransferase, putative, expressed
RLVHYYPFAGRLRELEGRKLAVDCTGEGVLFIEADADVRLDHFGDALQPPFPCLDELIFDVPGSSEVLGSPLLLFQVTRLACGGFIL

SEQ ID NO: 108243 - protein, 267 aa, Setaria italica
  Transcript Sequence Number=SeqID_42269
  Gene Ontology: Mol. function=branched-chain-amino-acid transaminase activity; Cellular component=chloroplast; Biological process =branched chain family amino acid metabolic process
  Homolog annotation: Hit_ID=B6THP1; Match level="QueryCoverage=95%, HitCoverage=62%, E-value=1e-135, Identity=91%"; Hit description =Branched-chain-amino-acid aminotransferase
  Pfam annotation: Domain name=Aminotran_4; Domain location=64-261; Score=44.0; E_value=5.9e-10; Accession=PF01063.11; Description =Aminotransferase class IV
GFQLIPTDFMYLMRCSSDGVFTKGELVPYGPIELNPAAAVLNYGQGLLEGLRAHRKEDGSILLFRPHENALRMRIGADRLCMPAPSVEQFVEAVKLTVLANKRWVPPTGKGSLYIRPQLIGSGAILGVAPAPQYTFIVFVCPVGHYFKDGLSPISLLTEEEYHRAAPGGTGDIKTIGNYASVVSAQRRAKEKGHSDVLYLDSVHNKFVEEVSSCNIFMVKDNVISTPLLTGTILPGITRKSVIGIAQSLGFQVDQIGIFIYLQFLSC

SEQ ID NO: 108244 - protein, 200 aa, Setaria italica
  misc_feature (143)..(143): Xaa can be any naturally occurring amino acid
  Transcript Sequence Number=SeqID_42270
  Homolog annotation: Hit_ID=B9T6T9; Match level="QueryCoverage=98%, HitCoverage=30%, E-value=4e-33, Identity=42%"; Hit description=SGT1 protein, putative
QVRRIDEILSMPYSAEEFKGVDLPPSDDESWLYGGEGELNAELRERQKELEEYEAAKKHRKSQKQSVSGSSKSQADQFKLGEITESMQDFVRNMSSFEGAEVPANRREMESVDLDVNQFFKAMESVFGGSSREQAGSDDGFDXKSSSSDMDFDDSDEENAFDEELDDKDMGDSFMDSYSDALNKELSSTTLEKSFARAPR

SEQ ID NO: 108245 - protein, 90 aa, Setaria italica
  Transcript Sequence Number=SeqID_42271
YYLFNHIYGHTITCYSIILGSILINNWKLAPWIYYFMPLHFQIISLMSEYAGNIMDGLVWSLFLWAVLNYFEGSGRVTRGGEWETLKNSQ

SEQ ID NO: 108246 - protein, 64 aa, Setaria italica
  Transcript Sequence Number=SeqID_42272
QSKNNSYLQFKHKKIQSYISYFRACHIIPKNIIQTKSLPPINCDFSIAKKKKNITVRYARFLKE

SEQ ID NO: 108247 - protein, 110 aa, Setaria italica
  Transcript Sequence Number=SeqID_42273
  Gene Ontology: Mol. function=hydrogen ion transmembrane transporter activity; Biological process=proton transport
  Homolog annotation: Hit_ID=B2B9U2; Match level="QueryCoverage=100%, HitCoverage=100%, E-value=2e-39, Identity=75%"; Hit description =Vacuolar ATPase subunit G
  Pfam annotation: Domain name=V-ATPase_G; Domain location=5-109; Score= 172.1; E_value=1.6e-48; Accession=PF03179.7; Description=Vacuolar (H+)-ATPase G subunit
MDASRRQSGIQQLLAAEQEAQQIVNAARAAKSARLRQAKEEAEREITEYRKQLETEHQRKVAESSGDSGANVKRLEQETDAKIEQLKQQAASISPEVIQMLLRHVTTVKN

SEQ ID NO: 108248 - protein, 137 aa, Setaria italica
  Transcript Sequence Number=SeqID_42274
RLWSDSAKKYSLRSIKPFRAGPQLFKYPVVCTHLGPDASIDLLKTRLYSTEVPFSTSNNRTEKIQFQSDQASAVMYLKGLDDHADRSVQSADQPATNLFSHESMEMALVFPTVRSDGKDDEVTSSYHPSVASQVQSS

SEQ ID NO: 108249 - protein, 77 aa, Setaria italica
  Transcript Sequence Number=SeqID_42275
FLTISCSMILYTWRPWWPLLDGRLARLVRSLKVEVLPPSLLVGNPAKQARTCAEPKQKPDSANLAAGCCVQYQSLKS

SEQ ID NO: 108250 - protein, 69 aa, Setaria italica
  Transcript Sequence Number=SeqID_42276
TSEFLFLSLHYCSMHIFILEHLHFWCPGVFILYRRLFVSVTVGYPTRAVFPKNHRERRSILLVFCKTTK

SEQ ID NO: 108251 - protein, 124 aa, Setaria italica
  misc_feature (71)..(71): Xaa can be any naturally occurring amino acid
  Transcript Sequence Number=SeqID_42277
  Homolog annotation: Hit_ID=B9SQ91; Match level="QueryCoverage=61%, HitCoverage=13%, E-value=1e-18, Identity=52%"; Hit description =Pentatricopeptide repeat-containing protein, putative
MLSVEAPAYYLTARPRWKLRACRNVMQEAASQDAKANFYRSERKNRKKEGTYIDKDGIARTFDRKKISRKXGGAMKGRGWKYGSGFVDGVFPVLSPMAQDILELVQKGTDVAKVCQSLDNIPTI

SEQ ID NO: 108252 - protein, 214 aa, Setaria italica
  misc_feature (28)..(28): Xaa can be any naturally occurring amino acid
  misc_feature (32)..(32): Xaa can be any naturally occurring amino acid
  misc_feature (95)..(95): Xaa can be any naturally occurring amino acid
  Transcript Sequence Number=SeqID_42278
  Gene Ontology: Mol. function=aspartic-type endopeptidase activity; Cellular component=chromatin; Biological process=DNA integration
  Homolog annotation: Hit_ID=Q337X2; Match level="QueryCoverage=60%, HitCoverage=7%, E-value=5e-41, Identity=64%"; Hit description =Retrotransposon protein, putative, unclassified, expressed
NGVVERKHRHLLETTRALMIVSSTPLQXLERXFSTATYLINIQPSSALQGGIPYERLCGKLPNYTSLRLFGCVFYVLLALRERTKLTAQSVECFXLGYSAEHKGYRCWDLVGRWMRISRDVTFDESRPFYSCPPPDASHSSFVEPLSFLTIPDTPIAPMHFPHLVPASAAPDEPLMVPSSASPSSVEPSSSDSTPHVPMGTIYDTKPPVTRFYV

SEQ ID NO: 108253 - protein, 340 aa, Setaria italica
  misc_feature (52)..(52): Xaa can be any naturally occurring amino acid
  Transcript Sequence Number=SeqID_42279
  Gene Ontology: Mol. function=aminomethyltransferase activity; Cellular component=cytoplasm; Biological process=glycine catabolic process
  Homolog annotation: Hit_ID=B6SNX1; Match level="QueryCoverage=92%, HitCoverage=76%, E-value=1e-156, Identity=86%"; Hit description =Aminomethyltransferase
  Pfam annotation: Domain name=GCV_T; Domain location=3-217; Score= -10.9; E_value=0.00021; Accession=PF01571.13; Description=Glycine cleavage T-protein (aminomethyl transferase)
  Pfam annotation: Domain name=GCV_T_C; Domain location=227-322; Score =45.6; E_value=2e-10; Accession=PF08669.3; Description=Glycine cleavage T-protein C-terminal barrel
  Pfam module annotation: Pfam domain module=GCV_T::GCV_T_C; Domain location=3-217::227-322
QRYAPTPNAPARGPAPPAYAALLTPQGRFLYDLFLYRPPPRSQMLDRTGSAXPETGEKPQEEEGEGEPEEVLADVDAAEVDELVACFKRYRLRSKVEIDNVSENFACWQRFGRNVVHTEPSTQEPEAQSIGWGQGVDHAGESAAQGNGHGWQWLKDPRLDYLGYRGIFPADTIPPLVESDKEADERHYQLWRIENGIAEGSTEIPKGEAIPLEYNFAGLGAISFEKGCYIGQEFIARTHHRGVIRKRLMPMKFVDEKGQELEQAVAPGSEVVDEASGKKIGTVSTALGSRGMGLLRLEEALKQGSSLRISDNRDVRVQAFKPDWWPAEWTQILDQHSAAA

SEQ ID NO: 108254 - protein, 227 aa, Setaria italica
  Transcript Sequence Number=SeqID_42280
  Gene Ontology: Mol. function=binding
  Subcellular localization annotation: CTP_CleavageSite=55; ConfidenceScore=5.40e-01
MASGQDSSGTTLMDLITSDPSAASGAGASSQQQSSSGGGGGGSGVGSLLGKPAASAADRKSKRGTLTQIQNETISAAKALNPVKVLPQRNRKKKPVSYAQLARSIHELAATCDQKSSQRQLVNSVFPKLAVYNSVDPSVAPSLLMLHQQCEDRNVLRYVYYYLARILSDNGSQGLSAAGGIPTPNWDALADIDAVGGVTRADVVPRIVDQLSAESSSDDVEFHARRL

SEQ ID NO: 108255 - protein, 171 aa, Setaria italica
  Transcript Sequence Number=SeqID_42281
SEAAQDALLYLFNQGHNFITENEISDIFTRLVERLPQVVLGSEETTALSHAKRLLALTFYAGPQFLINHLHHSPVIATRFFDCLGLCISHSSQFSGSMDKLIVSNPLSVGYLYSVAELKGGAYSKDMTNSSLQATYTPAASKISVIHDNGLSNAILGTVEYELPHVPPWFV

SEQ ID NO: 108256 - protein, 88 aa, Setaria italica
  Transcript Sequence Number=SeqID_42282
  Homolog annotation: Hit_ID=O64542; Match level="QueryCoverage=73%, HitCoverage=7%, E-value=4e-15, Identity=60%"; Hit description =YUP8H12R.29 protein
HGSVPARSLPGTIRLVFLRIVSLPKGRKLLSRYINLMVPGSDLARIACMAVFRHLRFVFGNLPSDDGSAETVTKLANAVAARQALRPL

SEQ ID NO: 108257 - protein, 267 aa, Setaria italica
  Transcript Sequence Number=SeqID_42283
  Homolog annotation: Hit_ID=O64542; Match level="QueryCoverage=94%, HitCoverage=30%, E-value=2e-70, Identity=54%"; Hit description =YUP8H12R.29 protein
RPEFGIMRMGNGRPRFRSKYMSTEELENISRIQHAATHINDPYIDDYYHQACLARRSVDARLKHHFCPTLILDPSSRARGKDEPHAYLKVDALGRLPFSSIRRPRPLLDVEPASTTDDNTLVSKSLDQEPMLAARITIEDGLSLLLDIDDIDRLLQINQQQDGGLQLRNRRQSLLGQLAESLQLVDPLGPNKNTHLSANDDLVFLRIVSLPKGRKLLSRYINLMVPGSDLARIACMAVFRHLRFVFGNLPSDDGSAETVTKLANAVA

SEQ ID NO: 108258 - protein, 181 aa, Setaria italica
  misc_feature (64)..(64): Xaa can be any naturally occurring amino acid
  Transcript Sequence Number=SeqID_42284
  Gene Ontology: Mol. function=protein serine/threonine kinase activity; Biological process=protein amino acid phosphorylation
  Homolog annotation: Hit_ID=B9A1H1; Match level="QueryCoverage=100%, HitCoverage=15%, E-value=1e-50, Identity=53%"; Hit description =Putative LRR-kinase protein
PVIHCDLKPSNVLLAEDMSARVGDFGISKFLPENTSRRMQNSYSITGIRGSIGYVAPGDSSSIXVLLYFANKYDMLTNILFCSSVEYGEGSAISTAGDIYSLGVLLLEIFTGRSPTDDMFRDSLGLHKFTEDALPDRTLEIVDSTIWMHVEPKDSITRRGVQECLISVFRLGLSCSKQQPR

SEQ ID NO: 108259 - protein, 189 aa, Setaria italica
  misc_feature (177)..(177): Xaa can be any naturally occurring amino acid
  Transcript Sequence Number=SeqID_42285
  Gene Ontology: Mol. function=protein binding; Cellular component =nucleus; Biological process=regulation of transcription, DNA -dependent
  Homolog annotation: Hit_ID=O22467; Match level="QueryCoverage=84%, HitCoverage=40%, E-value=3e-61, Identity=63%"; Hit description=WD-40 repeat-containing protein MSI1
MAGYSAESFEGRLDGVQITEDTDGAMNAQIVEEYSMWKANAPYLYDLIINHSMDWPSLTVQWLPERAEAPGQDHTVQKVVLGTHTCKDYPNFLMIAEVYVPCEGSFVEHCDGSKKVQIVQQINHDGEVNRARYMPQNSFIIATKTVSAEVYVFDYSKHPSKPPLDGACNPDLRLKGXNSEGYGLSWSYF

SEQ ID NO: 108260 - protein, 431 aa, Setaria italica
  Transcript Sequence Number=SeqID_42286
  Gene Ontology: Mol. function=protein binding; Cellular component =nucleus; Biological process=regulation of transcription, DNA -dependent
  Homolog annotation: Hit_ID=O22467; Match level="QueryCoverage=95%, HitCoverage=96%, E-value=0.0, Identity=84%"; Hit description=WD-40 repeat-containing protein MSI1
  Pfam annotation: Domain name=WD40; Domain location=174-213; Score =26.7; E_value=9.5e-05; Accession=PF00400.24; Description=WD domain, G-beta repeat
  Pfam annotation: Domain name=WD40; Domain location=223-262; Score =25.5; E_value=0.00022; Accession=PF00400.24; Description=WD domain, G-beta repeat
  Pfam annotation: Domain name=WD40; Domain location=269-308; Score =44.1; E_value=5.6e-10; Accession=PF00400.24; Description=WD domain, G-beta repeat
  Pfam annotation: Domain name=WD40; Domain location=313-352; Score =26.5; E_value=0.00011; Accession=PF00400.24; Description=WD domain, G-beta repeat
  Pfam annotation: Domain name=WD40; Domain location=370-409; Score =28.0; E_value=3.8e-05; Accession=PF00400.24; Description=WD domain, G-beta repeat
  Pfam module annotation: Pfam domain module=WD40::WD40::WD40::WD40::WD4 0; Domain location=174-213::223-262::269-308::313-352::370-409
MPKAGGGAADEEEFRAEVEERLINEEYKIWKKNTPFLYDLVITHALEWPSLTVQWLPDRAEPPGKDHSVQKMILGTHTSDNEPNYLMLAQVQLPLDDAEADARHYDDDHADIGGFGAASGKVQIVQQINHDGEVNRARYMPQNSFIIATKTVSAEVYVFDYSKHPSKPPLDGACNPDLRLKGHNSEGYGLSWSIFKEGHLLSGSDDAQICLWDIKANSKNKSLDALQIFKHHDGVVEDVAWHLRHEYLFGSVGDDHHLLIWDLRSPAPTKPVQSVVAHQGEVNCLAFNPFNEWVVATGSTDKTVKLFDLRKIDKSLHTFDCHKEEVFQVGWSPKNETILASCCLGRRLMVWDLSRIDQEQTPEDAEDGPPELMFIHGGHTSKISDFSWNPCEDWVIASVAEDNILQIWQMAENIYHDEDDLPISDEPPKTS

SEQ ID NO: 108261 - protein, 55 aa, Setaria italica
  Transcript Sequence Number=SeqID_42287
IVWKVFGVCGIIFGSKRLSTRGLRPIKNPKAWSLIYQESDPKNKTSRSHLKIWIN

SEQ ID NO: 108262 - protein, 177 aa, Setaria italica
  Transcript Sequence Number=SeqID_42288
  Subcellular localization annotation: CTP_CleavageSite=19; ConfidenceScore=5.04e-01
SKSTNPVDTHYHATANRLVSATGWVKSSYGNITTNATRTFALEYLLTFETLDLTIVADTGVVATDGAGGVLYSAQTHGNFPLGWVYQQNSLTITHGLEETTVAAGRWSSAPPYRSLRTTQSSLVEDEEGGGKSWGVRQTYRYNATDGCYFRNVTSSNYSVVSDHSNEVCVKGRHPPE

SEQ ID NO: 108263 - protein, 60 aa, Setaria italica
  Transcript Sequence Number=SeqID_42289
LKTVILHNRPSYASLPLGCPLYVHSNLIFIDVQSPPVSDDYNRTNGLYMWPLLIKFGLIK

SEQ ID NO: 108264 - protein, 103 aa, Setaria italica
  Transcript Sequence Number=SeqID_42290
TACRRPSAPRHLRLCRSGGGRRLGESSRWSGRRLVHGGISLLLQLGDDNRSAYRCPWRRHRFLRETPSPFVEKMIHCWAKAGALRFVSDISTQIFRYFDCNAL

SEQ ID NO: 108265 - protein, 70 aa, Setaria italica
  Transcript Sequence Number=SeqID_42291
DPFPPSFPVEKKNTCRSGICFGGKDAKLDYVKIKMCLKQSVLNNCVKNTHRCLAFELGCRSSICAVKTCI

SEQ ID NO: 108266 - protein, 142 aa, Setaria italica
  Transcript Sequence Number=SeqID_42292
  Subcellular localization annotation: CTP_CleavageSite=35; ConfidenceScore=5.32e-01
FKGRRRGNARTRGNIATSLTACRRPSAPRHLRLCRSGGGRRLGESSRWSGRRLVHGGISLLLQLGDDNRSAYRCPWRRHRFLRETPSPFVEKMIHCWAKAGALREAGREWISADQNRHAPAPPSDRYLLPCPDHLQPLPCFS

SEQ ID NO: 108267 - protein, 92 aa, Setaria italica
  Transcript Sequence Number=SeqID_42293
CLVTTSYLLEQARAVDDYTISQIITKELNDGDLSRLLIVVTGASHVMYGPRGSGVPGRISKKVPKKDQVVVLLDPESQVIRREGELPIADFL

SEQ ID NO: 108268 - protein, 40 aa, Setaria italica
  Transcript Sequence Number=SeqID_42294
  Homolog annotation: Hit_ID=Q8S3T1; Match level="QueryCoverage=97%, HitCoverage=25%, E-value=8e-12, Identity=84%"; Hit description =Putative n-calpain-1 large subunit
MMEEEGHHGVVLACSICGFLFAVLSALSFWVLWAVNWRPW

SEQ ID NO: 108269 - protein, 160 aa, Setaria italica
  Transcript Sequence Number=SeqID_42295
  Gene Ontology: Mol. function=protein serine/threonine kinase activity; Biological process=protein amino acid phosphorylation
  Homolog annotation: Hit_ID=Q6H464; Match level="QueryCoverage=100%, HitCoverage=23%, E-value=3e-33, Identity=47%"; Hit description =Putative wall-associated kinase 4
  Pfam annotation: Domain name=EGF_CA; Domain location=81-120; Score =26.4; E_value=0.00012; Accession=PF07645.7; Description=Calcium binding EGF domain
MEGSGPVEDLFDFSMVYDIVIRWAVIDSTCQQASQNITKYACRSENSYCLNVTHGKIFMGYRCKCSRGFKGNPYILEGCTDIDECSLPNNCNGICRNTPGSYKCTPCPHNKEFDSSKRRCVTSTKQRNLLLGIAIGISCGIGSIIIALGVIVLANKWKRG

SEQ ID NO: 108270 - protein, 85 aa, Setaria italica
  Transcript Sequence Number=SeqID_42296
  Gene Ontology: Mol. function=protein serine/threonine kinase activity; Cellular component=plasma membrane; Biological process =protein amino acid phosphorylation
  Homolog annotation: Hit_ID=Q10P10; Match level="QueryCoverage=91%, HitCoverage=11%, E-value=1e-33, Identity=93%"; Hit description =Protein kinase domain containing protein, expressed
GRGAQPAAELRRLSYQQLRRATGGFAAGSKLGQGGFGPVFRGALPRSGQPVAVKVMDAAGSLQGEREFHNELSLASHLLGCAVPG

SEQ ID NO: 108271 - protein, 255 aa, Setaria italica
  misc_feature (252)..(252): Xaa can be any naturally occurring amino acid
  Transcript Sequence Number=SeqID_42297
PNTRIISLSPRHPEKYMKKGPAYVDENCTYLAGKNFVDFGSVDWEKLLRNHGISDSSRVLVFFDDHQSELKRLKQALKAGFQHLIFEDNYDTGTGDHYSLRQICDQPYIRGGGHSCFWDSDEARLRSKRKKLWEKAVEIDDLCGEGDAWWGVRGYMRDNFNHSNKAISYEEHFQNSRFVESMVDLYWELPPVAGPSLTHQTRYDPARAADPIIEDGRYALFRRTGLERLDASVFNGYTQMAYVEISSSKLNXNDV

SEQ ID NO: 108272 - protein, 44 aa, Setaria italica
  misc_feature (1)..(1): Xaa can be any naturally occurring amino acid
  Transcript Sequence Number=SeqID_42298
XGGGGYDGREVLRYSFFQFNGHPSSEQLNYAQIDKEVISLIMYL

SEQ ID NO: 108273 - protein, 46 aa, Setaria italica
  Transcript Sequence Number=SeqID_42299
  Gene Ontology: Mol. function=hydrolase activity, acting on ester bonds
  Homolog annotation: Hit_ID=Q8RZ48; Match level="QueryCoverage=100%, HitCoverage=12%, E-value=3e-14, Identity=71%"; Hit description =Lipase-like
KTAKIWGNPSGFANWDGVHTTEKAYEVISQGVLNGPFANPPLLRTC

SEQ ID NO: 108274 - protein, 331 aa, Setaria italica
  Transcript Sequence Number=SeqID_42300
  Gene Ontology: Mol. function=oxidoreductase activity; Biological process=oxidation reduction
  Homolog annotation: Hit_ID=Q10T48; Match level="QueryCoverage=98%, HitCoverage=87%, E-value=1e-158, Identity=82%"; Hit description =Oxidoreductase, zinc-binding dehydrogenase family protein, expressed
  Pfam annotation: Domain name=ADH_N; Domain location=31-112; Score =83.1; E_value=1e-21; Accession=PF08240.4; Description=Alcohol dehydrogenase GroES-like doma
  Pfam annotation: Domain name=ADH_zinc_N; Domain location=143-284; Score=151.9; E_value=1.9e-42; Accession=PF00107.18; Description=Zinc- binding dehydrogenase
  Pfam module annotation: Pfam domain module=ADH_N::ADH_zinc_N; Domain location=31-112::143-284
MAAKAKAIRVHELGGPEVMRWEEVEVGDPKEGEIRIRTTAIGVNFIDVYFRKGVYAAPAMPFTPGMEAVGVVTAVGPGLTGRKVGDVVAYAGNPMGSYAQEQILPASVAVPVPPSVDHKQAASVMLKGMTAHVLLRRVFKVQSGHTVLVHAAAGGVGSLLCQWANALGATVIGTVSNEEKAAQATQDGCHHVIIYTNEDVATRVKEITSGKGVNVVYDSVGKDTYKASVECLASRGFMVSFGQSSGKPDPIPMSDLASKSLFLTRPSLMHYTATRDELLESAGEVFANVANGVLRVRVNHTYPLSEAARAHADLEARKTSGSIVLIPDSDS

SEQ ID NO: 108275 - protein, 117 aa, Setaria italica
  Transcript Sequence Number=SeqID_42301
  Gene Ontology: Mol. function=hydrolase activity; Cellular component =nucleus
  Homolog annotation: Hit_ID=Q60DG7; Match level="QueryCoverage=67%, HitCoverage=20%, E-value=2e-37, Identity=91%"; Hit description=(RAP Annotation release2) Histone deacetylase superfamily protein
MASDSSPPAAEGPGDKLAVFWHEGMLAHDAGRGVFDSGRDPGFLDVLDQHPENADRVRNMVSILRRGPIAPFLSWHSGRPAHASELLSFHSSGQSPNPLTNLLVTNYYCLSHRILES

SEQ ID NO: 108276 - protein, 79 aa, Setaria italica
  misc_feature (1)..(15): Xaa can be any naturally occurring amino acid
  Transcript Sequence Number=SeqID_42302
XXXXXXXXXXXXXXXYWLIIGLLKTEMLTEKNTSSHCHCSENQGKKCAWTGTTKEHTCRVTLTSTQGWSQNLTLFDHKG

SEQ ID NO: 108277 - protein, 346 aa, Setaria italica
  Transcript Sequence Number=SeqID_42303
  Gene Ontology: Mol. function=serine-type endopeptidase activity; Cellular component=plasma membrane; Biological process=protein transport
  Homolog annotation: Hit_ID=Q9XI10; Match level="QueryCoverage=95%, HitCoverage=46%, E-value=1e-124, Identity=64%"; Hit description =F8K7.10 protein
  Pfam annotation: Domain name=PD40; Domain location=134-169; Score =27.9; E_value=4.2e-05; Accession=PF07676.4; Description=WD40-like Beta Propeller Repeat
  Pfam annotation: Domain name=PD40; Domain location=181-220; Score =36.8; E_value=8.9e-08; Accession=PF07676.4; Description=WD40-like Beta Propeller Repeat
  Pfam annotation: Domain name=PD40; Domain location=229-280; Score =1.1; E_value=11; Accession=PF07676.4; Description=WD40-like Beta Propeller Repeat
  Pfam annotation: Domain name=PD40; Domain location=37-70; Score=8.2; E_value=1.2; Accession=PF07676.4; Description=WD40-like Beta Propeller Repeat
  Pfam module annotation: Pfam domain module=PD40::PD40::PD40::PD40; Domain location=134-169::181-220::229-280::37-70
HFNPFISPDGERVAYHRCRGSGNGDSPLLLENIKSPAPDTFSLFRIDGSYPSFSHDGKRIAFVGLPGLFVVNADGSGGRRQILSGEAFPTAWDWKRKGVIYTSIGPTFASERTEVDVIAVSLGDDDDDSSISIKKLTTGSENNAFPSPSPDGKWVVFRSGRSGHKNLYIMDAEDGEAGGIHRLTEGPWSDTMCNWSPDGEWIAFSSDRHNPGGGSFAIYMIHPNGTGLRRVVHSADGGRTNHPWFSPDSKTLVFTSDYAAVSAEPISNPHHYQPYGEIFTVNIDGTGIRRLTHNSFEDGTPSWTPYYLEPEDVGETLQASGTCKFRDCHWLTVDAKPDGLMCGKHG

SEQ ID NO: 108278 - protein, 64 aa, Setaria italica
  Transcript Sequence Number=SeqID_42304
MDDISSMATGRYRRWAAASGGADSSDPTTWYAWAHRGHRLWAAMPDAFWIYMYKVHRCRQPRED

SEQ ID NO: 108279 - protein, 95 aa, Setaria italica
  Transcript Sequence Number=SeqID_42305
  Subcellular localization annotation: CTP_CleavageSite=27; ConfidenceScore=5.18e-01
PPPRIYISTSSPYPLTSRTPCRFRQLPAAAPREVSLLIRFLLARGWIVSFRAWDLVYVVGLHVWIGSCELESSSAIVFGWVVKKGDHCLIYLYRY

SEQ ID NO: 108280 - protein, 42 aa, Setaria italica
  Transcript Sequence Number=SeqID_42306
MAWWRKKVVTPARRAWAAVSTRVRARNTGSGGSILKLHEDVQ

SEQ ID NO: 108281 - protein, 102 aa, Setaria italica
  Transcript Sequence Number=SeqID_42307
  Gene Ontology: Mol. function=oxidoreductase activity; Biological process=oxidation reduction
  Homolog annotation: Hit_ID=A9PHC3; Match level="QueryCoverage=100%, HitCoverage=28%, E-value=5e-19, Identity=50%"; Hit description=20G -Fe(II) oxidoreductase
GGLQVHHDGAWRDLAAPGVPDDGALLVNLGDMAKAISADAYRSVPHRVVASMGDDERLSLCYFAFPRDDAVVSCDGSRYRPFTVPEFRAQVQADLKAIGSKV

SEQ ID NO: 108282 - protein, 49 aa, Setaria italica
  Transcript Sequence Number=SeqID_42308
MNGAGGSHQQQQQRLRQQQQQQQQALLMQQALQQQQQYRCPAVLGRPAA

SEQ ID NO: 108283 - protein, 113 aa, Setaria italica
  Transcript Sequence Number=SeqID_42309
  Gene Ontology: Mol. function=phosphoribosyl-AMP cyclohydrolase activity; Cellular component=chloroplast; Biological process =histidine biosynthetic process
  Homolog annotation: Hit_ID=B6TR63; Match level="QueryCoverage=74%, HitCoverage=27%, E-value=1e-23, Identity=67%"; Hit description =Histidine biosynthesis bifunctional protein hisIE
  Subcellular localization annotation: CTP_CleavageSite=50; ConfidenceScore=5.75e-01
MAAAAPTRAPVSSSSSDVVFSGRTSRPNLRAAAVSSAPGWRRREPYPAVSVAAGSGQSAPGTVAVDPKVDTLLDSVKWDSKGLAVAIAQHVDTGAILMQGFANKEALDKNYIN

SEQ ID NO: 108284 - protein, 153 aa, Setaria italica
  misc_feature (10)..(10): Xaa can be any naturally occurring amino acid
  misc_feature (64)..(64): Xaa can be any naturally occurring amino acid
  misc_feature (114)..(114): Xaa can be any naturally occurring amino acid
  Transcript Sequence Number=SeqID_42310
  Gene Ontology: Cellular component=extracellular region; Biological process=sexual reproduction
  Homolog annotation: Hit_ID=Q850K7; Match level="QueryCoverage=100%, HitCoverage=58%, E-value=7e-64, Identity=78%"; Hit description =Expansin-like B1
  Pfam annotation: Domain name=Pollen_allerg_1; Domain location=47-135; Score=-4.8; E_value=0.0097; Accession=PF01357.13; Description=Pollen allergen
NGTDFILSQXAFAGMGQNKDAGATLLNLGYVGIEYRRVPCIYPGKNIIFKITESSHFPYYLEFXEIWYQQGNQDIIAVQLCETVNLTCQLLGRTHGAVWAAISPPNGPLNIRMXFSSLAAHRGDQKWLVSTSTIPQNWTAGATYDSGVQVQLQ

SEQ ID NO: 108285 - protein, 92 aa, Setaria italica
  Transcript Sequence Number=SeqID_42311
  Gene Ontology: Mol. function=transferase activity, transferring glycosyl groups
  Homolog annotation: Hit_ID=B6SUZ6; Match level="QueryCoverage=97%, HitCoverage=20%, E-value=2e-45, Identity=92%"; Hit description =Protein-O-fucosyltransferase 1
ACLRSAIDFEVCSRADVFVGNSFSTFSNLVVLSRTEKLYNLGKVSSCGENIGLSSYAYNVMGDDGGPQRWMTDMSDTNLQRLSYGTNNVSCH

SEQ ID NO: 108286 - protein, 199 aa, Setaria italica
  misc_feature (3)..(3): Xaa can be any naturally occurring amino acid
  misc_feature (6)..(6): Xaa can be any naturally occurring amino acid
  misc_feature (9)..(9): Xaa can be any naturally occurring amino acid
  misc_feature (13)..(13): Xaa can be any naturally occurring amino acid
  misc_feature (22)..(23): Xaa can be any naturally occurring amino acid
  misc_feature (167)..(167): Xaa can be any naturally occurring amino acid
  misc_feature (191)..(191): Xaa can be any naturally occurring amino acid
  Transcript Sequence Number=SeqID_42312
  Gene Ontology: Mol. function=transferase activity, transferring glycosyl groups; Cellular component=integral to membrane; Biological process=cell wall organization and biogenesis
  Homolog annotation: Hit_ID=B9T5I4; Match level="QueryCoverage=100%, HitCoverage=23%, E-value=7e-82, Identity=71%"; Hit description =Cellulose synthase A catalytic subunit 6 [UDP-forming], putative
RRXKIXPRXPEWXFCSEIDYLXXKVHPEFVRERRAMKREYEETKFRRNAVGLNSHKVPEGGWSLPEGGPWHGNNVRDHAGMVQVITGHDCVMDDAGNKLPWLIYVSREKRPGYDHHKKAGALNALLRTSAVLSNAPFVLNVDCDHYMNNSKALREAMCFLMDPVLGXKICYVQFPQRFDGIDQHDRYSNHXNLVFFDIN

SEQ ID NO: 108287 - protein, 41 aa, Setaria italica
  Transcript Sequence Number=SeqID_42313
TTLNSVPALCNPDFTVVVRGKSYDAIVTKMPFVPTKYYKPS

SEQ ID NO: 108288 - protein, 56 aa, Setaria italica
  Transcript Sequence Number=SeqID_42314
  Gene Ontology: Mol. function=aminomethyltransferase activity; Cellular component=mitochondrion; Biological process=glycine catabolic process
  Homolog annotation: Hit_ID=A3AXK2; Match level="QueryCoverage=67%, HitCoverage=10%, E-value=3e-15, Identity=97%"; Hit description =Aminomethyltransferase
CAAPTLQLLTKEDLSKMYFSDFKMIDINGYECFLTRTGYYFAFLPPLIKKMHLVRF

SEQ ID NO: 108289 - protein, 412 aa, Setaria italica
  Transcript Sequence Number=SeqID_42315
  Gene Ontology: Mol. function=aminomethyltransferase activity; Cellular component=mitochondrion; Biological process=glycine catabolic process
  Homolog annotation: Hit_ID=B7ENR4; Match level="QueryCoverage=89%, HitCoverage=89%, E-value=0.0, Identity=93%"; Hit description =Aminomethyltransferase (Fragment)
  Pfam annotation: Domain name=GCV_T; Domain location=85-300; Score =270.3; E_value=4.3e-78; Accession=PF01571.13; Description=Glycine cleavage T-protein (aminomethyl transferase)
  Pfam annotation: Domain name=GCV_T_C; Domain location=309-401; Score =136.2; E_value=1.1e-37; Accession=PF08669.3; Description=Glycine cleavage T-protein C-terminal barrel
  Pfam module annotation: Pfam domain module=GCV_T::GCV_T_C; Domain location=85-300::309-401
MRGLLACATLARRAAAGSYGAAPARVRHLAGAAEAAEAELKKTALYDFHVANGGKMVPFAGWSMPIQYKDSIMDSTVNCRTNGSLFDVAHMCGLSLKGRGAIPFLESLVIADVAGLRDGTGTLTVFTNEKGGAIDDSVVTKVTDQHIYLVVNAGCRDKDLAHIGAHMEAFNKKGGEVKWHIHDERSLLALQGPLAAPTLQLLTKEDLSKMYFSDFKMIDINGYECFLTRTGYTGEDGFEISVPSENAVDLAKAILEKSEGKVRLTGLGARDSLRLEAGLCLYGNDMEQHITPVEAGLSWAIGKRRRAEGGFLGADVILKQLQEGPKIRRVGMFTQGPPARSHSELVSNSGENIGEVTSGGFSPCLKKNIAMGYVKSGLHKAGTEFKVVVRGKSYDAIVTKMPFVPTKYYKPS

SEQ ID NO: 108290 - protein, 132 aa, Setaria italica
  Transcript Sequence Number=SeqID_42316
MGGGSEEKFRRSPVSGQSFTTMAAPAASTSVSESDDSDSDSSQCSEASTWDSQVLQRHAECLELEELAAISVNPALLRTLNHLLLEVYAILRPKPLDYGQRNTLIDAFRKITKRIFDSNDGFPVVEPFGSFT

SEQ ID NO: 108291 - protein, 102 aa, Setaria italica
  Transcript Sequence Number=SeqID_42317
  Gene Ontology: Mol. function=enzyme inhibitor activity
  Pfam annotation: Domain name=PMEI; Domain location=2-94; Score=3.2; E_ value=0.0092; Accession=PF04043.7; Description=Plant invertasepectin methylesterase inhibitor
MNAATDRMNAPGTDATVKEALDDCTSSYSDIKSNLETVDDALKRGDLATARTNLDSVETDVTTCDDGFNERGTPSVMTDHDQELQKLASDLIAIGANSIHHA

SEQ ID NO: 108292 - protein, 333 aa, Setaria italica
  Transcript Sequence Number=SeqID_42318
  Gene Ontology: Mol. function=hydrolase activity; Biological process =metabolic process
  Homolog annotation: Hit_ID=B6T563; Match level="QueryCoverage=93%, HitCoverage=99%, E-value=1e-169, Identity=92%"; Hit description =Pyrimidine-specific ribonucleoside hydrolase rihB
  Pfam annotation: Domain name=IU_nuc_hydro; Domain location=18-330; Score=253.7; E_value=4.4e-73; Accession=PF01156.11; Description =Inosine-uridine preferring nucleoside hydrolase
MEASNGQIHHHDEQPRAEQKIIIDTDPGIDDSVAIMMAFQSPGVQVLGLTTIFGNCTTEHATRNALILCEKAGHPEVPVAEGSHEPLKGGKPKVAAFVHGSDGLGNIELPDPTIKKVEQSAAEFLVDKVSQFPGEVSVLALGPLTNLALAIKKDPSFVKNVRKIVVLGGAFFSAGNATPSAEANIHSDPEAADIVFTSGADIYVVGLNITTQVSFTDKDLLELRNSKGKHAQFLCDVCKFYLDWHIESYGAPVIFLHDPVSFAALVRPDLFTFRKGVVRVETQGICAGHTSMDMLLKKWNSENPWTGYSPISVAWTVDVPKMVAFVKELVTGE

SEQ ID NO: 108293 - protein, 55 aa, Setaria italica
  Transcript Sequence Number=SeqID_42319
LQLKSLAASLESSVYKKPTSSAYVYPHQELTCIHIKSDLYFFKEGFKGKIEQPNL

SEQ ID NO: 108294 - protein, 135 aa, Setaria italica
  Transcript Sequence Number=SeqID_42320
GRQQGMVDREPLPLNMLYYDYIGKVSTLADKLRLPYKGIEIWSEDRGHKANNNDPSMTKVADAFTRILEDIPAAGNKLDGGAFISVQEVDAALQKLQVEAALHSQESANFLDSPILANGHDLALDHAFSDMFNAT

SEQ ID NO: 108295 - protein, 156 aa, Setaria italica
  misc_feature (138)..(156): Xaa can be any naturally occurring amino acid
  Transcript Sequence Number=SeqID_42321
QPKPDFKDEPWSVLALTSFSDVDGGCSGFMGSDDGAVRRRLQLTALRTIASVKALCCRGRIVCSLFSFMYFLLFLCVITCIRPNPCYATHRTPADSCQDCRPYRAILSESAVLVFYSFGVTKKLSDYFEKVSSGYLKXXXXXXXXXXXXXXXXXXX

SEQ ID NO: 108296 - protein, 81 aa, Setaria italica
  Transcript Sequence Number=SeqID_42322
NVYDKGQQAGFTIFFFNYTVELHEAMFTYCTHLFQDGYSHWHNVLFQSDFCSPCAEKITNKFPQKQLLKNVKSYLYVQAIN

SEQ ID NO: 108297 - protein, 87 aa, Setaria italica
  Transcript Sequence Number=SeqID_42323
  Subcellular localization annotation: CTP_CleavageSite=42; ConfidenceScore=5.01e-01
MALTKCAIAVFLVLAVISNTSTCCVRAICSGCPTPKPKPGMPCFHAGSSQHPCTTEKCSRLCEHLNHNGTLAYCRSASPGVCCCPNE

SEQ ID NO: 108298 - protein, 251 aa, Setaria italica
  Transcript Sequence Number=SeqID_42324
MPILFGIAMLAALVLTSEGRISRKDLSVDLGGGGGGSIGIGTGISIGIGGGVSGSGSGSGSGSGSASGSGSGSGSASGSGSGAASGAGSSAGSGAGSGAGSYAGSGTGSGAGSGAGSGAGSGAGSGSGYGQGQGAGEGQGQGSGYGEGHGSGHGQGSGSGSGYGEGYGEGHGQGSGSGQGSGYGEGHGSGHGQGSGQGSGSGYGEGYGSGHGQGSGYGEGYGEGSGRGYGDGSGSGYGEGHGYGYGSGHGK

SEQ ID NO: 108299 - protein, 127 aa, Setaria italica
  misc_feature (107)..(107): Xaa can be any naturally occurring amino acid
  Transcript Sequence Number=SeqID_42325
  Gene Ontology: Mol. function=transferase activity, transferring glycosyl groups; Cellular component=plasma membrane
  Homolog annotation: Hit_ID=Q7XZZ4; Match level="QueryCoverage=54%, HitCoverage=6%, E-value=5e-22, Identity=85%"; Hit description=C2 domain-containing protein, putative, expressed
ELNLYNDKKAIAATGSGRRGGTFLGKVKVAGASFAKGGEEALVYYPLEKRSVFSQIKGEIGLKIWFVDDPPPPQPAAPVGEEKGADAAAAEKKEAPAEGKEEKGDGXAAAAAPAEEKKAEAAPAEEK

SEQ ID NO: 108300 - protein, 44 aa, Setaria italica
  Transcript Sequence Number=SeqID_42326
LTGQIAPRHDLAEMSGSSELCKGLADSIEVPTLSEQHRQLLLQC

SEQ ID NO: 108301 - protein, 83 aa, Setaria italica
  Transcript Sequence Number=SeqID_42327
AIVQSRNKRRIKEDMKRDRYAHLARTSTHRSFFLNNQIGVCHIFLHSTSNQSHETTIVPFWHYKEPRQEGWSRMRIGEILSVL

SEQ ID NO: 108302 - protein, 317 aa, Setaria italica
  Transcript Sequence Number=SeqID_42328
  Gene Ontology: Mol. function=zinc ion binding; Cellular component =intracellular
  Homolog annotation: Hit_ID=Q2Z1Y7; Match level="QueryCoverage=58%, HitCoverage=52%, E-value=2e-39, Identity=43%"; Hit description=Pm27 protein
  Pfam annotation: Domain name=DUF1644; Domain location=29-189; Score =122.9; E_value=1e-33; Accession=PF07800.4; Description=Protein of unknown function (DUF1644)
MGSGNLLMKKVVRHSSFDLDIQLDKSWMEDVTCPICLDYPHNAVLLRCTSYEKGCRPFVCDTDQTRSNCLERFKGAYELPANVKVSSLAVPPLDSIIHIVPSNANNRPSCPLCRGDVIGWIVIGEARMHLNQKKRCCEEDCCSFVGNFNELQKHTQQKHPDSRPSEIDPARQVDWDNFQQSSDIVDVLSTIHAQVPNGIVLGDYVIEYGDDDTGEDYEVFRRVRTNWWSCIFCKAFSRSSRSRRRARARERRGNGRRNGNQANLENFNLEVPTQSVELREIRFDEIDDEYIVTGAIPSIAAPGRMASFHYRDTRYGR

SEQ ID NO: 108303 - protein, 51 aa, Setaria italica
  Transcript Sequence Number=SeqID_42329
LLKSVYESMASGFLKTQECWTTYKYTTRSRHELVYGKVYCLLCVIPACDKE

SEQ ID NO: 108304 - protein, 290 aa, Setaria italica
  Transcript Sequence Number=SeqID_42330
  Gene Ontology: Mol. function=CDP-diacylglycerol-glycerol-3-phosphate 3-phosphatidyltransferase activity; Cellular component=integral to membrane; Biological process=phospholipid biosynthetic process
  Homolog annotation: Hit_ID=B6TWM7; Match level="QueryCoverage=90%, HitCoverage=82%, E-value=4e-84, Identity=64%"; Hit description=CDP -diacylglycerol--glycerol-3-phosphate 3-phosphatidyltransferase
  Pfam annotation: Domain name=CDP-OH_P_transf; Domain location=129 -279; Score=128.1; E_value=2.8e-35; Accession=PF01066.13; Description= CDP-alcohol phosphatidyltransferase
  Subcellular localization annotation: CTP_CleavageSite=39; ConfidenceScore=5.06e-01
ALPHRVPAAGRLPPTTAVTSAGAVGAGRWFRWQSARGLCAAPHSGGGAGVEGMGSDAGVVGARRRRAVNGLAKDVPAVNGMSKEDPAPLPPPPRLLTLPTVLTIGRVAAVPLLISTFYMEGPWAATATTGIFIAAAITDWLDGYLARKMQLGTPFGAFLDPVADKLMVAATLVLLCTKPLEGSLLRDGPWLLTVPSIAIIGREITMSAVREWAASQNSKVLEAVAVNNLGKWKTATQMTALTLLLASRDPSLPAQGALVTPGVVLLYVSAGLAIWSLVVYMRKIWRILLK

SEQ ID NO: 108305 - protein, 130 aa, Setaria italica
  Transcript Sequence Number=SeqID_42331
  Gene Ontology: Mol. function=catalytic activity; Biological process =nucleoside metabolic process
  Homolog annotation: Hit_ID=B6T4U2; Match level="QueryCoverage=100%, HitCoverage=35%, E-value=2e-41, Identity=63%"; Hit description =Vegetative storage protein PNI288
NELALESNGDYTRELGSLNFTDYTVGKNARSAGNLLNGVWYQPEEVFPAASGTPEVRGHAFWAPVDARYYELSRKLEGVKLEACVVSNGTTCLPRRPAVAWVERGCSASVFVDNAAYREFLRSRFGVTAV

SEQ ID NO: 108306 - protein, 151 aa, Setaria italica
  Transcript Sequence Number=SeqID_42332
  Gene Ontology: Mol. function=ATP-dependent helicase activity
  Homolog annotation: Hit_ID=B9S326; Match level="QueryCoverage=88%, HitCoverage=10%, E-value=1e-25, Identity=43%"; Hit description=ATP -dependent RNA helicase, putative
  Pfam annotation: Domain name=R3H; Domain location=27-83; Score=44.2; E_value=5.3e-10; Accession=PF01424.14; Description=R3H domain
MGRKGRKGKDAAAAGGGGVREATLVRVSKVLEDFRASDAEVYTFEPDISRLERGAIHQMCRKMGMTSKSSGFGEQRRLSVYKSKRKQGPAMEEGPSHLRFSEEAIHVLQDLFTHYPPDDADLHGDANRNSSGKAANTKWKTDSAFCRPAMS

SEQ ID NO: 108307 - protein, 70 aa, Setaria italica
  Transcript Sequence Number=SeqID_42333
SLKQGFSPVRSLCAFCCYEKVCLWFTSLLLVQGGVMPCNLDLYSLLIKDTQLSCVFEKKKRQPLGKMQLY

SEQ ID NO: 108308 - protein, 309 aa, Setaria italica
  Transcript Sequence Number=SeqID_42334
  Gene Ontology: Mol. function=protein binding; Cellular component =extracellular region
  Homolog annotation: Hit_ID=B6TA85; Match level="QueryCoverage=99%, HitCoverage=67%, E-value=1e-147, Identity=84%"; Hit description =Protein binding protein
  Pfam annotation: Domain name=LRR_1; Domain location=108-130; Score =7.7; E_value=10; Accession=PF00560.25; Description=Leucine Rich Repeat
  Pfam annotation: Domain name=LRR_1; Domain location=133-155; Score =1.4; E_value=1.7e+02; Accession=PF00560.25; Description=Leucine Rich Repeat
  Pfam annotation: Domain name=LRR_1; Domain location=157-179; Score =9.0; E_value=5.9; Accession=PF00560.25; Description=Leucine Rich Repeat
  Pfam annotation: Domain name=LRR_1; Domain location=181-203; Score =7.6; E_value=11; Accession=PF00560.25; Description=Leucine Rich Repeat
  Pfam annotation: Domain name=LRR_1; Domain location=207-228; Score =9.7; E_value=4.2; Accession=PF00560.25; Description=Leucine Rich Repeat
  Pfam annotation: Domain name=LRR_1; Domain location=35-58; Score=5.5; E_value=27; Accession=PF00560.25; Description=Leucine Rich Repeat
  Pfam annotation: Domain name=LRR_1; Domain location=60-83; Score=6.0; E_value=22; Accession=PF00560.25; Description=Leucine Rich Repeat
  Pfam annotation: Domain name=LRR_1; Domain location=85-107; Score =7.0; E_value=14; Accession=PF00560.25; Description=Leucine Rich Repeat
  Pfam module annotation: Pfam domain module=LRR_1::LRR_1::LRR_1::LRR _1::LRR_1::LRR_1::LRR_1::LRR_1; Domain location=108-130::133-155::157- 179::181-203::207-228::35-58::60-83::85-107
RLLQGFINSLPDLALFHANSNDFGGAVPALGGLQYFYELDLSNNRLAPAPFPTDVLGLTNATFIDIRFNSFYGELPAGVFCRFPRIQAIFVNNNQFSGSLPDNIGQSPVNYLSLANNRFTGEIPTSISRNAGTLLEVLFLNNSLSGCLPYELGLLEKATVIDAGTNQLTGTIPASFACLRKVEQLNLADNLLYGEVPDALCRLAFGRLKNLTLSGNYFTSLGSCCWDLIKEGRLNVDRNCIQWAPNQRSHEECAKFQRQTKSCPVNSYLPCRPKYRGSGEPAGAAARAAEEEEDAAAEYRYRTYSALHP

SEQ ID NO: 108309 - protein, 69 aa, Setaria italica
  Transcript Sequence Number=SeqID_42335
LDQNTMLKDECSKLEAAGKLLTSKADELRKELSVWRRVHRSLTDELQFYNGLEGLRRGGHLSNPGVGFI

SEQ ID NO: 108310 - protein, 160 aa, Setaria italica
  Transcript Sequence Number=SeqID_42336
  Gene Ontology: Mol. function=nutrient reservoir activity; Cellular component=extracellular region; Biological process=oxidation reduction
  Homolog annotation: Hit_ID=Q851K1; Match level="QueryCoverage=100%, HitCoverage=69%, E-value=5e-80, Identity=90%"; Hit description =Germin-like protein 3-6
  Pfam annotation: Domain name=Cupin_1; Domain location=1-150; Score =152.9; E_value=9.4e-43; Accession=PF00190.14; Description=Cupin
  Pfam annotation: Domain name=Cupin_2; Domain location=34-112; Score =54.2; E_value=5e-13; Accession=PF07883.3; Description=Cupin domain
  Pfam module annotation: Pfam domain module=Cupin_1::Cupin_2; Domain location=1-150::34-112
SSGGDTLANPNGSNVTELDVNEWPGLNTLGVSMNRVDFAPGGTNPPHVHPRATEVGIVTRGELLVGIVGSLDSGNRYYSKVVRAGETFVIPRGLVHFQFNVGKEEATMVVSFNSQNPGIIFVPLTLFGSSPPIPTPVLVKALRVDAEVVELLKSKFTGGY

SEQ ID NO: 108311 - protein, 182 aa, Setaria italica
  Transcript Sequence Number=SeqID_42337
  Gene Ontology: Mol. function=oxidoreductase activity, acting on CH-OH group of donors
  Homolog annotation: Hit_ID=B6SXM3; Match level="QueryCoverage=100%, HitCoverage=23%, E-value=2e-84, Identity=86%"; Hit description =Oxidoreductase
  Pfam annotation: Domain name=GMC_oxred_N; Domain location=2-182; Score=190.0; E_value=6.8e-54; Accession=PF00732.11; Description=GMC oxidoreductase
SMEQLYEGGGFVSTLSGGALILAGSAVGGGTAVNWSACIKTPDEVRAEWARDQGIPLFATDEYAAAMDRVFERLGVTHGCNEEGLQNKVLRKGCEKLGYKVESVSRNSSEGHYCGSCGFGCRTGDKRGTDTTWLVDAVSHGAVILTGCKAEKLLLMERAGTGGADGRAKRCAGVVARSTNPA

SEQ ID NO: 108312 - protein, 261 aa, Setaria italica
  Transcript Sequence Number=SeqID_42338
  Gene Ontology: Mol. function=protein binding; Cellular component =membrane coat; Biological process=intracellular protein transport
  Homolog annotation: Hit_ID=B9S1S1; Match level="QueryCoverage=100%, HitCoverage=26%, E-value=1e-128, Identity=82%"; Hit description=AP-1 complex subunit gamma-2, putative
  Pfam annotation: Domain name=HEAT; Domain location=152-188; Score =26.7; E_value=9.8e-05; Accession=PF02985.14; Description=HEAT repeat
MEQLRTIGRELAMGSQGGWGQSKEFLDLVKSIGEARSKAEEDRIIARELEHLKRRLADPDVPRRKMKELLLRLVYAEMLGHDASFGHIHAVKMTHDESLPLKRTGYLAVALFLDERHDLVILVVNTIQKDLRSDNYLVVCAALTAACRLIGEEAIPAVLPQVVELLAHPKEAVRKKAVMALHRFYQRSPSSVSHLVSNFRKRLCDNDPGVMGATLCPLYDLILEEPNSYKDLVVSFVNILKQVAERRLPTSYDYHQMPAPF

SEQ ID NO: 108313 - protein, 166 aa, Setaria italica
  misc_feature (105)..(105): Xaa can be any naturally occurring amino acid
  Transcript Sequence Number=SeqID_42339
  Gene Ontology: Mol. function=binding
  Homolog annotation: Hit_ID=B9T6U7; Match level="QueryCoverage=100%, HitCoverage=64%, E-value=1e-34, Identity=34%"; Hit description =Pentatricopeptide repeat-containing protein, putative (Fragment)
  Pfam annotation: Domain name=PPR; Domain location=111-145; Score=3.2; E_value=3.7; Accession=PF01535.12; Description=PPR repeat
  Pfam annotation: Domain name=PPR; Domain location=41-75; Score=39.5; E_value=1.4e-08; Accession=PF01535.12; Description=PPR repeat
  Pfam module annotation: Pfam domain module=PPR::PPR; Domain location =111-145::41-75
  Subcellular localization annotation: CTP_CleavageSite=48; ConfidenceScore=5.01e-01
FARMPVKNIISWTAMLRALSDAGDFVGMRSLFNRMPERNLVSWNCILSCYTRHGRFRQALQMFPRMLLEGLIPDSFTVVSVLSASENLRKLRLGRWIHANLVNPXSMLMLTVGTALVGMYAMCGDIARAMVVFFKMDRKDVFSWNVMIRALAVHSQADDTFKLFDL

SEQ ID NO: 108314 - protein, 107 aa, Setaria italica
  Transcript Sequence Number=SeqID_42340
  Subcellular localization annotation: CTP_CleavageSite=50; ConfidenceScore=5.12e-01
QLNSVTPNISTDSAAPYTSRNCNVGTTYTELSVGRSRIVDCRFALLDCVLVSYSDNSLNAGCLAFLLNRCAVIFVPKNGSCNSFLNEWVRDSAYFIDRVENYSWLAE

SEQ ID NO: 108315 - protein, 106 aa, Setaria italica
  misc_feature (12)..(12): Xaa can be any naturally occurring amino acid
  Transcript Sequence Number=SeqID_42341
  Homolog annotation: Hit_ID=B6TD02; Match level="QueryCoverage=88%, HitCoverage=32%, E-value=3e-36, Identity=81%"; Hit description=RNA -binding protein containing a PIN domain
  Pfam annotation: Domain name=DUF901; Domain location=1-104; Score =22.8; E_value=4.3e-10; Accession=PF05991.3; Description=Protein of unknown function (DUF901)
MILSEVKVVVVXDAANSGVSTHKETYKGVDVVYSADLSADSWIEKEVEALVADGCPKVWVVTSDALEQQLAHGEGALIWSSKRLVKEIKESEKELDLELKETRSTS

SEQ ID NO: 108316 - protein, 53 aa, Setaria italica
  Transcript Sequence Number=SeqID_42342
MQVEALVADGCPKVWVVTSDALEQQLAHVTTHTLVADGCPKVWVVTSVAPMHQ

SEQ ID NO: 108317 - protein, 120 aa, Setaria italica
  Transcript Sequence Number=SeqID_42343
  Homolog annotation: Hit_ID=B6TD02; Match level="QueryCoverage=92%, HitCoverage=38%, E-value=2e-44, Identity=82%"; Hit description=RNA -binding protein containing a PIN domain
  Pfam annotation: Domain name=DUF901; Domain location=2-110; Score =25.4; E_value=2.7e-10; Accession=PF05991.3; Description=Protein of unknown function (DUF901)
QANLFSSNRVDVVYSADLSADSWIEKEVEALVADGCPKVWVVTSDALEQQLAHGEGALIWSSKRLVKEIKESEKELDLELKETRSTSLQGKILQHKLNPKVVHALKGLRNKLEEQERRKK

SEQ ID NO: 108318 - protein, 104 aa, Setaria italica
  Transcript Sequence Number=SeqID_42344
AGRDCVPRQRNSIVAFQSKTGVEVCTFSLILKNAASLLTKKDPLKVEADTRLGDLIQSFSDLGTIVENSNFELTGDREKMKDGVLSSISALDKFEQSVKDCLGV

SEQ ID NO: 108319 - protein, 59 aa, Setaria italica
  Transcript Sequence Number=SeqID_42345
NHSFSPCSMLLKKKEKKKENIRSSLKKKSELDTLRISILCFFFSDIFSIFKAQFFSLDV

SEQ ID NO: 108320 - protein, 85 aa, Setaria italica
  Transcript Sequence Number=SeqID_42346
TIIALTEKMCFLDDFIMVSTISVVSLSGIRCLVLLSGGQTLSSCIVFVFLTGAVCLQVNTESGPPRRRMAFLEQPQIGLEPCCFC

SEQ ID NO: 108321 - protein, 189 aa, Setaria italica
  Transcript Sequence Number=SeqID_42347
  Gene Ontology: Mol. function=isomerase activity; Cellular component =mitochondrial inner membrane; Biological process=metabolic process
  Homolog annotation: Hit_ID=B6TLK7; Match level="QueryCoverage=94%, HitCoverage=70%, E-value=2e-82, Identity=86%"; Hit description =Fumarylacetoacetate hydrolase domain-containing protein 1
  Pfam annotation: Domain name=FAA_hydrolase; Domain location=1-181; Score=147.9; E_value=3.2e-41; Accession=PF01557.10; Description =Fumarylacetoacetate (FAA) hydrolase family
PPPPIEIPEPLESLHHEVELGVVISRRGRDVPEASAMDFVGGYALALDMTARDLQSAAKSAGLPWTLAKGQDTFTPISAVTLAKGYDTFTPVSAVIPKSAVTNPDDLELWLKVDDELRQKGSTNDMLFKIPFLISYISSIMTLMEGDVILTGTPEGVGPVRVGQKIKAGITDLIDVEFDVQRRNRTFSA

SEQ ID NO: 108322 - protein, 262 aa, Setaria italica
  Transcript Sequence Number=SeqID_42348
  Gene Ontology: Mol. function=isomerase activity; Cellular component =mitochondrial inner membrane; Biological process=metabolic process
  Homolog annotation: Hit_ID=B6TLK7; Match level="QueryCoverage=81%, HitCoverage=92%, E-value=1e-115, Identity=94%"; Hit description =Fumarylacetoacetate hydrolase domain-containing protein 1
  Pfam annotation: Domain name=FAA_hydrolase; Domain location=49-254; Score=271.3; E_value=2.3e-78; Accession=PF01557.10; Description =Fumarylacetoacetate (FAA) hydrolase family
  Subcellular localization annotation: CTP_CleavageSite=61; ConfidenceScore=5.40e-01
SELETICFSVISTSSTPPRLRSTTKNKKIKKTLPAMASAAAQRLLASSTKIIGVGRNYVAHAKELGNPVPKEPVLFLKPTSSFLHAGVSTAAIEIPEPLESLHHEVELGVVISRRGRDVPEASAMDFVGGYALALDMTARDLQSAAKSAGLPWTLAKGQDTFTPISAVIPKSAVTNPDDLELWLKVDDELRQKGSTNDMLFKIPFLISYISSIMTLMEGDVILTGTPEGVGPVRVGQKIKAGITDLIDVEFDVQRRNRTFSA

SEQ ID NO: 108323 - protein, 187 aa, Setaria italica
  misc_feature (8)..(8): Xaa can be any naturally occurring amino acid
  Transcript Sequence Number=SeqID_42349
  Gene Ontology: Mol. function=hydrolase activity
  Homolog annotation: Hit_ID=B9S6E3; Match level="QueryCoverage=92%, HitCoverage=45%, E-value=5e-50, Identity=57%"; Hit description =Alpha/beta hydrolase, putative
AGQFADPXNKPAAAPAEEEEESSPLSRFVVKPLKEAFQRVVLGFLFWQSKQPARVEKVLKSVYIDSSNVDEYLIGSITAPAADPNAGEVYYRLMSRFMSNQSRYTLDRLLGKLACPLLLLWGDLDPWVGPAKAARIQEFYADTAVVHLQAGHCPHDEAPEQANRALLEWLAAIDARAKPAEPSLQTV

SEQ ID NO: 108324 - protein, 259 aa, Setaria italica
  Transcript Sequence Number=SeqID_42350
  Gene Ontology: Mol. function=hydrolase activity
  Homolog annotation: Hit_ID=B9S6E3; Match level="QueryCoverage=86%, HitCoverage=57%, E-value=4e-76, Identity=63%"; Hit description =Alpha/beta hydrolase, putative
  Subcellular localization annotation: CTP_CleavageSite=52; ConfidenceScore=5.41e-01
MPVASVAALRTAGGSGRCRGAGSPQVGLNGGRFLMMQRRELVTKAGIALAVSCSMATSSPASANGSAQGLEVLPFKPDGYNFWTWRGRRIHYVEQGAGQPIVLIHGFGASAFHWRYNIPELAKKYKVYAIDLLGFGWSEKALVDYEATIWMEQVSDFLREIVKEPAVLVGNSLGGFTTLFAATEVPELVRGVVLLNSAGQFADPNKPAAAPAEEEEESSPLSRFVVKPLKEAFQRVVLGFLFWQSKQPARVEKVLKSVT

SEQ ID NO: 108325 - protein, 97 aa, Setaria italica
  Transcript Sequence Number=SeqID_42351
MVLARKKLKQKLHTLLPAGEAEVEAHGEEAQAVKERLASSKRPRPKRPPRKKSLPEVVCQTEEEGKEEVERRREERRKEKKEKRRIRRLMEAEAAAS

SEQ ID NO: 108326 - protein, 63 aa, Setaria italica
  Transcript Sequence Number=SeqID_42352
  Gene Ontology: Mol. function=substrate-specific transmembrane transporter activity; Cellular component=integral to membrane; Biological process=transmembrane transport
  Homolog annotation: Hit_ID=Q2V4B9-2; Match level="QueryCoverage=93%, HitCoverage=16%, E-value=8e-14, Identity=62%"; Hit description =Isoform 2 of Probable plastidic glucose transporter 3
NPQIVNFFVSLLFLRLLEQLGPQVLYTIFSSVCVVAAIFVRRHILETKGKTLQEIEVSLLQAQ

SEQ ID NO: 108327 - protein, 480 aa, Setaria italica
  Transcript Sequence Number=SeqID_42353
  Gene Ontology: Mol. function=substrate-specific transmembrane transporter activity; Cellular component=integral to membrane; Biological process=transmembrane transport
  Homolog annotation: Hit_ID=Q8GTR0; Match level="QueryCoverage=99%, HitCoverage=99%, E-value=1e-173, Identity=64%"; Hit description =Sugar transporter
  Pfam annotation: Domain name=MFS_1; Domain location=49-427; Score =75.8; E_value=1.5e-19; Accession=PF07690.8; Description=Major Facilitator Superfamily
  Pfam annotation: Domain name=Sugar_tr; Domain location=45-476; Score =311.1; E_value=2.3e-90; Accession=PF00083.16; Description=Sugar (and other) transporter
  Pfam module annotation: Pfam domain module=MFS_1::Sugar_tr; Domain location=49-427::45-476
MRWKLNSSAYKRVPSREATMEPDVETPMRTTDAGAGPSWRMSLPHVCVATLTSFLFGYHSGVVNEPLESISADLGFSGNTFAEGLVVSICLGGAFIGCLFSGSVADGIGRRRAFQLSALPMIIGAAISALTNSLEGMLLGRFLVGTGMGLGPPVASLYITEVSPPTVRGTYGSFVQIATCLGIIVSLLIGTPVKDIDRWWRVCFWVAAIPATLQALAMEFCAESPQWLYKCGRTIEAEMQFEKLLGPLHVKSAMAELSRSERDDGESVKYSELFNGRHFNVVFIGSVLFALQQLSGINSVFYFSSTVFRGVGVPSNFANICMGISNLAGSIIAMVLMDKLGRKMLLSGSFLGMAFSMGLQAIGANRHLGSTSVYLSVGGILLFVLSFSLGAGPVPGLLLPEIFPNKIRAKAVALCMSVHWIVNFFVSLLFLRLLEQLGPQVLYTIFSSVCVVAAIFVRRHILETKGKTLQEIEVSLLQAQ

SEQ ID NO: 108328 - protein, 64 aa, Setaria italica
  Transcript Sequence Number=SeqID_42354
YSAIWDLLFTWMLLLMSFHLPFAYLFVVSYIFYSHLMWYSVGNILLCIFILYSVLCAESCTIII

SEQ ID NO: 108329 - protein, 650 aa, Setaria italica
  misc_feature (622)..(622): Xaa can be any naturally occurring amino acid
  Transcript Sequence Number=SeqID_42355
  Gene Ontology: Mol. function=protein serine/threonine kinase activity; Biological process=protein amino acid phosphorylation
  Homolog annotation: Hit_ID=B9SJP9; Match level="QueryCoverage=74%, HitCoverage=42%, E-value=1e-55, Identity=35%"; Hit description =Serine/threonine protein kinase, putative
LDALVSVVNDDDVVNMMEEYDKVIASGEVFTRLRIFLFSQNLDDDAASAVVHYNVDERETERRYVDALNNLGDVNTPSSPVSVEQLFGIVGNDSGIPDFAGLRHLNVPRPSQSQRYGEMDSPWSPAYVSPGQYAVHDPRDFPVSPSSARFQVGAEDFDERTPDDFVRQSPKYRHYEAQSPPHMDNLVWLPPGAVIQQNAGFPGNLSRSNNFLDGNSVGEHGRLPFQQGQGSMTDPRYMDPRWTRPAQQHFDQPSMTNEYPGHPSNSCSNCYRSGEHYMGGQDIRMENGVYVKEQNGGHPPMFYNESHLHDRVWHAHTSQSHQRYEDPRLHLPGNGRVIEPYIVDTNPVNSVFAPNKVYEMHSATLGRSSHESPHYFHGSCELINDTYHNQQVGGSGSYVQPAGFEESPGQHYNHSSTYGADSFYQMQQNLPPIQSLRRRANSPVHAGSPYDSPHLPMPNGSIPMPNGSINTNFVRNTGDVSPRIPGLPAYERMPNPWAPPNGSIPYRVVGHDVPAAMESTSALGPRSNPITAQYVQPFIAPESVQHQHGAPSREVNPERAYADHIPPPYVDGRVAVSALPLTDQLSRLDTNTIKKPEGPEYDNSTRNVNEGTPLHAVDETNXLPRHVGAVHEVDPKQKPTEHEIRTKQLE

SEQ ID NO: 108330 - protein, 271 aa, Setaria italica
  misc_feature (12)..(12): Xaa can be any naturally occurring amino acid
  misc_feature (21)..(21): Xaa can be any naturally occurring amino acid
  misc_feature (34)..(34): Xaa can be any naturally occurring amino acid
  misc_feature (220)..(220): Xaa can be any naturally occurring amino acid
  Transcript Sequence Number=SeqID_42356
  Homolog annotation: Hit_ID=Q7FSP8; Match level="QueryCoverage=98%, HitCoverage=65%, E-value=4e-56, Identity=46%"; Hit description=X1 (Fragment)
  Pfam annotation: Domain name=XH; Domain location=133-271; Score =108.4; E_value=2.5e-29; Accession=PF03469.6; Description=XH domain
RLAALEQQKADXNVMKIMENXKREKEAVMKSSRXLSIQSEKKLNLELNIKHLMGKLQVMELKPGDEDSESGKRIDELREELSEKITELNDVESFNQTLIAKESKNSDELREARDVLIDALQGLSGATSSQTQIGIKRIGELDSKVFLNMCKRKFSAEDAEVESAILCSKWQKEISNPEWNPFKAIMVDGNTLEAIREDDKKLLELKECSEEAYAAVTKAXEVRLKDVNGRRRDPFPELWNYEEGLKAQTTEAVRYALKLWNASKVKGKRRR

SEQ ID NO: 108331 - protein, 249 aa, Setaria italica
  misc_feature (103)..(103): Xaa can be any naturally occurring amino acid
  misc_feature (137)..(137): Xaa can be any naturally occurring amino acid
  Transcript Sequence Number=SeqID_42357
  Homolog annotation: Hit_ID=Q9XGZ7; Match level="QueryCoverage=89%, HitCoverage=50%, E-value=1e-69, Identity=57%"; Hit description =T1N24.19 protein
  Pfam annotation: Domain name=DUF266; Domain location=1-234; Score =376.8; E_value=3.8e-110; Accession=PF03267.6; Description =Arabidopsis protein of unknown function, DUF266
HAMPGYHRPDDFPPSSPFHRRQVPSQVVEWGEVSMVDAERRLLANALLDPANERFVLVSESCIPLFGFPVVYDYLTRSRQSFVSSYDDTGPGGRGRYPGGLAXPEVSLEQWRKGSQWFEMDRALAVVVVADERYYPXKFREHCIPTCYTDEHYVQTVLSIEAQGRVANRSVTWTDWSWGGAHPATFWEAHVDEAFLKRLTTKAGQGNCTYNGRTSELCFLFARKFAPNALQPLVFYPSSYPKVNLVLLG

SEQ ID NO: 108332 - protein, 148 aa, Setaria italica
  Transcript Sequence Number=SeqID_42358
  Gene Ontology: Mol. function=nucleotide binding; Cellular component =endoplasmic reticulum lumen; Biological process=response to stress
  Homolog annotation: Hit_ID=Q40924; Match level="QueryCoverage=75%, HitCoverage=16%, E-value=2e-46, Identity=75%"; Hit description =Luminal binding protein
MAPGRVWTLLFALLLADLVAPIHAAAPSHGGGGDKNTGTVIGIDLGTTYSCVGVYRNGHVEIIANDQGNRITPSWVAFTDGGERLIGEAAKNQAAANPERTIYDAKRLIGRQFDDAVVQRDMKLLPYAVVDRNGKPHMRVQVRDGDVR

SEQ ID NO: 108333 - protein, 94 aa, Setaria italica
  Transcript Sequence Number=SeqID_42359
  Gene Ontology: Mol. function=metal ion binding
  Homolog annotation: Hit_ID=B9S1H3; Match level="QueryCoverage=60%, HitCoverage=7%, E-value=2e-09, Identity=49%"; Hit description =Synaptonemal complex protein, putative
  Pfam annotation: Domain name=zf-C3HC4; Domain location=39-78; Score =5.7; E_value=0.023; Accession=PF00097.17; Description=Zinc finger, C3HC4 type (RING finger)
  Subcellular localization annotation: CTP_CleavageSite=41; ConfidenceScore=5.20e-01
RNVTKRTKTRPNTKKDQPSRHPNRPLPQPAQKPSRRRDCVVCKKEAAVVILLQCAHQVLCVGCNKLQEDKGVVRCPSCSAKIEERIRVFGASTN

SEQ ID NO: 108334 - protein, 588 aa, Setaria italica
  misc_feature (63)..(63): Xaa can be any naturally occurring amino acid
  Transcript Sequence Number=SeqID_42360
  Gene Ontology: Mol. function=metal ion binding
  Homolog annotation: Hit_ID=B9S1H3; Match level="QueryCoverage=96%, HitCoverage=81%, E-value=3e-63, Identity=42%"; Hit description =Synaptonemal complex protein, putative
  Pfam annotation: Domain name=zf-C3HC4; Domain location=533-572; Score= 5.7; E_value=0.023; Accession=PF00097.17; Description=Zinc finger, C3HC4 type (RING finger)
LLKRLDEAYAAALARLADLGHSEEASLEAVLRAGHCYGKLNDPVSNIVANARTYLSDPGHAGXGGFADLRRLEEYSLAGLVCLLQSSRPTLTRAEALWCLLSSDLRLEEAIAIGCSLNGKPVPAAAPAESEELPPPVAETPQRGHIHYNNTTAAAAQDPALFDPETFMRLAIHQGPAAATMSCLKAAGWSRSSGAAVEGQPKESFAKKLSTEELIESVVVELEALDIDKKDPTDANPDPKNQMVRDLIKQTREMEAQLKERREWAQGKAIQAARKLGADLTELRVLRMEHDENQRRKKEKQVMEDDTIKRLAHLENELKKKSGQLDRSNATVQRLEMENAEIRAEMEAAKLSASETERQCQGLLRKEKKDTKKLEVWERQKAKLKEDIAECKTKITQAERELSEVKKAIKNMEIKIREDTRAKEENVALLEEERRKKEAAKADSDRRLEELRRKKEVESQCYKDDLRRLQDELNRLQKSTGTNQPAVASTNPPGMTNRSTARTSKQQPIQRPPAASNRPLPQPAQKPSRRRDCVVCKKEAAVVILLQCAHQVLCVGCNKLQEDKGVVRCPSCSAKIEERIRVFGASTN

SEQ ID NO: 108335 - protein, 148 aa, Setaria italica
  Transcript Sequence Number=SeqID_42361
  Homolog annotation: Hit_ID=B6T2Z5; Match level="QueryCoverage=84%, HitCoverage=54%, E-value=1e-64, Identity=92%"; Hit description =Cyclase/dehydrase
  Pfam annotation: Domain name=Polyketide_cyc; Domain location=41-147; Score=50.8; E_value=5.1e-12; Accession=PF03364.12; Description =Streptomyces cyclasedehydrase
GEGRSGISISSSSSRARARARPALFSPVAMEWQECTTELEVDVPCSVAYQCYSERESIPQWMPFISSVKVLEDKPDLSRWSLKYEVFGRNVEFSWLARNMTPTKNQKIHWRSLEGLPNRGAVRFFPKSPSSCRVQLTVAYEIPEILAP

SEQ ID NO: 108336 - protein, 163 aa, Setaria italica
  misc_feature (136)..(136): Xaa can be any naturally occurring amino acid
  misc_feature (157)..(157): Xaa can be any naturally occurring amino acid
  Transcript Sequence Number=SeqID_42362
  Homolog annotation: Hit_ID=Q5W7D1; Match level="QueryCoverage=86%, HitCoverage=25%, E-value=4e-33, Identity=51%"; Hit description =Unknow protein
KVGSMRRQSKEEYSLAAYTEKTKVASTSHDEVMPIYSSLHSAGPSVSRKARKHLSERWQMACQSGSENSIPKGITTLGEMLGLSDGDAPKETSHKGSSDPNFSRSNLREVPASPLGISSKDGWKTWIYCEDDSRGXMSRNFPRSKSLPASLTTSTKXSSRRQS

SEQ ID NO: 108337 - protein, 76 aa, Setaria italica
  Transcript Sequence Number=SeqID_42363
FSGFQMPGNRQRKKLICVTRWFSENKQLNYILHHFVLYIFLIETSLKKVRTSSDSAPCSRNYSPRPHILPGTVHHT

SEQ ID NO: 108338 - protein, 71 aa, Setaria italica
  Transcript Sequence Number=SeqID_42364
  Gene Ontology: Mol. function=protein serine/threonine kinase activity; Biological process=protein amino acid phosphorylation
  Homolog annotation: Hit_ID=Q8S1Y6; Match level="QueryCoverage=100%, HitCoverage=11%, E-value=1e-27, Identity=83%"; Hit description =Putative CRK1 protein
  Subcellular localization annotation: CTP_CleavageSite=52; ConfidenceScore=5.47e-01
KMPSVIFGHMKSYLNSPKKGMQKAKPSLNMAPSTVLIGAFRPYSLGHPMEVRRKNREQFRGKGRNVVGAVK

SEQ ID NO: 108339 - protein, 506 aa, Setaria italica
  Transcript Sequence Number=SeqID_42365
  Gene Ontology: Mol. function=protein serine/threonine kinase activity; Cellular component=plasma membrane; Biological process =protein amino acid phosphorylation
  Homolog annotation: Hit_ID=Q8S1Y6; Match level="QueryCoverage=96%, HitCoverage=88%, E-value=0.0, Identity=77%"; Hit description =Putative CRK1 protein
  Pfam annotation: Domain name=APH; Domain location=15-211; Score= -11.1; E_value=0.013; Accession=PF01636.15; Description =Phosphotransferase enzyme family
  Pfam annotation: Domain name=Pkinase; Domain location=13-300; Score =304.8; E_value=1.8e-88; Accession=PF00069.17; Description=Protein kinase domain
  Pfam annotation: Domain name=Pkinase_Tyr; Domain location=13-262; Score=33.6; E_value=5.8e-16; Accession=PF07714.9; Description =Protein tyrosine kinase
  Pfam module annotation: Pfam domain module=APH::Pkinase::Pkinase_Tyr; Domain location=15-211::13-300::13-262
ALRGWAPRGADAFQKLEKIGSGTYSNVYKAIDVESGRVVALKKVRVDGVGEAESARFMAREIALLRRLGDHPHVVRLEGLVTSRLNTAPSLYLVFEYMEHDLTGLTACATASGRRLSLPQVKCYMKQLLSGIEHCHNNGVLHRDIKSSNLLVSSDGILKIADFGLATSYDPDNMQPMTSQVITLWYRPPELLLGATHYGVGVDLWSVGCILAELLLGEPIFPGRTEVEQLHKIFKLCGTPSEDYWEKMKFAHPTFKPYERCLAEKFKDVPPSTLSLLETLLSIDPDMRGTATDALNSEFFRTEPYACEPSSLPRYPPCKERDVKLKYEKHKRKSRVNGSVERHKNRQHASQNPGRRVFTPDVNNKPQANPKVPRLVTSTSTTKLERFPPPHLDASIGYSLDSSADGTTEEFFTSSVVELKKMPSVIFGHMKSYLNSPKKGMQKAKPSLNMAPSTVLIGAFRPYSLGHPMEVRRKNREQFRGKGRNVVATAFDNCLTDYSFFFCPFL

SEQ ID NO: 108340 - protein, 387 aa, Setaria italica
  Transcript Sequence Number=SeqID_42366
  Gene Ontology: Mol. function=protein binding; Cellular component =protein complex; Biological process=cell adhesion
  Homolog annotation: Hit_ID=Q9Y2D8; Match level="QueryCoverage=76%, HitCoverage=49%, E-value=3e-25, Identity=27%"; Hit description =Afadin- and alpha-actinin-binding protein
MSSSARFDLRASSQHLQPPPSGMSDGGAFANAGNLEHCARYLNQTLVTFGFPASLDLFATDPVSIARTCNCIYALLQQRQRDIEFRESTNDLRQRMQSDISRLEAKIERMDAQLAAKDRELATLTRTEAKNTAALKSQIDKLQQERDEFQKMVIGNQQVRTQQLHEMKKKEKEYIKLQEKLNQVLMEKKKESSRSGMEIMNLLQKEGRQRGTWNGKKNDNDYYKMIVDAYEVKKQELMQENADLRALLRSMQMDMREFLNAPNGSSQPTVAANGRKEAGSPQSPLGGKTDVFDLPFHMARDQIEESLRTKMASIKARMTQLQDAQKGAEVTSEATERELELEAQLVEARSIIQEQASIMSKHFTKSDKPSGRRHSSLDSEREASAEV

SEQ ID NO: 108341 - protein, 105 aa, Setaria italica
  Transcript Sequence Number=SeqID_42367
  Gene Ontology: Mol. function=magnesium ion binding; Cellular component=chloroplast; Biological process=photosynthesis, light harvesting
  Homolog annotation: Hit_ID=B6SZR1; Match level="QueryCoverage=100%, HitCoverage=44%, E-value=4e-39, Identity=76%"; Hit description =Chlorophyll a-b binding protein 4
  Pfam annotation: Domain name=Chloroa_b-bind; Domain location=55-105; Score=-11.7; E_value=0.00018; Accession=PF00504.13; Description =Chlorophyll A-B binding protein
  Subcellular localization annotation: CTP_CleavageSite=43; ConfidenceScore=5.61e-01
MASVTARTPVAALRPSASLRSSAFVGHSSRLGRAAAPTRRSLRAEAKGEWLPGLPSPAYLDGSLPGDNGFDPLGLAEDPENLRWFVQAELVNGRWAMLGVAGMLI

SEQ ID NO: 108342 - protein, 284 aa, Setaria italica
  Transcript Sequence Number=SeqID_42368
  Gene Ontology: Mol. function=GTP binding; Cellular component =intracellular
  Homolog annotation: Hit_ID=Q9AY71; Match level="QueryCoverage=100%, HitCoverage=65%, E-value=1e-138, Identity=85%"; Hit description=GTP -dependent nucleic acid-binding protein engD, putative, expressed
  Pfam annotation: Domain name=YchF-GTPase_C; Domain location=200-283; Score=201.0; E_value=3.2e-57; Accession=PF06071.5; Description =Protein of unknown function (DUF933)
LGNQFLSNIREVDSILQVVRCFEDDDIVHVNGKVDPRSDIDVINLELIFSDLEQIEKRLDKLKKSKTKDAQVKVKEQAEKTGLEKIQEALMDGKPARSVDLADHEKEAIQHLCLLTMKPVIYVANVTESDLAEPDSNPHVKEVAKAASDLESGIVTISAQVEAELAELPLEERVEYLKSLGVAASGLGNLVKATYDLLGLRTYFTTGDKETKAWTILSGMTAPQAAGVIHSDFQKGFIRAETVSYDDFVAAGSLGAAREKGLLRLEGKDYVVQEGDVMLFRFNV

SEQ ID NO: 108343 - protein, 134 aa, Setaria italica
  Transcript Sequence Number=SeqID_42369
  Gene Ontology: Mol. function=protein dimerization activity
  Homolog annotation: Hit_ID=Q8LNK9; Match level="QueryCoverage=98%, HitCoverage=16%, E-value=5e-17, Identity=41%"; Hit description=HAT family dimerisation domain containing protein
HIRNMSAAMIEKYDKYWADIHGLMAVAVILDPRLKMTMLHACYIALFGEEAAGKYVTEAQELLTSLMKHYHVTDQDNVATSSAGAPSTVSAAAVLSIFKTLTANKRTTSFVRSKNELDRYLEEETLPHDENNYF

SEQ ID NO: 108344 - protein, 202 aa, Setaria italica
  misc_feature (55)..(55): Xaa can be any naturally occurring amino acid
  Transcript Sequence Number=SeqID_42370
  Gene Ontology: Mol. function=protein dimerization activity
  Homolog annotation: Hit_ID=Q7XD60; Match level="QueryCoverage=89%, HitCoverage=51%, E-value=1e-27, Identity=44%"; Hit description=HAT family dimerisation domain containing protein
  Pfam annotation: Domain name=hATC; Domain location=74-155; Score =109.9; E_value=8.4e-30; Accession=PF05699.6; Description=hAT family dimerisation domain
GVGAANMLLKGKWLHMRCCAHILNLIVKDGMAVIGTAVAHIRESVAYWIATPKRXDNVATSSAGAPSTVSAAAVLSIFKTLTANKRTTSFVRSWWKLEGARYPTLRLIARDILAIPITTVASESAFSTSGRVLSEHRSRLTPKMLEALMCSQSWLRHNLKDEGDGRFNTFWSCLEDNEEDLKDEYCITRADSDLIYLFHCTS

SEQ ID NO: 108345 - protein, 54 aa, Setaria italica
  Transcript Sequence Number=SeqID_42371
  Gene Ontology: Cellular component=mitochondrion
  Homolog annotation: Hit_ID=B9RGM1; Match level="QueryCoverage=100%, HitCoverage=9%, E-value=1e-12, Identity=61%"; Hit description =Pentatricopeptide repeat-containing protein, putative
  Pfam annotation: Domain name=PPR; Domain location=11-45; Score=28.6; E_value=2.6e-05; Accession=PF01535.12; Description=PPR repeat
MKTGGWTPGSSVYNSLVYVLTRENCMKDAHNIFSKLIDEGLQPDVETYNNMIIP

SEQ ID NO: 108346 - protein, 247 aa, Setaria italica
  misc_feature (24)..(24): Xaa can be any naturally occurring amino acid
  Transcript Sequence Number=SeqID_42372
  Gene Ontology: Mol. function=binding; Cellular component=mitochondrion
  Homolog annotation: Hit_ID=B9RGM1; Match level="QueryCoverage=86%, HitCoverage=39%, E-value=4e-58, Identity=51%"; Hit description =Pentatricopeptide repeat-containing protein, putative
  Pfam annotation: Domain name=PPR; Domain location=138-172; Score =10.7; E_value=0.49; Accession=PF01535.12; Description=PPR repeat
  Pfam annotation: Domain name=PPR; Domain location=173-207; Score =30.8; E_value=5.5e-06; Accession=PF01535.12; Description=PPR repeat
  Pfam annotation: Domain name=PPR; Domain location=2-36; Score=21.8; E_ value=0.0029; Accession=PF01535.12; Description=PPR repeat
  Pfam annotation: Domain name=PPR; Domain location=37-71; Score=28.6; E_value=2.6e-05; Accession=PF01535.12; Description=PPR repeat
  Pfam annotation: Domain name=PPR; Domain location=72-106; Score=20.4; E_value=0.0073; Accession=PF01535.12; Description=PPR repeat
  Pfam module annotation: Pfam domain module=PPR::PPR::PPR::PPR::PPR; Domain location=138-172::173-207::2-36::37-71::72-106
GISYTLMVSCFSKVGNLFDTLRLXCEIKKRGWTPGSSVYNSLVYVLTRENCMKDAHNIFSKLIDEGLQPDVETYNNMIIPLCERCKLDDARIVMESMILKGIVPTISTYHAFLKQEGIDESLKLLRKMKEDGCGPNSDTFLMLMDKFFVLNESGNVLRVWNEMRKYDISPARSHYMTLVQGLVEHGCIPRALEYYDEMKEKGFASDSQLEKEFKTFLLANRDHWRGAGKYNIIPQRGKHFTRRSRTQ

SEQ ID NO: 108347 - protein, 139 aa, Setaria italica
  Transcript Sequence Number=SeqID_42373
RLDAIQGGDSMIREGKRAVSRELTRILEFVDKVLVKEHEQVAMGDALGASEYHEGCSASFVGGRPSVSKKKVSFSGNGQVHELNEETGDGNEVDEGSENSSSAESDEVKPNKRSANGKPGLAAPMPVHMESRRIADARR

SEQ ID NO: 108348 - protein, 57 aa, Setaria italica
  Transcript Sequence Number=SeqID_42374
LEFYEDGSVMLQVLLSHPDAILEDIEAIGRISWEAVMVDDCQNSRISKCLEQLKRLP

SEQ ID NO: 108349 - protein, 117 aa, Setaria italica
  Transcript Sequence Number=SeqID_42375
  Gene Ontology: Mol. function=microtubule motor activity; Cellular component=microtubule associated complex; Biological process =microtubule-based movement
  Homolog annotation: Hit_ID=Q69UI4; Match level="QueryCoverage=92%, HitCoverage=15%, E-value=9e-18, Identity=53%"; Hit description =Kinesin 1-like
  Pfam annotation: Domain name=TSC22; Domain location=47-97; Score=1.1; E_value=0.033; Accession=PF01166.10; Description=TSC-22dipbun family
FDPNSITDIEDDAFLQEQFLQEVYIFDPNSITDIDSACQDTASEEISLLMQAVEELKGTVEELTDENEKLRRELDVAREIAAQAQLAAAAAGAEARSRTLLDFVPAPLLLPFGFVPD

SEQ ID NO: 108350 - protein, 44 aa, Setaria italica
  Transcript Sequence Number=SeqID_42376
LSVRVSRLIITYEELANEPCHTCLKHKPWNNWWCTCRTDHGECL

SEQ ID NO: 108351 - protein, 136 aa, Setaria italica
  Transcript Sequence Number=SeqID_42377
FTCGAGGGGATDSSGEMWASDVGEVRMRDVLMATEFGPAPVGGAAAGTGGSGAAAEAAAADSGYGSEPGYRGDVELGYGDEIDEEEEDGRQQLFWGGVIGDMNKMRIGGDNNFGEQKSHHRCRRKKHDVRMLDSLR

SEQ ID NO: 108352 - protein, 270 aa, Setaria italica
  Transcript Sequence Number=SeqID_42378
  Gene Ontology: Mol. function=metal ion binding; Cellular component =integral to membrane; Biological process=metal ion transport
  Homolog annotation: Hit_ID=B9T4M0; Match level="QueryCoverage=99%, HitCoverage=71%, E-value=1e-91, Identity=67%"; Hit description =Urease accessory protein ureH, putative
  Pfam annotation: Domain name=NicO; Domain location=35-270; Score =128.5; E_value=2.2e-35; Accession=PF03824.8; Description=High -affinity nickel-transport protein
YSIPLTLVQPSWAPPALAHYHPTAKAGTTLFKSELLGSAWTGFLAGCLHTLSGPDHLAALAPLSIGRSRVESAVVGALWGCGHDAGQVIFGLLFLGLKDRLHIEIIRTWSTRVVALTLLVIGALGIREASEVPTPCVALDGGECDVGGVVDHRHHHHHTVGETLPGGKKKINFATFATGIVHGLQPDALMMVLPALALPSRVAGAAFLGMFLVGTVVSMGSYTVFIGSCTEALKDRIPRITEKLTWAASLLAISMGLAILVSQSFGITLY

SEQ ID NO: 108353 - protein, 626 aa, Setaria italica
  Transcript Sequence Number=SeqID_42379
  Homolog annotation: Hit_ID=Q2HSE5; Match level="QueryCoverage=97%, HitCoverage=78%, E-value=0.0, Identity=58%"; Hit description=IMP dehydrogenase/GMP reductase, putative
QQCDEACKIFAEYQRRLHQFVNQARDVRRSSIGVSGAAGAVEDMQLQSDREDLYSSTIKSNRLPEDLVETAGERSIRKACETLAADMIETIRSSFPAFEGSGINSSCQLDAAKLGIDLDGEIPTDVKAVALDSLKNPTLLLQSIITYTSRMKTLIHRETDKIDIRADAELLRYKYENEQVIDAASTDASSPLPYQVYGNGKNGSQLSTRGTYDQLLERQKEHVQQFLATEDALNKAAEAKALSQKLLQRLHGTIDMAGSKKLPTGNNSQNVTNSRHLELDVWAKEREVAGLKASLSTLTSEVQRLYKLCAEWKEAEDSLKKKWKKIEEFDARRSELECIYSALQRANMDASAFWEQQPLSARGYVSTTIIPACNAVVGMSTNSRDLIERELAAFGQSLDNSLCRLPATPQALLEAVGSSGVTGLEALAAAEKHAALLTARAGARDPSAVPSICRISAALQYNSVSPGTEGTDSGLASVLNSLEFCLKPCGSEASILEDLSKAINLVHTRRNLVENDRVLLNRAHRAQQEYERVANYCLKLAGEQEKVVSERWLPELRNAVQEARRCFEDCQRVRGLVDEWYEQPAATIVDWVTIDGQSVGAWINLVKQLHMEISRRTLAMSSVGDD

SEQ ID NO: 108354 - protein, 552 aa, Setaria italica
  misc_feature (14)..(14): Xaa can be any naturally occurring amino acid
  Transcript Sequence Number=SeqID_42380
  Gene Ontology: Mol. function=DNA (cytosine-5-)-methyltransferase activity; Cellular component=nucleus; Biological process=DNA methylation
  Homolog annotation: Hit_ID=O65343; Match level="QueryCoverage=99%, HitCoverage=36%, E-value=0.0, Identity=86%"; Hit description =Cytosine-specific methyltransferase
NHNPLKMSEIDDFXITALIMPMDDDLEKERERGVRCEGFGRIEDWNISGYDEGTAVVWVSTDVADYECVKPASNYKSYFDHFYEKAQVCVEVFKKLTRSVGGNPDQGLDELLASVVRSINAMKGYSGTMSKDLVISIGEFVYNQLVGLDQTSGNDDEKFATLPVLIALRDQCKSRVDLTKMPSNISNASLKIKDTECEEIPEDDDAKLARLLQQEEEWKMMKKQRGRRGTPSQKNVYIKISEAEIANDYPLPAYYKPANQEMDEYIFDGDDSIFSDDVPVRILNNWALYNADSRLISLELIPMKSGAENDVVIFGSGFMRDDDGSCCSTAESVKSSSSSSKADQSDAGVPIYLSPIKEWLIEFGGSMICITIRTDVAWYKLRQPTKQYAPWCEPVLKTARLAVSIITLLKEQSRASKLSFADVIKKVAEFDKGNPAFISSNVALVERYIVVHGQIILQQFADFPDETIRRSAFVSGLLLKMEQRQHTKLVMKKKTQVMRGENLNPSAAMGPASRRKVMRATTTRLINRIWSDYYAHHFPEDSKEGDGNETKE

SEQ ID NO: 108355 - protein, 306 aa, Setaria italica
  misc_feature (135)..(135): Xaa can be any naturally occurring amino acid
  Transcript Sequence Number=SeqID_42381
  Gene Ontology: Mol. function=cysteine-type peptidase activity; Cellular component=nucleus; Biological process=biosynthetic process
  Homolog annotation: Hit_ID=Q2QRK4; Match level="QueryCoverage=100%, HitCoverage=14%, E-value=1e-143, Identity=75%"; Hit description =Transposon protein, putative, CACTA, En/Spm sub-class
  Pfam annotation: Domain name=Transposase_21; Domain location=60-286; Score=460.5; E_value=2.4e-135; Accession=PF02992.6; Description =Transposase family tnp2
EYEKLDACPICEALRYKIRRDDPGDVKGQSPKKRVPAKVMWYFPIIPRLKRLFRNKANAKLMRWHKEYRKEDEMLRHPADGAQWRSIDRTFPDFESEARNIRFGLSTDGFNPFGELSSGHSTWPVTLCMFNLPPXLCMKRKFIMMPALIQGPKQPGNDIDVHLRPLVDDLLQLWKEEGVRVWDEDRQEIFNLRALLFVTINDWPALSNLSGQTNKGYRACTHCLDDTDSMYLKHCKKVVYMGHRRFLPAHHQLRKSGMHFKGTPDHRKKPAHRNGKRVFEMMKDVHVVFGKGLGSQPVPNDDNGHA

SEQ ID NO: 108356 - protein, 44 aa, Setaria italica
  Transcript Sequence Number=SeqID_42382
RMISFLLYRLSMVLLFELVEDLQFLSKAEEEKHRTLLFCYLIIC

SEQ ID NO: 108357 - protein, 122 aa, Setaria italica
  Transcript Sequence Number=SeqID_42383
  Gene Ontology: Mol. function=hydrolase activity; Cellular component =cytoplasm; Biological process=protein amino acid phosphorylation
  Homolog annotation: Hit_ID=Q6K4D8; Match level="QueryCoverage=95%, HitCoverage=37%, E-value=2e-62, Identity=95%"; Hit description =Hydrolase-like protein
GLRTVDAVIITHSHADAIGGLDCLRDWTNNVQPSIPIYVAERDYEVMKMTHYYLIDTSVVIPGAAVSALQFNIIKEEPFTVHNLEVIPLPVWHGQGYRSLGFRFADICYISDVSDIPVSKPY

SEQ ID NO: 108358 - protein, 255 aa, Setaria italica
  Transcript Sequence Number=SeqID_42384
  Gene Ontology: Mol. function=protein disulfide oxidoreductase activity; Biological process=cell redox homeostasis
  Subcellular localization annotation: CTP_CleavageSite=15; ConfidenceScore=5.10e-01
MGCTGSRHALRGGVRGGGGRSPYARSCSGPVTGSVHHTVALKSSTLGSLSLDRDEEMMKWRDDGGVGAAKTPPVKQQLMVRRQKQVPGSPAKTPVREPEVINVWELMDGLDDKEEEDGDAADGEDRREKSAPGSPEFDPDVIAAFRKALDEISPPPADPGNEDCVSNKKPDGLVGGEDGVKKREIQRFPGIVRARVSAFQQRIDAKLAKLAPPKPPAPPPPPDSARKVVLYLTSLRGIRKTYEDCWSTRSILHGY

SEQ ID NO: 108359 - protein, 70 aa, Setaria italica
  misc_feature (14)..(14): Xaa can be any naturally occurring amino acid
  Transcript Sequence Number=SeqID_42385
  Gene Ontology: Mol. function=RNA-directed DNA polymerase activity
  Homolog annotation: Hit_ID=Q7XT98; Match level="QueryCoverage=85%, HitCoverage=14%, E-value=1e-10, Identity=59%"; Hit description =OSJNBa0052O21.12 protein
PLPSNLFFADDSIXFFAKSDLSVKALKSTLQTYCEGSGQKINFSKSSVFFEAHSSEGTENKGSVHLSYNF

SEQ ID NO: 108360 - protein, 135 aa, Setaria italica
  misc_feature (68)..(68): Xaa can be any naturally occurring amino acid
  Transcript Sequence Number=SeqID_42386
  Gene Ontology: Mol. function=protein binding
  Homolog annotation: Hit_ID=Q69VA2; Match level="QueryCoverage=94%, HitCoverage=7%, E-value=2e-52, Identity=75%"; Hit description =Putative leucine rich repeat protein
PHVFLITFLSEPLKIETLVFKGNQVERETLTVVEQIPSNEIQQHIWNNYKKEMKYQWFVSIGSGEDQXFEPLATQCSRSYKVRFEDIGRCLKCECFATDVFGRSSELVSAVTTTIAPGRPKIEKLEIEGRRFYNN

SEQ ID NO: 108361 - protein, 89 aa, Setaria italica
  Transcript Sequence Number=SeqID_42387
  Gene Ontology: Mol. function=selenium binding; Cellular component =cytoplasm; Biological process=protein transport
  Homolog annotation: Hit_ID=B6TFC2; Match level="QueryCoverage=98%, HitCoverage=19%, E-value=1e-38, Identity=86%"; Hit description =Selenium-binding protein
  Pfam annotation: Domain name=SBP56; Domain location=1-89; Score= -303.9; E_value=0.015; Accession=PF05694.3; Description=56kDa selenium binding protein (SBP56)
LDSEFNVKGRWEKPGHSPLFGYDFWYQPRHKTMISSTWGAPAAFRTGFDLQHVQDGLYGRHLHVYDWPGGELKQTLDLGDTGLLPLEVI

SEQ ID NO: 108362 - protein, 67 aa, Setaria italica
  Transcript Sequence Number=SeqID_42388
  Gene Ontology: Mol. function=selenium binding; Cellular component =cytoplasm; Biological process=protein transport
  Homolog annotation: Hit_ID=B6TFC2; Match level="QueryCoverage=100%, HitCoverage=14%, E-value=5e-32, Identity=95%"; Hit description =Selenium-binding protein
ATDPRAPSLHKVVQAEDIAEKTGLGFPHTSHCLASGDIMISCLGDKEGNAAGNGFLLLDSEFNVKGR

SEQ ID NO: 108363 - protein, 290 aa, Setaria italica
  Transcript Sequence Number=SeqID_42389
  Gene Ontology: Mol. function=protein binding
  Homolog annotation: Hit_ID=Q69VA2; Match level="QueryCoverage=98%, HitCoverage=43%, E-value=1e-114, Identity=38%"; Hit description =Putative leucine rich repeat protein
LAGSMVEGGRLTFHAEYTGGLRGSCIHEWFRLHDDGRKEKLTAGDCLDLDLADVDCRIELIHTPVREDGLQGSPRSVISDTILPGEPKGVNLILPECFEDNEISPIKTYFGGKEGTGKYKWFRSKERPDNLEFDLVAASSEVVGETLKYKLSLDDVGSYLVLYWVPTRCDGKTGDPVMAITDDPVMAAFPSVLDVHLEQKSSDVYCGLGIYYGGYEGSSLYRWYRESSDGTRTRIDGANSVTYEVTDADYSCHLLFGYTPVRSDGITGEEKLSEPSDVNFVLVTYFLKFR

SEQ ID NO: 108364 - protein, 80 aa, Setaria italica
  Transcript Sequence Number=SeqID_42390
  Gene Ontology: Mol. function=protein binding
  Homolog annotation: Hit_ID=Q69VA2; Match level="QueryCoverage=96%, HitCoverage=4%, E-value=1e-33, Identity=93%"; Hit description =Putative leucine rich repeat protein
SMVGRNDLISIPGEIGRMYEANVDDVGYRLVAIYTPVREDGVEGQPISVSTEPIAVEPEIYKEVKQKLDDGSVKFEVTLI

SEQ ID NO: 108365 - protein, 42 aa, Setaria italica
  Transcript Sequence Number=SeqID_42391
  Homolog annotation: Hit_ID=B6TFC2; Match level="QueryCoverage=71%, HitCoverage=6%, E-value=1e-09, Identity=96%"; Hit description =Selenium-binding protein
MYDCAGTGINKPDYLATVDLDPASPTYSQVIHRLPNKGTNPK

SEQ ID NO: 108366 - protein, 184 aa, Setaria italica
  Transcript Sequence Number=SeqID_42392
  Gene Ontology: Mol. function=selenium binding; Cellular component =cytoplasm; Biological process=protein transport
  Homolog annotation: Hit_ID=B6TFC2; Match level="QueryCoverage=100%, HitCoverage=40%, E-value=1e-99, Identity=94%"; Hit description =Selenium-binding protein
  Pfam annotation: Domain name=SBP56; Domain location=1-184; Score =82.4; E_value=7.2e-22; Accession=PF05694.3; Description=56kDa selenium binding protein (SBP56)
AIDVKPLKVRNWILPEMPGLITDFVISLDDRYLYLVNWLHGDIRQYNIEDPAKPVLAGQVWVGGLLQKGSDVVYLTDDGQEEQYNVPQVKEHRLRGGPQMIQLSLDGKRIYVTNSLFSRWDEQFYGDDLVKKGSHMLQIDVDTEKGGLAINPNFFVDFSKEPDGPALAHEMRYPGGDCTSDIWI

SEQ ID NO: 108367 - protein, 704 aa, Setaria italica
  Transcript Sequence Number=SeqID_42393
  Gene Ontology: Mol. function=protein binding; Cellular component =nucleus
  Homolog annotation: Hit_ID=Q69VA2; Match level="QueryCoverage=100%, HitCoverage=91%, E-value=0.0, Identity=45%"; Hit description =Putative leucine rich repeat protein
  Pfam annotation: Domain name=LRR_1; Domain location=241-261; Score =5.0; E_value=34; Accession=PF00560.25; Description=Leucine Rich Repeat
  Pfam annotation: Domain name=LRR_1; Domain location=263-285; Score =6.9; E_value=15; Accession=PF00560.25; Description=Leucine Rich Repeat
  Pfam annotation: Domain name=LRR_1; Domain location=287-307; Score =11.4; E_value=2; Accession=PF00560.25; Description=Leucine Rich Repeat
  Pfam annotation: Domain name=LRR_1; Domain location=309-329; Score =3.4; E_value=70; Accession=PF00560.25; Description=Leucine Rich Repeat
  Pfam annotation: Domain name=LRR_1; Domain location=330-350; Score =7.8; E_value=9.8; Accession=PF00560.25; Description=Leucine Rich Repeat
  Pfam annotation: Domain name=LRR_1; Domain location=352-372; Score =3.8; E_value=58; Accession=PF00560.25; Description=Leucine Rich Repeat
  Pfam module annotation: Pfam domain module=LRR_1::LRR_1::LRR_1::LRR _1::LRR_1::LRR_1; Domain location=241-261::263-285::287-307::309 -329::330-350::352-372
  Subcellular localization annotation: CTP_CleavageSite=51; ConfidenceScore=5.30e-01
MEAPSEASKVADGKPVKPRPVAPTGRFALGTASSIKKRADGAASAEVAVPRSSMMKPTSSVNASSVQRRSSTGTVGKQQGNGSSVVAKKASPTLLDGAKKSKPVSASTVSSKPAVEKKTSLTESAKADLVKRPAVKASPTSTLKKVQSKTESSNGSSGSTRRVASNASLQSPRSVTSTATKKSGSQTSSSVPSRRKSSTADSRDSRFMMLPQVDLKASDEVRLDSRGHRVRSLKQLRLSPALEFVYLRDNLLSSLEGIEILKGVKVLDLSFNDFKLPGFEPLRNCIVLQQLYLAGNQITSLASLPELPNLEFLSVAQNRLKSLCMAHQPRLQVLAASRNKISTLKGFPHLPFLEHLRVEENPLLEMPHLEAASILLIGPTLKKFNDRDLNPNEAEVAKQYPAHTAICIRDGWEFCSPELAADSTFSFLLEQWKDKLPQDYMVNKAYVDHPFEEDPCHCHFGFTNLGREGELVLKYQWFLGGKTPTDFQPIPEALSEVYWPKHEDVGRCLKVECTPILNGAEFPPIFAVSLPVSPGTGCPKVINLTVSGELVEGNILSGVPEIAWCGGTPGKGVASWLRRRWNGNAEVIDGAEGMEYQLTVNDINSSLVFMYTPATDAGVKGEPQCTMTDFVKAATPSVSDVHVLGDIVEDNVIIGKGKYFGGREGLSKIRWFREKENGEFLLVLSDSMEYTLTNEDVGRHLKFV

SEQ ID NO: 108368 - protein, 984 aa, Setaria italica
  Transcript Sequence Number=SeqID_42394
  Gene Ontology: Mol. function=protein binding
  Homolog annotation: Hit_ID=Q69VA2; Match level="QueryCoverage=100%, HitCoverage=71%, E-value=0.0, Identity=40%"; Hit description =Putative leucine rich repeat protein
REGNGEFLLVLSDSMEYTLTNEDVGRHLKFVYTPVNLEGEEGESACALTDVVKKAPPKVFNLMIIGEAREGSKISASATVTGGTEGSSRVQWYKASSSEFKNEHELEALSTSKVSKTFRIPLSAVGYYIVAKFTPVAPDGEIGEPAYAISDGVVETLPPSLNFLTVTGEFSEGQILTASYGYIGGHEGNSLYSWHLHETEDDEGTPASEASGLLQYRVSKEAIGKFVSFKCTPIRDDGIVGEARVFIGKDRVTPGMPTLLSLEVTGEAIEGTTMVASKRYWGGEEGDTMFRWILASSDGTEKEIEGATSSSYTLKCDDIGFYISVLCKPVRNDGVQGSLVSTEVIGPIIPGPPTCRSLELAGSMVEGGRLTFHAEYTGGLRGSCIHEWFRLHDDGRKEKLTAGDCLDLDLADVDCRIELIHTPVREDGLQGSPRSVISDTILPGEPKGVNLILPEWFRSKERPFIFPSAFLTTKVNFGGKEGTGKYKWFRSKERPDNLEFDLVAASSEVVGETLKYKLSLDDVGSYLVLYWVPTRCDGKTGDPVMAITDDPVMAAFPSVLDVHLEQKSSDVYCGLGIYYGGYEGSSLYRWYRESSDGTRTRIDGANSVTYEVTDADYSCHLLFGYTPVRSDGITGEEKLSEPSDVILPEPLKIETLVFKGNQVERETLTVVEQIPSNEIQQHIWNNYKKEMKYQWFVSSGSGEDQSFEPLATQCSRSYKVRFEDIGRCLKCECFATDVFGRSSELVSAVTTTIAPGRPKIEKLEIEGRGFHTNLYAVRGTYSGGKEGKSKIQWLRSMVGSPDLISIPGEIGRMYEANVDDVGYRLVAIYTPVREDGVEGQPISVSTEPIAVEPEIYKEVKQKLDDGSVKFEVLCDKDRTPKKAQVMGHLERRVLEVNRKRIKVVKPGSKTSFPSTEVRGTYAPPFHVELYRNDQHRFKIVVDSDNEVDLMVQTRHMRDVVILTIRGLAQKFNSTSLNTLLKIEA

SEQ ID NO: 108369 - protein, 54 aa, Setaria italica
  Transcript Sequence Number=SeqID_42395
GLNITGWLVYETTDSFCNRMLTGHKLLCPSICKMAKGICAYCSVLDNHSLKRHN

SEQ ID NO: 108370 - protein, 139 aa, Setaria italica
  misc_feature (31)..(31): Xaa can be any naturally occurring amino acid
  misc_feature (55)..(55): Xaa can be any naturally occurring amino acid
  misc_feature (114)..(114): Xaa can be any naturally occurring amino acid
  Transcript Sequence Number=SeqID_42396
  Gene Ontology: Mol. function=nucleoside-triphosphatase activity; Cellular component=mitochondrion
  Homolog annotation: Hit_ID=B6SVD2; Match level="QueryCoverage=98%, HitCoverage=27%, E-value=7e-51, Identity=72%"; Hit description =Mitochondrial chaperone BCS1
NHLRRLLVGMSNRSILVVEDIDCTIEFEFRXTSSAQISSLLDSMTSSHVLMRIWXSEQVTLSGLLNFVDGLWSTTGEERIIVFTTNYKERLDPALLRPGRMDMHIHMGYCTQEXFRILTNNYHSINYHDTYPEIEKLIK

SEQ ID NO: 108371 - protein, 93 aa, Setaria italica
  Transcript Sequence Number=SeqID_42397
  Gene Ontology: Mol. function=microtubule motor activity; Cellular component=microtubule associated complex; Biological process =microtubule-based movement
GGYASLDQRSGNVKKFLSVVADMGLPGFSVKELDEGSMSSVVECLLVLRDSVDPRLGDDSPQDVAKTPSRKQWGVSEMDKPQVPGAALGKRSP

SEQ ID NO: 108372 - protein, 276 aa, Setaria italica
  misc_feature (50)..(50): Xaa can be any naturally occurring amino acid
  misc_feature (99)..(99): Xaa can be any naturally occurring amino acid
  Transcript Sequence Number=SeqID_42398
  Gene Ontology: Mol. function=microtubule motor activity; Cellular component=microtubule associated complex; Biological process =microtubule-based movement
  Homolog annotation: Hit_ID=B9T1M8; Match level="QueryCoverage=80%, HitCoverage=23%, E-value=2e-52, Identity=54%"; Hit description =Kinesin heavy chain, putative
PKTPSRKQWGVSEMDKPQVPGAALGKRSPGEDRRNGVPEPKAHQKTSVFXLDKKFREVFQLKRGSYSDLPASKISEMMHSSSLDNAPTQSLISVVNGIXLDESIERKKGEIPHRVVYLLRKVVQEIERRLCIQAEHIRSQNIIIKTREEKYCSKIKALEMLVKGTNEENQMATNRLQILKDEKSKIEERRKLSEQDVHRLVKEKEHSENIIQSLKKDMEAMNRMHEEQLEKIERKAKQMEEQLTTKVKEVEYLLLQSNKKIEEVEAASKLKSQLWD

SEQ ID NO: 108373 - protein, 138 aa, Setaria italica
  Transcript Sequence Number=SeqID_42399
  Gene Ontology: Mol. function=calcium ion binding; Cellular component =integral to membrane; Biological process=embryonic development ending in birth or egg hatching
  Homolog annotation: Hit_ID=Q0IKM2; Match level="QueryCoverage=97%, HitCoverage=17%, E-value=2e-51, Identity=72%"; Hit description=Ca2+ binding protein cbp1
  Pfam annotation: Domain name=LETM1; Domain location=16-138; Score =40.2; E_value=2.9e-12; Accession=PF07766.5; Description=LETM1-like protein
RILIASMSRADWAANLKHWKDEFVSTLQHYWLGTKLLWADVRISSRLLVKLASGKSLTRRERQQLTRTTADLFRLVPFAVFIIVPFMELLLPVFLKLFPNMLPSTFQDKMKEEEALKRKLKARMECAKFLQDTAKEMA

SEQ ID NO: 108374 - protein, 79 aa, Setaria italica
  Transcript Sequence Number=SeqID_42400
HLFHQFVKWLKIWMNTLQIDKVGSKNSGMPINIGLIIHPQKEQSSCLLLVNPSARLPTRLPILNRGVLMFCYMMVIDDC

SEQ ID NO: 108375 - protein, 49 aa, Setaria italica
  Transcript Sequence Number=SeqID_42401
DAEEDGSLDGEEFQGEGMDEDADVECFGMEIVDDDGPAVDEDDEGDSDG

SEQ ID NO: 108376 - protein, 227 aa, Setaria italica
  misc_feature (14)..(14): Xaa can be any naturally occurring amino acid
  Transcript Sequence Number=SeqID_42402
  Gene Ontology: Mol. function=phosphatidylinositol phosphate kinase activity; Biological process=phosphatidylinositol metabolic process
  Homolog annotation: Hit_ID=Q94LF4; Match level="QueryCoverage=28%, HitCoverage=3%, E-value=7e-16, Identity=66%"; Hit description =Putative phosphoinositide kinase
RLRRQLLFHSYLWXDKRLVFAARSDRCSHELFNFKQGDKEKIHSADSVAELNALTKPQSEVSGNKYTSKDSKYVECLQESIFGGNRTGLDASTSTNSSHDQQMSTSDLDSLQRDIKTPLYSSVSVSGDWLPLEPDLVARRTLSEGQFPSVLDVTNALEAKWTGKDDPVPSKLTMLESTASSEDSEEHMGDTTPSCASLLLNKLGDSAADHSNWIRMPFLLFYRSLNK

SEQ ID NO: 108377 - protein, 101 aa, Setaria italica
  misc_feature (63)..(63): Xaa can be any naturally occurring amino acid
  Transcript Sequence Number=SeqID_42403
  Gene Ontology: Mol. function=protein tyrosine/serine/threonine phosphatase activity; Biological process=protein amino acid dephosphorylation
  Homolog annotation: Hit_ID=B6U4B9; Match level="QueryCoverage=93%, HitCoverage=34%, E-value=3e-44, Identity=89%"; Hit description=Dual specificity protein phosphatase 4
  Pfam annotation: Domain name=DSPc; Domain location=4-98; Score=0.0; E_ value=0.00019; Accession=PF00782.12; Description=Dual specificity phosphatase, catalytic domain
DDCAYWRIPKTVPDCHNLYKNSFTYHSLQRDRPLDFDDANRFLEQCERDKSRVLVHCMTGKNXSAAIVAAFLMKSRGWRLAQSFQWVKDRRPQVQLTDASQ

SEQ ID NO: 108378 - protein, 81 aa, Setaria italica
  misc_feature (52)..(52): Xaa can be any naturally occurring amino acid
  misc_feature (74)..(74): Xaa can be any naturally occurring amino acid
  Transcript Sequence Number=SeqID_42404
  Gene Ontology: Mol. function=protein tyrosine/serine/threonine phosphatase activity; Biological process=protein amino acid dephosphorylation
  Homolog annotation: Hit_ID=B6U4B9; Match level="QueryCoverage=97%, HitCoverage=29%, E-value=1e-36, Identity=88%"; Hit description=Dual specificity protein phosphatase 4
  Pfam annotation: Domain name=DSPc; Domain location=5-81; Score=-27.3; E_value=0.026; Accession=PF00782.12; Description=Dual specificity phosphatase, catalytic domain
QTVPDCHNLYKNSFTYHSLQRDRPLDFDDANRFLEQCERDKSRVLVHCMTGXNRSAAIVAAFLMKSRGWRLAQXFQWVKEP

SEQ ID NO: 108379 - protein, 147 aa, Setaria italica
  misc_feature (33)..(33): Xaa can be any naturally occurring amino acid
  Transcript Sequence Number=SeqID_42405
  Gene Ontology: Mol. function=protein tyrosine/serine/threonine phosphatase activity; Biological process=protein amino acid dephosphorylation
  Homolog annotation: Hit_ID=B6U4B9; Match level="QueryCoverage=47%, HitCoverage=26%, E-value=6e-24, Identity=74%"; Hit description=Dual specificity protein phosphatase 4
EIFISFSAISGKCERDKSRIPFHCMTGNSRSQXVVAAFLMKSRGWGLAQSFQWVKDQRPQVHLTDAFEHDLLAYEQKLFGPCWPRFRFPPPHPVVLSLYTTYRPWRLGTGRSRVWCSSWLSWTQSASRATRTGSCSLCSGGDPGRAP

SEQ ID NO: 108380 - protein, 95 aa, Setaria italica
  misc_feature (45)..(45): Xaa can be any naturally occurring amino acid
  Transcript Sequence Number=SeqID_42406
  Gene Ontology: Mol. function=protein tyrosine/serine/threonine phosphatase activity; Biological process=protein amino acid dephosphorylation
  Homolog annotation: Hit_ID=B6U4B9; Match level="QueryCoverage=86%, HitCoverage=30%, E-value=6e-31, Identity=79%"; Hit description=Dual specificity protein phosphatase 4
MRKRDRENTCGVCGPHHKYDEEGEVCGVCGHRWKPSEGEGTPARXSAFPTEVLKDFLFLKSYDNDSRSEVIWTLSISHILSVRTAHPALFWMAPV

SEQ ID NO: 108381 - protein, 193 aa, Setaria italica
  Transcript Sequence Number=SeqID_42407
  Gene Ontology: Mol. function=protein tyrosine/serine/threonine phosphatase activity; Biological process=protein amino acid dephosphorylation
  Homolog annotation: Hit_ID=B6U4B9; Match level="QueryCoverage=78%, HitCoverage=57%, E-value=1e-63, Identity=77%"; Hit description=Dual specificity protein phosphatase 4
  Pfam annotation: Domain name=DSPc; Domain location=1-116; Score=14.9; E_value=1.3e-05; Accession=PF00782.12; Description=Dual specificity phosphatase, catalytic domain
YNDSRSEVIWTLSISHILSTVPDCHNLYKNSITCHSIQCDRPLDFDDTNRKCERDKSRIPVHCMTGNSRSAAIVAAFLMKSRGWRLAQSFQWVKDRRPQVQLTDASQNELLEYEQKLFGPSSQPVIPTESFASLGLATKTAGDTQAPTFNQMTGTGRSRVWCSSWLSWTQSASRATRTGSCSLCSGGDPGRAP

SEQ ID NO: 108382 - protein, 220 aa, Setaria italica
  misc_feature (137)..(137): Xaa can be any naturally occurring amino acid
  Transcript Sequence Number=SeqID_42408
  Gene Ontology: Mol. function=protein tyrosine/serine/threonine phosphatase activity; Cellular component=intracellular; Biological process=protein amino acid dephosphorylation
  Homolog annotation: Hit_ID=B6U4B9; Match level="QueryCoverage=97%, HitCoverage=77%, E-value=1e-111, Identity=87%"; Hit description=Dual specificity protein phosphatase 4
  Pfam annotation: Domain name=DSPc; Domain location=48-186; Score =98.7; E_value=2e-26; Accession=PF00782.12; Description=Dual specificity phosphatase, catalytic domain
MRKRERENPCGICGHYHKYEEGEVCGVCGHRWKPSDGEGTPAKHESAFPTEVLKDFLFLGSYDNASRSEVLKTLNVSHILNSASFSTVPDCHNLYKNSFTYHSLQRDRPLDFDDANRFLEQCERDKSRVLVHCMTGXNRSAAIVAAFLMKSRGWRLAQSFQWVKDRRPQVQLTDASQNELLEYEQKLFGPSSQPVIPTESFASLGFGYPKPAGDSTSRCL

SEQ ID NO: 108383 - protein, 116 aa, Setaria italica
  misc_feature (50)..(50): Xaa can be any naturally occurring amino acid
  Transcript Sequence Number=SeqID_42409
  Gene Ontology: Mol. function=protein tyrosine/serine/threonine phosphatase activity; Biological process=protein amino acid dephosphorylation
  Homolog annotation: Hit_ID=B6U4B9; Match level="QueryCoverage=70%, HitCoverage=30%, E-value=6e-32, Identity=80%"; Hit description=Dual specificity protein phosphatase 4
MRKRDRENTCGVCGPHHKYDEEGEVCGVCGHRWKPSEGEAPRRGESAFPXEVLKDFLFLKSYDNASRSEVLKTLNVSHILNVRNASPALFWMAPVRFLVCDFRSRVVTLENDSLSK

SEQ ID NO: 108384 - protein, 63 aa, Setaria italica
  Transcript Sequence Number=SeqID_42410
VSCISTRVCGSRLDFGFERISSPSSSFNLPQFMVDMFILEWIVYCIEGVGIHPVWRSQFGFGF

SEQ ID NO: 108385 - protein, 73 aa, Setaria italica
  Transcript Sequence Number=SeqID_42411
IHAGYLPTRYRLLSNYLLFIGLVLQASFPLLCSTAHPHPHGTRSFPQFLGIVMHLFLSSDDRFLSHFSFFYGF

SEQ ID NO: 108386 - protein, 84 aa, Setaria italica
  Transcript Sequence Number=SeqID_42412
  Subcellular localization annotation: CTP_CleavageSite=40; ConfidenceScore=5.17e-01
TLLRPLLTLGRLLLFPPPAPSPTGGERSPYSTGNAVFPPACARIPSPEEPSSPACHPLPPPSLPISQWRREVQPPSPRIRPPAP

SEQ ID NO: 108387 - protein, 49 aa, Setaria italica
  Transcript Sequence Number=SeqID_42413
VLKCRARPSRIKAKNSESPICQWVNGQKILYSGEPKITLTFLTKEKKSR

SEQ ID NO: 108388 - protein, 555 aa, Setaria italica
  Transcript Sequence Number=SeqID_42414
  Gene Ontology: Mol. function=hydrolase activity, hydrolyzing O -glycosyl compounds; Cellular component=chloroplast; Biological process=carbohydrate metabolic process
  Homolog annotation: Hit_ID=B5U8Z0; Match level="QueryCoverage=97%, HitCoverage=55%, E-value=0.0, Identity=84%"; Hit description=Alpha -glucosidase like protein
  Pfam annotation: Domain name=Glyco_hydro_31; Domain location=2-170; Score=-136.0; E_value=3.7e-05; Accession=PF01055.18; Description =Glycosyl hydrolases family 31
FCLFYGPILSGTNQLSGPDIGGFAGNATPKLFGRWMGVGALFPFSRGHTETGSIDHEPWSFGEECEEVCRLALLRRYRLLPHIYTLFYHSHTKGIPVATPVFFADPQDPELRKVETSFLLGPLLVCASTLPNKGAHECAHTLPKGIWLPFDFADSHPDLPVLYLRGGAILPVGPPIKHVGEASLEDDLSLIIALDENGKAEGVLFEDAGDGYKFTQGDYLLTYYTAELHSSVVTVKVFKSEGSWKRPKRNLKINILLGGGAMISADGVDGGEIHLTMPPESEVSSLVATSELECKKRLEMIQPIPDIDEPSRQEGAELSKIPVDLKSGDWLLKVVPGIGGRIISMTHLPSDSQWLHSRIEINGYEEYSGTEYRSAGCTEEYNVIRRYLEQSGEEESICMEGDIGGGLVLQRQISILKDNPKIVQIESSIQARSVGAGSGGFSRLVCLRVHPTFTLLHPTEVVVAFTAINGSKQEISPESGEITFEGDLRPNGEWMLVDKCVGLSLVNRFDPSEVSKCMVHWGTGDVNMELWSEERPVSKDTPLRICHQYEVRQTN

SEQ ID NO: 108389 - protein, 452 aa, Setaria italica
  Transcript Sequence Number=SeqID_42415
  Gene Ontology: Mol. function=hydrolase activity, hydrolyzing O -glycosyl compounds; Cellular component=chloroplast; Biological process=carbohydrate metabolic process
  Homolog annotation: Hit_ID=B5U8Z0; Match level="QueryCoverage=98%, HitCoverage=45%, E-value=0.0, Identity=86%"; Hit description=Alpha -glucosidase like protein
  Pfam annotation: Domain name=Glyco_hydro_31; Domain location=108-452; Score=416.9; E_value=3.2e-122; Accession=PF01055.18; Description =Glycosyl hydrolases family 31
PAVVPACEAAPGGAQKVVLKLPSGTSFYGTGEASGPLERTGKRVFTWNTDAWGFGSGTTSLYQSHPWVLAVLPDGKALGVLADTTRRCEIDLREESTIKFSASSAYPVITFGPFKTPADVMTSLSHAIGTVSMPPKWSLGYHQCRWSYDSSEKVLKVIRTFREKGIPCDVVWMDIDYMDGFRCFTFDSKRFPDPKAMVDDLHSIGCQAIWMLDPGIKKEEDYFVYDSGTKNDVWIQKADGSPFVGEVWPGDCVFPDYTSEKTRAWWAGLVKDFISNGVDGIWNDMNEPAVFNTTTKTMPESNIHRGDADIGGVKNHSYYHNVYGMLMARSTYEGMAMGNAAKRPFVLTRAGFIGSQRYAATWTGDNLSNWEHLHMSLPMVLQLGLSGQPLSGPDIGGFAGNATPKLFGRWMGVGALFPFSRGHTETGSIDHEPWSFGEECEEVCRLALLRRY

SEQ ID NO: 108390 - protein, 80 aa, Setaria italica
  Transcript Sequence Number=SeqID_42416
MAEHGAAAAQPPQSGKNSSEPAECLLKEYLLLLATLVATVTYAAGLNLPGGSWLEDAPAEGQLAGDSILRQTNYTRYIVF

SEQ ID NO: 108391 - protein, 83 aa, Setaria italica
  Transcript Sequence Number=SeqID_42417
YQNSRGCNTWEMHNFCCIPQNIMYRAPKINLENFLEDFNRCVCVHLASNKETTKLGVSKRKLGTKFEGIEEAGMRHAAGDRAI

SEQ ID NO: 108392 - protein, 156 aa, Setaria italica
  misc_feature (28)..(28): Xaa can be any naturally occurring amino acid
  Transcript Sequence Number=SeqID_42418
  Gene Ontology: Mol. function=nucleotide binding; Biological process =defense response
  Homolog annotation: Hit_ID=Q2QZJ3; Match level="QueryCoverage=98%, HitCoverage=15%, E-value=2e-43, Identity=58%"; Hit description=NB -ARC domain containing protein, expressed
LGMRDSMKIALGGRCTAELMQGSETLLXECGGLPLALVSVARQLSGEDEPTGQFCSELCSKLGSYLEREDGEPNFARLRDVLMDSYTSLSDLTVRTCLLYLGIFPNDRPLRKNVIIRRWLAEGYARSEDITLSEQSVANGNFKTLIDRNIVLPVMF

SEQ ID NO: 108393 - protein, 60 aa, Setaria italica
  Transcript Sequence Number=SeqID_42419
ESPASSQGVVSSGKFVRLRSCFCKEKDHLVETRKVVERDPTCWKGVERGSYSNRLLNRDV

SEQ ID NO: 108394 - protein, 100 aa, Setaria italica
  misc_feature (82)..(82): Xaa can be any naturally occurring amino acid
  Transcript Sequence Number=SeqID_42420
  Subcellular localization annotation: CTP_CleavageSite=6; ConfidenceScore=5.19e-01
MSVSRRARTPKPKSFLPSPSFYSFSKKAKPRKLVSLCLGTLGQHLEDIIADISEFAAFFPPHIKLAILSIARRRRLLNDEVXLTALAESSWEILDISGSD

SEQ ID NO: 108395 - protein, 73 aa, Setaria italica
  Transcript Sequence Number=SeqID_42421
KRVERSNINEEKQCPRLRKGSIELWSNAISYNHFIRFRDWEIVLLLLMSVLLNSYAFFLVKCYLLDCHCYASV

SEQ ID NO: 108396 - protein, 108 aa, Setaria italica
  Transcript Sequence Number=SeqID_42422
  Subcellular localization annotation: CTP_CleavageSite=62; ConfidenceScore=5.06e-01
MSSFMERGGFLDGSSSNGMASLPILPVPSFGVMQHGHGMMGGSSDQQMVGPLQGVDQEVKPPMATAGGSGLQQWPSSTTQEQQVVVVDGSADNNNHNMDGGASGSSSG

SEQ ID NO: 108397 - protein, 108 aa, Setaria italica
  Transcript Sequence Number=SeqID_42423
  Gene Ontology: Mol. function=hydrolase activity; Cellular component =cytosol
  Homolog annotation: Hit_ID=Q5CAG1; Match level="QueryCoverage=90%, HitCoverage=25%, E-value=2e-42, Identity=79%"; Hit description =OSJNBa0065H10.6 protein
RHAHNVAFQKSDLFFICVLRPLSNDIRIDEAEIQAAKWMPLPELMEQPFIQDDHMFRKISNICVQRLRKRYCGLTAHHVVSRFDGGASTLYYNVAEPERGDRNGDDAA

SEQ ID NO: 108398 - protein, 130 aa, Setaria italica
  Transcript Sequence Number=SeqID_42424
  Subcellular localization annotation: CTP_CleavageSite=81; ConfidenceScore=5.36e-01
NAPLRKALPLQMKLLLFQPLVAKGRVNGRNLRFLTLKSILALSLLLRRKLLNPAPKRARIKVLVLTRGRQKEFLDDALNVSPSHEDDIEITSPAAQHGTEDQVSRPLIPAEAAVGTASKPFEIQYSDDEP

SEQ ID NO: 108399 - protein, 75 aa, Setaria italica
  Transcript Sequence Number=SeqID_42425
GVCSVGVCGVVWLYEPFISFLNAMIRSSLAYSRKKVATSKSRCHNPIINTRELQLFQPIIGFLCPPMSFENKQLQ

SEQ ID NO: 108400 - protein, 73 aa, Setaria italica
  Transcript Sequence Number=SeqID_42426
IRAPATWRPSMTEVLELLEGGEIRQDRWAMPEVAADDEEPWWLDDLDDEEEEEDEDEEFNTPSPSSSSSTTSN

SEQ ID NO: 108401 - protein, 108 aa, Setaria italica
  Transcript Sequence Number=SeqID_42427
IQVALNQERIQTSNLLQVLHHKECLMFTLAREMGNKDVDSQVESCDMISDLNNSSSCRCLLTASHLENSCSGWPWDAMKTYAKQLPSLSCNENESSFLLLYLFRNAIL

SEQ ID NO: 108402 - protein, 101 aa, Setaria italica
  Transcript Sequence Number=SeqID_42428
  Subcellular localization annotation: CTP_CleavageSite=69; ConfidenceScore=5.07e-01
MEPAERIESGKALGKRPRSRVLPRTASMVTVPSAAKQGRQERRAGVTSSTSLPAGGAGMGDGGSGAATRAFYSGGYLAGVETTAAFLKACGLCNRRLGPGH

SEQ ID NO: 108403 - protein, 240 aa, Setaria italica
  Transcript Sequence Number=SeqID_42429
  Homolog annotation: Hit_ID=B6TY49; Match level="QueryCoverage=95%, HitCoverage=62%, E-value=6e-63, Identity=61%"; Hit description =Octicosapeptide/Phox/Bem1p
DDDVDHLMDELDRLHDETAAVARPPRLRVFLFAPAPDAAFGSVLSGTAGDAASTDQWFVDALNAPAPHPIERGRSEASSIISEVPDYLFGLDTASDEPSPGPAASRTKSDAAETPRQHGDEDDALAPARQAPYVAEGASPWPAPPPPYMAQPVYYFPVPPPVHYLDPSAQGGYMPRPVYHIVGGGGSEVPGGDLHTAGGVYGVPQHMQPFPPMMYAPPRAVVYTAEGKPLQPPEGGAQSS

SEQ ID NO: 108404 - protein, 50 aa, Setaria italica
  Transcript Sequence Number=SeqID_42430
YEKRKLSCVSGLNKRAVHFSFIQQVQHNPLKDGMEAPHFSAQLAFILLLC

SEQ ID NO: 108405 - protein, 30 aa, Setaria italica
  Transcript Sequence Number=SeqID_42431
GNRKKKEGRCLKKKFFLLVNISQDGPYAQT

SEQ ID NO: 108406 - protein, 108 aa, Setaria italica
  Transcript Sequence Number=SeqID_42432
  Gene Ontology: Cellular component=chloroplast; Biological process =cell redox homeostasis
  Homolog annotation: Hit_ID=B6U6B7; Match level="QueryCoverage=100%, HitCoverage=39%, E-value=5e-40, Identity=74%"; Hit description =Thioredoxin-like 1
FRFYRGAQGRLCSFSCTNATIKKFKDALAKHKPDRCSLGPIKGIEESELLALAANRDLQFTYTKEPDLAPSMEDGAEVITHDHPRLPAAAKPLVRQGSEDRAVVSSGR

SEQ ID NO: 108407 - protein, 276 aa, Setaria italica
  misc_feature (17)..(17): Xaa can be any naturally occurring amino acid
  misc_feature (266)..(266): Xaa can be any naturally occurring amino acid
  Transcript Sequence Number=SeqID_42433
  Gene Ontology: Mol. function=metal ion binding
  Homolog annotation: Hit_ID=Q7XQ90; Match level="QueryCoverage=100%, HitCoverage=5%, E-value=1e-112, Identity=73%"; Hit description =OSJNBa0018M05.18 protein
LMLCVRDSYVEMALEFXKSLKRNPLSSTIELRSAESMSAILQTYGDRVYSFWPRSKQYPTSFTGHGSAVINSDSPRASKADWQSLIEQVIRPFYLRLADLPVWQLYRGNIVKVDEGMFLAHSGNGDNDNLPSASVCSFIKEHYPVFSVPWELVSEIQAVGVTIREIRPKMIRDLLKASSSILLRSIETYIDVLEYCFSDMDPYRFSDLRMPDESRVNSQHVGTMNSSSSYSMPSSSSSLSYNSSTQSPGTSGGDALEIMTYFGKAXYMYFGRGVVE

SEQ ID NO: 108408 - protein, 183 aa, Setaria italica
  Transcript Sequence Number=SeqID_42434
  Gene Ontology: Mol. function=hydrolase activity; Biological process =lipid catabolic process
  Homolog annotation: Hit_ID=B9R7G2; Match level="QueryCoverage=100%, HitCoverage=44%, E-value=1e-47, Identity=48%"; Hit description =Patatin, putative
KARSNTLMDARLADVCIGTSAAPTVLPAHYFETVDYHTGASRSFNIIDGGLVANNPTLVAMSEITKQIQMRSKEFPETKPLDYNRYLVISLGTGLPDQDIKFDALRSSNSGIFRWLGWHYTMPLLHMFLHASSDMTDSHVANLFKAIGCSDQLLRIQEHNIPIAAVSADLSTEKNLQGLIKIG

SEQ ID NO: 108409 - protein, 80 aa, Setaria italica
  Transcript Sequence Number=SeqID_42435
YTLGLGGVCNWPATLTFSFHATTILYVSLLMNSVFQQKSMSMDLDHKEHPHHICNFKRMLVLCKTWKRKVKTNLWDIMPN

SEQ ID NO: 108410 - protein, 124 aa, Setaria italica
  Transcript Sequence Number=SeqID_42436
  Gene Ontology: Mol. function=protein serine/threonine phosphatase activity; Cellular component=protein serine/threonine phosphatase complex; Biological process=protein amino acid dephosphorylation
  Homolog annotation: Hit_ID=Q9M3V1; Match level="QueryCoverage=93%, HitCoverage=29%, E-value=1e-26, Identity=51%"; Hit description =Protein phpsphatase 2C (PP2C)
GSYKQTANRVRGILAMSRALGDRMLRPEVIAEPEITVTDRTPEDECLILASDGMWDAVPNEIACSVARQCLQDGNPADAAAAGGTGPEPEPRCSNAASLLVRLAFGRDSWDNISVVVIDLQQRE

SEQ ID NO: 108411 - protein, 86 aa, Setaria italica
  misc_feature (29)..(29): Xaa can be any naturally occurring amino acid
  Transcript Sequence Number=SeqID_42437
  Subcellular localization annotation: CTP_CleavageSite=57; ConfidenceScore=5.49e-01
YVPGAALHAPCTGLPAPPPPRPPPHPRAXPIPPSSSNPPYSPPPPPPPPPISPRSTPAAADAGSAGRDHPPTLAGRRAWTARGGGS

SEQ ID NO: 108412 - protein, 76 aa, Setaria italica
  Transcript Sequence Number=SeqID_42438
DKKEQQMGNNEQVSVGGLSDSRSLDEAWTVSITPTADAAVPTGLLDACLHPVPSFPLVLDSNHPLWPLPQPCPPHP

SEQ ID NO: 108413 - protein, 63 aa, Setaria italica
  Transcript Sequence Number=SeqID_42439
LRLPVKSSRVNARDRDTNVLKENLPSSCLEWSAPSYIARAGPWDQAVGQFGAPKPGQRGMIVR

SEQ ID NO: 108414 - protein, 349 aa, Setaria italica
  misc_feature (177)..(177): Xaa can be any naturally occurring amino acid
  Transcript Sequence Number=SeqID_42440
  Gene Ontology: Mol. function=electron carrier activity; Biological process=response to oxidative stress
  Homolog annotation: Hit_ID=B6TZQ7; Match level="QueryCoverage=88%, HitCoverage=89%, E-value=1e-79, Identity=52%"; Hit description =Peroxidase 12
  Pfam annotation: Domain name=peroxidase; Domain location=57-295; Score=283.3; E_value=5.5e-82; Accession=PF00141.15; Description =Peroxidase
MAPPLAAAVGLLLAAAAVVSARAPLSLTELQATNATSGDGLSVYFHLESCPQLETLVRSNVDAALRQNVRLTAGLLRLFFHDCFPQGCDASILLDNGERNLPPNVGLQQEVLNLIEDIRAKVHAQCGATVSCADITVLATRDAVNLAGGPAFSVSLGRLDSLAPASDNDVFKLPPPXTATVDELLSAFNAAGLTDPADLVSLSGAHTVGKARCSAFGAISGPASDDITRCITEPCSAAGSGDRLRDLDFLTPSVFDNIYFIELTLKKNKGVMLPSDQALVTDPRTSWLVQGFADNHWWFFDQFKTSMIKMSNLKGPQGNVGEVRRTCFRRNSAGSTVQNAGDEGLVSPA

SEQ ID NO: 108415 - protein, 193 aa, Setaria italica
  Transcript Sequence Number=SeqID_42441
  Homolog annotation: Hit_ID=B9RGG4; Match level="QueryCoverage=43%, HitCoverage=7%, E-value=3e-15, Identity=42%"; Hit description =Pentatricopeptide repeat-containing protein, putative
SSYVGNISWQRFCENKKYVSIYNNFEHWDDSGAFENFQNAKARFWADYHGQPSDIPLPDPDMYIDEVDHHCTVDPELAADVEKSAGNCTEKPAEVHDWGWEPSHGSNATWGGNNESSSKWDNNNSGWCAAPEKPSWGSLSNNQYASNNRYSNFYGGSNNNRYFNQRNNKQKDHHEGFQRSSLQDPSRGKKMEW

SEQ ID NO: 108416 - protein, 378 aa, Setaria italica
  misc_feature (249)..(249): Xaa can be any naturally occurring amino acid
  Transcript Sequence Number=SeqID_42442
  Gene Ontology: Mol. function=kinase activity
  Homolog annotation: Hit_ID=B9RAZ5; Match level="QueryCoverage=80%, HitCoverage=42%, E-value=5e-80, Identity=49%"; Hit description=Zinc finger protein, putative
RIMNCGEKHISSNLSTLLRWSPFSTEGELLDQFSDMECHGTKIIVFNLWFNDALEMELDFDTDKQDIMISGAPEIRAGRNTVERLTQMHVANRFRYSLRVYASILYLHVPENFQIILCGRAVEPHYAVNDLMYRECIKYRPQVEVTGEVDVITTIGYLSGAPRLDIYGFSVYHKNRLILPYWRAGSFNRQRRGIAGVLEANFIRPTHDKQDFERTGLFQRLETRLKDMATEYWTYHCHLVGYTQVAKGXPPAHYISTTADHDDHNLVAQATTNTCDYNSRARASVALHPCSNGYNMLYPLHVDLDALPDQMDCDACPSASINVGTTSYTPRNAPQQSETELCRRRKPCSEIFWRAQKKAEHQCLSDQPGSDNGTEEAE

SEQ ID NO: 108417 - protein, 123 aa, Setaria italica
  Transcript Sequence Number=SeqID_42443
ALPKPREPGEEDLLHLDRRRGLCGLLLDLITREIFFTKGSPHWPVLQCGCLRYFLCCLSLSYFSLLSVAKIQQSAGPINTTLGNFSVYMWLAIVTSKGALYQLDTRVPRLPFYPFFFVWANAA

SEQ ID NO: 108418 - protein, 61 aa, Setaria italica
  Transcript Sequence Number=SeqID_42444
  Subcellular localization annotation: CTP_CleavageSite=21; ConfidenceScore=5.10e-01
SYTLCLTNLVRFVFGIRQGCFCGRVTERCSVRLSQSFFFLQIFSTSFSSIRRVIQNTAVYA

SEQ ID NO: 108419 - protein, 100 aa, Setaria italica
  Transcript Sequence Number=SeqID_42445
  Gene Ontology: Mol. function=protein binding
  Homolog annotation: Hit_ID=B6TJE0; Match level="QueryCoverage=92%, HitCoverage=26%, E-value=2e-25, Identity=64%"; Hit description =Speckle-type POZ protein
LGEQATAMAQHLLEAADRYGLNRLKRICVEKVCTTINVDTVATTLALAEQHGCSKLKARCMKFALDNICAVSATEGFKHLEASYPSVLTELLKLMVEGHK

SEQ ID NO: 108420 - protein, 169 aa, Setaria italica
  Transcript Sequence Number=SeqID_42446
  Gene Ontology: Mol. function=glutamate-tRNA ligase activity; Cellular component=cytoplasm; Biological process=tRNA aminoacylation for protein translation
  Homolog annotation: Hit_ID=B6SRU1; Match level="QueryCoverage=99%, HitCoverage=23%, E-value=7e-75, Identity=80%"; Hit description =Glutamyl-tRNA synthetase, cytoplasmic
  Pfam annotation: Domain name=tRNA-synt_1c; Domain location=27-169; Score=-33.6; E_value=4.4e-13; Accession=PF00749.13; Description=tRNA synthetases class I (E and Q), catalytic domain
CLKEKVQDLKLNTSIPEIDLPGAKVGEVCVRFAPEPSGYLHIGHAKAGLLNKYFAERYNGRLIVRFDDTNPSKENNEFVENIMEDIDTMGIKYDRVTYTSDYFPKLMEMVESLIKQGKAYVDDTPREQMRAERMAGVESKCRNNTVEEKSSQLWREMVNGTEIGMQCYV

SEQ ID NO: 108421 - protein, 162 aa, Setaria italica
  misc_feature (117)..(117): Xaa can be any naturally occurring amino acid
  Transcript Sequence Number=SeqID_42447
  Gene Ontology: Mol. function=aminoacyl-tRNA ligase activity; Cellular component=cytoplasm; Biological process=tRNA aminoacylation for protein translation
  Homolog annotation: Hit_ID=Q6K1T2; Match level="QueryCoverage=91%, HitCoverage=25%, E-value=2e-46, Identity=71%"; Hit description=Lysyl- tRNA synthetase
  Pfam annotation: Domain name=tRNA_anti; Domain location=101-162; Score=22.0; E_value=0.0025; Accession=PF01336.17; Description=OB -fold nucleic acid binding domain
  Subcellular localization annotation: CTP_CleavageSite=55; ConfidenceScore=5.33e-01
SGVASRRWRRWPLHIRCCSAAAATTNQKPPPQDRRRRSASSSSSTSDRDSIRAIRLKKVEELRGKGFEPYAYKWDRTHTTKELQEEYTHLENGEVCEEAAVSIAGRIVARRAFGKLXFMTVRDDTGTIQLYCEKDSLTEDQFEQLKAFIDIGDILGASGSIK

SEQ ID NO: 108422 - protein, 233 aa, Setaria italica
  Transcript Sequence Number=SeqID_42448
  Gene Ontology: Mol. function=ubiquitin-protein ligase activity; Cellular component=ubiquitin ligase complex; Biological process =ubiquitin-dependent protein catabolic process
  Homolog annotation: Hit_ID=B6SV72; Match level="QueryCoverage=100%, HitCoverage=50%, E-value=1e-115, Identity=90%"; Hit description =Ubiquitin-protein ligase
VTLDADAKAALMQPAKVSLVVDMLNEGAADTKINCVRLIRILMDERGFRPETMASLSLLVGVMRLIRDKRHPDGVVAGLELLNSICAVHRPARGMIVSIGAVPQLVELLPELATECVEPALDILDALSAIPEGRVALKDCPRTIPNAVRLLMRVSEACTRRSLSMLWTVCRMAPEECAPAAVEAGLAAKLLLVIQSGCAPELKQKASELLKLCRLNYTDTLFISKCKLTRTIQ

SEQ ID NO: 108423 - protein, 92 aa, Setaria italica
  misc_feature (1)..(14): Xaa can be any naturally occurring amino acid
  misc_feature (29)..(29): Xaa can be any naturally occurring amino acid
  Transcript Sequence Number=SeqID_42449
XXXXXXXXXXXXXXLKPNLYIVIAIPYIXKKNCSPTTSDVTHITTFAKTLRVISSKSDYSPFVFQYKHQTAFDAGALQDGNLERQASPSAPL

SEQ ID NO: 108424 - protein, 393 aa, Setaria italica
  Transcript Sequence Number=SeqID_42450
  Gene Ontology: Mol. function=catalytic activity; Cellular component =plasma membrane
  Homolog annotation: Hit_ID=B6U1A8; Match level="QueryCoverage=100%, HitCoverage=80%, E-value=0.0, Identity=89%"; Hit description=Protein phosphatase 2C ABI2
  Pfam annotation: Domain name=PP2C; Domain location=3-255; Score =102.1; E_value=2e-27; Accession=PF00481.13; Description=Protein phosphatase 2C
KRDEDFFLLRTDCPRPFTSASSSAASPHPTFAVFAVLDGHNGNAAAIYTRDNLLNHVLSAMPRGLSREEWLHALPRALVAGFVKTDKEFQSKGQTSGTTATFVIIDGWTITVASVGDSRCILDAQGGTVSLLTVDHRLEENVEERERVTASGGEVGRLSVVGGAEIGPLRCWPGGLCLSRSIGDIDVGEFIVPVPYVKQVKLSNAGGRLIIASDGIWDALPSEAAAKSCRGLPAELAAKQVVKEALRTRGLKDDTTCIVVDIIPPGQTIRPASPPKKMNKLKSLIFRKKAKDPSQKLTKQHSGAGVVEEIFEEGSAMLSERLGPDSNGGRTSSSLFTCAICQVDLEPSEGISVHAGSIFSSSSKPWEGPFLCSDCRDKKDAMEGKRPSGVKVL

SEQ ID NO: 108425 - protein, 381 aa, Setaria italica
  misc_feature (24)..(24): Xaa can be any naturally occurring amino acid
  Transcript Sequence Number=SeqID_42451
  Homolog annotation: Hit_ID=Q5EXM2; Match level="QueryCoverage=93%, HitCoverage=36%, E-value=1e-135, Identity=65%"; Hit description=Pg1
  Pfam annotation: Domain name=DUF1399; Domain location=107-250; Score =328.3; E_value=1.6e-95; Accession=PF07173.4; Description=Protein of unknown function (DUF1399)
SIPQGGDGRRGWTGRQAARWAAAXQESVPVGADLVAAALRQLEFLAAVDRRRWLYEGPLLDRAIRRYKACWLPLLAKHTQAPVVDGSLVVPLDCEWIWHCHRLNPVQYIRDCKKVYGRILNNDNVESSTRTKSKIQSEKVWNELYPEEPFELEYTSSSETTMDVDPGATEGISYDLVSAVKRQSSFYYQVGTPTMHDQRFLVEALARYKAFLYLIKMNLEKGVQRFRVPTYDVDLMWHTHQLHPITYCKDMLKLLGKVLEHDDTDADRSEGKKLDVGFTETTEQFESSFGVRYWKAGCMYRGNMPSPVTSAPQIFNTEVGSDICKLQQSLNVLKLTFVELYLQVVDIKNLPSAVPKENVYVRFTKNQSDMFISDGGRLDIS

SEQ ID NO: 108426 - protein, 124 aa, Setaria italica
  Transcript Sequence Number=SeqID_42452
  Gene Ontology: Mol. function=microtubule motor activity; Cellular component=microtubule associated complex; Biological process =microtubule-based movement
  Homolog annotation: Hit_ID=Q2QMU6; Match level="QueryCoverage=97%, HitCoverage=4%, E-value=2e-41, Identity=67%"; Hit description =Kinesin motor domain containing protein, expressed
LNTRYQRDQASHSSSEQEMDEVRRQVEVETAEVIVCLQEELISVQQQLDASNKKDLLAKQSIDALQLEIKQLNDKLIEVLKKNESLSSVIEDKEKEIELLTNDWNRLAADMGSYLVEIKATQNQ

SEQ ID NO: 108427 - protein, 341 aa, Setaria italica
  Transcript Sequence Number=SeqID_42453
  Gene Ontology: Mol. function=transferase activity, transferring glycosyl groups; Biological process=metabolic process
  Homolog annotation: Hit_ID=Q6JAG9; Match level="QueryCoverage=95%, HitCoverage=70%, E-value=1e-152, Identity=81%"; Hit description =Putative cis-zeatin O-glucosyltransferase
APLAALLARLSASHRRVVVVHDRINGYAAEEAARLPNGEAFGLHCLAASTLAGKMEAGLPVLRERGLVFLATDACASKEFVEYVVKRARPSKEISPGAGILMNTCRALEGEFIDVVADHLAADGKKCFAIGPLNPLLHTDAQEQSKPRHEWLDWLNKQPPASVLYVSFGTTSTLRTEQIAELAAALRDSNQRFIWVLRDADRGHEFTGHDESQSRHAELLPEFTKQTEGRGRVITGWAPQLEILAHCATAAFMSHCGWNSTVESLSHGKPILAWPMHGDQPWDAELVCKYLKAGILVRPWEKHGEVIPAEAIREVIVTAMVSEGGMAVQQRAKVLGEAVRA

SEQ ID NO: 108428 - protein, 190 aa, Setaria italica
  Transcript Sequence Number=SeqID_42454
  Gene Ontology: Mol. function=transferase activity, transferring glycosyl groups; Biological process=metabolic process
  Homolog annotation: Hit_ID=C4MF46; Match level="QueryCoverage=100%, HitCoverage=38%, E-value=3e-76, Identity=75%"; Hit description=UDP -glycosyltransferase
MAIEGEQRPLHILFFPFLSPGHLIPAADMAALFATRGVKCTILTTPVNAAVIRSAVERANDAEGALAIDIAVVPFPDVGLPPGVESGPALNSEADRGKFFHAIQQLREPFDRFLAESRPDAVVSDSFFDWSVDAAAEHGVPRLAFLGSSLFARACSVSMLRHNPVEAAPDDPDASVLLPGLPHRVELRRS

SEQ ID NO: 108429 - protein, 67 aa, Setaria italica
  Transcript Sequence Number=SeqID_42455
LKCMTEQQSLRPRSVLLEDKERYTRFLGLTWKYNKSTISDSFQLSLVVSPHLSHRIVLSCHCFENPC

SEQ ID NO: 108430 - protein, 80 aa, Setaria italica
  misc_feature (60)..(60): Xaa can be any naturally occurring amino acid
  Transcript Sequence Number=SeqID_42456
  Gene Ontology: Mol. function=oxidoreductase activity, acting on the CH-OH group of donors, NAD or NADP as acceptor; Cellular component =glyoxysome; Biological process=cellular carbohydrate metabolic process
  Homolog annotation: Hit_ID=Q42972; Match level="QueryCoverage=86%, HitCoverage=17%, E-value=2e-24, Identity=85%"; Hit description =Malate dehydrogenase, glyoxysomal
  Pfam annotation: Domain name=Ldh_1_C; Domain location=1-80; Score= -52.5; E_value=0.046; Accession=PF02866.10; Description=lactatemalate dehydrogenase, alphabeta C-t
AGRIHLTSRIQNGGTEVVEAKAGAGSATLSMAYAAAKFADACLRGLRGDAGIVECSYVAXSQVTELHKSTPLFRHHHACL

SEQ ID NO: 108431 - protein, 115 aa, Setaria italica
  Transcript Sequence Number=SeqID_42457
  Gene Ontology: Mol. function=electron carrier activity; Cellular component=endoplasmic reticulum membrane; Biological process =oxidation reduction
  Homolog annotation: Hit_ID=B4FQ24; Match level="QueryCoverage=98%, HitCoverage=21%, E-value=3e-49, Identity=85%"; Hit description =Flavonoid 3-monooxygenase
AIMRDPEVWKDPEEFVPERFLPGGAGGGEGRKLDFTGSDMGYLPFGSGRRICAGIAMADRMTAYSLAMLLQAFDWELPAGARLDLEEKFAIVMKKATPLVAVPTPRLSRPELYSA

SEQ ID NO: 108432 - protein, 177 aa, Setaria italica
  Transcript Sequence Number=SeqID_42458
ISVFLFRSLRRRARRAKELRVRSSGVKKPNNLTEEALEGLRMMSASPIETEKPPSPIQALLGGIAAGVIALILYKFTTTIEASLNRQTISDSFSVRQITITIRTIITGLCYLATSVFGINAVGLILYSLQLTFQSIMDDDSNSSSTGKISEQSNTSNSESASSDLQQISDKSKNSAE

SEQ ID NO: 108433 - protein, 522 aa, Setaria italica
  misc_feature (111)..(111): Xaa can be any naturally occurring amino acid
  misc_feature (383)..(383): Xaa can be any naturally occurring amino acid
  misc_feature (436)..(436): Xaa can be any naturally occurring amino acid
  misc_feature (451)..(451): Xaa can be any naturally occurring amino acid
  misc_feature (456)..(456): Xaa can be any naturally occurring amino acid
  Transcript Sequence Number=SeqID_42459
  Gene Ontology: Mol. function=sequence-specific DNA binding; Cellular component=nucleus; Biological process=regulation of transcription, DNA-dependent
  Homolog annotation: Hit_ID=Q60D94; Match level="QueryCoverage=89%, HitCoverage=88%, E-value=0.0, Identity=72%"; Hit description=Unknow protein
NIVAILLLLCQQKLFRDRILKNKELSRNGGILSLSHTILKLVVPECLKGSTDLVASVSRLKAKILSILLQLCEAESVSYLDEVATSPNSMRLGQTLALEVLNLLKTAFGRXKITSDSHNKSYPMGSVLISALRLVDVFSDDSNFRSSFMTNTVPFLTQILAIPHDEFVLSWCSVNLPVVEEDANLDYDPFGAVEVALLASDNALTEAKANYSCPFRPSLPSMAYAQTRTSCVVKIIANLHVFVPNICEEQERDLFLQNFQKYLMSGSPKQSVDQPNDFKATKVCINLGSLSDYAKTLIPNFLNEEDVQLLSDFSDKLQTWCKSQVGQVAQQVVHTDTPSESKEDLHPVQQPLPTQASTPDSFMNNLKDVQNMEVSTTAPSTKXRGMLRMRLPKNSKKWWFLQNAVGQDLVHLGVARTASAGFSAVSSGVNTGYQRXQMDLDPASSTVDHFXKTPEXQKESGLQEDEKGDTSMYDDRQPKRRKRTIMNDEQIDELETALVDEPDMHKNAVLLQNWSEKLSMQV

SEQ ID NO: 108434 - protein, 383 aa, Setaria italica
  Transcript Sequence Number=SeqID_42460
  Gene Ontology: Mol. function=sequence-specific DNA binding; Cellular component=nucleus; Biological process=regulation of transcription, DNA-dependent
  Homolog annotation: Hit_ID=Q60D94; Match level="QueryCoverage=61%, HitCoverage=45%, E-value=7e-82, Identity=67%"; Hit description =Unknow protein
  Pfam annotation: Domain name=Homeobox; Domain location=151-214; Score= 3.9; E_value=0.0049; Accession=PF00046.21; Description=Homeobox domain
MFQVVHTDTPSESKEDLHPVQQPLPTQASTPDSFMNNLKDVQNMEVSTTAPSTKLEGNATDETPKNSRNGGFLQNAVGQDLVHLGVARTASAGFSAVSSGVNTGYQRSKMDLDPASSTVDHFKTPELSKESGLQEDEKGDTSMYDDRQPKRRKRTIMNDEQIDELETALVDEPDMHKNAVLLQNWSEKLSMQGPEITASQLKNWLNNRKAKLARIAKERGVPFEGENSDKPSTPATPHLGESSESAGEDSYLPPARVMNAISKGRLVSPDSSELTSSAEFSQNMMLSRPFTRSFSFEPGRLVSLVDGDGKEVGRGKIFHAPPGKSSTESRLCVVDVTELRIEKWRELPHPSEASGRTFQEAEVRNGGVIRVPWDVVRLAPVAQ

SEQ ID NO: 108435 - protein, 160 aa, Setaria italica
  misc_feature (34)..(34): Xaa can be any naturally occurring amino acid
  Transcript Sequence Number=SeqID_42461
KNNMKVNKAIQMARSEGCDVHDWDINTYKAAGGXSFHPELEAYVDFVMQSLPLVQPAIKSLLKVSDSLSSSEVLQLASLLSPSNCNPAKPLQATLEPSIELSNDALEMFASFKENFVGKQSFFRKKIETALRNEGYLYELHVICGINECVGSQKSFIDFT

SEQ ID NO: 108436 - protein, 108 aa, Setaria italica
  misc_feature (52)..(52): Xaa can be any naturally occurring amino acid
  misc_feature (75)..(75): Xaa can be any naturally occurring amino acid
  Transcript Sequence Number=SeqID_42462
  Gene Ontology: Mol. function=helicase activity
  Homolog annotation: Hit_ID=Q1EPC6; Match level="QueryCoverage=90%, HitCoverage=5%, E-value=7e-22, Identity=54%"; Hit description=DNA helicase homolog, putative
LKANDEEADVDVDLATGDASEPNVLDPYGQVYANVPSETHMLAPMENCEHCXAKKFGFEPLGFCCRSGGKINLSXLDTPPELMRLWSSSDADARHFRANIRERRRSNV

SEQ ID NO: 108437 - protein, 122 aa, Setaria italica
  Transcript Sequence Number=SeqID_42463
  Subcellular localization annotation: CTP_CleavageSite=43; ConfidenceScore=5.65e-01
LAALSIGTGCATAAAVAPGAGSSHTPPWSSWSPPRFGANEVTRAAAESSRANPTPPRMLDLFGVKEMAMAAAEAARASPPPAPRTLQLFPADNKVSASPKPPKMQRTLQLFQDKIPDDDEEM

SEQ ID NO: 108438 - protein, 52 aa, Setaria italica
  Transcript Sequence Number=SeqID_42464
TEKPVIKSNEGRGNITYPTSDKILRLSAKARIPQSTHHKTVQRIPAKIDKNR

SEQ ID NO: 108439 - protein, 56 aa, Setaria italica
  Transcript Sequence Number=SeqID_42465
  Subcellular localization annotation: CTP_CleavageSite=43; ConfidenceScore=5.02e-01
LPDVAMAFLNRHGAGRSVAVRTTRGHSHGHFGLVGFACSLTVNCFISKVFMTCILC

SEQ ID NO: 108440 - protein, 212 aa, Setaria italica
  Transcript Sequence Number=SeqID_42466
  Gene Ontology: Mol. function=protein domain specific binding; Cellular component=endosome membrane; Biological process=protein transport
  Homolog annotation: Hit_ID=B6T5E0; Match level="QueryCoverage=92%, HitCoverage=92%, E-value=1e-97, Identity=91%"; Hit description =Charged multivesicular body protein 2b
  Pfam annotation: Domain name=Snf7; Domain location=16-186; Score =191.2; E_value=2.8e-54; Accession=PF03357.13; Description=Snf7
MNPFAKKPTPREVMRSSKRDLTNATRGIERDIASLQQEEKKLVAEIKRTAKTGNEAATKILARQLIRLRQQISNLQGNRAQIRGIATHTQAMHANTSVATGLQSASKAMGALNKQMAPAKQTKIMQEFQKQSAQMDMMNEMMSDSIDDVLDDDQAEEETEELANQVLDEIGVDIASQLSSAPKGKIAGKKVQVDDSSELEELEKRLAALKNP

SEQ ID NO: 108441 - protein, 294 aa, Setaria italica
  misc_feature (268)..(268): Xaa can be any naturally occurring amino acid
  Transcript Sequence Number=SeqID_42467
  Gene Ontology: Mol. function=RNA binding; Biological process =regulation of transcription, DNA-dependent
  Homolog annotation: Hit_ID=B9S9V3; Match level="QueryCoverage=92%, HitCoverage=52%, E-value=1e-104, Identity=66%"; Hit description =Ribosomal RNA small subunit methyltransferase B, putative
  Pfam annotation: Domain name=Methyltransf_15; Domain location=81-293; Score=-128.2; E_value=0.085; Accession=PF09445.2; Description=RNA cap guanine-N2 methyltransferase
  Pfam annotation: Domain name=Nol1_Nop2_Fmu; Domain location=47-293; Score=81.9; E_value=2.2e-21; Accession=PF01189.9; Description =NOL1NOP2sun family
  Pfam module annotation: Pfam domain module=Methyltransf_15::Nol1_Nop2_ Fmu; Domain location=81-293::47-293
KTYFFLFQRIEVDDRAQARALSIIYSHPVWMVRRWIRFHGKDEALRLMNWNNSDPRFSLRVNTSKGYTRADLVKQLESLQVHYEESIMDEFVRIREGMQAVLQAGLLIMGTCSLQDESAGLVVSVVDPQPGETIIDCCAAPGGKTLFMASRLSGQGKIWALDVNKGRLRILMEAAKLHSLDDMITDIHADLRLHTKETTAKYDKVLLDAPCSGLGVLSKRADLRWNRQFEDLEELMCLQDELLDSASTLVKPGGILIYSTCSIDCEEXKRITAFVQRHPVLVHINQHVFFGCKL

SEQ ID NO: 108442 - protein, 90 aa, Setaria italica
  Transcript Sequence Number=SeqID_42468
  Homolog annotation: Hit_ID=Q7XSP3; Match level="QueryCoverage=81%, HitCoverage=20%, E-value=7e-34, Identity=93%"; Hit description =OSJNBa0070M12.10 protein
YRCFTGLCEAASQGNSMPTAAAGGNNKVKVFGGDGKVWFAGKRVRGKLAMWEEDETGISGGKWDWVDGVPGYSDGVYGGFVFDGGFTAIP

SEQ ID NO: 108443 - protein, 101 aa, Setaria italica
  Transcript Sequence Number=SeqID_42469
  Homolog annotation: Hit_ID=Q7XSP3; Match level="QueryCoverage=83%, HitCoverage=23%, E-value=4e-41, Identity=94%"; Hit description =OSJNBa0070M12.10 protein
WDEAGRMPPNMYRCFTGLCEAASQGNSMPTAAAGGNNKVKVFGGDGKVWFAGKRVRGKLAMWEEDETGISGGKWDWVDGVPGYSDGVYGGFVFDGGFTAIP

SEQ ID NO: 108444 - protein, 119 aa, Setaria italica
  misc_feature (29)..(29): Xaa can be any naturally occurring amino acid
  Transcript Sequence Number=SeqID_42470
  Gene Ontology: Mol. function=GTP binding; Cellular component =intracellular
  Homolog annotation: Hit_ID=B6UF30; Match level="QueryCoverage=94%, HitCoverage=17%, E-value=9e-24, Identity=57%"; Hit description =Guanine nucleotide-binding protein-like 3
RTRKVVGESVQESCEELMSDANNREGSKXAGASTQHDKLYTAEGILDPRKRKAEKKRRKANKFSVLNDIDEDNDFKVDYQMKDAAADGEDDESNEAVADGKDGGDEAKENDPMTGIDDA

SEQ ID NO: 108445 - protein, 193 aa, Setaria italica
  Transcript Sequence Number=SeqID_42471
  Gene Ontology: Mol. function=GTP binding; Cellular component =intracellular; Biological process=ribosome biogenesis
  Homolog annotation: Hit_ID=B6UF30; Match level="QueryCoverage=77%, HitCoverage=25%, E-value=3e-54, Identity=76%"; Hit description =Guanine nucleotide-binding protein-like 3
  Pfam annotation: Domain name=GN3L_Grn1; Domain location=16-96; Score =89.3; E_value=1.3e-23; Accession=PF08701.3; Description=GNL3LGrn1 putative GTPase
MGKQSKKSKSKRVTLSQKHKVLRKVKEHHRKKRKEAKREGKAGQRKKVEKDPGIPNEWPFKEQELKALEARRAQALQELELKKEARKERARKRKLGLLEDEDIAKLASAASAQGSEFAEKDTTKENTPSEIAKSHDHSERSFYKELVKVIEASDVILEVLDARDPLGTRCIDMERMVRKADPSKRIVLLLNKI

SEQ ID NO: 108446 - protein, 485 aa, Setaria italica
  misc_feature (464)..(464): Xaa can be any naturally occurring amino acid
  Transcript Sequence Number=SeqID_42472
  Gene Ontology: Mol. function=GTP binding; Cellular component =intracellular; Biological process=ribosome biogenesis
  Homolog annotation: Hit_ID=B6UF30; Match level="QueryCoverage=97%, HitCoverage=78%, E-value=0.0, Identity=84%"; Hit description=Guanine nucleotide-binding protein-like 3
  Pfam annotation: Domain name=MMR_HSR1; Domain location=154-257; Score= 76.4; E_value=1.1e-19; Accession=PF01926.15; Description=GTPase of unknown function
LFVRGLGTSNTPSEIAKSHDHSERSFYKELVKVIEASDVILEVLDARDPLGTRCIDMERMVRKADPSKRIVLLLNKIDLVPKEAVEKWLTYLREEMPTVAFKCNTQEQRTKLGWKSSKLDKASNIPQSSDCLGAENLIKLLKNYSRSHELKLAITVGIVGLPNVGKSSLINSLKRSRVVNVGSTPGVTRSMQEVQLDKKVKLLDCPGVVMLKSSNSGVSVALRNCKRVEKMEDTISPVKEILSICPHEKLLSLYKVPSFSSVDEFLQKVATLRGKLKKGGIVDVEAAARIVLHDWNEGKIPYYTLPPKRDAGEDSDAVIISEGGKEFNIDEIYKAESSYISGLKSIEDFHHIEIPPNAPPGIDEEMLEDGKKPSQPVEESREESMSDVNDREGSKATSASTQHDKLYTAEGILDPRKRKAEKKRRKVNKFSALSDMDADYDFKVDYQMQDAAAAGEDDESTEAXDDKNDGDEAKDNDPMTGVDDA

SEQ ID NO: 108447 - protein, 72 aa, Setaria italica
  Transcript Sequence Number=SeqID_42473
  Gene Ontology: Cellular component=endoplasmic reticulum membrane; Biological process=intracellular protein transmembrane transport
  Homolog annotation: Hit_ID=B4FEC8; Match level="QueryCoverage=61%, HitCoverage=54%, E-value=1e-16, Identity=95%"; Hit description =Protein transport protein Sec61 beta subunit
  Pfam annotation: Domain name=Sec61_beta; Domain location=23-68; Score= 76.7; E_value=8.6e-20; Accession=PF03911.8; Description=Sec61beta family
RGSTAAAASLRRRRTTRDAAGAGAGASSMLQFYTDEAAGRKMSPNTVLIMSIGIVAVVAMLHVFGKLYRTSN

SEQ ID NO: 108448 - protein, 83 aa, Setaria italica
  Transcript Sequence Number=SeqID_42474
  Gene Ontology: Mol. function=transcription regulator activity; Cellular component=nucleus; Biological process=regulation of transcription
  Homolog annotation: Hit_ID=Q9ZPN6; Match level="QueryCoverage=98%, HitCoverage=15%, E-value=1e-27, Identity=61%"; Hit description =Transcription factor MYC7E (Fragment)
CYYKGCDEDKRKQKPLTPAAQAEQEHRKRVLRELNSLISGAAAAPDAGLPGQALFAGQPTWIASGLSSAPCERARQAYNFGLR

SEQ ID NO: 108449 - protein, 569 aa, Setaria italica
  misc_feature (51)..(51): Xaa can be any naturally occurring amino acid
  Transcript Sequence Number=SeqID_42475
  Gene Ontology: Mol. function=transcription regulator activity; Cellular component=nucleus; Biological process=regulation of transcription
  Homolog annotation: Hit_ID=Q9ZPN6; Match level="QueryCoverage=99%, HitCoverage=79%, E-value=0.0, Identity=72%"; Hit description =Transcription factor MYC7E (Fragment)
  Pfam annotation: Domain name=HLH; Domain location=482-531; Score =50.7; E_value=5.8e-12; Accession=PF00010.18; Description=Helix-loop -helix DNA-binding domain
QMPAAMAPGFNQDTLQQRLQAMIEGSRETWTYAIFWQSSVDAATGASLLGXWGDGYYKGCDEDKRKQKPLTPAAQAEQEHRKRVLRELNSLISGAAAAPDEAVEEEVTDTEWFFLVSMTQSFLNGSGLPGQALFAGQPTWIASGLSSAPCERARQAYNFGLRTMVCVPVGTVEPRLGSTDVVFQTAESMAKIRSLFGGGGGAGGGSWPPVQPPAPPPQQPAAGADQAETDPSVLWLADAPVMDIKESLSHPSAEISVSKPPPPPQIHFENGSSSTLTENPSPSVHAPPPPPAPAAAPPQRQHQHNQAHQGPFRRELNFSEFASNPSMAAAPPFFKPESGEILSFGADSNGRRNPSPAPPAATASLTTAPGSLFSQHTATLTAAPANDTKNNNNKRSMEATSRASNTNHHPAATANEGMLSFSSAPTTRPSTGTGAPAKSESDHSDLDASVREVESSRVVAPPPEAEKRPRKRGRKPANGREEPLNHVEAERQRREKLNQRFYALRAVVPNVSKMDKASLLGDAISYINELRGKLTSLESDKDTLHAQIEALKKERDARPAPHAAGLGGH

SEQ ID NO: 108450 - protein, 292 aa, Setaria italica
  misc_feature (14)..(14): Xaa can be any naturally occurring amino acid
  misc_feature (64)..(64): Xaa can be any naturally occurring amino acid
  Transcript Sequence Number=SeqID_42476
  Gene Ontology: Mol. function=aspartyl esterase activity; Cellular component=cell wall; Biological process=cell wall modification
  Pfam annotation: Domain name=Pectinesterase; Domain location=85-292; Score=384.8; E_value=1.5e-112; Accession=PF01095.11; Description =Pectinesterase
MQVSMNEKLKADMXHSVLRNATELSSNALAITNSLGGLLKKLDLDMFKKDSLRRLLSEQDEQGXPVWMRSPERKLMAAGNQPKPNAVVAQDGSGQFKSIQQAVDAMPKGNTGRYVIYVKAGLYNEMVMIPKDKVNIFMYGDGPKKTRVTGRKSFADGITTMKTATFSIEASGFICKNMGFHNTAGAERHQAVALRVQGDLAAFYNCRFDAFQDTLYVHARRQFFRNCVISGTIDFIFGNSAAVFQNCLIITRRPMDNQQNSVTAHGRTDPNMKSGLVIQNCRLVPDQKLFPD

SEQ ID NO: 108451 - protein, 71 aa, Setaria italica
  misc_feature (1)..(1): Xaa can be any naturally occurring amino acid
  Transcript Sequence Number=SeqID_42477
  Subcellular localization annotation: CTP_CleavageSite=53; ConfidenceScore=5.25e-01
XLVFFFFFKNFDICMPFFCLQSSIFLQGNCTRHAFSSQILSPEKNRIGTISARASLPSSFAGKGSNFVIVF

SEQ ID NO: 108452 - protein, 103 aa, Setaria italica
  Transcript Sequence Number=SeqID_42478
  Gene Ontology: Mol. function=oxidoreductase activity; Biological process=oxidation reduction
  Homolog annotation: Hit_ID=Q9FGZ1; Match level="QueryCoverage=92%, HitCoverage=14%, E-value=1e-35, Identity=74%"; Hit description =Phytoene dehydrogenase-like
KNMVEFFDLLLSPASKILNYWFESDVLKATLATDAVIGTMAGVNTPGSGYVLLHHVMGETGGQRGVWAYVQGGMGSVSSAISKAALEAGVQIVTNPNPLLPFL

SEQ ID NO: 108453 - protein, 429 aa, Setaria italica
  Transcript Sequence Number=SeqID_42479
  Gene Ontology: Mol. function=oxidoreductase activity; Biological process=oxidation reduction
  Homolog annotation: Hit_ID=B9S6H4; Match level="QueryCoverage=99%, HitCoverage=75%, E-value=0.0, Identity=71%"; Hit description =Phytoene dehydrogenase, putative
YPRYEEQLERFCKLMDFVIDSAPPELRQELHASVVDRMKDRVDKSAFWGSLLRHVMQQGQKNMVEFFDLLLSPASKILNYWFESDVLKATLATDAVIGTMAGVNTPGSGYVLLHHVMGETGGQRGVWAYVQGGMGSVSSAISKAALEAGVQIVTNAEVSQVMVNETTGKVEGVALADGTEVHSPVVLSNATPYKTFVDLVPANVLPKDFLCAINTADYSSATTKINVAVDRLPQFHCCKDINPEGGPEHMGTIHIGSESMEEIELAYKEAAGGVSSKRPVIEMTIPSVLDKTISPPGQHVINLFVQYTPYKLSEGSWQDSNVRKSFAERCFSLIDEYAPGFSSSVVGYDMLTPPDLEREFGLTGGNIFHGAMGLDSLFLMRPAKGWSDYRTPVKGLYLCGSGAHPGGGVMGAPGRNAASVVLEDLKKAK

SEQ ID NO: 108454 - protein, 183 aa, Setaria italica
  misc_feature (39)..(39): Xaa can be any naturally occurring amino acid
  misc_feature (175)..(175): Xaa can be any naturally occurring amino acid
  Transcript Sequence Number=SeqID_42480
  Gene Ontology: Mol. function=ARF guanyl-nucleotide exchange factor activity; Cellular component=Golgi apparatus; Biological process =ubiquitin-dependent protein catabolic process
  Homolog annotation: Hit_ID=B9RRY8; Match level="QueryCoverage=99%, HitCoverage=32%, E-value=4e-64, Identity=62%"; Hit description =Protein pim1, putative
  Pfam annotation: Domain name=RCC1; Domain location=32-84; Score=24.9; E_value=0.00032; Accession=PF00415.10; Description=Regulator of chromosome condensation (RCC1)
  Pfam annotation: Domain name=RCC1; Domain location=94-144; Score=5.2; E_value=0.23; Accession=PF00415.10; Description=Regulator of chromosome condensation (RCC1)
  Pfam module annotation: Pfam domain module=RCC1::RCC1; Domain location=32-84::94-144
WDFHGHTVVKVACGNEHVVAAVSAGEIYTGGDLVCYAWXNNNHGQLGLGDKESRSRPVLISAFSEESSWEVYEIACGASHTAVLTNKKSFDQIESRCWTFGLGDKGQLGHGNQATICSPQPVDGLPTGSFLISLDCGLFHTTVVSSDGEVWCWGMERGLGLCPDASYSGVDAGDXALSPIRVQ

SEQ ID NO: 108455 - protein, 243 aa, Setaria italica
  Transcript Sequence Number=SeqID_42481
GTASKPFEIQYSDDEPPLHRSRDRSPPPEPRAPAPEVVPGQLALVPHEEEASAEQVATAGIVTLAGRSTQDISEHDQGSDSETESDDPSSALFMSAEPPTAVANRLDLAEGTLLFGGTQRKVLHFSSGHRVRSDLQKAQDSFSFLIMEEDLGQESAEEILTHAQDLSMKAFVACHVAQRRVREDLRQSELSKQSSESALSKEIKVVKKLQFEKETLATALDTEKTNLFCLRLRKIPFRRETKS

SEQ ID NO: 108456 - protein, 85 aa, Setaria italica
  Transcript Sequence Number=SeqID_42482
VGCELIIVSLASQALILIIKQEMPRSQLQHAGDFRCMDCSETFRRDGAGHGSSTIANRTPSSVRAQELSPAGHNRRWSHYSRRRA

SEQ ID NO: 108457 - protein, 146 aa, Setaria italica
  Transcript Sequence Number=SeqID_42483
  Gene Ontology: Mol. function=protein serine/threonine kinase activity; Biological process=protein amino acid phosphorylation
  Homolog annotation: Hit_ID=B9RSY9; Match level="QueryCoverage=100%, HitCoverage=11%, E-value=2e-46, Identity=57%"; Hit description=ATP binding protein, putative
ALLCKNSRRWLPPFLFVNAKLISAVFGLGKEKEGFIHQCTEAFVQLVASLVPAILDTVCSDIQQVLAGKRHGPVTALAGRAHPKSTIHLFPVILHLLGSASFRHRVMTSHVLLQLANLIKILEAPFQARDDFQMTLLRVLEAATEE

SEQ ID NO: 108458 - protein, 104 aa, Setaria italica
  Transcript Sequence Number=SeqID_42484
  Gene Ontology: Cellular component=integral to membrane
  Homolog annotation: Hit_ID=B6TI82; Match level="QueryCoverage=89%, HitCoverage=34%, E-value=5e-23, Identity=53%"; Hit description =Transmembrane protein 56
TPFVNLRWYLDVAGQKTCNLYLYNGVTLFVGWLVARIILFVYLFTHMYLHYDQARSIFTLGFYSLVAVPSTVSVMNVFWFWKILKGMVKTMSRRRKHSENGKTD

SEQ ID NO: 108459 - protein, 295 aa, Setaria italica
  misc_feature (67)..(67): Xaa can be any naturally occurring amino acid
  Transcript Sequence Number=SeqID_42485
  Gene Ontology: Mol. function=metal ion binding; Biological process =RNA-dependent DNA replication
  Pfam annotation: Domain name=DUF594; Domain location=229-286; Score =105.2; E_value=2.2e-28; Accession=PF04578.5; Description=Protein of unknown function, DUF594
LSLKLTVTKSFTKLLLLRKECKWFGRWENKIGQYSLMDSFRYPDNQFLEKHSELMTMFREGRKKDSXIPVPMEVKKAIAWTLKASNGQIANGAPALVRHGMPELCWACPTNNEFTLAQVILLWHIATSYCEISESNRVNVQPTAQTSNPKLVATSLSKYCAYLVKFAPKLVPGSPIETESTLEELVYEARRAFKVNPDILTLFGELQQQHNEGRARDWMLAKGAVLGIKLASMEDQVTRWNLLADFWAELMLYIAPCDNVAAHIESLAEGGEFVTHVWALLMHAGILERPAAHAI

SEQ ID NO: 108460 - protein, 54 aa, Setaria italica
  Transcript Sequence Number=SeqID_42486
PAGGDIPFRSSLCSQSCTDMGNSLKKNLKKRLSENSLQYSFSCSGESSNHATYT

SEQ ID NO: 108461 - protein, 735 aa, Setaria italica
  misc_feature (26)..(26): Xaa can be any naturally occurring amino acid
  Transcript Sequence Number=SeqID_42487
  Homolog annotation: Hit_ID=Q84VD2; Match level="QueryCoverage=34%, HitCoverage=100%, E-value=1e-107, Identity=79%"; Hit description =Myosin-like protein (Fragment)
  Pfam annotation: Domain name=BRE1; Domain location=315-403; Score= -6.1; E_value=0.056; Accession=PF08647.3; Description=BRE1 E3 ubiquitin ligase
  Pfam annotation: Domain name=DUF812; Domain location=106-493; Score= -319.4; E_value=0.1; Accession=PF05667.3; Description=Protein of unknown function (DUF812)
  Pfam annotation: Domain name=DUF827; Domain location=285-505; Score= -110.7; E_value=0.039; Accession=PF05701.3; Description=Plant protein of unknown function (DUF827)
  Pfam annotation: Domain name=DUF869; Domain location=355-697; Score= -291.6; E_value=0.086; Accession=PF05911.3; Description=Plant protein of unknown function (DUF869)
  Pfam annotation: Domain name=EzrA; Domain location=75-520; Score= -387.7; E_value=0.055; Accession=PF06160.4; Description=Septation ring formation regulator, EzrA
  Pfam module annotation: Pfam domain module=BRE1::DUF812::DUF827::DUF86 9::EzrA; Domain location=315-403::106-493::285-505::355-697::75-520
KRATELLLAELNEAHERADNLQEELXKAEAALSESYKQYSVTESARADAVRHLEHVMHAQSQTRRKQLDHLMELNSTSSQLREVCFELSHHLVNAFSKDVDLICYMENFMKSSGKWIDGTNMMDVPIASKHVLSNRINSKKAHIPNAPLEIKMDDTDERQILHHLAIACRALSECVKDCNDLKRSIDEHGFSVEQKATELFDVMSNLQNRLTSQQNELESLRAKFVELQLEMKGRDEEIVSERRNMSLLYEACTSSVAEIEGMTDIYPGNQSYAVDHSADERIKSLVEQLVLAVKTSRNSNEGSTKELKATVLELQQELQAKDIQISTISSELSYQLRAAESSAKQLSVELEGAKMEVHNLAKQVDMLHNENKALETQVNELKNMESMASEQHGRIKELTDELSRKDQEIEGLMQALDEEEKELEVMENKSHELEQMLQEKEFALKSAEVSRTKALAKLATTVDKFDELHSLSENLLAEVENLQSQLQERDSEISFLRQEVTRSTNELLTTEESNKKYSSQINDFIKWLETALLQFGVHCDYDGTPVPVYMEMLSKKIGSLISESDDLRVVVQSKDSLLQVERTKMEELMRKSDALEASLSQKDSQIGLLRRDRASSQLNRSINLPGTSEIEQMNDKSPAVVTQLRGARKVNNDQIAIDVEMDKDKQLDDEDDDKAHGFKSLTMSRFVPKFTRPISDRIDGMWVSGDRLLMRQPTLRLGILIYWIALHALLASFI

SEQ ID NO: 108462 - protein, 215 aa, Setaria italica
  Transcript Sequence Number=SeqID_42488
LYYAQAQINKLQESDAEQMQKYQSLVLELESVGKQRDNLQEQLNQEEQKCTSLREKLNVAVRKGKGLVQHRDSLKQTIEEMNAVIEKLKNERKQHIESLETEKSSLMDRLAENEKSLHETNQYLSGLLNALNKVDIAREFDTDPVTKVEKIAKFCLDLQETVVSSQNEVKKSKRATELLLAELNEAHERADNLQEELFKAEAALSESYKQYSVSN

SEQ ID NO: 108463 - protein, 44 aa, Setaria italica
  Transcript Sequence Number=SeqID_42489
VLEFQCSKLYCLEAPYLGPFAERTIKFFLFVNHPAKLIKHVHFL

SEQ ID NO: 108464 - protein, 42 aa, Setaria italica
  Transcript Sequence Number=SeqID_42490
LSFVHSLALLMKRGMLRSRSFNLWTLFFCLLFLCKDDEVRYF

SEQ ID NO: 108465 - protein, 66 aa, Setaria italica
  Transcript Sequence Number=SeqID_42491
SLTVFLSSLFEIRSPLVAIFIRFSQGRNIRIWIIEILHMLQVKELIRYCCSPSLAMPYDWILERIG

SEQ ID NO: 108466 - protein, 78 aa, Setaria italica
  Transcript Sequence Number=SeqID_42492
  Gene Ontology: Mol. function=DNA photolyase activity; Cellular component=mitochondrion; Biological process=protein-chromophore linkage
  Homolog annotation: Hit_ID=Q651U1; Match level="QueryCoverage=100%, HitCoverage=13%, E-value=2e-32, Identity=84%"; Hit description =Cryptochrome DASH, chloroplastic/mitochondrial
PSIAKAVSAHTVYAHKETCSEELLVERLVRKALEQVQITQGGAPGQKKPMNPRLQLIWGATLYHIDDLPFTVSNLPDV

SEQ ID NO: 108467 - protein, 348 aa, Setaria italica
  misc_feature (240)..(240): Xaa can be any naturally occurring amino acid
  misc_feature (340)..(341): Xaa can be any naturally occurring amino acid
  Transcript Sequence Number=SeqID_42493
  Gene Ontology: Mol. function=DNA binding; Biological process =regulation of transcription, DNA-dependent
  Homolog annotation: Hit_ID=B9GL80; Match level="QueryCoverage=68%, HitCoverage=45%, E-value=3e-61, Identity=52%"; Hit description=High mobility group family
  Pfam annotation: Domain name=HMG_box; Domain location=121-188; Score =61.8; E_value=2.5e-15; Accession=PF00505.11; Description=HMG (high mobility group) box
  Pfam annotation: Domain name=HMG_box; Domain location=242-308; Score =82.0; E_value=2.2e-21; Accession=PF00505.11; Description=HMG (high mobility group) box
  Pfam module annotation: Pfam domain module=HMG_box::HMG_box; Domain location=121-188::242-308
KAKRAPARSGKAAKAAAAAASVVDDVAELQGMLERLRLEKEKAEEMVRERDEVIRKKEEEIETKEKEQERLQAELRKVQRAKEFKPTVSFPLVKSLLEKEQDAGDKGKRKKGKGKAVPERKKPCTAYVLWLKDQWTEIKKENPEADFKEVTNTLGAKWKALGAEEKQPYEERYRQEKEAYLQVVGQEKREAEAMKLLEEQQMQWTAKELLEQYLKFRQEAEEGDGKKGKRKNSKKVKDPXKPKQPMSAYFVYTQERRAALVAEKKNVPEIGKITGEEWKNMTEAQKAPYEEVAKKQKEEYHKQMGVYKKKKIEEAASLEKEEEEQKKIMKQEALQLLKKXXKADNIIK

SEQ ID NO: 108468 - protein, 334 aa, Setaria italica
  misc_feature (42)..(42): Xaa can be any naturally occurring amino acid
  misc_feature (189)..(189): Xaa can be any naturally occurring amino acid
  Transcript Sequence Number=SeqID_42494
  Gene Ontology: Mol. function=transporter activity; Cellular component= integral to membrane; Biological process=RNA-dependent DNA replication
  Homolog annotation: Hit_ID=B6ST65; Match level="QueryCoverage=99%, HitCoverage=62%, E-value=1e-142, Identity=73%"; Hit description =Glycerol 3-phosphate permease
  Pfam annotation: Domain name=MFS_1; Domain location=1-331; Score =73.8; E_value=6.2e-19; Accession=PF07690.8; Description=Major Facilitator Superfamily
AIGMFFVGHIGDRVDLRNLLTIGMIGTGLFTAAFGAGYWLNXHNFYYFLGIQLIAGLFQSTGWPSVVAVVGNWFGKKKRGLIMGIWNAHTSVGNISGSLIAAALLKFGWGWSFVVPGVMIALVGLIVFLFLPSGPEAIGSEDDHLNDSGKNEIGTPLLEGQTEVTEKPVGFIEALRIPGVVPFALCLFXCKLVAYTFLYWLPFYISHTAVGGKYLSDSTAGALSTLFDLGGVIGGILAGHMSDRLDARALTAASFTFSAIPTLFFYRMYGSISLCWNIILMFITGMLVNGPYALITTAVSADLGTHSSLRSNSRALATVTAIIDGTGSAGAAVV

SEQ ID NO: 108469 - protein, 176 aa, Setaria italica
  Transcript Sequence Number=SeqID_42495
  Gene Ontology: Mol. function=phosphatidylserine decarboxylase activity; Cellular component=endoplasmic reticulum membrane; Biological process=phospholipid biosynthetic process
  Homolog annotation: Hit_ID=B2W047; Match level="QueryCoverage=58%, HitCoverage=57%, E-value=4e-14, Identity=38%"; Hit description =Transmembrane protein 85
  Pfam annotation: Domain name=DUF1077; Domain location=16-174; Score =233.6; E_value=5e-67; Accession=PF06417.4; Description=Protein of unknown function (DUF1077)
MEKGKGLARRWAVELHDVSSSASPAVPDPPGFTRSAPDADDAAGARQRKDSEAAWKAQKAWEVAQSPFKNLMMMGFMMWMAGSTVHLFSIGITFSALWQPISALRSVGKVFEPFKDPRVDTIAPKLLFIALNLAAMGLGVWKLNTLGLLPTNPSDWVSSLAPAPEVEYAGGGIPLI

SEQ ID NO: 108470 - protein, 97 aa, Setaria italica
  misc_feature (1)..(1): Xaa can be any naturally occurring amino acid
  Transcript Sequence Number=SeqID_42496
XPIRQHLQILFLEWVCEMISWPWHSKIGDSVTVQTNHGPCVMCLPSGRSLPCALRLLGPAARLPCASGAACARHRPPTAPRPNRMPTERKAARNGEG

SEQ ID NO: 108471 - protein, 425 aa, Setaria italica
  misc_feature (84)..(84): Xaa can be any naturally occurring amino acid
  Transcript Sequence Number=SeqID_42497
  Gene Ontology: Mol. function=nucleic acid binding
  Homolog annotation: Hit_ID=Q7F9N5; Match level="QueryCoverage=36%, HitCoverage=42%, E-value=2e-10, Identity=34%"; Hit description =OSJNBa0054D14.3 protein
  Pfam annotation: Domain name=zf-CCHC; Domain location=347-364; Score =32.2; E_value=2.1e-06; Accession=PF00098.15; Description=Zinc knuckle
  Pfam annotation: Domain name=zf-CCHC; Domain location=375-391; Score =0.6; E_value=0.63; Accession=PF00098.15; Description=Zinc knuckle
  Pfam annotation: Domain name=zf-CCHC; Domain location=403-420; Score =20.1; E_value=0.00028; Accession=PF00098.15; Description=Zinc knuckle
  Pfam annotation: Domain name=zf-CCHC; Domain location=46-63; Score =14.1; E_value=0.0029; Accession=PF00098.15; Description=Zinc knuckle
  Pfam annotation: Domain name=zf-CCHC; Domain location=70-89; Score =0.5; E_value=0.63; Accession=PF00098.15; Description=Zinc knuckle
  Pfam annotation: Domain name=zf-CCHC; Domain location=95-112; Score =8.6; E_value=0.026; Accession=PF00098.15; Description=Zinc knuckle
  Pfam module annotation: Pfam domain module=zf-CCHC::zf-CCHC::zf -CCHC::zf-CCHC::zf-CCHC::zf-CCHC; Domain location=347-364::375 -391::403-420::46-63::70-89::95-112
MQEPRRDDGLLRLHTIKRNWKAATQASSWSSNGHNKIQNSCPAKDKLCVTCSEKGHNSHDCPMKDREEKLICTICNKVGHYYLXVDCRLNVSENHACHRCGEKGHYASKGPMHCGDKFIYTGLSCSSCDTNHLLGRCPMSNITCFLSEGKDCVPAQCHLSPILTAVNQHCRESFRGTLKEGRTVTRLDPPSGIELYDDSRECQLNGNNEMAPKVSSCSLGEPVNRDGGSPIKTHVLAADKNNPATTTDEPLTPASGFTCLDCHEDNCHSANSCSKKKSPRELEPYDCNHGCQSMGASEMVVPNVSSISPVVQDRCDWVSPIITKIPASEDTNAEAMTDVVQTKVLVVTCFSCHDEGHWARNCPKKAPRKLVHCGVTCLNCNGNHYTIRCPKKKKPGELKLCNVTCLRCRDKGHFADRCPKMQQPR

SEQ ID NO: 108472 - protein, 83 aa, Setaria italica
  Transcript Sequence Number=SeqID_42498
  Gene Ontology: Mol. function=nucleoside-triphosphatase activity; Cellular component=intracellular; Biological process=regulation of transcription, DNA-dependent
PIWHCILECYREIVAYHKTNIVSQPIPPLSKKLLDMAGCGALKAFQDRLCNAFNGLRLLRLTLQQWQFETKFPDLALPKSTLV

SEQ ID NO: 108473 - protein, 50 aa, Setaria italica
  Transcript Sequence Number=SeqID_42499
QTCVSVDCMLPVRCFNTNCYSVLIFCNVKVLLMMYGLAIMTSHWQCLQVK

SEQ ID NO: 108474 - protein, 58 aa, Setaria italica
  Transcript Sequence Number=SeqID_42500
TEQHHNISVIAPYRALLLRKCYLQLHRLVTSQKMKLNLNILVRPRFHILAAGSPTKPT

SEQ ID NO: 108475 - protein, 131 aa, Setaria italica
  Transcript Sequence Number=SeqID_42501
ATMKGPMPGVDLRFYHSSIRPAGLPLGSDVSSAFHPIHDLQIDNSPRELTLPVAQEATWEACSPSQTQQNSSVHKKCLPAFVNNVTSESYVWSMQSKSKARVQSLACEFQETDSPVMKIKVCKYYSPHQNK

SEQ ID NO: 108476 - protein, 87 aa, Setaria italica
  Transcript Sequence Number=SeqID_42502
PEPDSEQAVTGAGLGAPAAVEHPRPNAAAEVSPAPPPPDAGAQTGAASAAGEEAPEQVAGSNAGVEEAEARLASAEVITAAESEYRR

SEQ ID NO: 108477 - protein, 79 aa, Setaria italica
  Transcript Sequence Number=SeqID_42503
  Gene Ontology: Mol. function=structural constituent of ribosome; Cellular component=ribonucleoprotein complex; Biological process =translation
  Homolog annotation: Hit_ID=B9RUR2; Match level="QueryCoverage=69%, HitCoverage=50%, E-value=1e-19, Identity=85%"; Hit description=60S ribosomal protein L37a, putative
  Pfam annotation: Domain name=Ribosomal_L37ae; Domain location=1-78; Score=62.1; E_value=2.2e-15; Accession=PF01780.11; Description =Ribosomal L37ae protein family
MVYKLAEHLYVRYRCEVLFSPNATFAVFSYQFAVKRKAVGIWGCKDCGKVKAGGAYTMNTASAVTVRSTIRRLREQTEA

SEQ ID NO: 108478 - protein, 81 aa, Setaria italica
  Transcript Sequence Number=SeqID_42504
  Gene Ontology: Mol. function=structural constituent of ribosome; Cellular component=ribonucleoprotein complex; Biological process =translation
  Homolog annotation: Hit_ID=B6TBB9; Match level="QueryCoverage=87%, HitCoverage=78%, E-value=2e-33, Identity=100%"; Hit description=60S ribosomal protein L37a
  Pfam annotation: Domain name=Ribosomal_L37ae; Domain location=2-81; Score=138.0; E_value=2.9e-38; Accession=PF01780.11; Description =Ribosomal L37ae protein family
MTKRTKKAGIVGKYGTRYGASLRKQIKKMEVSQHSKYFCEFCGKFAVKRKAVGIWGCKDCGKVKAGGAYTMKYVCSFQPKN

SEQ ID NO: 108479 - protein, 111 aa, Setaria italica
  Transcript Sequence Number=SeqID_42505
  Gene Ontology: Mol. function=structural constituent of ribosome; Cellular component=ribonucleoprotein complex; Biological process =translation
  Homolog annotation: Hit_ID=B9RUR2; Match level="QueryCoverage=84%, HitCoverage=85%, E-value=5e-44, Identity=92%"; Hit description=60S ribosomal protein L37a, putative
  Pfam annotation: Domain name=Ribosomal_L37ae; Domain location=21-110; Score=211.5; E_value=2.2e-60; Accession=PF01780.11; Description =Ribosomal L37ae protein family
RRRYRPAPRRSSRLRPVDAMTKRTKKAGIVGKYGTRYGASLRKQIKKMEVSQHSKYFCEFCGKFAVKRKAVGIWGCKDCGKVKAGGAYTMNTASAVTVRSTIRRLREQTEA

SEQ ID NO: 108480 - protein, 116 aa, Setaria italica
  Transcript Sequence Number=SeqID_42506
  Gene Ontology: Mol. function=structural constituent of ribosome; Cellular component=ribonucleoprotein complex; Biological process =translation
  Homolog annotation: Hit_ID=B9RUR2; Match level="QueryCoverage=82%, HitCoverage=87%, E-value=1e-44, Identity=91%"; Hit description=60S ribosomal protein L37a, putative
  Pfam annotation: Domain name=Ribosomal_L37ae; Domain location=26-115; Score=211.5; E_value=2.2e-60; Accession=PF01780.11; Description =Ribosomal L37ae protein family
RNCAAAARCRPAPRRSSRLRPVDAMTKRTKKAGIVGKYGTRYGASLRKQIKKMEVSQHSKYFCEFCGKFAVKRKAVGIWGCKDCGKVKAGGAYTMNTASAVTVRSTIRRLREQTEA

SEQ ID NO: 108481 - protein, 408 aa, Setaria italica
  Transcript Sequence Number=SeqID_42507
  Gene Ontology: Mol. function=catalytic activity; Cellular component =chloroplast
  Homolog annotation: Hit_ID=B6U2F2; Match level="QueryCoverage=95%, HitCoverage=71%, E-value=1e-162, Identity=73%"; Hit description =Protein phosphatase 2C
  Pfam annotation: Domain name=PP2C; Domain location=146-367; Score= -51.8; E_value=0.0071; Accession=PF00481.13; Description=Protein phosphatase 2C
  Pfam annotation: Domain name=SpoIIE; Domain location=182-399; Score= -4.7; E_value=0.0028; Accession=PF07228.4; Description=Stage II sporulation protein E (SpoIIE)
  Pfam module annotation: Pfam domain module=PP2C::SpoIIE; Domain location=146-367::182-399
CFSQTGAASAAGEEAPEQVAGSNAGVEEAEARLASAEVITAAESEYETEGDGVAVGAGVPTSGAVVKTTGTGLEQREEAAGTAGLEESEAASEGSTVQDFDTDVETESSGSSGDEQGAEFGVPLPIVERNSKEVDWKKDTSEVKDSDRMVEIAQSELVLSSGAAILPHPSKVATGGEDAYFIAGNGWFGVADGVGQWSFEGINAGLYARELMDGCKKFITENQGALDFGPEQILSKAADEAHSPGSSTVLVAHFDGQVLQASNIGDSGFLVIRNGEVYEKSKPMVYGFNFPLQIEKGDDPLKLVQNYTIDLEEGDAIVTATDGLFDNVYEHEVAAIISKSLQADLKPAEIAEHLAAKAQEVGRSGAGRSPFSDAALSVGYLGFSGGKLDDIAVVVSIVRTSEIQVIQD

SEQ ID NO: 108482 - protein, 186 aa, Setaria italica
  Transcript Sequence Number=SeqID_42508
  Gene Ontology: Mol. function=transferase activity, transferring groups other than amino-acyl groups
  Homolog annotation: Hit_ID=B6TXA0; Match level="QueryCoverage=98%, HitCoverage=42%, E-value=4e-91, Identity=88%"; Hit description =Anthranilate N-benzoyltransferase protein 1
RRGRSTSCAVTAHLWRAMCVARGLPADGDTRLRVPANIRQRLRPQLPAAYFGNAIVRDLVTVKVGEVLSQPLGFVAERIKRAVSRVDDAYVRSVIDYLEVESEKGSQAARGQFMPESDLWVVSWLGMPIYDADFGWGRPGFVAPAQMFGSGTAYVTQGPDKDDPIKVLFALEPEYLQTFEKAFYGE

SEQ ID NO: 108483 - protein, 163 aa, Setaria italica
  Transcript Sequence Number=SeqID_42509
  Gene Ontology: Mol. function=acyl carrier activity; Cellular component=chloroplast; Biological process=fatty acid biosynthetic process
  Subcellular localization annotation: CTP_CleavageSite=7; ConfidenceScore=5.06e-01
MAMPAPQAATRVVAGGQLVFGKPEKAKGGRLLVRSCDNGGGRNGRRVTVEAVNGAVKLNGAAVAADVRQVPAPSSMDDGGDAFRLGKFVEGRLVYRQQFVIRSYEIGPDRTATMETLMNLLQETALNHVMCSGLAGDGFGATRQMSLRKLIWVVTRINIQVNK

SEQ ID NO: 108484 - protein, 180 aa, Setaria italica
  Transcript Sequence Number=SeqID_42510
  Subcellular localization annotation: CTP_CleavageSite=71; ConfidenceScore=5.51e-01
LTSTKKNTAQTFTVHVLTSIIKRQTAPRHGPTNAPSTSSHATSALTPGPRTPQTQKHTQIHYSTHERPLLRAAPRSYDTNVNPNADAAAATRPRRPRPYTGAVPCVARDSKIVDRTRAGRARWTHSDLPAASAAGAAAASASAGAAASSAAAAAAGAASSLASSSFASASVAAVSASASA

SEQ ID NO: 108485 - protein, 74 aa, Setaria italica
  Transcript Sequence Number=SeqID_42511
RLCVSISEMCDVMKACACTCLRLLKYPCSAKLSSQCSCNRIIVLYYARQMQQFQYFRVAISLYLGYQNITLVST

SEQ ID NO: 108486 - protein, 134 aa, Setaria italica
  misc_feature (43)..(43): Xaa can be any naturally occurring amino acid
  Transcript Sequence Number=SeqID_42512
  Gene Ontology: Mol. function=nucleic acid binding; Cellular component= chromatin; Biological process=DNA integration
  Homolog annotation: Hit_ID=Q8LMF6; Match level="QueryCoverage=88%, HitCoverage=9%, E-value=1e-33, Identity=55%"; Hit description =Putative retroelement
MLDHTPEIINALHAYHTTELWHARLGHPGTASLHRILNTLVFXCSKSDTHTCHACRLSKHVRLPFFESTHVASFPFQLLHCDVWTSPIISNSGYKYYLVMLDDYSHFAWTFPLRHKSNVLPAIIAFHAFVCTQI

SEQ ID NO: 108487 - protein, 126 aa, Setaria italica
  Transcript Sequence Number=SeqID_42513
  Gene Ontology: Cellular component=integral to membrane
  Homolog annotation: Hit_ID=B6SXZ2; Match level="QueryCoverage=95%, HitCoverage=18%, E-value=3e-42, Identity=70%"; Hit description =Transmembrane 9 superfamily protein member 4
FFYIPCTTIWTHQFYYMFGIVFLVFVILIVTCAEITIVLCYFQLCNEDYRWWWRSYLTSGSSAVYLFLYAAFYFFTRLQITKAVSGMLFFGYMFIVSYAFFVLTGTIGFYACLWFTRLIYSSVKID

SEQ ID NO: 108488 - protein, 271 aa, Setaria italica
  misc_feature (11)..(11): Xaa can be any naturally occurring amino acid
  Transcript Sequence Number=SeqID_42514
  Gene Ontology: Mol. function=DNA binding
  Homolog annotation: Hit_ID=B6U674; Match level="QueryCoverage=88%, HitCoverage=58%, E-value=3e-64, Identity=61%"; Hit description=6b -interacting protein 1
  Subcellular localization annotation: CTP_CleavageSite=46; ConfidenceScore=5.33e-01
EGPKPVSSWQXFDRLDFLLAPTYGNKPGSGGGGGGGHNSNSRSPVPAALRVSFPQRSRTPLMPAAASAAKRRPPSPEPSVSSESSDGFPPLPALPAANGKRRRTDEGRADGGSSGDRTQGLRDLAQAIRRFGEAYERVEAAKLDQAAEMERRRIDFARELESQRAQFFLNAQMELTQAKNHASSGVATIPAGATTVGGSSRRMSMATDAGGSSNHHHHSRYRISHGDRHRNAPRSHYQQYHDNNHAAAAAAASEGEQSDEEEEDDEEEESQ

SEQ ID NO: 108489 - protein, 102 aa, Setaria italica
  Transcript Sequence Number=SeqID_42515
  Gene Ontology: Mol. function=electron carrier activity; Biological process=response to oxidative stress
  Homolog annotation: Hit_ID=Q9LGU0; Match level="QueryCoverage=87%, HitCoverage=26%, E-value=5e-21, Identity=53%"; Hit description=Class III peroxidase 6
  Pfam annotation: Domain name=peroxidase; Domain location=1-102; Score= -79.2; E_value=0.00086; Accession=PF00141.15; Description=Peroxidase
AINYGVPSGRRDGLASAASDATQSLPPPFAELGRLTELFAAKGFTQDELVTLSGAHSVGRAHCGSFAERIRPNVSETMDAEYGAGLQRRCAEDAGDGAAVIT

SEQ ID NO: 108490 - protein, 72 aa, Setaria italica
  Transcript Sequence Number=SeqID_42516
PLSPIFYSSLNKKSNRVQARKTNKVANNHNIYSSLIWQILIFHSLENVAILTCNMLKQCKNSYSTTSYAMNQ

SEQ ID NO: 108491 - protein, 329 aa, Setaria italica
  Transcript Sequence Number=SeqID_42517
  Homolog annotation: Hit_ID=Q7X8Q0; Match level="QueryCoverage=99%, HitCoverage=95%, E-value=1e-139, Identity=72%"; Hit description =P0041A24.7 protein
TVDDKSENAWRSRVVVLYVMHLITYFTNIIGVVTIALISIVSIFGLVCLCRSVYFQLWIKRRGYQRLSYFNGPWLTRITLMLVGFWWGVGEVLRLTFVNGEGRLISDRSWQVNVCKFYIISNLGFAEPGLFLLLSFLLSAALQKQELGTLNRKWNRKTIRAAFILCSPSLIWDACVVFVGARISSDDGQPPKIAKYWYSASKIHNGDITCTYPLLSSIFLGAFYIILTVYVMFVGRQMLSLVINKGLRRRIYMLIVATGILLPRATLLGLSVLPWPGEVHEALVFVSFLVLMLAAMVGIVILVYFPVADTFAIGDQEHIEMQASRDMIL

SEQ ID NO: 108492 - protein, 207 aa, Setaria italica
  misc_feature (69)..(69): Xaa can be any naturally occurring amino acid
  Transcript Sequence Number=SeqID_42518
  Gene Ontology: Mol. function=diacylglycerol kinase activity; Biological process=activation of protein kinase C activity
  Homolog annotation: Hit_ID=Q94DX0; Match level="QueryCoverage=99%, HitCoverage=42%, E-value=1e-103, Identity=85%"; Hit description =Pentatricopeptide (PPR) repeat protein-like
  Pfam annotation: Domain name=PPR; Domain location=126-160; Score=8.7; E_value=0.83; Accession=PF01535.12; Description=PPR repeat
  Pfam annotation: Domain name=PPR; Domain location=22-56; Score=11.4; E_value=0.4; Accession=PF01535.12; Description=PPR repeat
  Pfam annotation: Domain name=PPR; Domain location=89-123; Score=2.6; E_value=4.4; Accession=PF01535.12; Description=PPR repeat
  Pfam module annotation: Pfam domain module=PPR::PPR::PPR; Domain location=126-160::22-56::89-123
RLNTGIWIHQYVQKQGWELDVVLGTALVDMYGKCGHIAEGARVFSEMVERNVYTWNSIIGALALAQDGXKTALQWFFQMETDGVRPDAVTLICVLCACAHAGFVDIGRKIFNSIVQGKYGFQPGIKHFGCMVDLLSRSGHLDDAFRLVETMPSQPNAVIWGLLLRGCKARGDSILSEHVTMRLVELEPENASHYVLLANLYAGTGRW

SEQ ID NO: 108493 - protein, 149 aa, Setaria italica
  misc_feature (135)..(135): Xaa can be any naturally occurring amino acid
  Transcript Sequence Number=SeqID_42519
  Gene Ontology: Mol. function=receptor activity
  Homolog annotation: Hit_ID=Q6Z027; Match level="QueryCoverage=99%, HitCoverage=7%, E-value=3e-59, Identity=74%"; Hit description =Putative death receptor interacting protein
IVTVPVNWFALALTHNDESLRIDAAESLFLNPKTSSLPSSLELSLLKEAVPLNMRCSSTAFQMKWTSLFRKFFARVRTALDRQVKQGSWIPSSTASVKGADSVDAANAAVTQRAEDLFQFMKWLSSFLFNSCYPXPYERKQLTMELILT

SEQ ID NO: 108494 - protein, 101 aa, Setaria italica
  Transcript Sequence Number=SeqID_42520
EQDNHRHTNIVLLHMATVKSNTTRAMCAALCILVMVPSAVLAELVVVDRVHIPMDQCSYQKCITACIHRIRRAYILVEGYCETTKMCFCKYSEERHPPTLE

SEQ ID NO: 108495 - protein, 84 aa, Setaria italica
  Transcript Sequence Number=SeqID_42521
  Gene Ontology: Mol. function=catalytic activity; Cellular component =mitochondrial alpha-ketoglutarate dehydrogenase complex; Biological process=metabolic process
  Homolog annotation: Hit_ID=B6TX05; Match level="QueryCoverage=95%, HitCoverage=22%, E-value=6e-37, Identity=91%"; Hit description=3 -methyl-2-oxobutanoate dehydrogenase
ENEVFQVIIPRSPREAKGLLLASIRDPNPVVFFEPKWLYRLSVEEVPEEDYMLPLSQAEVIRKGSDITLIGWGAQLAVLKEACE

SEQ ID NO: 108496 - protein, 365 aa, Setaria italica
  Transcript Sequence Number=SeqID_42522
  Gene Ontology: Mol. function=catalytic activity; Cellular component =mitochondrial alpha-ketoglutarate dehydrogenase complex; Biological process=metabolic process
  Homolog annotation: Hit_ID=B6TX05; Match level="QueryCoverage=93%, HitCoverage=94%, E-value=0.0, Identity=90%"; Hit description=3 -methyl-2-oxobutanoate dehydrogenase
  Pfam annotation: Domain name=Transket_pyr; Domain location=43-221; Score=260.1; E_value=5.2e-75; Accession=PF02779.16; Description =Transketolase, pyrimidine binding dom
  Pfam annotation: Domain name=Transketolase_C; Domain location=235 -355; Score=165.3; E_value=1.8e-46; Accession=PF02780.12; Description= Transketolase, C-terminal domain
  Pfam module annotation: Pfam domain module=Transket_pyr::Transketolase _C; Domain location=43-221::235-355
MAARALREAGRRRGWAAEVGRRCFSGGSAGAAVPERKEGGGGKSVNLFTAVNQALHIALDTDPRAYVFGEDVGFGGVFRCTTGLADRFGKNRVFNTPLCEQGIAGFAIGLAAMGNRAIAEIQFADYIFPAFDQIVNEAAKFRYRSGNEFNCGGLTIRTPYGAVGHGGHYHSQSPEAFFCHVPGLKVIIPRSPREAKGLLLASIRDPNPVVFFEPKWLYRLSVEEVPEEDYMLPLSQAEVIRKGSDITLIGWGAQLAVLKEACEDAEKDGVSCELIDLKTLIPWDKETVEASVKKTGKLLVSHEAPITGGFGAEIAASIAERCFQRLEAPVARVCGLDTPFPLVYEPFYMPTKNKVLDAIKATVNY

SEQ ID NO: 108497 - protein, 136 aa, Setaria italica
  Transcript Sequence Number=SeqID_42523
  Gene Ontology: Mol. function=RNA binding; Cellular component =ribonucleoprotein complex; Biological process=RNA processing
  Homolog annotation: Hit_ID=B9R8D8; Match level="QueryCoverage=50%, HitCoverage=15%, E-value=2e-22, Identity=63%"; Hit description=Lupus la ribonucleoprotein, putative
  Pfam annotation: Domain name=La; Domain location=1-53; Score=74.9; E _value=2.9e-19; Accession=PF05383.9; Description=La domain
LLTFSDTNLERDDFLKSLMDENGWVPVSKVADFNRLKKMTTDIHLIVDALANSSLLEVQDDKIRRRSDWAKWASFSGATSVASPSSASMDSRDYINTEAKVADEQVQDAHIYSLNRDLSAISIDEKPKSLAAQSIK

SEQ ID NO: 108498 - protein, 356 aa, Setaria italica
  Transcript Sequence Number=SeqID_42524
  Gene Ontology: Mol. function=RNA binding; Cellular component =ribonucleoprotein complex; Biological process=RNA processing
  Homolog annotation: Hit_ID=B9S0U6; Match level="QueryCoverage=74%, HitCoverage=29%, E-value=4e-31, Identity=36%"; Hit description=Lupus la ribonucleoprotein, putative
  Pfam annotation: Domain name=La; Domain location=198-255; Score =114.1; E_value=4.7e-31; Accession=PF05383.9; Description=La domain
PSYPPAMQYHQHPGQPISNPVPVLPSPMMLQEYPYQPFPVSVPNHERHVGKSGYENSVPPFVPVDQVGANEGNRPMPPHPRGDSHAWRPPVGTHGARPHPGPEGHGHFSQTWQNPQMFGTRENTNLPQGVGPRAFVRPMVPPPLGYINGPPYPGPMHPMYYYMPAPMEPMRGPQRYIQNQPTPSPVLSPKAAELRSKILTQVEYYFSDTNLERDDFLKSLMDENGWVPVSKVADFNRLKKMTTDIHLIVDALANSSLLEVQDDKIRRRSDWAKWASFSGATSVASPSSASMDSRGERNIGGFSNKDDDSEDQKKHSQSKDIKCNTDYINTEAKVADEQVQDAHIYSLNRTYLPLVL

SEQ ID NO: 108499 - protein, 557 aa, Setaria italica
  misc_feature (379)..(379): Xaa can be any naturally occurring amino acid
  Transcript Sequence Number=SeqID_42525
  Gene Ontology: Mol. function=RNA binding; Cellular component =ribonucleoprotein complex; Biological process=RNA processing
  Homolog annotation: Hit_ID=B9S0U6; Match level="QueryCoverage=64%, HitCoverage=41%, E-value=8e-72, Identity=43%"; Hit description=Lupus la ribonucleoprotein, putative
  Subcellular localization annotation: CTP_CleavageSite=34; ConfidenceScore=5.25e-01
IKVLYCISCKYSKSKSISSVLGPSGATSVASPSSASMDSRGERNIGGFSNKDDDSEDQKKHSQSKDIKCNTDYINTEAKVADEQVQDAHIYSLNRDLSAISIDEKPKSLAAQSIKSSKHYSSFRSGDVKVQKVKSKINAPDSQNDFSSFGGDQSTFMLDEELELEHADHSRDDLYSHKRGDDEEEDFFVDDQDVNRLIIVTQDTGLAKDDKSRTSMPQAFSTEEASRISDALYHYETLHGRRANNHRGSQADTADVDSKPTGGSKGNHIGCGPNGTEETGQPIPRKRQSRGNRKAQSARKQRFFAGNFMSNPDQYGGVSESPPGHSVGYFYGSTPENHSYKSSKLSSSPHGIPTGSSPVGSIPKSSPQSQHLNYHLLEXNKLQQQRYNKFKHHCLVERKKLGTGHSEQMNSLYRFWSYYLRDNFNEDMYTHFKKFALEDAAASYRYGLECLFRFYSYGLEKNFQPNVYEDFEKLTLEFYQNGDLYGLEKYWAFHHYRNPDSGPVNKLPELERLLREEFRTLDDFKAKEKAHDATEKETGCSSSTVAVTASHSKAETK

SEQ ID NO: 108500 - protein, 88 aa, Setaria italica
  Transcript Sequence Number=SeqID_42526
  Gene Ontology: Cellular component=vacuole
HLRRPLRGHGQGMYARARLTINPDKVYRMAMTKLNTSAAVLEVMGAPLTGTDVRAFVMSGGGPKLKDFKFKLGGKRCFLIFPIKGSER

SEQ ID NO: 108501 - protein, 277 aa, Setaria italica
  misc_feature (38)..(38): Xaa can be any naturally occurring amino acid
  misc_feature (168)..(168): Xaa can be any naturally occurring amino acid
  Transcript Sequence Number=SeqID_42527
  Gene Ontology: Cellular component=vacuole
  Pfam annotation: Domain name=TIM21; Domain location=57-196; Score= -47.7; E_value=0.053; Accession=PF08294.3; Description=TIM21
GRPVEAARSAAARYRSAVGLQVEAFWRRNYMILVGAGXVIVCVALWRIMFGIASTFVGLSEGMAKYGFLALATAIVAFAGMYARARLTINPDKVYRMAMTKLNTSAAVLEVMGAPLTGTDVRAFVMSGGGPKLKDFKFKLGGKRCFLIFPIKGSERKGLVSVEVKKKXGQYDMKLLAVDIPMASGPDQRLFLIGDEQEYKVGGGLISELRDPIVKAMAAEKEFDYLDEREDEEDEQREREEAEREEAEALKREEERLREEAEERRRREEAENLEKAT

SEQ ID NO: 108502 - protein, 162 aa, Setaria italica
  misc_feature (133)..(133): Xaa can be any naturally occurring amino acid
  Transcript Sequence Number=SeqID_42528
  Gene Ontology: Mol. function=ribonuclease activity
  Homolog annotation: Hit_ID=Q2RBR8; Match level="QueryCoverage=98%, HitCoverage=30%, E-value=2e-13, Identity=36%"; Hit description=RNase P subunit p30 family protein, expressed
GSVVCPEDKDLDQSAGMQVDAETCRGTSELVEWPPSGMDDEAPLDLAFYSSHKLHSNIIQREVMEGKIEQSMDENVERTAENETESIDKKTRTSVSMEPAFHGQEISLTSYKRSTDASCESDELKEQNSEETXASLEKNVAKTHELLPKFSYPSGKVEMSTI

SEQ ID NO: 108503 - protein, 109 aa, Setaria italica
  Transcript Sequence Number=SeqID_42529
  Gene Ontology: Mol. function=binding
GLSEIEVSESQSRECIVSTIMNNIANMMDAELHNVRSQLLSDFTPDDMCPMSTQFFEAHTDNPSSGSHETGHHQEAMLIDLGNDHDAFGEASESTEACASSVPASDLLS

SEQ ID NO: 108504 - protein, 143 aa, Setaria italica
  misc_feature (11)..(11): Xaa can be any naturally occurring amino acid
  Transcript Sequence Number=SeqID_42530
  Gene Ontology: Mol. function=DNA-3-methyladenine glycosylase I activity
  Homolog annotation: Hit_ID=B4FL85; Match level="QueryCoverage=59%, HitCoverage=25%, E-value=4e-41, Identity=90%"; Hit description=GMP synthase
  Subcellular localization annotation: CTP_CleavageSite=50; ConfidenceScore=5.43e-01
RSSSNLTLSSXSLSQNSNDSSLSSSNSSWEPKVPLLYGGTFSPWGDVMVSLEMRREDDDKASDHDVEGGEEDFDCSEPGSMHRCSWITKNTDEAYVQFHDECWGVPVYSDKYLPPHFFLNLPATVTISALHPDFGASSCSSPW

SEQ ID NO: 108505 - protein, 228 aa, Setaria italica
  misc_feature (132)..(132): Xaa can be any naturally occurring amino acid
  Transcript Sequence Number=SeqID_42531
  Gene Ontology: Mol. function=DNA-3-methyladenine glycosylase I activity; Biological process=base-excision repair
  Homolog annotation: Hit_ID=B4FL85; Match level="QueryCoverage=98%, HitCoverage=66%, E-value=1e-120, Identity=90%"; Hit description=GMP synthase
  Pfam annotation: Domain name=Adenine_glyco; Domain location=31-212; Score=285.0; E_value=1.6e-82; Accession=PF03352.5; Description =Methyladenine glycosylase
NERTKASDHDVEGGEEDFDCSEPGSMHRCSWITKNTDEAYVQFHDECWGVPVYSDNRLFELLSLSGMLIDHNWTEILKRRDMYREVFADFDPSTVAKMDEDAVAEISGNKELKLAECRVRCIVENAKCIQKXVAKEFGSFSGYMWGHVNHRPVVGKYRHHKYIPFRTPKSEAVSKDLVRRGFRLVGPVIVYSFMQAAGMAIDHLVDCFRFPECVRLAERSWGITNVAA

SEQ ID NO: 108506 - protein, 331 aa, Setaria italica
  Transcript Sequence Number=SeqID_42532
  Gene Ontology: Mol. function=DNA-3-methyladenine glycosylase I activity; Biological process=base-excision repair
  Homolog annotation: Hit_ID=B4FL85; Match level="QueryCoverage=100%, HitCoverage=100%, E-value=1e-160, Identity=81%"; Hit description=GMP synthase
  Pfam annotation: Domain name=Adenine_glyco; Domain location=135-315; Score=296.8; E_value=4.7e-86; Accession=PF03352.5; Description =Methyladenine glycosylase
  Subcellular localization annotation: CTP_CleavageSite=73; ConfidenceScore=5.21e-01
MLTTANSRQHHAFEKSPSSHIKNLDRKLQQAMNNATSKYMQRIYPLGIQRSSSNLTLSSLSLSQNSNDSSLSSSNSSWEPKVPLLYGGTFSPWGDVMVSLEMRREDDDKASDHDVEGGEEDFDCSEPGSMHRCSWITKNTDEAYVQFHDECWGVPVYSDNRLFELLSLSGMLIDHNWTEILKRRDMYREVFADFDPSTVAKMDEDAVAEISGNKELKLAECRVRCIVENAKCIQKVAKEFGSFSGYMWGHVNHRPVVGKYRHHKYIPFRTPKSEAVSKDLVRRGFRLVGPVIVYSFMQAAGMAIDHLVDCFRFPECVRLAERSWGITNVAA

SEQ ID NO: 108507 - protein, 147 aa, Setaria italica
  Transcript Sequence Number=SeqID_42533
  Gene Ontology: Mol. function=transporter activity; Cellular component= intracellular; Biological process=transport
  Homolog annotation: Hit_ID=B9RH84; Match level="QueryCoverage=81%, HitCoverage=19%, E-value=1e-32, Identity=62%"; Hit description =Phosphatidylinositol transporter, putative
CIVRALELEFPPEESDSEEGLGLGRKGMSAPIDRFATTRDEGHACSDEKRECNSDEENSEGERRVKRGSFKKRAITAGYKFRHSLRRKSRTKSGNHVVSIEDIRDVQELETVERFRRCLLDEGLLPERHDDYHTMLRFLKARKFNIE

SEQ ID NO: 108508 - protein, 183 aa, Setaria italica
  Transcript Sequence Number=SeqID_42534
  Subcellular localization annotation: CTP_CleavageSite=55; ConfidenceScore=5.25e-01
ILFFSLFFFSFPFFFSSFFVPYPVLILHARLCSLLLVHFHRYPPARVVLLLIHRRSSILAAGCCCCSFIAAPRLHPCRAAGPRWWLTERADALRPATRLRRAWPSPFLSIAGRAPCYFPVVLFLHRAPHLYRRRASLACAVDEHRSGRGIFCQGSRKVGVEAAGSPFFRLPLRRKARRAGFAG

SEQ ID NO: 108509 - protein, 101 aa, Setaria italica
  Transcript Sequence Number=SeqID_42535
  Gene Ontology: Mol. function=transferase activity, transferring glycosyl groups; Cellular component=integral to membrane; Biological process=GPI anchor biosynthetic process
  Homolog annotation: Hit_ID=B6TUG3; Match level="QueryCoverage=65%, HitCoverage=38%, E-value=4e-29, Identity=95%"; Hit description =Phosphatidylinositol N-acetylglucosaminyltransferase subunit P
  Pfam annotation: Domain name=PIG-P; Domain location=52-100; Score= -14.2; E_value=2.5e-05; Accession=PF08510.4; Description=PIG-P
MDDGVRRTREWSPASPSLVVRRPRRTVSRRPHRDWDPSSRSPSFAARDHGPKPSEVYGFVGSITTVIATAVYLAWAYTPEPFLRSLGVTYYPSKYWALASI

SEQ ID NO: 108510 - protein, 63 aa, Setaria italica
  Transcript Sequence Number=SeqID_42536
KIVNKLGKYGTLKLTLIWGYSVSSNHLYLYYEKNQCNRNQKNQHNFGCTHESLAPSGMEAESS

SEQ ID NO: 108511 - protein, 88 aa, Setaria italica
  Transcript Sequence Number=SeqID_42537
GWTGWYGRRSGFWRGSVGWWLGGGIGHGVGGGYGKGGGLGGGIGHGIGGGYGKGGGGGGFGKGFGFGFGNGGGGGGGIGVGGGIGGHH

SEQ ID NO: 108512 - protein, 60 aa, Setaria italica
  Transcript Sequence Number=SeqID_42538
TKLTSEYHICRYGIFLFMNVHWIQRTMNICSWYNHLIFNSIACICLRMPHNRQALIIIAS

SEQ ID NO: 108513 - protein, 155 aa, Setaria italica
  Transcript Sequence Number=SeqID_42539
  Subcellular localization annotation: CTP_CleavageSite=34; ConfidenceScore=5.31e-01
TSSRKKASEPSDWTATSPLSPLTNPALPPPPPVPALQAAATCQREGTERSDCFPAPGLISSLPPSSFPIRHCHHIFRPRFSWARRGRAGGLASCLGRLSLRSLLLFFGALAHGFGAGSREIRRHVSWSLAATRRGLSSPRLLPDLFHPPSRSMDS

SEQ ID NO: 108514 - protein, 49 aa, Setaria italica
  Transcript Sequence Number=SeqID_42540
VLPVFRIRTFYDPPLGGSVNTWEYSAILLARVHATGQSTLEKFHLNAIN

SEQ ID NO: 108515 - protein, 58 aa, Setaria italica
  Transcript Sequence Number=SeqID_42541
RKSIAENLCSTFHFPCLIHVVIYIAGKMECATKSFSLEEKHSRKPMFVLLQNNTQFTG

SEQ ID NO: 108516 - protein, 126 aa, Setaria italica
  Transcript Sequence Number=SeqID_42542
SNMLKLYHLWSLWPQGWIPDQSKKNQKPEYFNLLLRPDIPESLDSLIRGTARLWPPVRRSVLTRAALPPGSAAPDEVASTGACCRHEERRAVATRTEGRYRRTNARQGEGGGSGGRRSSRSRRRRT

SEQ ID NO: 108517 - protein, 66 aa, Setaria italica
  Transcript Sequence Number=SeqID_42543
IQISTVPISCSLVSASCPGLGRRPHHLKTVLCMYWFSAWLGHLRKQRACVISHPGVSCTLVIKNCQ

SEQ ID NO: 108518 - protein, 40 aa, Setaria italica
  Transcript Sequence Number=SeqID_42544
RKMVSSLLESNTPDRITTMPSVTASQNHRQVASVLSYTEM

SEQ ID NO: 108519 - protein, 89 aa, Setaria italica
  Transcript Sequence Number=SeqID_42545
KELERGIEHLKNIKLESSTSYPNLPTIYFRLGVSLRQTLSCSTYFLQLELKWDPGVMAEEHLLLQNAHQENDYLTVVSCCLYYPVTRTL

SEQ ID NO: 108520 - protein, 54 aa, Setaria italica
  Transcript Sequence Number=SeqID_42546
YNLIYMSWYTILLYYIFLIIVYLSYIILPWSSILDYSKCSCANLTVDTTVVVTN

SEQ ID NO: 108521 - protein, 42 aa, Setaria italica
  Transcript Sequence Number=SeqID_42547
MPNSIYACRLGINQFTTNFYENGIINSPQSHLPNWNNQVTIK

SEQ ID NO: 108522 - protein, 76 aa, Setaria italica
  Transcript Sequence Number=SeqID_42548
GLLASPGQDALTNEQLIGSMQCRWQHKRQRWVQPEWQHDNIQMLELKWDPGVMAEEHLLLQNAHQKMTILTVVSCL

SEQ ID NO: 108523 - protein, 85 aa, Setaria italica
  Transcript Sequence Number=SeqID_42549
MIPNLLESNIVELPQWVICIVDCYGKTLTEDMAYMNYDLLEVLYNNLENITHIYVYIRIRESIGASLVQLHQGQMLNSELINHAY

SEQ ID NO: 108524 - protein, 82 aa, Setaria italica
  Transcript Sequence Number=SeqID_42550
NQCVPNTFSESNVFCSQTHQFNYADFCIAVIICALAPVVNHLPQSVIYVQFCCVTIHMVHWCLCAYLLTVRPIFLALFHGAW

SEQ ID NO: 108525 - protein, 57 aa, Setaria italica
  Transcript Sequence Number=SeqID_42551
FAHVLINFYYTSQFSISVATVLKNDEHHSGQHVTFGKLDLCFYEHYVPAGCIGFRYK

SEQ ID NO: 108526 - protein, 111 aa, Setaria italica
  Transcript Sequence Number=SeqID_42552
LPLPVRLIHHVIQLRPPSPIFSAAATTAQNLARSPPEMQILAVGRGSGGAPLVSGSSGDPAGGDPSGGSAACWLCVASAATCHSLRDGRREAHGAQASRPVRHRCTLGSRR

SEQ ID NO: 108527 - protein, 140 aa, Setaria italica
  Transcript Sequence Number=SeqID_42553
AHHAQNLPEGFIPCKPESLDSLIRGTARPGLPCAGRSSPWLSCRRDLPLHTRYVEKRKGAPARSLPGRRRFHLDLTPLPAGGNPPQMRSPNREGAAGAERRGVAGPLLGRRDSYRRRSGSGEETGRRLVRAGWLTGRQRI

SEQ ID NO: 108528 - protein, 141 aa, Setaria italica
  Transcript Sequence Number=SeqID_42554
LWLFPACLFLIQECSSSFSGLLNDHIIYYVLIFKKLLQVMMPLANFWVPSVQRAAYSALIGSAPAPLCLLSTIMVPTSMIRWKDWSAARLVNHHQESHEDINQITTKNHEDTLHHSYLHSYSTHEDFHHHSLREKELATIL

SEQ ID NO: 108529 - protein, 163 aa, Setaria italica
  Transcript Sequence Number=SeqID_42555
YFQNGVINLPQGTYQNSVINLPQSTYRNIVINLPKRYLQKEFHLRAVKNGILERTSKDLHDAAFNLICSSGLNSFLAPAADLHRETNELCSARAGLQLCWGIYASTERALSFTPWLIVPGRLAATLRMPAATGRHRPCRMSSCLRAMESGDGSSDGRRKRGIR

SEQ ID NO: 108530 - protein, 443 aa, Setaria italica
  Transcript Sequence Number=SeqID_42556
VTTADIQQPPEQDTGPDSGEKDKEKEPEGEEEEERRKAALEKLEKASEDSILGQGLKAFDSSVETITTGTWQALGTAWKSGSLFVQKLENSASSLAETIQQGELPAKASVIAPTILETGRSFTARGMEVLERVGKETMEFIVEETGMEVDKGSAGEGDQQTEEEQFEEVSFDRCFYIYGGPDQLEELEALSSHYALLFNRKKGKLSAEQKTYYDGKLKEIQQIFSLSTNAEEDGPDSDKGKKIESADTDADAEMKKLCETSVSKAAKMAAGFATALGGLSPNDIIKRTTNRLETIHSEGVHRLSEMCCLAVSQLLVLGKSVISAANKSKNEDDENDVKIDWPEDPISKAKTIRWKVQSISVDMEKVSTSFATGISDVAEAYAAAIQNALADKQDDLPSQKSVQEKAKSISNHLNSDQTSAVSKLQDALQYLAYVVVCASMPSV

SEQ ID NO: 108531 - protein, 105 aa, Setaria italica
  Transcript Sequence Number=SeqID_42557
YFPRLENLASSLAETIQQGELPAKASVIAPTILETGKSFTARGMEVLERIGKETMEFIVEETGMEVDKGSAGEGDQQTEEELFDSFIYFLLRFMTVVNFSHHDNR

SEQ ID NO: 108532 - protein, 111 aa, Setaria italica
  Transcript Sequence Number=SeqID_42558
  Gene Ontology: Mol. function=catalytic activity; Biological process =metabolic process
  Homolog annotation: Hit_ID=B6TQ72; Match level="QueryCoverage=100%, HitCoverage=65%, E-value=9e-49, Identity=88%"; Hit description =KHG/KDPG aldolase
ESKVLYIPGVLTPTEVLSACSAGAKVVKVYPVSVMGGEVYMSALKKPFPLVPMVASQGIQIGSIKGYVEAGASAVVLSDAIFDKELMRKGKFSEISELASQATFEALQSTK

SEQ ID NO: 108533 - protein, 84 aa, Setaria italica
  Transcript Sequence Number=SeqID_42559
  Homolog annotation: Hit_ID=Q7X7V8; Match level="QueryCoverage=100%, HitCoverage=15%, E-value=3e-31, Identity=80%"; Hit description =OSJNBa0088K19.14 protein
RGVASDAAAYLFLAGGGPREAARVATAVMHLLGLATAYGTCVWVTFVSSYVLAAALPRQQLGMLQSKLYPVYFRAMAYGVGLAL

SEQ ID NO: 108534 - protein, 271 aa, Setaria italica
  misc_feature (13)..(13): Xaa can be any naturally occurring amino acid
  misc_feature (21)..(21): Xaa can be any naturally occurring amino acid
  misc_feature (40)..(40): Xaa can be any naturally occurring amino acid
  misc_feature (42)..(42): Xaa can be any naturally occurring amino acid
  misc_feature (115)..(115): Xaa can be any naturally occurring amino acid
  misc_feature (179)..(179): Xaa can be any naturally occurring amino acid
  misc_feature (184)..(184): Xaa can be any naturally occurring amino acid
  Transcript Sequence Number=SeqID_42560
  Gene Ontology: Mol. function=protein serine/threonine kinase activity; Biological process=protein amino acid phosphorylation
  Homolog annotation: Hit_ID=Q19VG4; Match level="QueryCoverage=100%, HitCoverage=79%, E-value=1e-132, Identity=85%"; Hit description =Serine/threonine kinase protein
  Pfam annotation: Domain name=Pkinase; Domain location=1-247; Score =41.2; E_value=6.1e-11; Accession=PF00069.17; Description=Protein kinase domain
  Pfam annotation: Domain name=Pkinase_Tyr; Domain location=1-247; Score=-64.5; E_value=1.9e-09; Accession=PF07714.9; Description =Protein tyrosine kinase
  Pfam module annotation: Pfam domain module=Pkinase::Pkinase_Tyr; Domain location=1-247::1-247
LANGWPVAVKHIXVKNEHAEXFRKEVTSLSHVRHPNLVSXLXGYCDGREECFLVYELCVNGNLSEWLFGKDKNLSWIQRLQIALGSACGLWFLHIYPEGCIVHRDIKPTNILLGXVNMEPKLSDFGLSKVIDLGVSHVSSEVRGTFGYVDPEYRHNHKVNAAGDVYSLGMVLLQLIMGXEVIDXLNLCIGRSQASTLIQDGNVLEFADPRLNGEYSTDAFDLSLKLALSCTGHKKQRPSMEQVVSRLEKALEISMRDGAKHNSISIIESIA

SEQ ID NO: 108535 - protein, 118 aa, Setaria italica
  misc_feature (12)..(12): Xaa can be any naturally occurring amino acid
  misc_feature (111)..(111): Xaa can be any naturally occurring amino acid
  Transcript Sequence Number=SeqID_42561
  Gene Ontology: Mol. function=phosphatase activity
  Homolog annotation: Hit_ID=Q6VEY3; Match level="QueryCoverage=100%, HitCoverage=26%, E-value=2e-25, Identity=55%"; Hit description=CTD -phosphatase-like protein
VKSMKISHFHVXELEQSAVLNSPDKVPQDDSDPTIQLADQDIRVMEASGLHDLHGGKSVGVFKDLTSGVVVSPNSEADSSANYDDDESLLHIVNYVDKEFADEGVDYSAQXFCAVSDH

SEQ ID NO: 108536 - protein, 448 aa, Setaria italica
  Transcript Sequence Number=SeqID_42562
  Gene Ontology: Mol. function=phosphatase activity
  Homolog annotation: Hit_ID=Q6VEY3; Match level="QueryCoverage=97%, HitCoverage=100%, E-value=1e-156, Identity=63%"; Hit description=CTD- phosphatase-like protein
  Pfam annotation: Domain name=NIF; Domain location=263-439; Score =232.6; E_value=9.9e-67; Accession=PF03031.10; Description=NLI interacting factor-like phosphatase
TSAVVKMPALRMKRMLEDTDFANEFNTKTVKSMKISHFHVSELEQSAVLNSPDKVPQDDSDPTIQLADQDIRVMEASGLHDLHGGKSVGVFKDLTSGVVVSPNSEADSSANYDDDESLLHIVNYVDKEFADEGVDYSAQNFCAVSDHEASWGPNQCCSLLDIYSPDGDFHFLLDNPADLLPSYTGLCEEFVSIDAFMNTSSRCGSFPLIESVTEASIDNKPCSPEVDLCFSNSDVLEWLNPHLSEEDLPDLVDFAELNSNAIPATKEQGTRKVTLVLDLDETLVHSTMEQCDDADFTFPVFCDMKEHVVYVKKRPHVDMFLQKMVEMFDVVIFTASQSVYANQLLDMLDPENKLFSKRFFRESCLFTDSSYTKDLTVVGVDLAKVAIIDNTPQVFQLQVNNGIPIESWYNNPADEALPQLIPFLETLAVADDVRPIIAKKFGNIIDSC

SEQ ID NO: 108537 - protein, 428 aa, Setaria italica
  misc_feature (154)..(154): Xaa can be any naturally occurring amino acid
  Transcript Sequence Number=SeqID_42563
  Gene Ontology: Mol. function=endonuclease activity
  Homolog annotation: Hit_ID=Q7XUD5; Match level="QueryCoverage=93%, HitCoverage=47%, E-value=4e-87, Identity=44%"; Hit description =OSJNBa0088A01.10 protein
SKYVIISSGIIDAANEKCQEGKIKPLFAAYLLNIVTYIRIWRCLDYEVFRRNRGLIQEMVHYPPVPDIRQERTEDAASFDSMDIWTKLSTMDLNNSQNDAVLNCISKIHRNSSSFSLIWGPPGTGKTKTISVLLWLMREMKHGTLACAPTNLAXKQVASRFSRLIKERSFDTSCLGDVLLIGNKQRMCVDGDLKEIYLHDRVRKLLGCFAPMTGWRHLLSSLSDLFQNGYSQYLQYLQDQKEGDKPSFFSYIRKRFTIIYTYLRRCFKELLFHVPKSSILEVNYNNILSILEMLGDFNSMFQRRYIGDEVKEVFMYNNGEPDSRNSSVITLGKARLKCLEQLNTLLSCLKLPLTSSKRVIRDFCTENASIIFCTVSSSSKVITNKKLELLVIDEAAQLKECETLIPLRLRTLKHAVLIGDECQIPATV

SEQ ID NO: 108538 - protein, 453 aa, Setaria italica
  Transcript Sequence Number=SeqID_42564
  Gene Ontology: Mol. function=protein tyrosine kinase activity; Cellular component=integral to membrane; Biological process=protein amino acid phosphorylation
  Homolog annotation: Hit_ID=B6SVW1; Match level="QueryCoverage=76%, HitCoverage=67%, E-value=1e-148, Identity=71%"; Hit description=ATP binding protein
  Pfam annotation: Domain name=Pkinase; Domain location=177-435; Score=- 51.9; E_value=2.1e-05; Accession=PF00069.17; Description=Protein kinase domain
  Pfam annotation: Domain name=Pkinase_Tyr; Domain location=176-435; Score=-80.8; E_value=2.3e-08; Accession=PF07714.9; Description =Protein tyrosine kinase
  Pfam module annotation: Pfam domain module=Pkinase::Pkinase_Tyr; Domain location=177-435::176-435
SSSSSTILPTAHHLGNLINGHARRLLHIGDKYTAFLQAPPPIHKKRHKHHKSPQKLSPVPAPSPSPLNAPPRASPSPSASIPAISPGFHPLAAPSEPLSTLPSPPPHKHSWRNYRIVTAGSAVFLVMAAASVMYCRAKKVGSVRPWATGLSGQLQRAFVTGVPALKRSELQAACEDFSNIVGSTSSCMLYKGTLSSGVEIAVVSSSITSVKDWSKECESHFRKKITTLSKVSHKNFMNLLGYCEEDHPFTRAMVFEYAPNGTLFEHLHVREAENLDWTTRLRVSMGIAYCLEHMQQMNPPIVPRNFDSSTIYLTDDFAAKVSDLDFWSDTKGLKSNSSLATDDSTISDIDGIVHQFGIILLEILTGKVPYCEEDGSLEQWASHYFDGNMCLAELMDSSLSSFPEEAARALCEVARSCIELDPKKRPQMAQVATWMKEITSLGPEGATPKVSPL

SEQ ID NO: 108539 - protein, 170 aa, Setaria italica
  Transcript Sequence Number=SeqID_42565
  Gene Ontology: Mol. function=protein serine/threonine kinase activity; Cellular component=plasma membrane; Biological process =protein amino acid phosphorylation
  Homolog annotation: Hit_ID=B9SQH2; Match level="QueryCoverage=97%, HitCoverage=15%, E-value=6e-46, Identity=58%"; Hit description =Phytosulfokine receptor, putative
  Pfam annotation: Domain name=FNIP; Domain location=87-131; Score =13.1; E_value=0.045; Accession=PF05725.4; Description=FNIP Repeat
  Pfam annotation: Domain name=LRR_1; Domain location=105-127; Score =21.8; E_value=0.0029; Accession=PF00560.25; Description=Leucine Rich Repeat
  Pfam annotation: Domain name=LRR_1; Domain location=129-151; Score =4.0; E_value=52; Accession=PF00560.25; Description=Leucine Rich Repeat
  Pfam annotation: Domain name=LRR_1; Domain location=81-103; Score =17.5; E_value=0.056; Accession=PF00560.25; Description=Leucine Rich Repeat
  Pfam module annotation: Pfam domain module=FNIP::LRR_1::LRR_1::LRR_1; Domain location=87-131::105-127::129-151::81-103
  Subcellular localization annotation: CTP_CleavageSite=44; ConfidenceScore=5.66e-01
LDLSNNTLVGGIPKSLTQLKSLVTSRQSPGMAFTSMPLYVKHNRSTSGRQYNQLSNFPPSLFLNDNGLNGTIWPEFGNLRELHVLDLSNNFISGSIPDALSRMENLEVLDLSSNNLSGSIPSSLTELTFLSKFSVAHNHLVGQIPNGGQFLTFSNSSFEGNPGLCRSGSC

SEQ ID NO: 108540 - protein, 69 aa, Setaria italica
  Transcript Sequence Number=SeqID_42566
TVPHHYTTKPEQQYVFMIQVRLFWLHASWMKPSLFFPKILFQICGVMYCTTHEKHFLRPKLLFILAFFR

SEQ ID NO: 108541 - protein, 91 aa, Setaria italica
  Transcript Sequence Number=SeqID_42567
  Subcellular localization annotation: CTP_CleavageSite=56; ConfidenceScore=5.60e-01
FRSPVLLSAQQPPAPALACRRAGPSLARPISLRQPTPTPPHLSRWQSGPARHPLTPATTRNELGFASEFAVQPPPHPPCMSMPRPYCGETT

SEQ ID NO: 108542 - protein, 570 aa, Setaria italica
  Transcript Sequence Number=SeqID_42568
  Gene Ontology: Mol. function=malate synthase activity; Cellular component=glyoxysome; Biological process=tricarboxylic acid cycle
  Homolog annotation: Hit_ID=P49081; Match level="QueryCoverage=97%, HitCoverage=98%, E-value=0.0, Identity=85%"; Hit description=Malate synthase, glyoxysomal
  Pfam annotation: Domain name=Malate_synthase; Domain location=23-558; Score=1144.2; E_value=0; Accession=PF01274.14; Description=Malate synthase
MCASVTAAAAAAAAPCYDAPEGVDVRGRYDPAFASVLTRDALAFVAALQREFRGAVRYAMEQRREAQRRYDAGELPRFDPATRSVREGGWKCAPVPPAVADRTVEITGPAEPRKMVINALNSGAKVFMADFEDALSPTWENLMHGQVNLRDAVAGTISFRDAARGREYKLNDRTAKLFVRPRGWHLPEAHVLIDGEPAIGCLVDFGLYFFHNHAAFRAGQGAGFGPFFYLPKMEHSREARIWNGVFERAEQAAGIERGSIRATVLVETLPAAFQMDEILYELRDHSAGLNCGRWDYIFSYVKTFRAHPDRLLPDRALVGMAQHFMRSYSHLLIRTCHRRGVHAMGGMAAQIPIKDDAAANEAALELVRKDKLREVRAGHDGTWAAHPGLIPAIREVFEGHLGGKPNQIAGAAGQEEATGAGITAEDLIQPPRGARTVDGLRLNTRVGVQYLAAWLSGSGSVPLYNLMEDAATAEISRVQNWQWLRHGAELDAAGVPVRATPELLARVLEEEMARVEAEVGTERFRQGRYAEAGRIFGRQCTAPELDDFLTLDAYNLIVVHHPGGASPCKL

SEQ ID NO: 108543 - protein, 100 aa, Setaria italica
  misc_feature (32)..(32): Xaa can be any naturally occurring amino acid
  Transcript Sequence Number=SeqID_42569
VTSHAVILSLFCHRKFLIWELQQRGVGVREGXKWTSATFNSYKVAFSNFLIIFTLLCNHTLFLNRGLLQTSILSIIALSSRHLPNPTLCIFICLACWGLE

SEQ ID NO: 108544 - protein, 66 aa, Setaria italica
  Transcript Sequence Number=SeqID_42570
VVFKSMLIDNQVCITNISSHLYAFCWCDNQDSRSSKVCPPIPRNSKYISKPHTGHVFLFSQANRKV

SEQ ID NO: 108545 - protein, 323 aa, Setaria italica
  Transcript Sequence Number=SeqID_42571
  Gene Ontology: Mol. function=translation initiation factor activity; Cellular component=eukaryotic translation initiation factor 2B complex; Biological process=cellular metabolic process
  Homolog annotation: Hit_ID=Q338M7; Match level="QueryCoverage=86%, HitCoverage=67%, E-value=1e-144, Identity=88%"; Hit description =Initiation factor 2 subunit family protein, expressed
  Pfam annotation: Domain name=IF-2B; Domain location=23-299; Score =188.4; E_value=2e-53; Accession=PF01008.9; Description=Initiation factor 2 subunit family
TARWNRRLSVTVDSDDEFDSEHDDRPALSAAVLAAHARNALRAPSLQTLLEDIPVTPAISRTASSTGDSDGKSKSGDKSSTRKLKHDVIAAIGDLIDEIDSCYEPISEQAVELIHQNEVILTLGRSRTVKEFLYAAKEKKRSFRVFVAEGAPRYQGHVLAKELVEKGVQTTVIIDSAVFAMISRVNMVIVGAHAIMANGGVIAPVGMNMVALAAQRHAVPFVVVAGSHKLCPLYPHNPEVLLNELKSPSDLLDFGEFSDCMNFSTQDGSPLLNVVNPTFDYVPPKLVSLFVTDTGGHSPSYMYRLIAEYYSADDLVVQRKSTA

SEQ ID NO: 108546 - protein, 413 aa, Setaria italica
  Transcript Sequence Number=SeqID_42572
  Gene Ontology: Mol. function=transferase activity; Cellular component= chloroplast envelope; Biological process=biosynthetic process
  Homolog annotation: Hit_ID=B6T479; Match level="QueryCoverage=100%, HitCoverage=99%, E-value=0.0, Identity=93%"; Hit description =Glycosyl transferase, group 1 family protein
  Pfam annotation: Domain name=Glycos_transf_1; Domain location=218 -381; Score=121.7; E_value=2.4e-33; Accession=PF00534.12; Description= Glycosyl transferases group 1
MAQAEEARAPLLLDEEAGGEWSSRPRRIALFVEPSPFAYISGYKNRFQNFIKHLREMGDEVLVVTTHKGAPEEFHGAKVIGSWSFPCPLYQNVPLSLALSPRIFSEVNKFKPDIIHATSPGIMVIGALAIAKMISVPMVMSYHTHLPAYIPRYNLNWLLEPTWSFIRCLHRAADLTLVPSVAIAEDFETAKVVPANRIRLWNKGVDSESFHTKYRRHEMRVRLSGGEPEKPLIIHVGRFGREKNLDFLKRAMERLPGSRIAFVGDGPYRAELEKLFTGMPAVFTGMLQGEELSQAYASADVFAMPSESETLGQVVLESMASGVPVVAARAGGIPDIIPKDKEGKTSFLFTPGDLDECVRKIEQLLKSKDLRESVGKAAREEMEKCDWRAASRKIRNEHYSTAMSYWRKKMGKT

SEQ ID NO: 108547 - protein, 149 aa, Setaria italica
  misc_feature (20)..(20): Xaa can be any naturally occurring amino acid
  Transcript Sequence Number=SeqID_42573
  Gene Ontology: Mol. function=methyltransferase activity; Biological process=metabolic process
  Homolog annotation: Hit_ID=B9SLV0; Match level="QueryCoverage=70%, HitCoverage=36%, E-value=2e-38, Identity=70%"; Hit description =Methyltransferase, putative
  Subcellular localization annotation: CTP_CleavageSite=38; ConfidenceScore=5.50e-01
MLLRAPPQTLRPSPRPRLLXPAPRCSNSNDAQPSPAPSSQTAAAGSVRRLVLPPEGRAKLDPRPDRDFYAFPRLVTHVDDGFIAALTDLYRERLCAGWDVLDLMSSWVSHLPPEVPFRRVVGHGLNAQELARNPRLDYFFVKDLNTDQQ

SEQ ID NO: 108548 - protein, 151 aa, Setaria italica
  Transcript Sequence Number=SeqID_42574
KDTKRCCRAPKGVKHPPRNPCADHSSQPPEEDASSFRQKFSRSSFKERIDTEGSPTCIVVLKPCLDKTENMEGAYPLTYEMFQSGCRKPRAPLNYGNAAPSRHTEEYMYQMSTGKCDVLGRGGKGSIEIAREVTKEMRRAVRGGSRWKTGD

SEQ ID NO: 108549 - protein, 124 aa, Setaria italica
  Transcript Sequence Number=SeqID_42575
  Gene Ontology: Mol. function=nucleic acid binding
  Pfam annotation: Domain name=SAP; Domain location=2-25; Score=12.1; E_ value=0.083; Accession=PF02037.19; Description=SAP domain
NELQRRNLPVSGLKNDLVKRLFEAIQDKILDDGEKTNGGIPPEELKGGETPGSVDASVNQASIKELVDEGASEVMKQGADLVISVTEAYDESILTTSEVTQEAVVGTPEASQRSLDAVARLSLL

SEQ ID NO: 108550 - protein, 146 aa, Setaria italica
  Transcript Sequence Number=SeqID_42576
LREPAAHAANQPPEDWIPFQFHPRGKTKRTPSIPPVIIRSSKQQIHRRAGAGDLIPSHPLPLRLALSPAPIRFHAPQQNRISPAPARACDSRRRSRRQCAPTWISTTTTQPGRLRRRFYMLMVTIAVCMHHIISDRISLGIPIIII

SEQ ID NO: 108551 - protein, 152 aa, Setaria italica
  Transcript Sequence Number=SeqID_42577
  Gene Ontology: Mol. function=nucleic acid binding
  Homolog annotation: Hit_ID=Q6YYC0; Match level="QueryCoverage=51%, HitCoverage=8%, E-value=4e-09, Identity=39%"; Hit description=Zinc finger CCCH domain-containing protein 55
PGRNRDPRLVTNSSAAPPSVPPIPHEATAISVPSAAPPPAPPIQQETRDDNTHPVDLSRSVEVTGHAAVPRIFKKALTNFVKEQLQKTWKMGHLTTELHKIIAQKVVEKVMHSAKSIHNTSQKAKKYLQDYRRKINELIRDYLKHYDVKYLQ

SEQ ID NO: 108552 - protein, 167 aa, Setaria italica
  Transcript Sequence Number=SeqID_42578
  Subcellular localization annotation: CTP_CleavageSite=40; ConfidenceScore=5.47e-01
PSGCGARRSSLHACYGPSLSLLFSTASRGRGGGGRTRSPRAAVREEGRPRSPPDAAYATTNTPVPSAREDDLDAATTTKQVPPSSQHRPALRPKDPLPRSPRHKASTLGGSAQAAIGSSSTRAGSSLPQASAVPGQRAWTTKPLIGSTPAGEEQRWRWRKHGRRTRT

SEQ ID NO: 108553 - protein, 90 aa, Setaria italica
  Transcript Sequence Number=SeqID_42579
  Gene Ontology: Mol. function=transferase activity, transferring glycosyl groups; Cellular component=integral to membrane
  Homolog annotation: Hit_ID=Q9LHZ7; Match level="QueryCoverage=100%, HitCoverage=7%, E-value=3e-23, Identity=68%"; Hit description =Cellulose synthase-like protein D2
MASNGGGGGVLRHSNSSRLSRMSYSGEDGRGAQAPAGDRPMVTFARRTHSGRYVSYSRDDLDSEVGGIGDFSPEHQEFLSYHVHIPATPD

SEQ ID NO: 108554 - protein, 228 aa, Setaria italica
  Transcript Sequence Number=SeqID_42580
  Gene Ontology: Mol. function=protein binding
  Homolog annotation: Hit_ID=B6TSC4; Match level="QueryCoverage=84%, HitCoverage=60%, E-value=3e-27, Identity=38%"; Hit description =Ubiquitin-protein ligase
RLEKRGRCEAFESVRVADDRILLYLAAWLSCLKSLCLVSCYSVSSEGFIEAIQGFPLLEKLELSLCKNIYGEAIEAAGKARTHMKRFRLSNDRFYSFEDECINDQEAHGISTMRELRSLQLFVNNLTNRGLAAILHSCPHLECLDIRHCFNVELDAALKVKCSRIKTLRLPNDITDDYEFEVKSPIRLNSKRSNFDDDDGDQNTYDPFKSYYGDWNTYDPFKSYGELE

SEQ ID NO: 108555 - protein, 929 aa, Setaria italica
  Transcript Sequence Number=SeqID_42581
  Gene Ontology: Mol. function=nucleoside-triphosphatase activity; Biological process=defense response
  Homolog annotation: Hit_ID=Q93Y95; Match level="QueryCoverage=97%, HitCoverage=100%, E-value=0.0, Identity=82%"; Hit description=Pollen signalling protein with adenylyl cyclase activity (Fragment)
  Pfam annotation: Domain name=LRR_1; Domain location=419-440; Score =8.2; E_value=8.4; Accession=PF00560.25; Description=Leucine Rich Repeat
  Pfam annotation: Domain name=LRR_1; Domain location=442-463; Score =12.7; E_value=1.1; Accession=PF00560.25; Description=Leucine Rich Repeat
  Pfam annotation: Domain name=LRR_1; Domain location=465-487; Score =12.8; E_value=1.1; Accession=PF00560.25; Description=Leucine Rich Repeat
  Pfam annotation: Domain name=LRR_1; Domain location=489-510; Score =7.4; E_value=12; Accession=PF00560.25; Description=Leucine Rich Repeat
  Pfam annotation: Domain name=LRR_1; Domain location=660-681; Score =6.8; E_value=15; Accession=PF00560.25; Description=Leucine Rich Repeat
  Pfam annotation: Domain name=LRR_1; Domain location=683-705; Score =0.9; E_value=2.1e+02; Accession=PF00560.25; Description=Leucine Rich Repeat
  Pfam annotation: Domain name=LRR_1; Domain location=716-741; Score =4.6; E_value=40; Accession=PF00560.25; Description=Leucine Rich Repeat
  Pfam annotation: Domain name=LRR_1; Domain location=744-766; Score =7.5; E_value=11; Accession=PF00560.25; Description=Leucine Rich Repeat
  Pfam annotation: Domain name=LRR_1; Domain location=767-788; Score =3.5; E_value=65; Accession=PF00560.25; Description=Leucine Rich Repeat
  Pfam annotation: Domain name=LRR_1; Domain location=808-829; Score =2.7; E_value=93; Accession=PF00560.25; Description=Leucine Rich Repeat
  Pfam annotation: Domain name=NACHT; Domain location=46-194; Score= -25.5; E_value=0.0074; Accession=PF05729.4; Description=NACHT domain
  Pfam annotation: Domain name=NB-ARC; Domain location=26-307; Score =202.2; E_value=1.4e-57; Accession=PF00931.14; Description=NB-ARC domain
  Pfam module annotation: Pfam domain module=LRR_1::LRR_1::LRR_1::LRR _1::LRR_1::LRR_1::LRR_1::LRR_1::LRR_1::LRR_1::NACHT::NB-ARC; Domain location=419-440::442-463::465-487::489-510::660-681::683-705::716 -741::744-766::...
  Pfam module annotation: Domain location=767-788::808-829::46-194::26 -307
RDWSSHNSVCNNCYDAAKLQAVGSQVHKAVGGLVPRMLREGKKKVDVFAIVGAVGIGKTTLAREIYNDDRMTENFPICVWVKMSKDLSEVAFLKKIITGAGANVGDTENREELLGLLSSALSKRFLIVLDDLDNPGIWDNLLKDPLGDGVARGRILITTRNEEVASSMKAVVHRVDKMDTENAWALLCKQVDPECNSEELAALKDVGIKIAEICDGHPLAIKVIAGVLRSRGNSKAEWEMVLNNDSWSMPPIVPEVPQALYVSYADLPSELKECFLRCSLYPEECSIQRFDLVRRWIAEGIVNAGDNKLLEESAEEHYVELISRNLLQPDPDNVERCWITHDLLRSLARFLIADESILIHGQQKLSTSLSKPRHLTFCNMENCSEDPISLKQQISIRSLMLFKSPNVRAIDPLIESAPLLRVLDLSKTAVEALPRSIGNLVHLRYLNLDGTQVRDMPSSIGFLINLQTLSLQGCQRLQRLPWSIRALLELRCLRLEGTSLSYVPKGVGELKHLNHLSGLIIGYDNNGPEGCDLDDLKALSELRHLHIESLDRATSGANALANKPFLKDLYLSEKAPVMEEQQQEEQESQENKDESVIEEKKEQEVSNGQCSGEESAKASEKIWNELIPPKSIEKLVIKNYRGVRFPNWIKGPKLGTSFPSLVLLDLENCMSCTKLPSLGLLDQLKSLQISNVDSVVTIGSEFLGTTVLSPATSFPKLEVLKLRNMRRLEEWSLAVEESQVLLPCLKSLHIQSCPKLKALPEGLKHVALRELHVEGAYSLTEIKDLPKLSDELHLKDNKALQRISNLPMLHSLIIDDCSKLKHVAGLDALQYLRLVFPPSTETFYFEELIIFWSIAFPRWLELLIQKCRGLRRFELQCSLSLLRSCLDGGKNWHIVQQIPEVRIISCDGKRYIRYNKSRRIYETNAQSEE

SEQ ID NO: 108556 - protein, 308 aa, Setaria italica
  Transcript Sequence Number=SeqID_42582
  Gene Ontology: Mol. function=nucleotide binding; Cellular component =intracellular; Biological process=signal transduction
  Homolog annotation: Hit_ID=Q7X864; Match level="QueryCoverage=100%, HitCoverage=38%, E-value=1e-156, Identity=86%"; Hit description =OSJNBa0006A01.22 protein
  Pfam annotation: Domain name=GTP_EFTU; Domain location=44-270; Score =257.9; E_value=2.4e-74; Accession=PF00009.19; Description=Elongation factor Tu GTP binding domain
  Pfam annotation: Domain name=MMR_HSR1; Domain location=47-200; Score =15.4; E_value=3.8e-05; Accession=PF01926.15; Description=GTPase of unknown function
  Pfam module annotation: Pfam domain module=GTP_EFTU::MMR_HSR1; Domain location=44-270::47-200
SRNYSSDISQLNVDKNNVNVTKPCLPEEYKPEKWMLADQESGVLSQLNLAIVGHVDSGKSTLSGRLLHLLGRISRKDMHKNEKESKEKGKGSFAFAWAMDESSEERERGVTMTVAVAYLETKKYRVVLLDSPGHKDFVPNMISGATQADAAILVVDASTGSFEAGMDGEGGKSVGQTKEHAQLIRSFGVEQLVVAVNKMDAVAYSKERFEFIKLQLGSFLRSCNFKDSAITWIPLSAVENQNLIKPPSDARLASWYQGFCLLDAIDSLQLPSRDVTKPLILPICDVIKSQSTGQLAAFGKLETGAIQI

SEQ ID NO: 108557 - protein, 240 aa, Setaria italica
  misc_feature (120)..(120): Xaa can be any naturally occurring amino acid
  Transcript Sequence Number=SeqID_42583
  Gene Ontology: Mol. function=nucleotide binding; Cellular component =intracellular; Biological process=signal transduction
  Homolog annotation: Hit_ID=Q7X864; Match level="QueryCoverage=93%, HitCoverage=28%, E-value=1e-104, Identity=82%"; Hit description =OSJNBa0006A01.22 protein
  Pfam annotation: Domain name=GTP_EFTU_D2; Domain location=55-122; Score=37.0; E_value=7.6e-08; Accession=PF03144.17; Description =Elongation factor Tu domain 2
  Pfam annotation: Domain name=GTP_EFTU_D3; Domain location=128-235; Score=31.2; E_value=1.1e-06; Accession=PF03143.9; Description =Elongation factor Tu C-terminal domain
  Pfam module annotation: Pfam domain module=GTP_EFTU_D2::GTP_EFTU_D3; Domain location=55-122::128-235
TNVRCLLHLDLSVASWYQGFCLLDAIDSLQLPSRDVTKPLILPICDVIKSQSTGQLAAFGKLETGAIQIGSKVLVLPCGLEATVKTIERDTNSCSIARAGDNVAVNLQGIDGNQLIPGGXLCHPGFPVAVANHLELKILVLDITIPILVGSQVEFHIHHAKEAARVTKIIALLDKTGKPSKSAPRFLKSKQNAVVQVTLDVAVCVQEFSKSRALGRAYLRLSGRTIAVGVVNRVIGQYEN

SEQ ID NO: 108558 - protein, 204 aa, Setaria italica
  Transcript Sequence Number=SeqID_42584
  Gene Ontology: Mol. function=zinc ion binding; Cellular component =intracellular
  Subcellular localization annotation: CTP_CleavageSite=64; ConfidenceScore=5.72e-01
SPPLSMAGCMLSSLAAARPAPSPSTTFFSGAKIGIDGPSGPTGTMGFSPAGSASMSATALLQKAAEMGATTSGGYGAGFPTTVGFGPMLGGPDRFPSPFGPLKAAMEPPYDGQPLLGQTQLVGLDVGRLLLPMPPGQQLYGGHGGGVGSMTRAIGSLMHGGQQQQQMVEHRRPDDLRVVDYLGVDEQRSFSGVSSFGPHIGPWT

SEQ ID NO: 108559 - protein, 154 aa, Setaria italica
  Transcript Sequence Number=SeqID_42585
  Homolog annotation: Hit_ID=Q70KT5; Match level="QueryCoverage=95%, HitCoverage=58%, E-value=3e-27, Identity=49%"; Hit description=TA7 protein (Fragment)
TTVCDHSANISSEKSHLKMNTVIVDQEETENIMMITSNSSTILPKSYGGQMYVEDFVDLNDRVAKGEKDRWQLAGPLQSHDHPPENINNGSGDLQITQPYLASEHQSSSVCLDNGVFSQQQAQLAKSVFPVDNPASVIEPFSNPQGNGQLQTGE

SEQ ID NO: 108560 - protein, 200 aa, Setaria italica
  Transcript Sequence Number=SeqID_42586
MLRRTRRLEQIDNAQAISCLLPKAGGALPRRSQASSPPPLPRLAMLAAAGEKRLSDGETASSTTTPNSSLSSASGAGSLPRCCSLSFDCFPSAAVAVACSPPSAPPAVPVWRRSEPHGAGSEKGRRRRQIKVRTQASPDLSEESAACVWRGLPPARPAPVTERRAPSKWTAEVSSPTQLRPSRSVDMDGGGFFPDTAPSL

SEQ ID NO: 108561 - protein, 48 aa, Setaria italica
  Transcript Sequence Number=SeqID_42587
KFSKILAHLRSSGTDVKELVFAVSRHGGSDTTSESPSPMVRGRGGAQP

SEQ ID NO: 108562 - protein, 335 aa, Setaria italica
  misc_feature (1)..(1): Xaa can be any naturally occurring amino acid
  misc_feature (13)..(13): Xaa can be any naturally occurring amino acid
  misc_feature (20)..(20): Xaa can be any naturally occurring amino acid
  misc_feature (57)..(57): Xaa can be any naturally occurring amino acid
  Transcript Sequence Number=SeqID_42588
  Gene Ontology: Mol. function=peptidyl-prolyl cis-trans isomerase activity; Cellular component=cytoplasm; Biological process=protein folding
  Homolog annotation: Hit_ID=B9S777; Match level="QueryCoverage=95%, HitCoverage=88%, E-value=1e-123, Identity=65%"; Hit description =Peptidyl-prolyl cis-trans isomerase d, ppid, putative
  Pfam annotation: Domain name=Pro_isomerase; Domain location=2-134; Score=207.2; E_value=4.4e-59; Accession=PF00160.13; Description =Cyclophilin type peptidyl-prolyl cis-tr
  Pfam annotation: Domain name=TPR_1; Domain location=225-258; Score =3.0; E_value=2.6; Accession=PF00515.20; Description=Tetratricopeptide repeat
  Pfam annotation: Domain name=TPR_1; Domain location=259-292; Score =32.7; E_value=1.4e-06; Accession=PF00515.20; Description =Tetratricopeptide repeat
  Pfam annotation: Domain name=TPR_2; Domain location=173-206; Score =8.4; E_value=3; Accession=PF07719.9; Description=Tetratricopeptide repeat
  Pfam annotation: Domain name=TPR_2; Domain location=225-258; Score =0.0; E_value=34; Accession=PF07719.9; Description=Tetratricopeptide repeat
  Pfam annotation: Domain name=TPR_2; Domain location=259-292; Score =32.1; E_value=2.3e-06; Accession=PF07719.9; Description =Tetratricopeptide repeat
  Pfam module annotation: Pfam domain module=Pro_isomerase::TPR_1::TPR _1::TPR_2::TPR_2::TPR_2; Domain location=2-134::225-258::259-292::173- 206::225-258::259-292
XTGEKGVGADTAXLHYKGSXFHRIVKGFMVQGGDITAGDGTGGQSIYGLNFEDENFXVLKHERKGMLSMANAGPDTNGSQFFITTTRTPHLDGKHVVFGRAIKGMGVVRAMEHIFVDEADRPTDDIVIVDSGELPEGADDGVVNFFKDGDMYPDWPIDLDEKPAEVSWWIDAVESAKAFGNESFKKQDYKTALRKYRKAMRYLDLCWEKEDIDEESSTALRKTKSIIFTNSSACKLKLGDLEGALLDADFALREREDNAKAFFRQGQVRVALNHIDAAVESFKQALELEPNDGGIKRELAAAKKKISDRRDQERKAFSRLFQPSGGLEKSEKENS

SEQ ID NO: 108563 - protein, 45 aa, Setaria italica
  Transcript Sequence Number=SeqID_42589
PGHSLLYLPSPATCTLQGCNCKGHGGELRRISNISPRRQTIEHMV

SEQ ID NO: 108564 - protein, 67 aa, Setaria italica
  Transcript Sequence Number=SeqID_42590
TVRTSIHACHAIHTKKNGKHHRGQLRVTKLAQQTRAHIVIKNHCRNNLTGATLSILNNRVMLIMIAS

SEQ ID NO: 108565 - protein, 170 aa, Setaria italica
  misc_feature (129)..(129): Xaa can be any naturally occurring amino acid
  misc_feature (155)..(155): Xaa can be any naturally occurring amino acid
  misc_feature (162)..(162): Xaa can be any naturally occurring amino acid
  Transcript Sequence Number=SeqID_42591
  Gene Ontology: Mol. function=protein binding; Cellular component =chromosome; Biological process=chromosome organization and biogenesis
  Homolog annotation: Hit_ID=Q8L6H8; Match level="QueryCoverage=95%, HitCoverage=12%, E-value=3e-75, Identity=89%"; Hit description=SMC4 protein
TELQVALVRGSNFTEVTKLLKGKGVDLDNNRFLILQGEVEQISLMKPKAQGPHDEGFLEYLEDIIGTNQYVEKIEEAYKQLEVLNEKRTASVQMLKLAEKERDSLESAKNEAETYMLKELSLLKWQEKXATKLASDDAISRVAQCQENVADLEKXNLSSERXKIQQNSQT

SEQ ID NO: 108566 - protein, 102 aa, Setaria italica
  misc_feature (74)..(74): Xaa can be any naturally occurring amino acid
  Transcript Sequence Number=SeqID_42592
  Subcellular localization annotation: CTP_CleavageSite=31; ConfidenceScore=5.55e-01
DRSNDGKGKTESKSKLCRRRRRRRHPSKPVRLQTASRTRDMSRPLSVRPTPSTTDARACRRARYTCGGTHPPAXPCPVRPSGISISNSSAGSGTAKWLGHAG

SEQ ID NO: 108567 - protein, 191 aa, Setaria italica
  misc_feature (72)..(72): Xaa can be any naturally occurring amino acid
  misc_feature (87)..(87): Xaa can be any naturally occurring amino acid
  misc_feature (93)..(93): Xaa can be any naturally occurring amino acid
  Transcript Sequence Number=SeqID_42593
  Gene Ontology: Mol. function=nucleic acid binding; Cellular component= nucleus; Biological process=RNA metabolic process
  Homolog annotation: Hit_ID=Q5ZDJ6; Match level="QueryCoverage=56%, HitCoverage=23%, E-value=5e-40, Identity=71%"; Hit description=Zinc finger CCCH domain-containing protein 8
  Pfam annotation: Domain name=zf-CCCH; Domain location=138-164; Score =25.3; E_value=0.00025; Accession=PF00642.16; Description=Zinc finger C-x8-C-x5-C-x3-H type (and similar)
  Pfam annotation: Domain name=zf-CCCH; Domain location=87-114; Score =31.1; E_value=4.5e-06; Accession=PF00642.16; Description=Zinc finger C-x8-C-x5-C-x3-H type (and similar)
  Pfam module annotation: Pfam domain module=zf-CCCH::zf-CCCH; Domain location=138-164::87-114
  Subcellular localization annotation: CTP_CleavageSite=50; ConfidenceScore=5.08e-01
PADVSAFDSHVGAFDYGVGAFDSHVGAFRLWRGRLRLARWRLRLARWRLRLAHRRLRLARWCFRFALRCEAXRGRLESSLPIYPQRXGEKDCXAYYMRTRTCKYGEACKFDHPQWVPEGGVPNWKEVPNVEDSYPERPGEPDCPYLVKSNTCRFKSRCKFNHPKEKVNALEAGTDKEVIFVQNVCKRKTPM

SEQ ID NO: 108568 - protein, 68 aa, Setaria italica
  Transcript Sequence Number=SeqID_42594
YCFVPCTVVDIALIAPLVQTTLPTPAPIISAPMLNPATNVLQSFDFHVTHVPIEPVPIYPQRPGETVC

SEQ ID NO: 108569 - protein, 41 aa, Setaria italica
  Transcript Sequence Number=SeqID_42595
GAADDLVPAKIHAPTAPSEAHNPKGLPIRPVCVYQVVFYFS

SEQ ID NO: 108570 - protein, 273 aa, Setaria italica
  misc_feature (37)..(37): Xaa can be any naturally occurring amino acid
  Transcript Sequence Number=SeqID_42596
  Gene Ontology: Mol. function=nucleic acid binding; Cellular component= nucleus; Biological process=RNA metabolic process
  Homolog annotation: Hit_ID=Q5ZDJ6; Match level="QueryCoverage=95%, HitCoverage=58%, E-value=1e-80, Identity=56%"; Hit description=Zinc finger CCCH domain-containing protein 8
  Pfam annotation: Domain name=zf-CCCH; Domain location=147-173; Score =45.1; E_value=2.7e-10; Accession=PF00642.16; Description=Zinc finger C-x8-C-x5-C-x3-H type (and similar)
  Pfam annotation: Domain name=zf-CCCH; Domain location=231-257; Score =41.7; E_value=2.9e-09; Accession=PF00642.16; Description=Zinc finger C-x8-C-x5-C-x3-H type (and similar)
  Pfam annotation: Domain name=zf-CCCH; Domain location=71-97; Score =46.2; E_value=1.3e-10; Accession=PF00642.16; Description=Zinc finger C-x8-C-x5-C-x3-H type (and similar)
  Pfam module annotation: Pfam domain module=zf-CCCH::zf-CCCH::zf-CCCH; Domain location=147-173::231-257::71-97
NLRLQFVYLVVGVPNWKEVPNVEDYYPERPGEPDCPXCKFNHPKEKVNALEAGTDNEHSLIADSAILPVRPSEPVCSFYAKTGKCKFGANCKFNHPMPSVIAKETIYTATTDAAAHIGAADDLVPAKMHAPTAPSEAHNPKGLPIRPGEVDCSFYMKTGSCKYGSICRFNHPYRPVVDIALIAPLVQTTLPTPAPIISAPMLNPATNVLQSFDFHVTHVPIEPVPIYPQRPGETVCDFYMKTGFCKYSQKCKFHHPMNRSEPGANGNWDPEQP

SEQ ID NO: 108571 - protein, 518 aa, Setaria italica
  Transcript Sequence Number=SeqID_42597
  Gene Ontology: Mol. function=nucleic acid binding; Cellular component= nucleus
  Homolog annotation: Hit_ID=Q5ZDJ6; Match level="QueryCoverage=73%, HitCoverage=86%, E-value=1e-145, Identity=63%"; Hit description=Zinc finger CCCH domain-containing protein 8
  Pfam annotation: Domain name=zf-CCCH; Domain location=163-189; Score =43.7; E_value=7.1e-10; Accession=PF00642.16; Description=Zinc finger C-x8-C-x5-C-x3-H type (and similar)
  Pfam annotation: Domain name=zf-CCCH; Domain location=213-239; Score =25.3; E_value=0.00025; Accession=PF00642.16; Description=Zinc finger C-x8-C-x5-C-x3-H type (and similar)
  Pfam annotation: Domain name=zf-CCCH; Domain location=266-292; Score =46.2; E_value=1.3e-10; Accession=PF00642.16; Description=Zinc finger C-x8-C-x5-C-x3-H type (and similar)
  Pfam annotation: Domain name=zf-CCCH; Domain location=342-368; Score =45.1; E_value=2.7e-10; Accession=PF00642.16; Description=Zinc finger C-x8-C-x5-C-x3-H type (and similar)
  Pfam annotation: Domain name=zf-CCCH; Domain location=408-434; Score =41.7; E_value=2.9e-09; Accession=PF00642.16; Description=Zinc finger C-x8-C-x5-C-x3-H type (and similar)
  Pfam annotation: Domain name=zf-CCCH; Domain location=462-488; Score =40.5; E_value=6.5e-09; Accession=PF00642.16; Description=Zinc finger C-x8-C-x5-C-x3-H type (and similar)
  Pfam module annotation: Pfam domain module=zf-CCCH::zf-CCCH::zf -CCCH::zf-CCCH::zf-CCCH::zf-CCCH; Domain location=163-189::213 -239::266-292::342-368::408-434::462-488
MSDPLYPYSRGALPGGDGALPPPRYSDLEVDLIAARYTGTPPPYPSSADVSAFDSHVGAFDYGVGAFDSHVGAFDSGVGAFDSHVGAFDSHVGAFDSHIGAFDSRVGAFDSRFGARRSAEALYHQSFMGSHSTVAQNEALYSPNTMAKRPRLESSLPIYPQRPREKDCAFYMRTRTCKYGEACKFDHPQWVPEGGVPNWKEVPNVEDYYPERPGEPDCPYLVKSNTCRFKSRCKFNHPKEKVNALEAGTDNEHSLIADSAILPVRPSEPVCSFYAKTGKCKFGANCKFNHPMPSVIAKETIYTATTDAAAHIGAADDLVPAKMHAPTAPSEAHNPKGLPIRPGEVDCSFYMKTGSCKYGSICRFNHPYRPAPIISAPMLNPATNVLQSFDFHVTHVPIEPVPIYPQRPGETVCDFYMKTGFCKYSQKCKFHHPMNRSEPGANGNWDPEQPVTLTLAGLPRRESAEACAFYMRSGTCRYGAHCKFDHPPPQEAIAKLQAAGKEDEEKKEGEAKEGSVVP

SEQ ID NO: 108572 - protein, 99 aa, Setaria italica
  misc_feature (50)..(50): Xaa can be any naturally occurring amino acid
  Transcript Sequence Number=SeqID_42598
  Gene Ontology: Cellular component=nuclear chromosome; Biological process=microsporogenesis
  Homolog annotation: Hit_ID=Q76CY8; Match level="QueryCoverage=67%, HitCoverage=10%, E-value=1e-18, Identity=65%"; Hit description =Essential protein for meiotic synapsis
QKKYLKTLLFCICEKEEGPMIEEYAFSFSYPNTSTEEVAMNMSRTGSKKXSTTFTSNSSEVTPDQMRYFLTFFFPQTRYFLTLDTVFFFWHEVAVLVKK

SEQ ID NO: 108573 - protein, 243 aa, Setaria italica
  misc_feature (13)..(13): Xaa can be any naturally occurring amino acid
  Transcript Sequence Number=SeqID_42599
  Gene Ontology: Mol. function=transferase activity, transferring glycosyl groups; Cellular component=integral to membrane; Biological process=cell wall organization and biogenesis
  Homolog annotation: Hit_ID=Q67X45; Match level="QueryCoverage=100%, HitCoverage=44%, E-value=1e-117, Identity=82%"; Hit description =Probable mannan synthase 3
RDTKMTLDYHFKXEQEAGSSTFALEQEAGTAGVWRISSIKEAGGWEDRTTVEDMDLAVRAGLKGWKFIYVGDVKVKSELPSNLKAYRRQQHRWTCGAANLFRKTGAEIILTKEVSLWRKLYLIYSFFFIRKVVAHVVPFMLYCVVIPLSVLIPEVTVPVWGVVYIPTTITLLYAIRNPSSLHFIPFWILFENVMSFHRTKAAVIGLLELGSVNEWVVTEKLGNSSCTKPVPQILEKPPCRSWD

SEQ ID NO: 108574 - protein, 459 aa, Setaria italica
  Transcript Sequence Number=SeqID_42600
  Gene Ontology: Mol. function=binding
  Homolog annotation: Hit_ID=B9S778; Match level="QueryCoverage=99%, HitCoverage=65%, E-value=1e-115, Identity=47%"; Hit description =Armadillo repeat-containing protein, putative
  Pfam annotation: Domain name=Arm; Domain location=101-144; Score =11.0; E_value=0.49; Accession=PF00514.15; Description=Armadillobeta -catenin-like repeat
  Pfam annotation: Domain name=Arm; Domain location=282-326; Score =10.4; E_value=0.58; Accession=PF00514.15; Description=Armadillobeta -catenin-like repeat
  Pfam annotation: Domain name=Arm; Domain location=327-369; Score=4.0; E_value=3.8; Accession=PF00514.15; Description=Armadillobeta-catenin -like repeat
  Pfam module annotation: Pfam domain module=Arm::Arm::Arm; Domain location=101-144::282-326::327-369
AIAISQEAFDAMVRENMEDLGMDADEALADAVEALTLQGADLSGIIKRVPGEAAAAEVSPMVRVLDELKASHSASGGLGQDLDGLVSLIDELRGLCCSGDGTENAAIAVRNGGVEALVALCASARVAQERLLGSALKALSSLLRDIGSTEKFRQSEGPKIVMDILKGGSESSDLLDAGFSVVAAGSAGNEVVKESFMDLKVDELILHVMREKSKTNVQSLYDAIRVLLTPDDNRVVASQVYGYSRRFAEIGIAEVLVSALREQVAPSSLPSACAALKSIAVNDEICRSISENGGTDVLLQCIDEAGEQKNKVIAKSCCSLLSKLAASDANKSVIIQRGGFDRSLKLASRFSEDPSILQEVMSMVTVLTLRSPENAARAMEIGYGTLAIQAMQRFPSSGQTQKQACLMIRNLVVRNPENRTILLNDGAEKLIRKAKVMHGSCKDAASSALRDLGLDNYNA

SEQ ID NO: 108575 - protein, 88 aa, Setaria italica
  Transcript Sequence Number=SeqID_42601
TNSLCGTEGVRRGGDREGNKEKREVTNLATHFKRTHISLEEHALVSPLEMLLYILYYPIAYLDEKFTASKVARSDAPLMSNYVANCCN

SEQ ID NO: 108576 - protein, 101 aa, Setaria italica
  Transcript Sequence Number=SeqID_42602
  Subcellular localization annotation: CTP_CleavageSite=49; ConfidenceScore=5.24e-01
PLRSFTLRRISTAACSPSSPASCRNQCTRTDASRIEAPGERRGRASLLVVMGGGCGEEVEVGGEAGAAEEREWEKQWARVSAPRLVAVLASLSSVPFPRSA

SEQ ID NO: 108577 - protein, 85 aa, Setaria italica
  Transcript Sequence Number=SeqID_42603
IVTLFICTTVLWCRHTNLADHGLQPMQAGPNSLCGGDQDKKLAVINDVMTVMANGGDQVQELAVINDVMTVMAMLQCSTFLIIVT

SEQ ID NO: 108578 - protein, 357 aa, Setaria italica
  Transcript Sequence Number=SeqID_42604
  Gene Ontology: Mol. function=receptor activity; Cellular component =plasma membrane; Biological process=protein amino acid phosphorylation
  Homolog annotation: Hit_ID=B9SEI9; Match level="QueryCoverage=99%, HitCoverage=52%, E-value=1e-119, Identity=56%"; Hit description =Serine-threonine protein kinase, plant-type, putative
  Pfam annotation: Domain name=LRRNT_2; Domain location=196-237; Score =20.0; E_value=0.0082; Accession=PF08263.4; Description=Leucine rich repeat N-terminal domain
  Pfam annotation: Domain name=LRR_1; Domain location=244-266; Score =0.2; E_value=2.7e+02; Accession=PF00560.25; Description=Leucine Rich Repeat
  Pfam annotation: Domain name=LRR_1; Domain location=268-290; Score =15.6; E_value=0.2; Accession=PF00560.25; Description=Leucine Rich Repeat
  Pfam annotation: Domain name=LRR_1; Domain location=291-313; Score =13.7; E_value=0.73; Accession=PF00560.25; Description=Leucine Rich Repeat
  Pfam annotation: Domain name=LRR_1; Domain location=314-336; Score =1.0; E_value=2e+02; Accession=PF00560.25; Description=Leucine Rich Repeat
  Pfam module annotation: Pfam domain module=LRRNT_2::LRR_1::LRR_1::LRR_ 1::LRR_1; Domain location=196-237::244-266::268-290::291-313::314-336
HPLAYDGATTGADLVLVNYGRVTCGNSLFGPGFTRDPDAFSRVWQADVDFRNNDLSYDAITAGGRKIFGSNQPPNYFPTKLYESAVTTGGDATNEIEYLMPVDTRLSYMVWLHFAEIDAGIGAAGQRVFDVMLAGENVTRIDIFKQVGGFTAFKWTYIVENLTSSTLSVKLVPVVGRPILCGLENYAMVPLEMRTVPSQVAAMKALKESLKIPARMGWNGDPCAPRAWDAWEGVTCHRGDKGLVITQLDLASQGLKGFITDEISHLKDLVSLNLSYNSLTGSLPPGLGQPSLVSLDLSSNEFTGSIPGTIGSSKLQTALLNNNQLDGQVPERLYSIGVHGGIIDLSGNKGLCGVPTL

SEQ ID NO: 108579 - protein, 58 aa, Setaria italica
  Transcript Sequence Number=SeqID_42605
LPTTGRVGNGDDAARTVGVQTCGPLAAGARGLSPPPRFGGPILILIIAQNKTAAVTRE

SEQ ID NO: 108580 - protein, 136 aa, Setaria italica
  Transcript Sequence Number=SeqID_42606
  Gene Ontology: Mol. function=signal transducer activity; Biological process=response to light stimulus
  Homolog annotation: Hit_ID=B6T0F2; Match level="QueryCoverage=91%, HitCoverage=21%, E-value=1e-50, Identity=77%"; Hit description =Photoreceptor-interacting protein-like
  Subcellular localization annotation: CTP_CleavageSite=22; ConfidenceScore=5.54e-01
PIAAVGTPNRSSSSCSSSPDTVGFGRSSSTKTPESMWPCVGREWWFDDMTSLSPQTIEKVMRVLGCYGIENKNLILTRFLLHYLRAATRRPALVLCKEATLAGLADTAVHGVALVGGTAFSCRGLFWVLKNRVGRG

SEQ ID NO: 108581 - protein, 72 aa, Setaria italica
  Transcript Sequence Number=SeqID_42607
YSSNTYRISPNNRTIFIFRISKGKGSTGHDLGRADQATEADPAHPASTSSLCQVLISCFVNLHPSFPIIRFI

SEQ ID NO: 108582 - protein, 321 aa, Setaria italica
  Transcript Sequence Number=SeqID_42608
  Gene Ontology: Mol. function=kinase activity; Biological process =protein amino acid phosphorylation
  Homolog annotation: Hit_ID=O80540; Match level="QueryCoverage=68%, HitCoverage=22%, E-value=1e-38, Identity=38%"; Hit description =F14J9.26 protein
  Pfam annotation: Domain name=DUF579; Domain location=152-302; Score =325.1; E_value=1.4e-94; Accession=PF04669.5; Description=Protein of unknown function (DUF579)
  Subcellular localization annotation: CTP_CleavageSite=48; ConfidenceScore=5.57e-01
MKSMGSRDKLSAVSAASGHRRALFAVFAFCFAFATFLTFLYTTSHFTSAAAAAGGSDASLALAAGSGSGSDNKLPLPVFDALVHYASISNATHRMPDTDIRAIAAVVRARAPCNLLVFGLGAESPLWLALNHGGRTVFLEENEFYVKYLEPKHPGLEAYDVSYTTKVRDFRDLLSAARASRAKECRPVQNLLFSECRLAINDLPNDLYDVAWDMVLIDGPSGWNPNSPGRMPSIFTTAVLARSGATAAKGPTDVLVHDFQFEVEQVLSKEFLCDENRVAGSGTPSLGHFVIPGGGGRSDAFCSESAQGESSSESGDNNRRK

SEQ ID NO: 108583 - protein, 141 aa, Setaria italica
  misc_feature (26)..(26): Xaa can be any naturally occurring amino acid
  Transcript Sequence Number=SeqID_42609
  Gene Ontology: Mol. function=transferase activity; Cellular component= intracellular; Biological process=regulation of transcription, DNA -dependent
  Homolog annotation: Hit_ID=B6SJK4; Match level="QueryCoverage=89%, HitCoverage=28%, E-value=2e-62, Identity=91%"; Hit description=HMG box family protein
  Pfam annotation: Domain name=ARID; Domain location=1-105; Score=33.9; E_value=8.2e-08; Accession=PF04669.5; Description=ARIDBRIGHT DNA binding domain
DAARFRAVLERLHAHMGTRLKVPIIXGGKDLDLHQLYKEVTSRGGIDKVKAENRWREVTASFVFPATATNASFMLKKYYMSLLYHFEQLYFFRVQGWYQEEIDSRTNSIEVKTKAQASHKRKRGTNSSPSDPASSSDSVDV

SEQ ID NO: 108584 - protein, 73 aa, Setaria italica
  Transcript Sequence Number=SeqID_42610
  Gene Ontology: Mol. function=sequence-specific DNA binding; Cellular component=nucleus; Biological process=regulation of transcription, DNA-dependent
  Pfam annotation: Domain name=GATA; Domain location=4-41; Score=46.1; E_value=1.3e-10; Accession=PF00320.19; Description=GATA zinc finger
LFRCLRCGISASATPHMRRGPEGRRTLCNACGIAWAKGKTRKVIDSDAHIDDATIAKVVPEVGMEFDNEDKAY

SEQ ID NO: 108585 - protein, 93 aa, Setaria italica
  Transcript Sequence Number=SeqID_42611
PSDYKEKNKRKLGIPVYRFQTKAKIKVIYGSQLILKKDSIIVIASAQQTIFYKLSFVCSQWFSRLNLFSSGLFRVILELMHVRMCIDKKAIGH

SEQ ID NO: 108586 - protein, 75 aa, Setaria italica
  Transcript Sequence Number=SeqID_42612
  Homolog annotation: Hit_ID=Q0JF21; Match level="QueryCoverage=52%, HitCoverage=17%, E-value=2e-09, Identity=79%"; Hit description =Lectin 8 kDa peptide
  Pfam annotation: Domain name=Chitin_bind_1; Domain location=31-72; Score=62.3; E_value=1.8e-15; Accession=PF00187.11; Description =Chitin recognition protein
MATVKTAATMVMKVLVLGLVLLAYAGLIAHAQPQCGSQGGGATCSNNLCCSQWGYCGLGGDYCGNGCQSGPCYTT

SEQ ID NO: 108587 - protein, 117 aa, Setaria italica
  Transcript Sequence Number=SeqID_42613
  Gene Ontology: Mol. function=ubiquitin-protein ligase activity; Cellular component=intracellular; Biological process=ubiquitin -dependent protein catabolic process
QPDVQGPELDLTPLRMRAFEQARVVLLGHGCAEFLLVVGMDVPSGRSLSLVGLMDEQFDEFKYRIEVVGKDGVLALFGQAARVDRLARPYHASAFLFVPNAIWDSYPEDIPVFIHLK

SEQ ID NO: 108588 - protein, 121 aa, Setaria italica
  Transcript Sequence Number=SeqID_42614
  Gene Ontology: Cellular component=integral to membrane
  Homolog annotation: Hit_ID=B9SI63; Match level="QueryCoverage=91%, HitCoverage=18%, E-value=3e-29, Identity=53%"; Hit description =Sodium/potassium/calcium exchanger 6, putative
  Pfam annotation: Domain name=Na_Ca_ex; Domain location=5-113; Score =7.5; E_value=0.0035; Accession=PF01699.16; Description=Sodiumcalcium exchanger protein
PCSPGNSLGDLIANVAVASRGGPCGAQVAVSGCYGGPVFNVLVGLGLSLLLSCWAGYPQTVKIPRESGLYRTLGFVVVGLVWALVMLPRRGMRVDRTLGFGLLAIYFCFICINISQLKNER

SEQ ID NO: 108589 - protein, 136 aa, Setaria italica
  misc_feature (24)..(24): Xaa can be any naturally occurring amino acid
  Transcript Sequence Number=SeqID_42615
  Gene Ontology: Mol. function=transporter activity; Cellular component= membrane; Biological process=oligopeptide transport
  Homolog annotation: Hit_ID=Q5Z774; Match level="QueryCoverage=99%, HitCoverage=22%, E-value=2e-46, Identity=62%"; Hit description =Putative peptide transporter
RCLDKAAIATEEDYHAGNTKNPWXRLCTVTQVEEVKCILGLIPILICTIIYSLEYTQMGSTFVEQGTAMDTNLFGKFRVPAASMSVFDIISVILSVLAYRFVIAPMASRFTKNPDGITDLQRMGSGLIIALIGMLL

SEQ ID NO: 108590 - protein, 61 aa, Setaria italica
  Transcript Sequence Number=SeqID_42616
MRMFSFPVPAGSASACTALQSQHPFQQAADLIVLVRPGQPHVSCSEPRSEDYPNPETWKVT

SEQ ID NO: 108591 - protein, 68 aa, Setaria italica
  Transcript Sequence Number=SeqID_42617
MAASGSGGNGPGGRPWTATSTWAPAPDGGVVEDAISFETSDEDAEDSPAGVLLSRPLPDGDGNAPPCE

SEQ ID NO: 108592 - protein, 454 aa, Setaria italica
  misc_feature (16)..(16): Xaa can be any naturally occurring amino acid
  misc_feature (277)..(277): Xaa can be any naturally occurring amino acid
  misc_feature (338)..(338): Xaa can be any naturally occurring amino acid
  Transcript Sequence Number=SeqID_42618
  Gene Ontology: Mol. function=nucleoside-triphosphatase activity; Cellular component=cell wall
  Homolog annotation: Hit_ID=B6U2J1; Match level="QueryCoverage=100%, HitCoverage=69%, E-value=0.0, Identity=79%"; Hit description=ATPase family AAA domain-containing protein 3
  Pfam annotation: Domain name=AAA; Domain location=210-419; Score =129.4; E_value=1.2e-35; Accession=PF00004.21; Description=ATPase family associated with various cellular activities (AAA)
  Pfam annotation: Domain name=AAA_5; Domain location=210-338; Score= -18.2; E_value=0.031; Accession=PF07728.6; Description=ATPase family associated with various
  Pfam annotation: Domain name=Mg_chelatase; Domain location=188-344; Score=-141.1; E_value=0.0071; Accession=PF01078.13; Description =Magnesium chelatase, subunit ChlI
  Pfam annotation: Domain name=Sigma54_activat; Domain location=182 -302; Score=-187.3; E_value=0.099; Accession=PF00158.18; Description =Sigma-54 interaction domain
  Pfam module annotation: Pfam domain module=AAA::AAA_5::Mg _chelatase::Sigma54_activat; Domain location=210-419::210-338::188 -344::182-302
KEESAIRLEQNNGRRXPEEQIQEQRRQTEKERSDIVRETIKLKAMSEAQARILETKETEDVKRRLLVDQIKADREKWIEVINTTFEHIGGGLQTILTDQNKLVVAVGGLTALAAGIYTTREGARVVWGYVDRILGQPSLVRESSRGRYPWSGSLSRATSSLTSKLKNGSNPGKNGNGFGDVILNPSLQKRVKQLANATANTKLHQAPFRNMLFYGPPGTGKTMAARELARNSGLDYALMTGGDVAPLGSQAVTKIHQLFDWAKKSNRGLLLFIDEAXAFLCERNKTYMSEAQRSALNALLFRTGDQSKDVVLALATNRPGDLDSAVADRIDEVLEFPXLPGEDERFKILKLYLDKYIAKAGDKYEKSWLRFFRRQPQKIEMKGITDDLIREAAAKTQGFSGREIAKMMASVQAAVYGSKDCELTPALFREVVDYKVAEHEQRRKLAGEEPKQNA

SEQ ID NO: 108593 - protein, 101 aa, Setaria italica
  Transcript Sequence Number=SeqID_42619
  Gene Ontology: Mol. function=zinc ion binding
  Homolog annotation: Hit_ID=B4FHI4; Match level="QueryCoverage=100%, HitCoverage=36%, E-value=6e-42, Identity=82%"; Hit description =Protein binding protein
  Pfam annotation: Domain name=zf-C3HC4; Domain location=59-101; Score =39.6; E_value=1.2e-08; Accession=PF00097.17; Description=Zinc finger, C3HC4 type (RING finger)
MGDHLALLVDRLLTESTLEAAIGGGKQMVDLHPEAVAVEYCHRAVGGGGGGSASKVVECRICQEEDWDSSMEAPCACCGSLKYAHRKCIQRWCNEKGDTIC

SEQ ID NO: 108594 - protein, 244 aa, Setaria italica
  misc_feature (10)..(10): Xaa can be any naturally occurring amino acid
  Transcript Sequence Number=SeqID_42620
  Homolog annotation: Hit_ID=Q25AI1; Match level="QueryCoverage=93%, HitCoverage=24%, E-value=1e-80, Identity=63%"; Hit description =H0702G05.12 protein
  Pfam annotation: Domain name=Transposase_24; Domain location=71-222; Score=-7.1; E_value=0.0024; Accession=PF03004.6; Description=Plant transposase (PttaEnSpm family)
HLDWRSVPEXNKDVMFHIVKLKFDIAPVGELWIVKSLGRKWKSWKSILKQKHFDTHETEEERLADRNPRVLEEQWRFLVAYWSTEKAQAASARNKACQANVTTYHSSGTKSFARIIEEERQQRHNDEPTVEDLFILTHKPKDGKPMAKAAASTIERFREQCQKPTEGSESDFGLESRRTRRRRKPALKTSLREAMEAKRRAEDEAATLRKKLFAMEERQRKLQEGKASVTVHLLAPPGSSPDHP

SEQ ID NO: 108595 - protein, 903 aa, Setaria italica
  Transcript Sequence Number=SeqID_42621
  Gene Ontology: Mol. function=sequence-specific DNA binding; Cellular component=nucleus; Biological process=regulation of transcription, DNA-dependent
  Homolog annotation: Hit_ID=Q41813; Match level="QueryCoverage=100%, HitCoverage=57%, E-value=0.0, Identity=63%"; Hit description=Hox2b protein
  Pfam annotation: Domain name=Homeobox; Domain location=144-199; Score= 7.6; E_value=0.0022; Accession=PF00046.21; Description=Homeobox domain
  Pfam annotation: Domain name=Homeobox; Domain location=353-409; Score= 27.5; E_value=2.5e-05; Accession=PF00046.21; Description=Homeobox domain
  Pfam module annotation: Pfam domain module=Homeobox::Homeobox; Domain location=144-199::353-409
DEVSASPLLDVLNSTGRMKIRAVGNQSNEEISNHAFIDMELEQGTVLPISSRRQVERLDYKKLYNEAYGKESSKSSDDEEWSGKELLEGSETDSLGEQLQPAKRCSRRAPAGQQNNEHTPQRERLRGSESEQQTEVLRSNGSSSTGRKFGPIVTQKLKVHFEKDPYPGRVTKENLAQELGLTFNQVCRWFSSTRHYSRVASAKNEKHQDNHTSENNDSTNADSMQTHAGVMEKLTADRSVIVPEKPTMQNNLNQCNKEDMPLSGTEIEMESYGQESSDSSDEEWSAFSTPRKSRLQDNETASPVESLLPPKRCSRRTPAREQNNEHTPQSEQLTGSASEHRTEVLCSNSSSSKASKHHFGPIVSQKLKAHFEKDPYPSRATKESLAQELGLTFNQVSKWFSATRYYSRGAAAKNKKHPGKNTTENDNSLSFDGVEVREPNIVLMEKPAADINDTISEKLMIQINLNEDIEEDIPPSQYTRCEERATMTPTAISTEVGPPGYGPGENFLQVSSRNTSCEQNVIMTPPAILREVGPPGYVRGENQGNNAPRNMSCEQGVFTSPTTITREIGPPGYGPEENQGSGISWNMSCEQGVFMSSPTISREAGPPGYGSRENQGSGTSWNTSCEQGMFINPATISREAGPPGYGPGEKHGNGTSPNTSCELRMFTSPTTISREVGLPGNEPGEDQDNGTSWNMSYKKGVFPTAIEVVPPGFGPGENQDYGTARNIRCEQRMYTSPTTIPREVGLPGYGGENQSNGASWSTCYEQGVFTSPTAISREIGPPGYGPGENQGNITLWTTSCKQRMFANHTTVSSEGGPPGYSIIENQGTGGSRNIDLEQRAVVTPGTISREVFPPGYGPGENQDSGASGNVGSPQGRSAQKVEFSDEARKKAIQRELRRRQKFR

SEQ ID NO: 108596 - protein, 105 aa, Setaria italica
  Transcript Sequence Number=SeqID_42622
  Gene Ontology: Mol. function=hydrolase activity; Biological process =metabolic process
  Homolog annotation: Hit_ID=B6TXN5; Match level="QueryCoverage=100%, HitCoverage=30%, E-value=8e-32, Identity=67%"; Hit description =Gibberellin receptor GID1L2
  Pfam annotation: Domain name=Abhydrolase_3; Domain location=1-105; Score=-63.3; E_value=0.0018; Accession=PF07859.5; Description =alphabeta hydrolase fold
RGVGAVVVSVNYRLVPEHRFPAAYEDGVAALQYLDGIAVPADLAPVPVDLSSCFLAGDSSGGNMVHHVAQRWAAMSAASPPLRLRLAGAIMIQPFFGGEERTAAE

SEQ ID NO: 108597 - protein, 78 aa, Setaria italica
  Transcript Sequence Number=SeqID_42623
  Gene Ontology: Mol. function=transporter activity; Cellular component= membrane; Biological process=oligopeptide transport
  Homolog annotation: Hit_ID=B6U6P2; Match level="QueryCoverage=87%, HitCoverage=12%, E-value=1e-20, Identity=64%"; Hit description =Peptide transporter PTR2
LHGTMHMGIADASTTATNLYGAICVFTLFGAFISDSYIKRFYTILIFAAIEILGYMLLACQAHFPSLHPPPCDITNHP

SEQ ID NO: 108598 - protein, 260 aa, Setaria italica
  Transcript Sequence Number=SeqID_42624
  Gene Ontology: Mol. function=transferase activity; Cellular component= chloroplast; Biological process=isoprenoid biosynthetic process
  Homolog annotation: Hit_ID=C5G5X3; Match level="QueryCoverage=100%, HitCoverage=70%, E-value=1e-118, Identity=83%"; Hit description =Putative geranylgeranyl pyrophosphate synthase 1
  Pfam annotation: Domain name=polyprenyl_synt; Domain location=1-256; Score=334.6; E_value=2e-97; Accession=PF00348.9; Description =Polyprenyl synthetase
KRVRPALCLAACGVAGGREAWALAPAAAVEMVHTMSLVHDDLPCMDDDDLRRGKPTCHVVYGEPIAVLAGDALLSLAFHHMASVGSYPPDVDPDKHPARVVRAIGELARCIGSEGLVAGQVVDLEMTGTSEIVPLERLEYIHLHKTAALLEASVVIGAIIGGATDEQIERLRKYARSIGLLFQVVDDILDVTKSSEELGKTAGKDLASDKTTYPKLLGLDKSREFAEKLLSDAKEQLAGFDKEKAAPLLHLAYYIAHRQN

SEQ ID NO: 108599 - protein, 51 aa, Setaria italica
  Transcript Sequence Number=SeqID_42625
  Subcellular localization annotation: CTP_CleavageSite=14; ConfidenceScore=5.04e-01
PPNTGRRSTTTTTRSMARMVIIWSTGGLVLDRSSGNKFLPRRLMLTQRTSS

SEQ ID NO: 108600 - protein, 374 aa, Setaria italica
  misc_feature (226)..(226): Xaa can be any naturally occurring amino acid
  Transcript Sequence Number=SeqID_42626
  Homolog annotation: Hit_ID=B9RS75; Match level="QueryCoverage=98%, HitCoverage=14%, E-value=1e-110, Identity=56%"; Hit description=Zinc finger protein, putative
VCLESASLSIDLRRELQGRQLVKLLTTDPLNGGGPAAASRFLSTLRDSNDALPVAIGAMKLLPDLRSKQLLVHFFPKRTVGSLSDAEIARLNSWALGLRVLSLLPLPSQQRCSSLHEHPQLIVEVLLMMKQFQSASLILKEFPTLRDDRLIISYAKKAISINVSSTPKERRPSISASRAKQKKATTPAKTNFVQSFGNFQREARKAFSWVPRDSGTKTPPKDSLRXRKSSGSGGDRSSWDALPGVQEERTPVYPSEGQDKLPFVSAPDEWVLTGEPDKDDATRSSHRYETSPDITLFKALISLCTDESVAAKGALELCMTQMKIVLSSQQLPLDASMDNIARAYHATETYVQARSHAKNLLKKLIGSSDLSSGS

SEQ ID NO: 108601 - protein, 93 aa, Setaria italica
  Transcript Sequence Number=SeqID_42627
PICAIGPDEAGRLLDSVDWAGPCTGFATKSIFLRSCCASISPCCCASPSLELQHDKVGIRGDPVSHPHAIILGPRAAARQPQHARRRPLIRRR

SEQ ID NO: 108602 - protein, 83 aa, Setaria italica
  Transcript Sequence Number=SeqID_42628
  Gene Ontology: Mol. function=transferase activity, transferring glycosyl groups; Biological process=metabolic process
  Homolog annotation: Hit_ID=B6TL37; Match level="QueryCoverage=100%, HitCoverage=16%, E-value=3e-36, Identity=81%"; Hit description =Cytokinin-O-glucosyltransferase 2
GRCRVAAWCPQEQVVRHPAVGCFLTHNGWNSTCESLAAGMPMVCWPGFADQYINRKYACDVWGVGVRLDDEVRREQVAMRVRE

SEQ ID NO: 108603 - protein, 159 aa, Setaria italica
  Transcript Sequence Number=SeqID_42629
  Homolog annotation: Hit_ID=B9S6G4; Match level="QueryCoverage=75%, HitCoverage=31%, E-value=4e-27, Identity=52%"; Hit description=Sugar transporter, putative
  Pfam annotation: Domain name=DUF1195; Domain location=5-156; Score =316.0; E_value=7.9e-92; Accession=PF06708.3; Description=Protein of unknown function (DUF1195)
MKAGVDHHHHGLHSPTPAAATKISIPISSGEAALFGKGRYKAWALAAIALLALWSMFAASVTLRWSSGELATFGNASDPLIDEFDPLEMEEREKLARRMWDVYTRTGDHVRLPRFWQEAFEAAYEELAGDDTQASDAAISEIARMSVHRPEVEQSWNKN

SEQ ID NO: 108604 - protein, 261 aa, Setaria italica
  misc_feature (99)..(99): Xaa can be any naturally occurring amino acid
  misc_feature (114)..(114): Xaa can be any naturally occurring amino acid
  Transcript Sequence Number=SeqID_42630
  Gene Ontology: Mol. function=sequence-specific DNA binding; Cellular component=nucleus; Biological process=regulation of transcription, DNA-dependent
  Homolog annotation: Hit_ID=Q20DP7; Match level="QueryCoverage=93%, HitCoverage=52%, E-value=2e-44, Identity=62%"; Hit description=WRKY transcription factor 64
  Pfam annotation: Domain name=WRKY; Domain location=137-182; Score =20.8; E_value=2.4e-06; Accession=PF03106.7; Description=WRKY DNA -binding domain
MKHHNSRYLPQSSPSDHPSFVSDHRSAMKEIARGQSLVTQLRAIVLPALQADQRCELVAQMFQNILDCSSKAITELQLHHQSNARADDALVDDKKRVRXFLSDDCIKEEGATAXPHHQHKRSRKSDDSVSLETPVPRYDGRQWRKYGQKHINKAKHPRSYYRCTYRHRAPVPILVSPIPHLALRQKATRPPPRSRFRCATFVSDHRSAMKEIARGQSLVTQLRAIVLPALQAYQRCELAAQMFQNILDCSSKAITELQLHH

SEQ ID NO: 108605 - protein, 63 aa, Setaria italica
  Transcript Sequence Number=SeqID_42631
  Homolog annotation: Hit_ID=B9REV1; Match level="QueryCoverage=93%, HitCoverage=7%, E-value=1e-23, Identity=81%"; Hit description =Nucleotide binding protein, putative
GSAPVPVYKEPSLVIPGVPAIIQHEIMNNRRHVLTKDTAGSVKLWEITRGAVIEDFGKVFVSS

SEQ ID NO: 108606 - protein, 754 aa, Setaria italica
  Transcript Sequence Number=SeqID_42632
  Gene Ontology: Mol. function=protein serine/threonine kinase activity; Cellular component=lysosome; Biological process=protein amino acid phosphorylation
  Homolog annotation: Hit_ID=B9REV1; Match level="QueryCoverage=100%, HitCoverage=100%, E-value=0.0, Identity=71%"; Hit description =Nucleotide binding protein, putative
  Pfam annotation: Domain name=WD40; Domain location=115-154; Score =29.6; E_value=1.3e-05; Accession=PF00400.24; Description=WD domain, G-beta repeat
  Pfam annotation: Domain name=WD40; Domain location=203-241; Score =27.3; E_value=6.1e-05; Accession=PF00400.24; Description=WD domain, G-beta repeat
  Pfam annotation: Domain name=WD40; Domain location=245-283; Score =38.5; E_value=2.6e-08; Accession=PF00400.24; Description=WD domain, G-beta repeat
  Pfam annotation: Domain name=WD40; Domain location=25-68; Score=19.1; E_value=0.019; Accession=PF00400.24; Description=WD domain, G-beta repeat
  Pfam annotation: Domain name=WD40; Domain location=287-325; Score =24.5; E_value=0.00043; Accession=PF00400.24; Description=WD domain, G-beta repeat
  Pfam annotation: Domain name=WD40; Domain location=74-110; Score =25.0; E_value=0.00031; Accession=PF00400.24; Description=WD domain, G-beta repeat
  Pfam module annotation: Pfam domain module=WD40::WD40::WD40::WD40::WD4 0::WD40; Domain location=115-154::203-241::245-283::25-68::287 -325::74-110
MHRVGSAGNTAGSTRPRKEKRFTYVLNDADAKKHCAGINCLAYLNGSANSTSDYLFSGSRDGTLKRWELNNGDASFSATFESHVDWVNDAIIVGEKLVSCSSDTTLKVWNCFSDGACTRTLRQHSDYVICLAAAEKNSNIVASGGLGGEVFIWDLDAALAPVAKSADAKEDEVPNGNSGPALTTLCNVNSSSNIASSNGQSHGYSPIAAKGHKDSVYALAMNDTGTLLVSGGTEKVVRVWDPRTGSKKMKLRGHTDNIRTLLLDSTGRYCLSGSSDSMIRLWDLGQQRCVHSYAVHTDSVWALASTPSFGHVYSGGRDQSVYLTDLSTRESVLLCTNEYPILQLSLQDDTIWVATTDSSVYGWPAEGHTPQKVFEKGGSFLAGNLSFSRARASLEGSAPVPVYKEPSLVIPGVPAIIQHEIMNNRRHVLTKDTAGSVKLWEITRGAVIEDFGKVSFEDKKKELFEMVSIPAWFTMDARLGCLSVHLDTPQCFSAEIYAVDLNVSGAQEDLKINLAQETLRGLLVHWSKRKQKSGSHSLSNGDSSSGKDLPSKDSPRSRSEVDDGTENHATHVLPSFEFSTVSPPSIITEGSSGGPWRKRITDLDGTEGDLPWWCVDCVTHNRYPKENTKCGFYLHPAEGSPAPNITQGKLSAPRILRIHKVANYVVEKLVLEKPLDGGSDSTFAMGLSSGQSQLSALDSSSRIGLKAWQKLKPCVEILCNNQVLSPEMSLATVRTYIWKKPEDLILHYRVVQSR

SEQ ID NO: 108607 - protein, 88 aa, Setaria italica
  misc_feature (49)..(49): Xaa can be any naturally occurring amino acid
  Transcript Sequence Number=SeqID_42633
SISLSRCLARRKKSRIRKGRLVSIHCSYDFRIGLPKLSATTSHQNLAFXASDQVHDHYHYGCHLGACRIWSQLLRPCICSSLSWVIIK

SEQ ID NO: 108608 - protein, 53 aa, Setaria italica
  Transcript Sequence Number=SeqID_42634
LHGPSWCSKNQVMTLRLREGFLQMNIKHTAPHILVAYRTPISSLNGTQTNRLT

SEQ ID NO: 108609 - protein, 82 aa, Setaria italica
  Transcript Sequence Number=SeqID_42635
  Homolog annotation: Hit_ID=B6U664; Match level="QueryCoverage=56%, HitCoverage=33%, E-value=1e-15, Identity=86%"; Hit description=Rapid alkalinization factor 1
  Pfam annotation: Domain name=RALF; Domain location=13-82; Score=99.8; E_value=9.1e-27; Accession=PF05498.3; Description=Rapid ALkalinization Factor (RALF)
MIGRRQLDDLNGTSADANATSADANSTSADDATTTTGYISYLALYRDSVPCSQRGASYYNCGPGAEANPYTRGCSAITQCRG

SEQ ID NO: 108610 - protein, 62 aa, Setaria italica
  Transcript Sequence Number=SeqID_42636
NLGAARIYKLQGITMLHKLLRLMDKQTSIYISYCRRQDYHQLYYIREFSSRTPCTEDNWLIC

SEQ ID NO: 108611 - protein, 80 aa, Setaria italica
  Transcript Sequence Number=SeqID_42637
NMDSCLLMCLQPMEFDMTKEHLTLLKILLLKISFSYLCSLGFYFGSGIYAIKSWRLRVPSNCGNFLCHQHSDMLLETSAP

SEQ ID NO: 108612 - protein, 74 aa, Setaria italica
  Transcript Sequence Number=SeqID_42638
ALSIASSIAASYTTEDGEPHDIYHAIGANVQNSNIPNQDARPVDVLISHSMPLVPVETKCRAGHCQFCTQSSII

SEQ ID NO: 108613 - protein, 191 aa, Setaria italica
  Transcript Sequence Number=SeqID_42639
  Gene Ontology: Mol. function=protein serine/threonine kinase activity; Biological process=protein amino acid phosphorylation
  Homolog annotation: Hit_ID=Q7XKV8; Match level="QueryCoverage=96%, HitCoverage=26%, E-value=2e-72, Identity=65%"; Hit description =OSJNBa0073E02.11 protein
  Pfam annotation: Domain name=Pkinase; Domain location=36-191; Score= -44.4; E_value=7.5e-06; Accession=PF00069.17; Description=Protein kinase domain
  Pfam annotation: Domain name=Pkinase_Tyr; Domain location=36-191; Score=-38.6; E_value=3.7e-11; Accession=PF07714.9; Description =Protein tyrosine kinase
  Pfam module annotation: Pfam domain module=Pkinase::Pkinase_Tyr; Domain location=36-191::36-191
LQAARGLLLFEEMKSKQGLSFTLFTKEELEEATGKFDERNVLGKGGNGTVYKGVLKDKRLVAIKKCKLINERQEKEFGKEMLILSQVNHRNVVRLYGCCLEVEVPMLVYEFIPNGTLYQLIHGRPHGSRISFTTRLKIAHETAETLAYLHSWASPPIIHGDVKSPNILIGEDYTAKVADFGASALAPTDEA

SEQ ID NO: 108614 - protein, 159 aa, Setaria italica
  Transcript Sequence Number=SeqID_42640
  Gene Ontology: Mol. function=serine-type endopeptidase inhibitor activity; Cellular component=extracellular region; Biological process=defense response
  Homolog annotation: Hit_ID=B6SJS2; Match level="QueryCoverage=100%, HitCoverage=40%, E-value=8e-80, Identity=89%"; Hit description =Protein Z
  Pfam annotation: Domain name=Serpin; Domain location=1-159; Score= -119.9; E_value=6.5e-06; Accession=PF00079.12; Description=Serpin (serine protease inhibitor)
PAFGEVAVGKYRAETHSIDFQKKADEAAGQVNSWVEKITSGLIKEILPPGSVDHTTRLVLGNALYFKGAWTEKFDASKTKDSEFHLLDGSSVQAPFMSSTEKQYIAYNNNLKVLKLPYQQGGDKRQFSMYILLPEAQDGIWSLAEKLSSEPEFLEKLIP

SEQ ID NO: 108615 - protein, 210 aa, Setaria italica
  Transcript Sequence Number=SeqID_42641
  Gene Ontology: Mol. function=serine-type endopeptidase inhibitor activity; Cellular component=extracellular region; Biological process=defense response
  Homolog annotation: Hit_ID=B6SJS2; Match level="QueryCoverage=100%, HitCoverage=52%, E-value=1e-87, Identity=78%"; Hit description =Protein Z
  Pfam annotation: Domain name=Serpin; Domain location=1-206; Score= -16.7; E_value=1.4e-10; Accession=PF00079.12; Description=Serpin (serine protease inhibitor)
NFEYSLTKDSEFHLLDGSSVQAPFMSSTEKQYIAYNNNLKVLKLPYQQGGDKRQFSMYILLPEAQDGIWSLAEKLSSEPEFLEKLIPMQKVPVKQFKVPKFKISFGFEASKLLKGLGLQLPFSPEADLSELVDSPEGQNLCVSSVFHKSFVEVNEEGTEAAAASAATVVLRSFTMPMDFVADHPFLFLIQEDMTGVVLFVGHVVNPLLAP

SEQ ID NO: 108616 - protein, 169 aa, Setaria italica
  misc_feature (159)..(159): Xaa can be any naturally occurring amino acid
  Transcript Sequence Number=SeqID_42642
  Gene Ontology: Mol. function=methyltransferase activity; Cellular component=nucleus; Biological process=rRNA processing
  Homolog annotation: Hit_ID=Q1EPL1; Match level="QueryCoverage=100%, HitCoverage=19%, E-value=4e-83, Identity=81%"; Hit description=FtsJ -like methyltransferase family protein
  Pfam annotation: Domain name=FtsJ; Domain location=22-167; Score =149.9; E_value=7.9e-42; Accession=PF01728.11; Description=FtsJ-like methyltransferase
MGKAKGKSRQDKFYHLAKEQGYRSRAAFKLLQLDARFRFLPTARSVLDLCAAPGGWVQVAVNHAPVGAFVVGVDLVPIRPIRGAHSLTEDITTTKCRAAVRRLMDANGVSAFDVVLHDGSPNVGGAWAQEATSQSALVIDALRLATMFLAPKGAFITKXFRSQDYNAIM

SEQ ID NO: 108617 - protein, 61 aa, Setaria italica
  Transcript Sequence Number=SeqID_42643
RSRTRVNSSNHKFSQSMLQLRNKLTDKLGTVFSLLLSGIKRLDMKKQRLLRSDTLHLPTCY

SEQ ID NO: 108618 - protein, 145 aa, Setaria italica
  misc_feature (20)..(20): Xaa can be any naturally occurring amino acid
  Transcript Sequence Number=SeqID_42644
DGDEIRKYFAAFHLLDNFPXAVIVDDFADFFSERSCQQRYGTTRARDLAMVRVLALCHNAIGHANAKLGTLGSCNLLLSDVLQGDTPRSLFIYKRWINSIYAIRGDGTGSYILKNIGSSESESKKARKAKYSVALQYLVLEEISN

SEQ ID NO: 108619 - protein, 163 aa, Setaria italica
  Transcript Sequence Number=SeqID_42645
  Gene Ontology: Mol. function=DNA binding
VQEITCDSSLMLESSKTMDALGNHSFGDRKTSSEDETQSHVAAGHLENETSLQQKETQSIRSCHRVVNGDKILVLGKFETMDILPKHDEDCENKSLPSDGSDIPVTSCHLEAGMPMPQKQTAYIQTCSEVVHDDEELVPEISKVMSPKFDADCGNKGTSLGSD

SEQ ID NO: 108620 - protein, 106 aa, Setaria italica
  Transcript Sequence Number=SeqID_42646
  Gene Ontology: Mol. function=nucleoside-triphosphatase activity; Cellular component=membrane; Biological process=lipid transport
  Homolog annotation: Hit_ID=B6SL34; Match level="QueryCoverage=91%, HitCoverage=13%, E-value=9e-45, Identity=85%"; Hit description=ATP -binding cassette sub-family G member 2
RLVTQTLRGLARDGRTVIASIHQPSSEVFELFDMLFLLSSGKTVYFGQASQACEFFASAGFPCPPLRNPSDHFLRCVNSDFDKVKATLKGSMKARIEISLTFSLAA

SEQ ID NO: 108621 - protein, 247 aa, Setaria italica
  misc_feature (8)..(8): Xaa can be any naturally occurring amino acid
  misc_feature (15)..(15): Xaa can be any naturally occurring amino acid
  Transcript Sequence Number=SeqID_42647
  Gene Ontology: Mol. function=nucleoside-triphosphatase activity; Cellular component=membrane; Biological process=lipid transport
  Homolog annotation: Hit_ID=B9N7Z1; Match level="QueryCoverage=96%, HitCoverage=35%, E-value=1e-101, Identity=71%"; Hit description =White-brown-complex ABC transporter family
  Pfam annotation: Domain name=ABC2_membrane; Domain location=1-144; Score=-7.3; E_value=0.008; Accession=PF01061.16; Description=ABC-2 type transporter
GFPSFVEXMKVFQRXRLNGHYGVASFVISNTISATPFLILICFLSGTICYFMVRLHPGFEHYIFFVLNLYASVTVVESLMMAIASVIPNFLMGIIIGAGIQGIFMLVSGYFRLPYDIPKPFWRYPMQYISFHYWALQGQCQNDMKGLVFDNQYPDQPKIPGDFILKYIFQINVDRSKWIDLSVIFSMIFIYRILFFLMIKINEDVLPWIRGHVARKRMQNKGPSATFGKTPSLRGYVVDPELGSNEG

SEQ ID NO: 108622 - protein, 77 aa, Setaria italica
  Transcript Sequence Number=SeqID_42648
TTKDLENIKNMILENLSRIEHVPSTQFHDRPSDPEAPEEKEEDMDKRPPQRSRLWSGGAYDSDTEDPDNVKSEGGTE

SEQ ID NO: 108623 - protein, 458 aa, Setaria italica
  Transcript Sequence Number=SeqID_42649
  Gene Ontology: Mol. function=histone deacetylase activity; Cellular component=chloroplast envelope; Biological process=regulation of transcription, DNA-dependent
  Homolog annotation: Hit_ID=B9IEX4; Match level="QueryCoverage=93%, HitCoverage=97%, E-value=0.0, Identity=75%"; Hit description=Histone deacetylase (Fragment)
  Pfam annotation: Domain name=Hist_deacetyl; Domain location=41-333; Score=357.3; E_value=2.8e-104; Accession=PF00850.11; Description =Histone deacetylase family
MAASGEGASLPSPAGGEDAHRRRVSYFYEPSIGDYYYGQGHPMKPHRIRMAHSLVVHYGLHRLLELSRPYPASDADIRRFHSDEYVAFLASATGNPGMLDPRAVKRFNVGEDCPVFDGLFPFCQASAGGSIGAAVKLNRGDADITINWAGGLHHAKKSEASGFCYVNDIVLAILELLKFHRRVLYVDIDVHHGDGVEEAFFTTNRVMTVSFHKYGDFFPGTGHITDVGAAEGKHYALNVPLSDGIDDATFRDLFQCIMKKVMEVYQPDVVVLQCGADSLAGDRLGCFNLSVKGHADCLRFLRSYNVPLMVLGGGGYTIRNVARCWCYETAVAVGVEPDNKLPYNDYYEYFGPDYTLHIQPKSVENTNTTKDLENIKNMILENLSRIEHVPSTQFHDRPSDPEAPEEKEEDMDKRPPQRSRLWSGGAYDSDTEDPDNVKSEGNDLIANSHMKEEPNDGL

SEQ ID NO: 108624 - protein, 147 aa, Setaria italica
  Transcript Sequence Number=SeqID_42650
  Gene Ontology: Mol. function=protein binding
  Homolog annotation: Hit_ID=B3VTC5; Match level="QueryCoverage=92%, HitCoverage=13%, E-value=8e-43, Identity=63%"; Hit description =Cf2/Cf5-like disease resistance protein
  Pfam annotation: Domain name=LRR_1; Domain location=11-33; Score =11.1; E_value=2.3; Accession=PF00560.25; Description=Leucine Rich Repeat
  Pfam annotation: Domain name=LRR_1; Domain location=35-57; Score =12.3; E_value=1.3; Accession=PF00560.25; Description=Leucine Rich Repeat
  Pfam annotation: Domain name=LRR_1; Domain location=59-81; Score =18.7; E_value=0.025; Accession=PF00560.25; Description=Leucine Rich Repeat
  Pfam annotation: Domain name=LRR_1; Domain location=83-104; Score =14.2; E_value=0.54; Accession=PF00560.25; Description=Leucine Rich Repeat
  Pfam module annotation: Pfam domain module=LRR_1::LRR_1::LRR_1::LRR _1; Domain location=11-33::35-57::59-81::83-104
QVLQYSGNAVFFKSIDLSYNRLVGKIPEEIGSLLGLINLDLSSNFINGSIPYKICNLQGLESLDLSNNQLSGEIPWCLSNLTSLSYLNLSYNNLSGRIPSGHQLDTLRADDPTSMYIGNPGLCGRSLPKVCPGDQPPVQRDPVISHE

SEQ ID NO: 108625 - protein, 163 aa, Setaria italica
  Transcript Sequence Number=SeqID_42651
  Gene Ontology: Mol. function=electron carrier activity; Biological process=oxidation reduction
  Homolog annotation: Hit_ID=B6SV20; Match level="QueryCoverage=100%, HitCoverage=31%, E-value=3e-68, Identity=72%"; Hit description =Cytochrome P450 CYP81L6
RLIEATDLPKLHYLRCIIMETFRLYPPAPLLVPHESSTDCTVDGFHIPKGTMLLVNTFAIHRDPELWDEPEKFIPERFENGKSTEGKMFIPFGMGRRRCPAENLGMQMVGLALGTMIQCFDWERVGEDLMDMTEGSGLTLPKEVPLEAFYEPRASLINLLSEI

SEQ ID NO: 108626 - protein, 86 aa, Setaria italica
  Transcript Sequence Number=SeqID_42652
FFSSNRPLARVNRSHNSTNALGPANYLPHIQWITPNGFFVPLLYMSLIIFPVLCIQPLISPIRVQEETQVVDIYSLRRRVDASYMS

SEQ ID NO: 108627 - protein, 88 aa, Setaria italica
  Transcript Sequence Number=SeqID_42653
  Subcellular localization annotation: CTP_CleavageSite=52; ConfidenceScore=5.04e-01
NKQYYHLNIFTITRFSISFMCCISIPLTVHFAVEMLSCLIVSTSSNIIKRFRVSRTSSDIMCFISVHLAIAEQMFSLYLYLFRNLVLL

SEQ ID NO: 108628 - protein, 109 aa, Setaria italica
  Transcript Sequence Number=SeqID_42654
  Gene Ontology: Mol. function=structural constituent of ribosome; Cellular component=ribonucleoprotein complex; Biological process =translation
  Homolog annotation: Hit_ID=Q7XY20; Match level="QueryCoverage=100%, HitCoverage=60%, E-value=5e-43, Identity=75%"; Hit description =Ribosomal protein L19
  Pfam annotation: Domain name=Ribosomal_L19e; Domain location=1-104; Score=132.3; E_value=1.6e-36; Accession=PF01280.12; Description =Ribosomal protein L19e
VSEISMANSRQNIRKLVKDGFIIRKPQKIHSRSRARRAHEAKQKGRHSGYGKRRGTREARLRKYREAKKIDKHMYHEMYVKVKGNSFKNKRVLMESIHKSKAEKAREKT

SEQ ID NO: 108629 - protein, 57 aa, Setaria italica
  Transcript Sequence Number=SeqID_42655
SNYNNKRRYDIQRYRDTKAWTYVTAKQFRGAPKLGYSWYQKAKAGDRSFISSPSLVP

SEQ ID NO: 108630 - protein, 62 aa, Setaria italica
  Transcript Sequence Number=SeqID_42656
  Gene Ontology: Mol. function=structural constituent of ribosome; Cellular component=ribonucleoprotein complex; Biological process =translation
  Homolog annotation: Hit_ID=Q9LUQ6; Match level="QueryCoverage=100%, HitCoverage=29%, E-value=2e-23, Identity=85%"; Hit description=60S ribosomal protein L19-2
  Pfam annotation: Domain name=Ribosomal_L19e; Domain location=1-51; Score=-39.2; E_value=0.0011; Accession=PF01280.12; Description =Ribosomal protein L19e
MRVLRRLLRKYCEAKKIDKHMYHDMYMKVKGNMFKNKRVLMESIHKSKAEKAREKTLSNQFE

SEQ ID NO: 108631 - protein, 69 aa, Setaria italica
  Transcript Sequence Number=SeqID_42657
  Gene Ontology: Mol. function=structural constituent of ribosome; Cellular component=ribonucleoprotein complex; Biological process =translation
  Homolog annotation: Hit_ID=A1IW31; Match level="QueryCoverage=78%, HitCoverage=39%, E-value=2e-10, Identity=66%"; Hit description=60 S ribosomal protein L19 (Fragment)
YSEISRHESLDICNSFKNKRVLMESIHKSKAEKAREKTLSDQFEAKRAKSKASRQRKIARREERLAQVR

SEQ ID NO: 108632 - protein, 275 aa, Setaria italica
  misc_feature (22)..(22): Xaa can be any naturally occurring amino acid
  misc_feature (262)..(262): Xaa can be any naturally occurring amino acid
  Transcript Sequence Number=SeqID_42658
  Homolog annotation: Hit_ID=Q84ZI5; Match level="QueryCoverage=98%, HitCoverage=56%, E-value=2e-32, Identity=36%"; Hit description =P0483E09.5 protein
RWRLRPPPSGLFGKLTHLAILXARMEGSELTSLVCTQCPCLRDLNLLIMLVDASNLSVRSESLQSLWFSVWKTRQLEIVAPRLEKLSVSNAIDEARISALKLAELSWSNAAYDPRCHQFDVGHRLRLLELGQSSTVASLMQQFDEVDELKLGISIPQGIDGYESFLNATNKLPKCKILSISSAWEHHGLVPGMLHLLRSCNSTRKLSLFDCCDSASKHTCLPSCPCRLEQSHRIDAISLNSLEEVEITSYTSSHEVLEFVEXLSKCNAAILKRVS

SEQ ID NO: 108633 - protein, 165 aa, Setaria italica
  misc_feature (41)..(41): Xaa can be any naturally occurring amino acid
  misc_feature (136)..(136): Xaa can be any naturally occurring amino acid
  Transcript Sequence Number=SeqID_42659
  Gene Ontology: Mol. function=structural constituent of ribosome; Cellular component=ribonucleoprotein complex; Biological process =translation
  Homolog annotation: Hit_ID=Q7XY20; Match level="QueryCoverage=89%, HitCoverage=68%, E-value=3e-36, Identity=61%"; Hit description =Ribosomal protein L19
  Pfam annotation: Domain name=Ribosomal_L19e; Domain location=1-103; Score=77.0; E_value=6.7e-20; Accession=PF01280.12; Description =Ribosomal protein L19e
MASLLLGLMRPPWHGTWRAHEAKQKGRHSGYGKRRGTREGXGSPTKILWMRRMRVLRRLLRKYREAKKIDKHMYHEMYVKVKGNSFKNKRVLMESIHKSKAEKAREKTLSDQFEARRAKSKASRDRKLARREERLXPGPEGTCSTISCCSSSACSGTKEGEEVKG

SEQ ID NO: 108634 - protein, 211 aa, Setaria italica
  misc_feature (90)..(90): Xaa can be any naturally occurring amino acid
  Transcript Sequence Number=SeqID_42660
  Gene Ontology: Mol. function=structural constituent of ribosome; Cellular component=ribonucleoprotein complex; Biological process =translation
  Homolog annotation: Hit_ID=A9NRT3; Match level="QueryCoverage=89%, HitCoverage=91%, E-value=6e-70, Identity=73%"; Hit description =Ribosomal protein L19
  Pfam annotation: Domain name=Ribosomal_L19e; Domain location=2-150; Score=318.7; E_value=1.2e-92; Accession=PF01280.12; Description =Ribosomal protein L19e
MVSLKLQKRLASSVLKCGKGKVWLDPNEVSEISMANSRQNIRKLVKDGFIIRKPQKIHSRSRARRAHEAKQKGRHSGYGKRRGTREARLXPTKILWMRRMRVLRRLLRKYREAKKIDKHMYHDMYMKVKGNSFKNKRVLMESIHKSKAEKAREKTLSDQFEAKRAKSKASRQRKIARREERLAQGPREPAAPAAAAPAPVPAAAAPKKAKK

SEQ ID NO: 108635 - protein, 71 aa, Setaria italica
  misc_feature (45)..(45): Xaa can be any naturally occurring amino acid
  Transcript Sequence Number=SeqID_42661
SFTNAVRLATAYSILVFGMIDPLYACAQCCQHILLDRVAENDQLXYTFPVCYIVWLCWQTLSCSCVSYSLV

SEQ ID NO: 108636 - protein, 82 aa, Setaria italica
  Transcript Sequence Number=SeqID_42662
MAPKKRKADPAESAAAAEPAAGNHRQEPASSENKPRGTIYFPITDDPPEPTAAAEDEDEGVGDDGDEAEDIGKLLEPLSREQ

SEQ ID NO: 108637 - protein, 157 aa, Setaria italica
  misc_feature (122)..(122): Xaa can be any naturally occurring amino acid
  misc_feature (138)..(138): Xaa can be any naturally occurring amino acid
  Transcript Sequence Number=SeqID_42663
  Gene Ontology: Cellular component=mitochondrion
  Homolog annotation: Hit_ID=Q8LNU1; Match level="QueryCoverage=100%, HitCoverage=56%, E-value=1e-52, Identity=34%"; Hit description =Putative chloroplast RNA processing protein
  Pfam annotation: Domain name=PPR; Domain location=118-152; Score =35.0; E_value=3e-07; Accession=PF01535.12; Description=PPR repeat
  Pfam annotation: Domain name=PPR; Domain location=13-47; Score=27.7; E_value=4.8e-05; Accession=PF01535.12; Description=PPR repeat
  Pfam annotation: Domain name=PPR; Domain location=48-82; Score=38.8; E_value=2.1e-08; Accession=PF01535.12; Description=PPR repeat
  Pfam annotation: Domain name=PPR; Domain location=83-117; Score=49.9; E_value=9.7e-12; Accession=PF01535.12; Description=PPR repeat
  Pfam module annotation: Pfam domain module=PPR::PPR::PPR::PPR; Domain location=118-152::13-47::48-82::83-117
DSMIQRGPKPDATAYSVLLHGYATEGSLFDVHNLYDLMVENHVEPDNHVFNILICAYVKHDMVDAAMVIFNKMQHQGLRPDIVTYGTLVDGLCKIGQLDDAMLLFNQMISRGLHPNIIILTXLIHGFCTCGNWEKAKXIIFEMVNRGICPDIVFFNT

SEQ ID NO: 108638 - protein, 59 aa, Setaria italica
  Transcript Sequence Number=SeqID_42664
  Gene Ontology: Cellular component=integral to membrane
  Homolog annotation: Hit_ID=B6U9E5; Match level="QueryCoverage=71%, HitCoverage=18%, E-value=2e-12, Identity=78%"; Hit description =Transmembrane protein PFT27
AFKSNKGESKNKSKANEDTKKQQRPFLLQFFSPIFIKAFSITFFGEWGDKSQVSCRKLL

SEQ ID NO: 108639 - protein, 144 aa, Setaria italica
  Transcript Sequence Number=SeqID_42665
HLRRGQSAGGEGGGGRGAGGGKGSLEDDAGGGEDRVSGGESGRSCKESNSSDLKRPVHDAGTASAAVDGAAAAKEEGEEEEAAAGESLAVKREEVSGESVARSKETDKESSDVQSSASPSRRREREGGGGAGVEEAEAEEASAS

SEQ ID NO: 108640 - protein, 46 aa, Setaria italica
  misc_feature (32)..(32): Xaa can be any naturally occurring amino acid
  Transcript Sequence Number=SeqID_42666
  Gene Ontology: Mol. function=transporter activity; Cellular component= integral to membrane; Biological process=transport
  Homolog annotation: Hit_ID=Q59G08; Match level="QueryCoverage=97%, HitCoverage=13%, E-value=2e-09, Identity=69%"; Hit description =SLC2A11 protein variant (Fragment)
KPGVVAHTCNPSSLGGRGGQIMRSGDRDHPSXHSETPSLLKYKKLA

SEQ ID NO: 108641 - protein, 112 aa, Setaria italica
  Transcript Sequence Number=SeqID_42667
  Subcellular localization annotation: CTP_CleavageSite=47; ConfidenceScore=5.42e-01
PGWAAAAASPARCKKSGSTGSVLRWRPRLVGRSQSDGKEKFVFLSTSASGRKGRTGGGDGGVAAALGGHAWSHYAKGGGNGGARRRSFLPYKQDLVGLFANTAVFRRSYHPF

SEQ ID NO: 108642 - protein, 183 aa, Setaria italica
  Transcript Sequence Number=SeqID_42668
  Homolog annotation: Hit_ID=Q5VS03; Match level="QueryCoverage=92%, HitCoverage=49%, E-value=5e-31, Identity=38%"; Hit description =Selenium-binding protein-like
  Pfam annotation: Domain name=DUF295; Domain location=89-140; Score =14.3; E_value=0.021; Accession=PF03478.10; Description=Protein of unknown function (DUF295)
ADCEFNGQFIALDYKYRLHTLSLAPTLGLQEIATVWWDDMDECPYLRPWLVVCGDMLLIVDHYIILPFDGAPVNYKAYRLDMSTVPAVWVEVEKLENHVLFIGSDVRSPAFSCVSPGRWGTRNNCLYYAYYDVPWVLHGLGDEADAVWHADNDDDIVFKRNWYTQLQPFWVYPSMFYADADGK

SEQ ID NO: 108643 - protein, 104 aa, Setaria italica
  Transcript Sequence Number=SeqID_42669
WECQILCHLKGNSHRTSGHEYSLRMYICCQLFSPPRSNKICPFGELFFLLCMLVEPRGYHAHVYKLQHVASGHHLQQKSYTSVNNSYFLDIRDDLGQMVASGCI

SEQ ID NO: 108644 - protein, 59 aa, Setaria italica
  Transcript Sequence Number=SeqID_42670
QMTATRIYICMHPQHAKLCYSSTRDRVLFFINTYVYLNPRARGHTCIYKHIIIDQLIDC

SEQ ID NO: 108645 - protein, 68 aa, Setaria italica
  Transcript Sequence Number=SeqID_42671
  Gene Ontology: Mol. function=kinase activity
LRELRDSFEVSSQRLLRPETESSYEKQFKRFPSRTRVPLRNFLFGTKRKKKSIFACINPTLQKQFSDL

SEQ ID NO: 108646 - protein, 135 aa, Setaria italica
  Transcript Sequence Number=SeqID_42672
  Gene Ontology: Mol. function=glutathione transferase activity; Cellular component=cytoplasm; Biological process=metabolic process
  Homolog annotation: Hit_ID=O82071; Match level="QueryCoverage=81%, HitCoverage=41%, E-value=8e-24, Identity=53%"; Hit description =Putative In2.1 protein
PRFLEKVYPPGKVPVLEHNGNVIAESLDLLSYLDANFEGPKLLPQDDPAKQAFADELIGSSDPVIVALFRAGRAAAGAGAGGDDISELVAPALDKVEEALGRFSDGPFFLGQSMSAVSDRPICFLCTLSLYLVLL

SEQ ID NO: 108647 - protein, 179 aa, Setaria italica
  Transcript Sequence Number=SeqID_42673
  Gene Ontology: Mol. function=glutathione transferase activity; Cellular component=cytoplasm; Biological process=metabolic process
  Homolog annotation: Hit_ID=Q8H8U5; Match level="QueryCoverage=82%, HitCoverage=48%, E-value=2e-38, Identity=54%"; Hit description =Protein IN2-1 homolog B
MATAASPAATSGSGSAAAGEKLMKEEVLPPTLASNSQPPNLLDGTTRLYISYICPYVQRVWIARNFKVPIDGGVPAGLIISSCFRYQNLENFLGQGLQDKIQLVAIDLQDKPAWFLEKVYPPGKVPVLEHNGNVIAESLDLLSYLDANFEGPKLLPQDDPAKQAFADELIGSSVPRSIR

SEQ ID NO: 108648 - protein, 53 aa, Setaria italica
  Transcript Sequence Number=SeqID_42674
LQAQAQVGSSISRRRKPIGRFALPASVPIQISPISSRTLFILFIIFMVILFNN

SEQ ID NO: 108649 - protein, 114 aa, Setaria italica
  Transcript Sequence Number=SeqID_42675
ALHKHMPHQLLVTAHQSSSSVYLIPELQDILLCKTTVPQCLHGNLQLFNPVKTGKQIPRAKPSPACREYSLTHCSPTTGGVRPIQRHLQVAISPPHRHSALSKQRNMAVCCCCA

SEQ ID NO: 108650 - protein, 59 aa, Setaria italica
  Transcript Sequence Number=SeqID_42676
MILLLLHVDLFVFLNLQAIVTNHLVLRGTYRSLTLVIYGNTAEDLGQFNIELGLDHSLA

SEQ ID NO: 108651 - protein, 111 aa, Setaria italica
  misc_feature (24)..(24): Xaa can be any naturally occurring amino acid
  Transcript Sequence Number=SeqID_42677
  Homolog annotation: Hit_ID=Q01K95; Match level="QueryCoverage=92%, HitCoverage=3%, E-value=8e-40, Identity=69%"; Hit description =OSIGBa0148A10.3 protein
LLLDRSSKQVNKHLADNHGKIEMXCSKIRCPAESNPSWRWHYYQPWKDPAAPRTEMERLEEEQACRSLLILFSNAFSASLPEFPVLSLDDVEKSGLFQWERESMVKQKHCD

SEQ ID NO: 108652 - protein, 552 aa, Setaria italica
  Transcript Sequence Number=SeqID_42678
  Homolog annotation: Hit_ID=Q01K95; Match level="QueryCoverage=99%, HitCoverage=20%, E-value=0.0, Identity=63%"; Hit description =OSIGBa0148A10.3 protein
LGAFKKSLETSQRSKETWQLQLLLTYLQNGISEQWQRIPSIITVFAAEASLTLLDSSHAQFTAISNFLMHSTSASLQSIPLFPTLLQSSSVHFKAERLWMLRLLSAGSNLADDAKIYKRGRVLELALAFCSSPVSDSESKVLVLKMLKKCVKLPVLAHHLAKESGLLLWLSSVISIEGSDGAESSCSRVTELTLEVVNDLISSRLITDWLQESALEQLSVISADLCVLLINNAKLLKGNVPLLTSVLSVITSTMRLSMKRKIYQPHFTLSLHGVFNLCQATVGSSRSAEHKLTMELGIDAILMNGPMPILSEMDKSRISMVVSWATSNIFWLYSNQRSMLEISSKESPINESPLSKLLRLLVASVILGRISSISHGKSGDLARSTSSLGTLHSFLNDAYERVETVESCSANDTLAVIILYLQDHVQKNSDSLPSVVMALCLLLLDRSSKQVNKHLADNHGKIEMLCSKIRCPAESNPSWRWHYYQPWKDPAAPRTEMERLEEEQACRSLLILFSNAFSAPLPEFPVLSLDDVEKSGLFQWERESTVKLKHCD

SEQ ID NO: 108653 - protein, 234 aa, Setaria italica
  Transcript Sequence Number=SeqID_42679
  Gene Ontology: Mol. function=protein serine/threonine kinase activity; Cellular component=plasma membrane; Biological process =protein amino acid phosphorylation
  Homolog annotation: Hit_ID=Q6KC54; Match level="QueryCoverage=99%, HitCoverage=44%, E-value=1e-74, Identity=57%"; Hit description =Calcium-dependent protein kinase 8
  Pfam annotation: Domain name=efhand; Domain location=124-152; Score =23.5; E_value=0.00086; Accession=PF00036.24; Description=EF hand
  Pfam annotation: Domain name=efhand; Domain location=160-188; Score =28.7; E_value=2.4e-05; Accession=PF00036.24; Description=EF hand
  Pfam annotation: Domain name=efhand; Domain location=193-221; Score =33.7; E_value=7.6e-07; Accession=PF00036.24; Description=EF hand
  Pfam annotation: Domain name=efhand; Domain location=88-116; Score =32.5; E_value=1.7e-06; Accession=PF00036.24; Description=EF hand
  Pfam module annotation: Pfam domain module=efhand::efhand::efhand::efh and; Domain location=124-152::160-188::193-221::88-116
DFEREPWPKVSDNAKDLVRKMLDPSAYSRLTAQQVLEHPWIQNASAAPNIPLGEAVRSRLKQFTVMNKFKKKALLVVAEYLPAEELEAIKELFHMLDTNKDGHLTIEELRKGLQTIGHNVHDTDVDMLMEAADIDGNGTLDCKEFVTVSIHLKKIRSEDHLPKVFSYFDKNGSGYIEIEELKEALSPRGDQKAIDDIILDVDKDKDGKISYEEFELMMKAGMDWRNTSRQYSRA

SEQ ID NO: 108654 - protein, 187 aa, Setaria italica
  misc_feature (69)..(69): Xaa can be any naturally occurring amino acid
  Transcript Sequence Number=SeqID_42680
CFFLFLIFLADWILYCNAWHTKIFIFGLDFHLVQLFFVCMPSLAVYLVAQYARREIKTMEAEAEEKRKXDEELEKQKQLEEESAKEDADSKLSKVLDRLDTLEGVVKEIVDDKNKVPSADIQTKEGVVKKDEVSPSKASDLKSSASDTQPVTVKSKDSNCAANASANTAQPNSKGNGDKASPADSKS

SEQ ID NO: 108655 - protein, 124 aa, Setaria italica
  misc_feature (95)..(95): Xaa can be any naturally occurring amino acid
  Transcript Sequence Number=SeqID_42681
  Gene Ontology: Mol. function=5'-3' exoribonuclease activity; Cellular component=intracellular; Biological process=nucleobase, nucleoside, nucleotide and nucleic acid metabolic process
  Homolog annotation: Hit_ID=Q10C49; Match level="QueryCoverage=95%, HitCoverage=18%, E-value=5e-46, Identity=70%"; Hit description=5'-3' exoribonuclease, putative, expressed
VTFIDETRLLAETRKLEDTLTEEEKFRNTTMFDIIYVRETHPLTAQIAFLYRMYNHLPRTDPYVIPIDPAASGGMNGFLCLSERNWYSITVTSPXATYLNPQYHKHIPEPPLGVIVPGKILKPS

SEQ ID NO: 108656 - protein, 143 aa, Setaria italica
  misc_feature (26)..(26): Xaa can be any naturally occurring amino acid
  misc_feature (91)..(91): Xaa can be any naturally occurring amino acid
  misc_feature (142)..(142): Xaa can be any naturally occurring amino acid
  Transcript Sequence Number=SeqID_42682
  Gene Ontology: Mol. function=5'-3' exoribonuclease activity; Cellular component=intracellular; Biological process=nucleobase, nucleoside, nucleotide and nucleic acid metabolic process
  Homolog annotation: Hit_ID=Q10C49; Match level="QueryCoverage=100%, HitCoverage=19%, E-value=8e-56, Identity=74%"; Hit description=5'-3' exoribonuclease, putative, expressed
  Pfam annotation: Domain name=XRN_N; Domain location=1-90; Score= -75.2; E_value=0.00022; Accession=PF03159.10; Description=XRN 5'-3' exonuclease N-terminus
  Pfam annotation: Domain name=zf-CCHC; Domain location=92-109; Score =28.9; E_value=8.3e-06; Accession=PF00098.15; Description=Zinc knuckle
  Pfam module annotation: Pfam domain module=XRN_N::zf-CCHC; Domain location=1-90::92-109
TALQYYIQLRLNHLLWYWSSSCSRLXFVLVYSNCSLGEGEHKIMSYIRLQRNLPGFDPNTRHCLYGLDADLIMLALATHEVHFSILREGNXEKCFLCGQVGHLAAECRGPSQVDSAVELPPIHKKKYQFLHIWVLREYLAKXL

SEQ ID NO: 108657 - protein, 865 aa, Setaria italica
  Transcript Sequence Number=SeqID_42683
  Gene Ontology: Mol. function=5'-3' exoribonuclease activity; Cellular component=intracellular; Biological process=nucleobase, nucleoside, nucleotide and nucleic acid metabolic process
  Homolog annotation: Hit_ID=Q10C49; Match level="QueryCoverage=63%, HitCoverage=76%, E-value=0.0, Identity=88%"; Hit description=5'-3' exoribonuclease, putative, expressed
  Pfam annotation: Domain name=XRN_N; Domain location=1-132; Score =115.3; E_value=2e-31; Accession=PF03159.10; Description=XRN 5'-3' exonuclease N-terminus
  Pfam annotation: Domain name=zf-CCHC; Domain location=139-156; Score =28.9; E_value=8.3e-06; Accession=PF00098.15; Description=Zinc knuckle
  Pfam module annotation: Pfam domain module=XRN_N::zf-CCHC; Domain location=1-132::139-156
DAADAAAEEERLRKEFEAEGRTLAQKEKSEAIDSNVITPGTQFMFVLSTALQYYIQLRLNHTLGWQSVKVILSDSNVPGEGEHKIMSYIRLQRNLPGFDPNTRHCLYGLDADLIMLALATHEVHFSILREVISMPGQQEKCFLCGQVGHLAAECRGPSQVDSAVELPPIHKKKYQFLHIWVLREYLAKDLEIVDAPFKINFERLIDDFVFMCFFVGNDFLPHMPTLEIREGAINLLMSIYRAEFISMGGYLTDGGEVVLDRVEHFIQSVAFNEEQIFQKRARIQQARENNEERNKIQRESTEENQYVDKVKLGEPGYRERYYAEKFKEEAESKPIDQVRRDVVQKYVEGLCWVMRYYYQGVCSWQWFYPYHYAPFASDLKDLAELEITFFLGQPFKPFDQLMGTLPAASSNALPKYYGDLMTDPNSPLKSFYPKDFEIDMNGKRFAWQGVAKLPFIDETRLLAETRKLEDTLTEEEKFRNTTMFDIIYVRETHPLTAQIAFLYRMYNHLPRTDPYVIPIDPAASGGMNGFLCLSERNWYSITVTSPVKCFNGIAQNRVLNATYLNPQYHKHIPEPPVGVIVPGKILKPSDFKPFPVLWHEDNSRRQARERPQVSGALSGSLLGQAAHRLVKNSLQIKSGSAAGLLEMPYRGAPYGPGNRPRPAGPLGYERGFVDNPHHAHTSRSVPNSHPQFFGDAQANRQPMRILERPNSGSHEAGIHASMSKLTIHEGPRLHQNNRMQNSGYWPNQPHPNHYAGPPPQQPMQNISFTPQRPFQTGGFPQQRPVNGVPPPLPPSNWIGKQPTGGPPGVPAKHDPRTAPDRQLKQDNPRSQQDKRQQATKVYRVKTQATNGNGLSESGKQEEPAA

SEQ ID NO: 108658 - protein, 71 aa, Setaria italica
  Transcript Sequence Number=SeqID_42684
SDSFYEGFDRDAIECAQSNQDLSVLRPQYFHYYQRKKVFCCCHNICFLQQPCISYLSWISTTSRSEASVLK

SEQ ID NO: 108659 - protein, 144 aa, Setaria italica
  misc_feature (8)..(8): Xaa can be any naturally occurring amino acid
  misc_feature (18)..(18): Xaa can be any naturally occurring amino acid
  misc_feature (118)..(118): Xaa can be any naturally occurring amino acid
  misc_feature (137)..(137): Xaa can be any naturally occurring amino acid
  Transcript Sequence Number=SeqID_42685
  Gene Ontology: Mol. function=protein dimerization activity
  Homolog annotation: Hit_ID=Q2QPA8; Match level="QueryCoverage=87%, HitCoverage=15%, E-value=8e-44, Identity=66%"; Hit description=HAT family dimerisation domain containing protein
WYRFATAXLNLKSLLDNXQLMRLFSNDDLNEMGYLDKAKGYLASKIARSETFWKGVNSAVNFFEPLAIVLRRMDSDVPAMGFLYGCLLEAKNEISARFDNDLSKVQQIFEIILERWNXELKTPLHRAGYYLNPHYYXPNKVDIE

SEQ ID NO: 108660 - protein, 46 aa, Setaria italica
  Transcript Sequence Number=SeqID_42686
NNSSLTIPKVWVRFYTWLHLSNYSFLAMERLKSSVHHEEKLILIMM

SEQ ID NO: 108661 - protein, 126 aa, Setaria italica
  Transcript Sequence Number=SeqID_42687
  Subcellular localization annotation: CTP_CleavageSite=33; ConfidenceScore=5.66e-01
LFLFTPFTFPFCFFLPSPSSSSSPSSPRLPDANATARQSPLPHGAVDKSHRGPLISAPAPSATESNLDVVGGVGLLPGGRFHLLIKKSQTSPRPNPCGRVNRGELGQETSVPASESSFLAGIPRKP

SEQ ID NO: 108662 - protein, 55 aa, Setaria italica
  Transcript Sequence Number=SeqID_42688
YAKQQSPLPCMRSCRRFPKECIFSHSRESVRRSTIAWASNKAYSSASNLLFSSTT

SEQ ID NO: 108663 - protein, 104 aa, Setaria italica
  Transcript Sequence Number=SeqID_42689
  Homolog annotation: Hit_ID=B6UEF5; Match level="QueryCoverage=100%, HitCoverage=42%, E-value=2e-39, Identity=80%"; Hit description=F-box domain containing protein
  Pfam annotation: Domain name=F-box; Domain location=11-58; Score =28.7; E_value=2.3e-05; Accession=PF00646.25; Description=F-box domain
MELSPAPVPAGRWADLPEDIAVAVASRLQEADVCALGGCSRSWRTACDADCVWERLFRCRWPAAAAEAAVASRVQGWKALYMNQHRRMAVAISNVVEFVGSSLN

SEQ ID NO: 108664 - protein, 193 aa, Setaria italica
  Transcript Sequence Number=SeqID_42690
  Homolog annotation: Hit_ID=B6T548; Match level="QueryCoverage=94%, HitCoverage=77%, E-value=4e-69, Identity=73%"; Hit description=F-box domain containing protein
MELSPAPVPAGRCRWPAAAAEAAVASRVQGWKALYMNQHRRMAVAISNVVEFVGSSLNNGSLESEYYLKAIADLALIADIGFLDVQFFLFSRNHSAIINLIGLHYSISSLHVPPTEVSKALQACQVAGRKVCVNLLKLGRWFYGFRLRDEHESRKISLNELTMSEGAEVLAILNRGAVHEVFRLRVSLADMDK

SEQ ID NO: 108665 - protein, 93 aa, Setaria italica
  Transcript Sequence Number=SeqID_42691
  Subcellular localization annotation: CTP_CleavageSite=11; ConfidenceScore=5.02e-01
FIIVKYQNWTSSSSGDPKSFNLFDMVCSLLGLTGFFTAVVILPYLPLLLVYTEDIKMRCNTSSYDQGVNFVCSYVLCSCMPGSSYVPCETVSY

SEQ ID NO: 108666 - protein, 131 aa, Setaria italica
  Transcript Sequence Number=SeqID_42692
  Gene Ontology: Mol. function=nucleotide binding; Cellular component =myosin complex; Biological process=protein amino acid phosphorylation
  Homolog annotation: Hit_ID=Q8LSS8; Match level="QueryCoverage=97%, HitCoverage=8%, E-value=3e-64, Identity=87%"; Hit description =Putative myosin heavy chain
MKFIRQAVDFLIIPHKSKKTLEQIKRNICPALSVRQIYRICTMYWDDKYGTHSVSADVVAKMRDMVSNDTQNPVSNSFLLDDDLSIPFTTEEIAEEVPDVDMSNIEMPSTLRHVHSAQFLMQHLQSPYLSR

SEQ ID NO: 108667 - protein, 153 aa, Setaria italica
  misc_feature (27)..(27): Xaa can be any naturally occurring amino acid
  Transcript Sequence Number=SeqID_42693
  Gene Ontology: Mol. function=protein dimerization activity; Cellular component=nucleus; Biological process=regulation of transcription, DNA-dependent
  Homolog annotation: Hit_ID=Q7XKK6; Match level="QueryCoverage=67%, HitCoverage=14%, E-value=2e-48, Identity=85%"; Hit description=Auxin response factor 10
  Pfam annotation: Domain name=B3; Domain location=30-135; Score=110.5; E_value=5.5e-30; Accession=PF02362.13; Description=B3 DNA binding domain
PLRSGEPVVDVGDAAAAGGDQQPQQPXPGAFAKTLTQSDANNGGGFSVPRFCAETIFPELDYRARPPVQSVYARDVHGVEWSFRHIYRGTPRRHLLTTGWSNFVNKKRLLAGDSVVFVREANGRIHVGLRRAKRGFGAGAGGDDGFAGWGDAF

SEQ ID NO: 108668 - protein, 81 aa, Setaria italica
  Transcript Sequence Number=SeqID_42694
  Gene Ontology: Cellular component=plasma membrane
  Homolog annotation: Hit_ID=Q9FM19; Match level="QueryCoverage=81%, HitCoverage=23%, E-value=7e-27, Identity=78%"; Hit description =Hypersensitive-induced response protein
MKHSVTSRSDPWTAAMGNLCCCVQVDQSTVAIREQFGKFDSVLEPGCHCMPWFIGKRVAGHLTLRLQQLDVRCETKTKDNV

SEQ ID NO: 108669 - protein, 78 aa, Setaria italica
  Transcript Sequence Number=SeqID_42695
QISEDSWQAIVPHKNLGSFSMYYQGKSGATLQLGERYVGRNCRRLHICQLPKEKKQRMIGWCRNHKGRNNELVVDCVY

SEQ ID NO: 108670 - protein, 287 aa, Setaria italica
  Transcript Sequence Number=SeqID_42696
  Gene Ontology: Cellular component=plasma membrane
  Homolog annotation: Hit_ID=Q9FM19; Match level="QueryCoverage=99%, HitCoverage=99%, E-value=1e-148, Identity=87%"; Hit description =Hypersensitive-induced response protein
  Pfam annotation: Domain name=Band_7; Domain location=8-182; Score =158.8; E_value=1.7e-44; Accession=PF01145.17; Description=SPFH domain  Band 7 family
MGNLCCCVQVDQSTVAIREQFGKFDSVLEPGCHCMPWFIGKRVAGHLTLRLQQLDVRCETKTKDNVFVNVVASIQYRALAGKASDAFYKLSNTRSQIQAYVFDVIRASVPKLILDDAFEQKDEIAKAVEEELEKAMSAYGFEIVQTLIVDIEPDEHVKRAMNEINAAARLRVAANEKAEAEKIVQIKRAEGEAEAKYLSGLGIARQRQAIVDGLRDSVLGFSVNVPGTTAKDVMDMVLITQYFDTMKEIGASSKASSVFIPHGPGAVRDIATQIRDGLLQGSAVSHH

SEQ ID NO: 108671 - protein, 210 aa, Setaria italica
  misc_feature (195)..(195): Xaa can be any naturally occurring amino acid
  Transcript Sequence Number=SeqID_42697
  Gene Ontology: Mol. function=oxidoreductase activity; Biological process=oxidation reduction
  Homolog annotation: Hit_ID=B4FE26; Match level="QueryCoverage=99%, HitCoverage=58%, E-value=3e-61, Identity=55%"; Hit description =Corticosteroid 11-beta-dehydrogenase isozyme 1
  Subcellular localization annotation: CTP_CleavageSite=48; ConfidenceScore=5.03e-01
EEVPDVADFKQVLAVNFWGTVHPTHCALPHLKKSGGKIFANSSAAAVLAMPRMSFYNASKAAVLNFFETLRMELRDEVGITIATPGWIESEMTKGKHLSKEGTVEVDQDMRDAQVGLFPVVRAERCAEAIVDAVCRGRRHLTVPLWYRAMFLWRMLAPEVADFSQRVFYRRTAGGGHGDRQAKARRFLEATGAKXVLQPASLRSSDIKRD

SEQ ID NO: 108672 - protein, 38 aa, Setaria italica
  Transcript Sequence Number=SeqID_42698
GGEVVVVGRALCFGPIDLACSTCRQTSCCHHKKSSIIK

SEQ ID NO: 108673 - protein, 607 aa, Setaria italica
  misc_feature (63)..(63): Xaa can be any naturally occurring amino acid
  Transcript Sequence Number=SeqID_42699
  Gene Ontology: Mol. function=protein serine/threonine kinase activity; Biological process=protein amino acid phosphorylation
  Homolog annotation: Hit_ID=UPI000034ED93; Match level="QueryCoverage =96%, HitCoverage=86%, E-value=0.0, Identity=80%"; Hit description =protein kinase family protein
  Pfam annotation: Domain name=Pkinase; Domain location=39-316; Score =49.2; E_value=1.6e-11; Accession=PF00069.17; Description=Protein kinase domain
  Pfam annotation: Domain name=Pkinase_Tyr; Domain location=39-316; Score=-173.8; E_value=0.036; Accession=PF07714.9; Description =Protein tyrosine kinase
  Pfam module annotation: Pfam domain module=Pkinase::Pkinase_Tyr; Domain location=39-316::39-316
MDDFDSGGRSGDKAGAGAGDDGGAPPLPLTVQIGNSPTYKLERKLGKGGFGQVYVGRRISAPXLSDRNPGSNALEVALKFEHQTSKGCNYGAPYEWQVYNTLSGNHGVPRVHYKGKQAEFYIMVMDMLGPSLWDVWNNNSHSMSVEMVACIGIEAISILEKMHSKGYVHGDVKPENFLLGPPGTPDEKKLFLVDLGLATKWKDAGTGSHVDYDQRPDIFRGTVRYASVHAHLGRTGSRRDDLESLAYTLIFLLRGRLPWQGYQGENKGFLVCKKKMSTPPESLCGICPQPFRHFVEYVVNLKFDEEPNYAKCISLFDGIVGPNPDIRPINTDGAQKLIYQVGQKRGRLIVDENDDEQPKKKIRMGMPATQWISVYNARRPMKQRYHYNVADNRLLQHIQKGNEDGLFISSVASCSNLWALIMDAGTGFTSQVYELSHHFLHKEWIMEQWERNFYITALAGANNGSSLVIMSRGTQYAQQSYKVSDSFPFKWINKKWKEGFYVTAMATAGSRWAVVMSRNAGFSAQVVELDFLYPSEGIHMRWDNGYRITATAATWDQAAFILSVPRRKPTDETQETLRTSAFPSQHVKDKWSKNLYLASICYGRSVS

SEQ ID NO: 108674 - protein, 78 aa, Setaria italica
  Transcript Sequence Number=SeqID_42700
MCCGGDGECRPLGWLLGLPFALLAVIVSFVGAIIWIIGLPISCICPCCLCVTLLLEVAVELVKAPLHVMTWFTSKIPC

SEQ ID NO: 108675 - protein, 87 aa, Setaria italica
  Transcript Sequence Number=SeqID_42701
  Gene Ontology: Mol. function=metal ion binding; Cellular component =ribonucleoprotein complex
QPLEEKEKKVVDNAKRQLRRYEHYYNRFQNHGVSCKAEREKLGPAVAESAKKLEAHDSILIKDASWLANAHRSLLLCRQVLTSSSLR

SEQ ID NO: 108676 - protein, 59 aa, Setaria italica
  Transcript Sequence Number=SeqID_42702
WHPNFWPLEIMELVVSKFLSLRDYGADWHSSKQVWSFSKKPSASQFSSLTILVHDSRSF

SEQ ID NO: 108677 - protein, 252 aa, Setaria italica
  Transcript Sequence Number=SeqID_42703
  Gene Ontology: Mol. function=sequence-specific DNA binding; Cellular component=nucleus; Biological process=regulation of transcription, DNA-dependent
  Homolog annotation: Hit_ID=Q69T58; Match level="QueryCoverage=96%, HitCoverage=35%, E-value=1e-104, Identity=76%"; Hit description =Homeobox-leucine zipper protein ROC8
  Subcellular localization annotation: CTP_CleavageSite=45; ConfidenceScore=5.44e-01
GVTPEGKRSMMKLSQRMVSSFCASLSSSQLHRWTMLSGPNDVGVRVMVHRSTDPGQPSGVVLSAATSIWLPVPCDRVFAFVRDENTRSQWDVLSHGNQVQEVSRIPNGSHPGNCISLLRGLNASQNSILILQESCTDASGSLVVYAPIDVPAANVVMSGEDPSAIPLLPSGFTILPDGRHGASSSSAGPLGSPAAGSLVTVAFQILVSSLPSSKLNAESVATVNSLISTTVEQIKAALNCASHSWMDGSMGN

SEQ ID NO: 108678 - protein, 167 aa, Setaria italica
  Transcript Sequence Number=SeqID_42704
  Homolog annotation: Hit_ID=Q8LPK7; Match level="QueryCoverage=82%, HitCoverage=25%, E-value=4e-15, Identity=32%"; Hit description =Putative myosin heavy chain
  Subcellular localization annotation: CTP_CleavageSite=43; ConfidenceScore=5.44e-01
TASARSLAALQAESAASARSLAALQAEASTASSMLSSGFERISAKASPSSAPAPLPTSQKYSSGLPALAYGVLKRANDIVDDLLAQIDAANRDRDRAREQMEHRNYQIAIEVSELEASVASRSADCESLSKSLSQREAEISELRDKIASLEVKLDAQRPVLAEQIGC

SEQ ID NO: 108679 - protein, 314 aa, Setaria italica
  Transcript Sequence Number=SeqID_42705
  Homolog annotation: Hit_ID=B9RMU3; Match level="QueryCoverage=95%, HitCoverage=50%, E-value=3e-62, Identity=43%"; Hit description =Paramyosin, putative
VKPRIRPIRRFRGLEASVASRSADCESLSKSLSQREAEISELRDKIASLEVKLDAQRPVLAEQIGCASKLYDEMREVVKLVDADAASTLSDSVFVWKETDVEESLKVSLEGTKLAYELAAMALEKVGACIDDKESKLRGLEDRVDELIKEKEHIGVLLRSALQATTSEVLKVAEDGLREAGIEIGLDERKEHRPGSVEKDEVYTLAGALENTMKESQVKIIELQHLVEALRAESGLLRTRLEGQEKEIVQLRKQIKHLEEKERVANESVEGLMMDVTAAEEEIKRWKMAAEEEAEAGRSIEQEFQIQISSLRRI

SEQ ID NO: 108680 - protein, 185 aa, Setaria italica
  misc_feature (46)..(46): Xaa can be any naturally occurring amino acid
  Transcript Sequence Number=SeqID_42706
  Homolog annotation: Hit_ID=B9RMU3; Match level="QueryCoverage=91%, HitCoverage=24%, E-value=7e-43, Identity=56%"; Hit description =Paramyosin, putative
GSLVRAGKEIVQLRKQIKHLEEKERVANESVEGLMMDVTAAEEEIXRWKMAAEEEAEAGRSIEQEFQIQISSLRKELDEAKQAMVELENKLKFKEETAAAAMAARDAAEKSLKLADLRSSRLRERLEELNRQLEESDNRTDSVNRNGHRYMCWPWQWLGLNYVRLPPAEMEQTSNEMELSEPLII

SEQ ID NO: 108681 - protein, 92 aa, Setaria italica
  Transcript Sequence Number=SeqID_42707
TNVFLLLLLPWHLFRRHNQLLTDSCMSLTMHKPYSPSLIPMMLFTCRVCILSFFVSASLVLTFCGIIVVIIIYPSGYAKWYSKFLRSGSSTT

SEQ ID NO: 108682 - protein, 453 aa, Setaria italica
  Transcript Sequence Number=SeqID_42708
  Gene Ontology: Mol. function=transferase activity, transferring glycosyl groups; Cellular component=cytosol; Biological process =pyridine nucleotide biosynthetic process
  Homolog annotation: Hit_ID=B6UET1; Match level="QueryCoverage=100%, HitCoverage=79%, E-value=0.0, Identity=96%"; Hit description =Nicotinate phosphoribosyltransferase-like protein
  Pfam annotation: Domain name=NAPRTase; Domain location=68-335; Score =148.5; E_value=2.1e-41; Accession=PF04095.8; Description=Nicotinate phosphoribosyltransferase (NAPRTase) family
FREVDCSDVEVYSIPEGSVVFPKVPLMRVEGPVAVVQLLETPFINLINYASLVTTNAARHRHVAGKSKVLLEFGLRRAQGPDGAISASKYCFMGGFDATSNVLAGNLFGIPLRGTHSHAFVSSYMSLDEIPDKALRSKDGSRVCQDFVSLVQEWLQKIQVADSLGGVFGYTNPSELAAFASYALAFPSNFLALVDTYDVMRSGIPNFCAVALALHDLGYKASGIRLDSGDLAYLSIEARKVFRAVEKEFNVPGFGKMVITASNDLNEETIDALNKQGHEVDAFGIGTYLVTCYSQAALGCVFKLVEINSKPRIKLSEDVAKVSIPCKKRCFRLYGKEGYPLVDIMIRESEPSPKAGERILCRHPFIESKRAYVVPQHVEELLQCYWPGRSDKPRAELPSLDKIRSRCMQQLEKLRPDHIRRLNPTPYKVSVSAKLYDFIHCLWLNEAPVGELQ

SEQ ID NO: 108683 - protein, 47 aa, Setaria italica
  Transcript Sequence Number=SeqID_42709
FGHSTSSFMFEVNEIVYECSVFVLYCCSSGMFLGFVSKKNLYASTVS

SEQ ID NO: 108684 - protein, 125 aa, Setaria italica
  Transcript Sequence Number=SeqID_42710
  Subcellular localization annotation: CTP_CleavageSite=40; ConfidenceScore=5.40e-01
GAVGKILFSRRCYYISMLLGGASPSSSRAMAPPGWRAAAAAATARTARRRAALPSFFSLEREEGDPRTPINRQETTGLETPRAMKIPAIQEGFLSLLGSDLAGINRRKVGGGVNQGTPRSRAGSG

SEQ ID NO: 108685 - protein, 196 aa, Setaria italica
  misc_feature (36)..(36): Xaa can be any naturally occurring amino acid
  Transcript Sequence Number=SeqID_42711
  Gene Ontology: Mol. function=transcription factor activity; Cellular component=nucleus; Biological process=regulation of transcription, DNA-dependent
  Homolog annotation: Hit_ID=B9T4R8; Match level="QueryCoverage=76%, HitCoverage=38%, E-value=2e-30, Identity=50%"; Hit description =Ethylene-responsive transcription factor, putative
  Pfam annotation: Domain name=AP2; Domain location=34-85; Score=73.6; E_value=7.5e-19; Accession=PF00847.12; Description=AP2 domain
EKVGLDFLKKDAIIHKPLPIDKRPVVRTKHKRKNPXRGIRRRPWGKWAAEIRDPRKGARVWLGTYKTPEEAARAYDVEARKIRGNKAKVNFPDEAPPNMMSNTTKPTVIAMPTIPFLAEKFSTNSLVSHSKNSNEDLFSVVNFNGKNARSIPTDGFGLPSMKIPHASYEIPRMGGCASQNRFSIGSSSNGIGEIRW

SEQ ID NO: 108686 - protein, 198 aa, Setaria italica
  Transcript Sequence Number=SeqID_42712
  Pfam annotation: Domain name=F-box; Domain location=23-70; Score =33.2; E_value=1e-06; Accession=PF00646.25; Description=F-box domain
  Subcellular localization annotation: CTP_CleavageSite=21; ConfidenceScore=5.07e-01
MASPGPSSPLDSRSTRRRTPVASNTGVLPPDVLFDVLLRLPAKELCRLHAVCRAWRSLTVDPLFTGAHAARHPLFLANFRDDQTHICVVDLLGIVVKRIPNADGHLLLHTSLDLACATTVRNSCQVLDPATGNVHVPPESPAVEHLDRENVRMPYTSFAFGRIATTGEYKVIRIFNRPTLAGFHQPHLFEVFTINISG

SEQ ID NO: 108687 - protein, 105 aa, Setaria italica
  misc_feature (21)..(21): Xaa can be any naturally occurring amino acid
  Transcript Sequence Number=SeqID_42713
  Gene Ontology: Cellular component=plasma membrane
  Homolog annotation: Hit_ID=Q6Z3H8; Match level="QueryCoverage=94%, HitCoverage=10%, E-value=9e-18, Identity=41%"; Hit description =Putative bzip-related transcription factor
  Pfam annotation: Domain name=DUF632; Domain location=1-105; Score= -88.5; E_value=0.0017; Accession=PF04782.4; Description=Protein of unknown function (DUF632)
WQDKLDSYHSQCQVISEAKTXTSIVSGANGQDLAIELEVELIKWIISFSSWVNAQRNFVKALNGWLALCLNYEPEDNDTGVPSYSPGSIGAPLVFVICNQNLNLL

SEQ ID NO: 108688 - protein, 77 aa, Setaria italica
  Transcript Sequence Number=SeqID_42714
  Gene Ontology: Mol. function=aminoacyl-tRNA ligase activity
  Homolog annotation: Hit_ID=Q2R1H7; Match level="QueryCoverage=77%, HitCoverage=17%, E-value=7e-25, Identity=90%"; Hit description=TRNA synthetase, putative, expressed
LDAENAPFFVAKLAIKTLPCIILFKKGIAVDRLIGFEDLGRKDDFSTRALENILKMKGIIDDLTLLFLDSLSSSSSS

SEQ ID NO: 108689 - protein, 229 aa, Setaria italica
  Transcript Sequence Number=SeqID_42715
  Gene Ontology: Mol. function=ATP binding; Cellular component=cellular_ component; Biological process=cell redox homeostasis
  Homolog annotation: Hit_ID=Q2R1H7; Match level="QueryCoverage=87%, HitCoverage=57%, E-value=1e-80, Identity=74%"; Hit description=TRNA synthetase, putative, expressed
  Pfam annotation: Domain name=Thioredoxin; Domain location=85-189; Score=-31.4; E_value=0.074; Accession=PF00085.12; Description =Thioredoxin
MDPDAVKSTLSNLAFGNVIAAAARDLQKEMVAKDKAQGAPASHDEVDLDELLDDPELEKLHAERIAALKKEAEKREVLKRQGHGEYREITEGDFLGEVTGSEKVICHFYHREFYRCKIMDKHLKALAPVYVGTKFVKLDAENAPFFVAKLAIKTLPCIILFKKGIAVDRLIGFEDLGRKDDFSTRALENILKMKGIIDEKKKDDDDEDDESESKNRRVRSSTAQDSDSD

SEQ ID NO: 108690 - protein, 58 aa, Setaria italica
  Transcript Sequence Number=SeqID_42716
  Gene Ontology: Mol. function=aspartic-type endopeptidase activity; Biological process=proteolysis
  Homolog annotation: Hit_ID=B4FXW6; Match level="QueryCoverage=100%, HitCoverage=35%, E-value=2e-22, Identity=82%"; Hit description =Aspartic proteinase nepenthesin-2
PPAKSYVIDAAPGVKCIGVQEGAWPGVSVIGNILQQEHLWEFDLRDRWLRFKHTRCAQ

SEQ ID NO: 108691 - protein, 230 aa, Setaria italica
  Transcript Sequence Number=SeqID_42717
  Gene Ontology: Mol. function=aspartic-type endopeptidase activity; Biological process=proteolysis
  Homolog annotation: Hit_ID=B4FXW6; Match level="QueryCoverage=68%, HitCoverage=100%, E-value=2e-58, Identity=68%"; Hit description =Aspartic proteinase nepenthesin-2
  Subcellular localization annotation: CTP_CleavageSite=25; ConfidenceScore=5.26e-01
YDGQSFQSSDGVLSLGNSNISFASRAAARFGARFSYCLVDHLAPRNATSYLTFGPGPGDAAAPEQTPLLLDRRMSPFYAVTVDTVYVAGEALDIPADVWDVEKNGGAILDSGTSLTILATPAYAAVVAALSKQLAGLPRVSMDPFEYCYNWTAGAPEIPKLEVHFAGSARLEPPAKSYVIDAAPGVKCIGVQEGAWPGVSVIGNILQQEHLWEFDLRDRWLRFKHTRCAQ

SEQ ID NO: 108692 - protein, 60 aa, Setaria italica
  Transcript Sequence Number=SeqID_42718
GAGRRHQQQQHQAQELVLRRLLPCNKGKACRFKRSSFSEEDDAASSAMLLLACVVCAPSL

SEQ ID NO: 108693 - protein, 170 aa, Setaria italica
  misc_feature (134)..(134): Xaa can be any naturally occurring amino acid
  Transcript Sequence Number=SeqID_42719
  Homolog annotation: Hit_ID=C1DZS1; Match level="QueryCoverage=37%, HitCoverage=5%, E-value=2e-09, Identity=47%"; Hit description=SNF2 super family
RGLRCKRGGLVDPAAVQELLDSLMDATGIVMGDKESAVVDKNSNSVRDGEDEDNDDDCVILDGDPDKPVAVAKEEGPRRDAAEDELQIVAEKGEIACRDFPHPRHLCATLPFSTSSHARHCNMCHCYVCDSPAXPCAFWGKGTAHTDHCHATDKDAKWKKLRQFIPRTKA

SEQ ID NO: 108694 - protein, 1022 aa, Setaria italica
  Transcript Sequence Number=SeqID_42720
  Gene Ontology: Mol. function=structural constituent of nuclear pore; Cellular component=nuclear pore; Biological process=nucleocytoplasmic transport
  Homolog annotation: Hit_ID=Q9LQU6; Match level="QueryCoverage=98%, HitCoverage=67%, E-value=0.0, Identity=59%"; Hit description=F10B6.25
LPPMLIERYNAAAGEGTALCGIFSDIHRAWATVDNSFFIWRFDKWDGQCQDYNVDEQAICAVGLARAKPGIFVEAIQYLLVFKSTPVELVLVGVCCSASADGTDPYAELSLQPLPEYMIATDGVTVTCITCTDKGQIFLAGRDGHIYELQYTTGSGWRKRCRKVCLTTGIGSLLSRWVLPNAFKFSTVDPIVDMVIDDERNTIYARTEGMKLQLFDLGANGDGPLTKVTEEKNIVDPRDAPYGGRRSNAQRSARSPKPSIVCISPLSSMESKWLHAVAVLSDGKRLFLTTSGGSGSSVGLSSSLQRPTCLKIVATRPSPPLGVGGGLTFGAVSAAGRAHPEDLALKVESAFYSAGALIMSDSSATAMSSLLAVQKDSAAQLSLPSTFGTASRSSRALRETVSALPVEGRMLCASDVLPLPDAAFTVQSLYADVECFTSFRKPSEKASIKLWAKGDLPTQHILPRRRVVVFNTMGLMEVIFNRPVDILRKLFDGNTLRSQIEEFFNRFGAGEAAAMCLMLAAKLLYAEDSLISNAVSEKAAEAFEDPGLVGMPQIDGTTALSNTRTQAGGFSMGQVVQEAEPLFSGAYEGLCLCSSRLLYPIWELPIMVIRGPAGANEHEDGIVVCRLSAGALKILESKIRSLETFLRSRRNKRRGLYGYVAGLGDSGSILYKTGPIMGSGGRGNGRSPYNSQIRDMNPTDQSASSKKPRLVYTSAELAAMEVRAMECLRRLLRRSGEALFLLQLICHHNVVRLAQTLGNDLRKKLVQLTFHQLVCSEDGDQLAMRLISALMEYYIGPEGRGTVEEISTKLREGCPSYFNESDYKYYLAVECLERASMTNNPDERDILARDAFNLLTKIPDSADLSAICKRFENLRFYEAVVRLPLQKAQALDSNADVINGQIDPRHHDMITLQREQCYEIVMNALRTLKGVGQGADKSSGLATAVDPASRSKYIKQIIQLSVQWPDTVFHEHLYRTLIELGLENELLEYGGSDLVSFLQSAGRKHQEEVCPNPCFPTKIWNY

SEQ ID NO: 108695 - protein, 87 aa, Setaria italica
  Transcript Sequence Number=SeqID_42721
  Gene Ontology: Mol. function=protein serine/threonine kinase activity; Cellular component=plasma membrane; Biological process =protein amino acid phosphorylation
  Homolog annotation: Hit_ID=B9RT11; Match level="QueryCoverage=73%, HitCoverage=12%, E-value=2e-26, Identity=85%"; Hit description =Receptor serine-threonine protein kinase, putative
KSLEPLHVYVQCQLCNLVDAPFQARPLFKDRRKFPLMADPALEGQYPSRGLYQALAVAAMCVQEQPSMRPLIGDVVTALTYLASQTY

SEQ ID NO: 108696 - protein, 399 aa, Setaria italica
  Transcript Sequence Number=SeqID_42722
  Gene Ontology: Mol. function=protein serine/threonine kinase activity; Cellular component=plasma membrane; Biological process =protein amino acid phosphorylation
  Homolog annotation: Hit_ID=Q32SF8; Match level="QueryCoverage=100%, HitCoverage=99%, E-value=0.0, Identity=81%"; Hit description =Serine/threonine kinase
  Pfam annotation: Domain name=Pkinase; Domain location=82-356; Score =142.0; E_value=1.8e-39; Accession=PF00069.17; Description=Protein kinase domain
  Pfam annotation: Domain name=Pkinase_Tyr; Domain location=82-356; Score=121.8; E_value=2.3e-33; Accession=PF07714.9; Description =Protein tyrosine kinase
  Pfam module annotation: Pfam domain module=Pkinase::Pkinase_Tyr; Domain location=82-356::82-356
MESCFPCLGGAKKKRPPEKPQIPPASEKPKLGPSSSVTKQDSFEVNKEAANRDIILSNGSDHHQIAAQTFTFRDLAVATRNFRPDCLLGEGGFGRVYKGYLNCVNQVVAIKQLDRNGLQGNREFLVEVLMLSLLHHPNLVSLIGYCADGDQRLLVYEYMPLGSLEDHLHDPSPDKARLDWSTRMKIAAGAAKGLEYLHDKASPPVIYRDLKCSNILLGEGYHPKLSDFGLAKLGPVGDKTHVSTRVMGTYGYCAPEYAMTGQLTLKSDIYSFGVVLLEIITGRRAIDNTRAAGEQNLVAWARPLFKDRRKFPLMADPALEGQYPSRGLYQALAVAAMCVQEQPSMRPLIGDVVTALTYLASQTYDPEAHGNSRLVAPGTPPRTKNSSRSHGSVDQRGSS

SEQ ID NO: 108697 - protein, 109 aa, Setaria italica
  misc_feature (91)..(91): Xaa can be any naturally occurring amino acid
  Transcript Sequence Number=SeqID_42723
GRGWSGYMGPCHRGDTASQGTEVVLLIPSGQPSDCRNEGAPYCSAHQSKEARQRNTKVDEWDRKNILSLGPKLTLGHGSGWCTPQSLQKTXNLCFSSDRVMRPGIFPMK

SEQ ID NO: 108698 - protein, 81 aa, Setaria italica
  Transcript Sequence Number=SeqID_42724
KDFGLSMLMKVVRLPTAPCYNNPHLTPRELCLYYSKELSSGCYTHLVHAFILIDQISISHHPSSGGSVNRKFPFYLFSVYL

SEQ ID NO: 108699 - protein, 78 aa, Setaria italica
  Transcript Sequence Number=SeqID_42725
  Gene Ontology: Cellular component=plastid inner membrane
  Homolog annotation: Hit_ID=B6TEI2; Match level="QueryCoverage=91%, HitCoverage=17%, E-value=2e-27, Identity=84%"; Hit description =Maltose excess protein 1-like
NYLNPSNIKGLSAFSMLLAMLGNGLMIPRAVFIRDLMWFTGSAWASVLQGWGNLACMYWYVYLTAVVALASIVLSCVA

SEQ ID NO: 108700 - protein, 181 aa, Setaria italica
  misc_feature (19)..(19): Xaa can be any naturally occurring amino acid
  misc_feature (27)..(27): Xaa can be any naturally occurring amino acid
  Transcript Sequence Number=SeqID_42726
  Gene Ontology: Cellular component=plastid inner membrane
  Homolog annotation: Hit_ID=B6TEI2; Match level="QueryCoverage=43%, HitCoverage=19%, E-value=6e-27, Identity=79%"; Hit description =Maltose excess protein 1-like
FSMLLAMLGNGLMIPRAVXFIRDLMWXFTGSAWASVLQGWGNLACMYCFGSISREFFFATTSGLLLWLGVVSFRYLLCFFPNINVFIRGISNFWYFHEEHRHFRVSVKRAAFQISTELNCFLAVSLPDCLSDHTCRFFVALPGFTFWRDTIAYGNSSPLTSLKEFVFREVISRRQLHLPCT

SEQ ID NO: 108701 - protein, 163 aa, Setaria italica
  Transcript Sequence Number=SeqID_42727
  Gene Ontology: Cellular component=plastid inner membrane
  Homolog annotation: Hit_ID=Q7XTQ5; Match level="QueryCoverage=99%, HitCoverage=40%, E-value=2e-77, Identity=88%"; Hit description =Maltose excess protein 1-like, chloroplastic
  Subcellular localization annotation: CTP_CleavageSite=52; ConfidenceScore=5.21e-01
PPNSVLPGIISGSLAVAAVAMARMGKLSDAGVKFVGSLSGWTATLLFMWMPVAQMWTNYLNPSNIKGLSAFSMLLAMLGNGLMIPRAVFIRDLMWFTGSAWASVLQGWGNLACMYCFGSISREFFFATTSGLLLWLGFTFWRDTIAYGNSSPLTSLKELFFGK

SEQ ID NO: 108702 - protein, 205 aa, Setaria italica
  Transcript Sequence Number=SeqID_42728
  Gene Ontology: Mol. function=nucleotide binding; Biological process =defense response
  Homolog annotation: Hit_ID=Q6EST1; Match level="QueryCoverage=100%, HitCoverage=21%, E-value=8e-59, Identity=57%"; Hit description =Putative MLA1
NKVRELSFDIEDCVDRFMLNHSHGGSKANFVRKAMRKVKKLWKDQGIAEEIQKLKILVTEQSERAKRYRALGSSPPHYLAASPQPVRLDPRATALFQEARDPVGIDGPREEIIQLLQVEENQHKVVSIYGTSGQGKTTLAMEVYRKITKAFDCRAFVSVSQTLDLKKLLRDILSQIVSKSEFDQSERWETEQLIRKMRDYLIDKR

SEQ ID NO: 108703 - protein, 179 aa, Setaria italica
  misc_feature (162)..(162): Xaa can be any naturally occurring amino acid
  Transcript Sequence Number=SeqID_42729
  Gene Ontology: Mol. function=nucleotide binding; Biological process =defense response
  Homolog annotation: Hit_ID=Q6EST1; Match level="QueryCoverage=100%, HitCoverage=17%, E-value=3e-30, Identity=48%"; Hit description =Putative MLA1
ADGATVKECRVHDVILEFIVSKAVEDNFVTIWNRNGFSENYSSNKIRRLSIQHGISRRAEEMVKIKEHAAHIRSINIFASNSLLVFKNISMVLSSQVLRVVNVLNKGDYIWEELYEDCYLGHVKSFGQMKYLRLENWSLICECKLPKDIEKLQHLETLDVKXSGIEKLPASITQLQRLV

SEQ ID NO: 108704 - protein, 847 aa, Setaria italica
  misc_feature (685)..(685): Xaa can be any naturally occurring amino acid
  Transcript Sequence Number=SeqID_42730
  Gene Ontology: Mol. function=nucleotide binding; Biological process =defense response
  Homolog annotation: Hit_ID=Q6EST1; Match level="QueryCoverage=99%, HitCoverage=87%, E-value=0.0, Identity=52%"; Hit description =Putative MLA1
  Pfam annotation: Domain name=AAA; Domain location=191-379; Score= -33.5; E_value=0.022; Accession=PF00004.21; Description=ATPase family associated with various cellular activities (AAA)
  Pfam annotation: Domain name=NACHT; Domain location=190-343; Score= -27.9; E_value=0.012; Accession=PF05729.4; Description=NACHT domain
  Pfam annotation: Domain name=NB-ARC; Domain location=171-456; Score =238.2; E_value=2.1e-68; Accession=PF00931.14; Description=NB-ARC domain
  Pfam module annotation: Pfam domain module=AAA::NACHT::NB-ARC; Domain location=191-379::190-343::171-456
MAELMASAATSVMGSVIGKLTAMLGDKYQFARDVEQGIRFLKDELSTMDVVLQKLADKEDDQMDPMAKDWRNKVRELSFDIEDCVDRFMLNHSHGGSKANFVREAMRKVKMLWKDQGIAEEIQKLKKLVTEQSERAKRYRIHHHLAASPQPVRLDPRATALFQEARDPVGIDGPREEIIQLLQVEENQHKVVSIYGTAGLGKTTLAMEVYRKITGAFDSRAFVSVSQTLDMKKLLRDILSQIVSTSEFDQSERWETEQLIRNMTDYLIDKRYFILIDDIWNVSDWELVEAALPRNDNGSRIITTTRSKTVAETCAGIDAQMYKAKPLGDDESRRLFFKRLFHSTEHCPQDLMAVSSDILRKCGGLPLAIISIAGLLANRSKTKEVWVNALKYISAAVDKDSHIDKMKRIFLLSYFDLPLYLRSCMLYLSVFPEDYVIDCRQLVLLWVAEGLIRGQSRENMEQLGRSYLNELINRSLVQPTKVGADGATVKECRVHDVILEFIVSKAVEDNFVTIWNRNGFSENYSSNKIRRLSIQHDISRQAEEMTIKEHAAHIRSINIFDPMSMLLITSMFLSSQVLRVLNTETRVGCNLGHVKSFGQIKYLRLGLSFGFRPLISFGCKLPKDIEKLQHLETLDVTVCAGIDILPASITQLHRLVRLLVGARVKLPDGIGNLQALEDLDKSLVXVLQNSIKFIQGLGDLTNLKVLGIDWRYDHYLLRHVDVEGHKEACISSLSKLVTTLRELHVVQDARDDRLSFMASCGSTPPPLRRLVFHDSCGPSVVPHQIISSLVNLTRLSIGLVSQEGINILASLPMLLSITVRVLGNSGIRYTISSQGFQCLVKFNFDCY

SEQ ID NO: 108705 - protein, 68 aa, Setaria italica
  Transcript Sequence Number=SeqID_42731
PPICTNIYLQIKALIIPKSITMSIHDNHRQIIHTTTTSLTIQKKYTPNHKGLPVKLVINHAPPQRLIK

SEQ ID NO: 108706 - protein, 111 aa, Setaria italica
  Transcript Sequence Number=SeqID_42732
  Subcellular localization annotation: CTP_CleavageSite=30; ConfidenceScore=5.44e-01
NNDNNKDITAPDTKKKQILPTASRLQPCISSQTPTNPRQRKLTRNLHTKLEARQLVRSCYPNGSETTQQRIPKPKLQKRTTNFQIRSHAPGTDDNPQLSERGSKLHPSPNA

SEQ ID NO: 108707 - protein, 61 aa, Setaria italica
  Transcript Sequence Number=SeqID_42733
CTFHLGENCCVFITCACYSDQAKIIRFLWWEHTLLVSTCLTIIMLPMCFSIFDDHVQLFIS

SEQ ID NO: 108708 - protein, 48 aa, Setaria italica
  Transcript Sequence Number=SeqID_42734
  Pfam annotation: Domain name=DUF623; Domain location=1-39; Score =24.4; E_value=3.6e-06; Accession=PF04844.5; Description=Protein of unknown function, DUF623
NVRARLHELLLCYLALNDRRAHKYVVSAFTDLLLRLTAATNLDDEHHD

SEQ ID NO: 108709 - protein, 50 aa, Setaria italica
  Transcript Sequence Number=SeqID_42735
LYHDVFPISTFCICHDDIRCPFQSWLVGFGHLITHSFLWVTVKVVSVNLS

SEQ ID NO: 108710 - protein, 119 aa, Setaria italica
  Transcript Sequence Number=SeqID_42736
  Subcellular localization annotation: CTP_CleavageSite=44; ConfidenceScore=5.30e-01
LLLSLSLLSLSAPSSPQIGKATATGIESSSSRLDSPGCLRLSPSLHTKEGRVGLGNQPNPEILKESLPFPSDPQFPPLEKRREEKRRLQFKESRIQLGRIEPSHPQIDSTPLPPPLAAA

SEQ ID NO: 108711 - protein, 99 aa, Setaria italica
  Transcript Sequence Number=SeqID_42737
TACSSSRWDQSGYGFDRSTWSTTAGTIRADFSPAADQNDRHGLVGPTSYVIIRLTVRTDPIQVVQAGGCLWARPCIYGQLVRSLLVWRKDLCLPSAELR

SEQ ID NO: 108712 - protein, 163 aa, Setaria italica
  misc_feature (8)..(8): Xaa can be any naturally occurring amino acid
  Transcript Sequence Number=SeqID_42738
  Gene Ontology: Mol. function=phosphotransferase activity, alcohol group as acceptor; Cellular component=chromosome; Biological process= response to DNA damage stimulus
  Homolog annotation: Hit_ID=Q5Z987; Match level="QueryCoverage=99%, HitCoverage=6%, E-value=2e-36, Identity=52%"; Hit description =Serine/threonine-protein kinase ATR
IVNVLQRXAIKTSRSAELQVAMYTAYKRIIELCSAQVWKPEILLKLLCLPKPCSKLIDCIRVVISKFGQNFFTLDDGKGQSSPQARSEKNDLPKVGQKRTSQNEQSSCAKRQKMTESRFSAGIGFELKEGYALRQSLNSLIKCLSPENHETYPLDPETAIEVN

SEQ ID NO: 108713 - protein, 156 aa, Setaria italica
  misc_feature (73)..(73): Xaa can be any naturally occurring amino acid
  misc_feature (137)..(137): Xaa can be any naturally occurring amino acid
  misc_feature (139)..(139): Xaa can be any naturally occurring amino acid
  Transcript Sequence Number=SeqID_42739
  Gene Ontology: Cellular component=nucleus; Biological process=cell division
  Homolog annotation: Hit_ID=B9RI21; Match level="QueryCoverage=49%, HitCoverage=13%, E-value=5e-35, Identity=89%"; Hit description =Cyclin-L2, putative
QKLEQIATAIVFCHRFFLRQSHAKNDRRTIATVCMFLAGKVEETPRPLKDVILISYEIIHKKDPAAVQRIKQXEVSNQMLELYEQNRVAPPVSQGNDTEGSSASVANQRAPGKVPGAADEPTAHEHHQAPRQSSQQXNXSGHHGYDHPHPEKQNIE

SEQ ID NO: 108714 - protein, 90 aa, Setaria italica
  Transcript Sequence Number=SeqID_42740
  Gene Ontology: Biological process=cell division
  Homolog annotation: Hit_ID=Q2RAC5; Match level="QueryCoverage=55%, HitCoverage=10%, E-value=1e-23, Identity=98%"; Hit description =Cyclin-T1-3
MPIYYALKGVYRLRTSLCLQFKPHHIAAGAIFLAAKFLKVKLPSDGEKVWWQEFDVTPRHLEGWSLDAKSVGNTCTALLGYSFLVRVRNL

SEQ ID NO: 108715 - protein, 127 aa, Setaria italica
  Transcript Sequence Number=SeqID_42741
  Homolog annotation: Hit_ID=Q2RAC5; Match level="QueryCoverage=86%, HitCoverage=22%, E-value=3e-44, Identity=80%"; Hit description =Cyclin-T1-3
MMDAMKKIDKDKVKAALEKRRKSKGDVSRKVDVMDDDDLIERELEHGVELAAEGEKVKQERRQSWPHPAHREDQQRAARMMGSTEEGELSTDSQEHHSPALDNRRRNDVHEHRNYDRGERDIKRLRP

SEQ ID NO: 108716 - protein, 200 aa, Setaria italica
  misc_feature (51)..(51): Xaa can be any naturally occurring amino acid
  Transcript Sequence Number=SeqID_42742
  Gene Ontology: Biological process=cell division
  Homolog annotation: Hit_ID=Q2RAC5; Match level="QueryCoverage=99%, HitCoverage=40%, E-value=1e-79, Identity=76%"; Hit description =Cyclin-T1-3
VVANQRAPGKVPATADEPTAHEHHQAPRQSSQQNMSGHHGYDHPHPEKQNXNRVTHSEARDSAANSNEGPNVSSSMMDAMKKINKDKVKAALEKRRKSKGDVSRKVDVMDDDDLIERELEHGVELAAEDEKSKQERRQSWPHPSHREDHQNTNRDNTEEGELSMDSQEYRSPEHGNRKRKDAHEHRNYDRDERDLKRLRS

SEQ ID NO: 108717 - protein, 427 aa, Setaria italica
  misc_feature (31)..(31): Xaa can be any naturally occurring amino acid
  misc_feature (41)..(41): Xaa can be any naturally occurring amino acid
  misc_feature (58)..(58): Xaa can be any naturally occurring amino acid
  misc_feature (75)..(75): Xaa can be any naturally occurring amino acid
  Transcript Sequence Number=SeqID_42743
  Gene Ontology: Cellular component=nucleus; Biological process=cell division
  Homolog annotation: Hit_ID=Q2RAC5; Match level="QueryCoverage=97%, HitCoverage=85%, E-value=0.0, Identity=86%"; Hit description=Cyclin -T1-3
  Pfam annotation: Domain name=Cyclin_N; Domain location=34-174; Score =44.0; E_value=6.1e-10; Accession=PF00134.15; Description=Cyclin, N -terminal domain
MDIMQTSDSSHHGIVENSPYRVPYDRHAEGXQLGASWYFKXVEENSLSRRDGIDLKEXLRKSYCTFLQDLGMRMXRPQVTIATAIVFCHRFFLRQSHAKNDRRTIATVCMFLAGKVEETPRPLRDVILLSYEIIHKKDPAAVQRIKQKEVYEQQKELILLGERLVLVTLGFDLNIHHPYKPLVEAIKRFKVAENALAQVAWNFVNDGLRTSLCLQFKPHHIAAGAIFLAAKFLKVKLPSDGEKVWWQEFDVTPRHLEEISNQILELYEQNRVAPPVSQGNDTEGSSASVANQRAPGKVPGAADEPTAHEHHQAPRQSSQQNMSGHHGYDHPHPEKQNNRVTHSEARDSAANSNEGPNVSSSMMDAMKKINKDKVKAALEKRRKSKGDVSRKVDVMDDDDLIERELEHGVELAAEDEASSAFSPACSS

SEQ ID NO: 108718 - protein, 100 aa, Setaria italica
  Transcript Sequence Number=SeqID_42744
  Gene Ontology: Mol. function=metal ion binding
  Homolog annotation: Hit_ID=B6TQA5; Match level="QueryCoverage=99%, HitCoverage=52%, E-value=2e-50, Identity=90%"; Hit description=DNL zinc finger family protein
  Pfam annotation: Domain name=zf-DNL; Domain location=7-71; Score =92.7; E_value=1.3e-24; Accession=PF05180.4; Description=DNL zinc finger
SSPRHDLAMVFTCKVCETRSMKMASRDSYENGVVVARCGGCNNLHLIADRLGWFGEPGSIEDFLAAQGEEVKKGSTDTLNFSLEDLVGSQVSSKGPSEQN

SEQ ID NO: 108719 - protein, 495 aa, Setaria italica
  misc_feature (456)..(456): Xaa can be any naturally occurring amino acid
  misc_feature (465)..(465): Xaa can be any naturally occurring amino acid
  Transcript Sequence Number=SeqID_42745
  Gene Ontology: Cellular component=nucleus; Biological process=cell division
  Homolog annotation: Hit_ID=Q2RAC5; Match level="QueryCoverage=99%, HitCoverage=99%, E-value=0.0, Identity=79%"; Hit description=Cyclin -T1-3
  Pfam annotation: Domain name=Cyclin_N; Domain location=35-178; Score =45.5; E_value=2e-10; Accession=PF00134.15; Description=Cyclin, N -terminal domain
MDAMQTSDSSHHGIVENSPYRIPYSRNAEGGKLGNSWYFSRKEIEEYSFSRRDGIDLKKESHFRKTYCICLQDLGMRLQVPQVTIATAIVFCHRFFLRQSHAKNDRRTIATVCMFLAGKVEETPRPLKDVILISYEIIHKKDPAAVQRIKQKEVYEQQKELILLGERVVLVTLGFDLNVHHPYKPLVEAIKRFKVAENALAQVAWNFVNDGLRTSLCLQFKPHHIAAGAIFLAAKFLKVKLPSDGEKVWWQEFDVTPRHLEEISNQILELYEQSNVAPPPSQGNDTDRSPASVANHRAPLKAPGTVGASTAQHHQASRQSSQQNMPGHRGYDHPHPEKQTSNQTPQNEARDGAANSNDGPKMSSLMMDAMKKIDKDKVKAALEKRRKSKGDVSRKVDVMDDDDLIERELEHGVELAAEGEKVKQERRQSWPHPAHREDQQRAARMMGSTEEGEPLXFSPDSQEHXSPALDNRRRNDVHEHRNYDRGERDIKRLRP

SEQ ID NO: 108720 - protein, 54 aa, Setaria italica
  Transcript Sequence Number=SeqID_42746
  Gene Ontology: Mol. function=oxidoreductase activity; Cellular component=cytoplasm; Biological process=metabolic process
  Homolog annotation: Hit_ID=Q49HE3; Match level="QueryCoverage=100%, HitCoverage=14%, E-value=1e-22, Identity=92%"; Hit description=12 -oxo-phytodienoic acid reductase
MVHQAPKEVIPLMTPYKMGQFQLSHRVVLAPLTRCRSYGNVPQPHAAVYYSQRA

SEQ ID NO: 108721 - protein, 127 aa, Setaria italica
  misc_feature (11)..(11): Xaa can be any naturally occurring amino acid
  Transcript Sequence Number=SeqID_42747
  Gene Ontology: Mol. function=transferase activity, transferring groups other than amino-acyl groups; Biological process=biosynthetic process
  Homolog annotation: Hit_ID=B4G105; Match level="QueryCoverage=100%, HitCoverage=31%, E-value=3e-44, Identity=71%"; Hit description =Chalcone synthase
  Pfam annotation: Domain name=Chal_sti_synt_C; Domain location=1-122; Score=71.7; E_value=2.7e-18; Accession=PF02797.7; Description =Chalcone and stilbene synthases, C-te
HVEEFCRKLSXEREGGGGEEEMGYDDMFWAVHPGGPAILTKMEGRLGLGGDKLRASRCALRDFGNASSNTIVYVLENMVEETRRRKAAAASGDGDGDDCEWGLILAFGPGITFEGILARNLQAPPRA

SEQ ID NO: 108722 - protein, 442 aa, Setaria italica
  Transcript Sequence Number=SeqID_42748
  Homolog annotation: Hit_ID=Q6H5G7; Match level="QueryCoverage=78%, HitCoverage=71%, E-value=2e-94, Identity=50%"; Hit description=Leaf senescence protein-like
  Pfam annotation: Domain name=DUF231; Domain location=263-440; Score =223.2; E_value=6.8e-64; Accession=PF03005.7; Description=Arabidopsis proteins of unknown function
MLTNFPKTYQLQNDKLLLPKKEFVTYTLYALIAVALLYLFVYPAAPASSTKPSVAAPWIQEELPPPSPPPSYQGGERSRSSPQPQAVSSAATPCDYSDGEWVPDPRPPPYNGTACEAIKDGRSCMANGRADTGYLHWRWQPRRCDLPDFSPEAFLRWLRNRHMAFVGDSLARNQAESLMCLLSSWSPAELVHREEDGRFRRWVFREHNATVSIFWSPFLVKGAEKSEHAGVRYNELYLDEFDERWMSELGAIDAAVVSAGQWFRIPSIYHDGGRVVGCYGCAAELNHTETSFFAVFRDVVRRTLAEVARRHEHGGKLVALTTFSPSHFEGEWNKGAPCTKTRPYKKGEKGLGYTETEMRKIVVEEAANAAGAASSSSSTVRFAAVDVTTLANMRPDGHPGPYMRKNPFAAADGRPVQNDCLHWCMPGPVDTFNQILLQTILR

SEQ ID NO: 108723 - protein, 383 aa, Setaria italica
  misc_feature (93)..(93): Xaa can be any naturally occurring amino acid
  Transcript Sequence Number=SeqID_42749
  Gene Ontology: Mol. function=protein binding; Biological process =defense response
  Homolog annotation: Hit_ID=B9V0H5; Match level="QueryCoverage=100%, HitCoverage=26%, E-value=2e-86, Identity=48%"; Hit description=NBS -LRR disease resistance protein family-3
  Pfam annotation: Domain name=LRR_1; Domain location=169-191; Score =5.5; E_value=26; Accession=PF00560.25; Description=Leucine Rich Repeat
  Pfam annotation: Domain name=LRR_1; Domain location=305-328; Score =1.3; E_value=1.7e+02; Accession=PF00560.25; Description=Leucine Rich Repeat
  Pfam annotation: Domain name=LRR_1; Domain location=330-352; Score =10.3; E_value=3.3; Accession=PF00560.25; Description=Leucine Rich Repeat
  Pfam annotation: Domain name=LRR_1; Domain location=354-376; Score =3.4; E_value=67; Accession=PF00560.25; Description=Leucine Rich Repeat
  Pfam module annotation: Pfam domain module=LRR_1::LRR_1::LRR_1::LRR _1; Domain location=169-191::305-328::330-352::354-376
KLPVSISEIGSLKFLNTAVCRRFDESTLPQFRNNSVLLPHFMVHADDGESSSNLIKLKDENPPILEISRIERVKCSTEAQKIKLSVKQNLEKXKFEWTKDAERFVEDIKVLEELTPPACLEYLEIRGYSSISFPPWATSIASYLPLVVSVTIMELPSCKALPPLGQLAKLQELHIEQMDSITKIDGDLYGCARAFPKLRTFRLFRMENLEEWNTAYSCGEDDSRVLMFPILTLLEIRDSPKLTIKPCLPRGEYFLDIRSCNDVLLSQLEERCHVPESSYPGPKGLFVHYSQQPLHEWRLLLEFSGISYLSIEHCSDLTCSSTDIIQGLSSLETFSLTDCESITVLPDWLGDLTSLMKLEIINCPGIQTLPESNTQLAKLQPKF

SEQ ID NO: 108724 - protein, 83 aa, Setaria italica
  Transcript Sequence Number=SeqID_42750
HRRGDAGRGGGGRWRRRGPLRRGRGAARHALGIFRREVSAGGGEPDRAGGLDLGIRGIGSGRADVSMRRSGFCSTADSVWYAV

SEQ ID NO: 108725 - protein, 64 aa, Setaria italica
  Transcript Sequence Number=SeqID_42751
LISIILDSVPGQHQVLELLLSAHILWGVRRSSLPALPRAPATAASCGIWTRLGVGTSCWVNPWV

SEQ ID NO: 108726 - protein, 60 aa, Setaria italica
  Transcript Sequence Number=SeqID_42752
LPKLPLTDIRSNLEMMIASLKATAEAAANSPDNLVGEMQGLLAKVDKKLQGRSATAARHH

SEQ ID NO: 108727 - protein, 80 aa, Setaria italica
  misc_feature (41)..(41): Xaa can be any naturally occurring amino acid
  Transcript Sequence Number=SeqID_42753
ALRRRPPRELHIGSMVGAVAVVAGLYVVLWGKAEDARKGGXPDQSKDSTDGTARSDAQLDVEHTLAAPLLAGAARSQAPS

SEQ ID NO: 108728 - protein, 44 aa, Setaria italica
  Transcript Sequence Number=SeqID_42754
VVNGEIVRRPPERQRRVEPVPQRTADRPRYNDRTRYARRRENQR

SEQ ID NO: 108729 - protein, 210 aa, Setaria italica
  Transcript Sequence Number=SeqID_42755
  Gene Ontology: Cellular component=chloroplast
  Homolog annotation: Hit_ID=B6TMC1; Match level="QueryCoverage=91%, HitCoverage=86%, E-value=2e-67, Identity=69%"; Hit description=DAG protein
  Subcellular localization annotation: CTP_CleavageSite=38; ConfidenceScore=5.25e-01
PLSSLLRRAPAAGAASAEQSMLLRSAAVAVASRLGFPRGMARRPGGDGYSPMRSGGGGGDLAPTEMAPLFPGCDYEHWLIVMDKPGGEGANKQQMIDCYVQTLAKVLGSEEEAKRKIYNVSCERYFGFGCEIDEETSNKLEGLPGVLFVLPDSYVDPEYKDYGAELFVNGEIVQRPPERQRRVEPVPQRTADRPRYNDRTRYARRRENQR

SEQ ID NO: 108730 - protein, 444 aa, Setaria italica
  misc_feature (27)..(27): Xaa can be any naturally occurring amino acid
  misc_feature (281)..(281): Xaa can be any naturally occurring amino acid
  Transcript Sequence Number=SeqID_42756
  Gene Ontology: Mol. function=transferase activity, transferring glycosyl groups
  Homolog annotation: Hit_ID=Q2RB54; Match level="QueryCoverage=99%, HitCoverage=68%, E-value=0.0, Identity=73%"; Hit description =Glycosyl transferase family 8 protein, expressed
  Pfam annotation: Domain name=Glyco_transf_8; Domain location=113-419; Score=152.9; E_value=9.5e-43; Accession=PF01501.12; Description =Glycosyl transferase family 8
RGLIIARAHYPSIAKIKQHERFTRELXQSIQEHERMLSDTITDADLPPIFTEKLEKMENTIERTKSCEVGCSNVERKLRQLLDITEDEAYFHTRQSAFLYHLGVQTMPKTHHCLNMRLTLEYFKSRSIRTDQLNKQMLESPTFQHYVIFSRNVLAVSTTINSTVLNSQDSGSIVFHLFTDAQNFYAMKHWFDRNSYLEATVHVTNIEDHLKFPKHEDSLEMQQLWPSEEFRVTIRNYSESSQRQMKTEYISVFGHSHFLLPDLLRSLNRVVVLDDDLIVQXDLSSLWNLDMDGKVVGAVQFCGVTLGQLRAYIAEHSFNSDACVWLSGLNVIELEKWRDLRVTSLYHQSLQKLQKENLTSKQLKALPVSILAFQDLIYPLEDSWVQSGLGHDYGISRDDIEKAPTLHYNGVMKPWLDLGIHDYKSYWRKYMTTGEKFMMECNIH

SEQ ID NO: 108731 - protein, 83 aa, Setaria italica
  Transcript Sequence Number=SeqID_42757
  Gene Ontology: Mol. function=metal ion binding; Cellular component =mitochondrial intermembrane space protein transporter complex; Biological process=protein import into mitochondrial inner membrane
  Homolog annotation: Hit_ID=B6T665; Match level="QueryCoverage=100%, HitCoverage=100%, E-value=3e-40, Identity=93%"; Hit description =Mitochondrial import inner membrane translocase subunit Tim10
  Pfam annotation: Domain name=zf-Tim10_DDP; Domain location=14-80; Score=75.9; E_value=1.4e-19; Accession=PF02953.7; Description =Tim10DDP family zinc finger
MAAKGGPTNLEKEQMFGMAEKEMEYRVDLFNRLTQTCFDKCVEKRYKEAELNMGENSCIDRCVSKYWQVTNLVGQMLGNRPQI

SEQ ID NO: 108732 - protein, 207 aa, Setaria italica
  misc_feature (8)..(8): Xaa can be any naturally occurring amino acid
  Transcript Sequence Number=SeqID_42758
NSENRPSXDLKDPFHKRVEMKLRALSDRLDADKTAASSRSAMTSCRSSYQNADRLTTSSRSSMRQNTDRVLAPSKLTAQASHKYRKGVQRSDALCKGSSPSHVASTNSTATGKLAAKTLVMPSSSQVSARTSRTVQVTSKRSAGPTSINNGSQNKRKQLSTPTALDENNRKRGYMRASAPPSARSSSENIPPYAKAPKISNVRNVVA

SEQ ID NO: 108733 - protein, 294 aa, Setaria italica
  Transcript Sequence Number=SeqID_42759
ERDELLTALLAATSRAGEEGERLLRDAREDEQDPVPVPPVDPPETTDAEALAAAAALYAQQRQKHDGYSDDFYTAATAASGMPPWMDPSKGWQDLKYDAVESTYNTKHNVPRRESPWKVDVESSGVPAKLRLLEQELINLEKVVNGDLSKIPLVMRKQVKRYQTLAGKIDDLCKRMQTSDPCDSTLSSEFRTQRQTEFLLEAFHLQHRATETRQKLSALQAETAKSSFGDELTAEAKMCTRRALSSIRNNFKEIQRSLEIWLARILGDLEGMLARDGASRIREYFLSPYASAVR

SEQ ID NO: 108734 - protein, 157 aa, Setaria italica
  misc_feature (121)..(121): Xaa can be any naturally occurring amino acid
  Transcript Sequence Number=SeqID_42760
  Gene Ontology: Mol. function=ceramidase activity; Cellular component =extracellular region; Biological process=sphingolipid metabolic process
  Homolog annotation: Hit_ID=A9YFM2; Match level="QueryCoverage=98%, HitCoverage=19%, E-value=8e-60, Identity=74%"; Hit description =Neutral ceramidase
HVTNDGLESLHKISGLPRRVSSIIPEPTEITDDLVQLASSYEASGGRRLSGSSITRRIRSTQQNKPKFVSAFCQSNCGDVSPNVLGTFCIDTGLPCDFNHSTCNGKNELCYGRGPGLSVLXYPDEFESTRIIGNRQFLKAVDLFNSASEEIQGRIDL

SEQ ID NO: 108735 - protein, 497 aa, Setaria italica
  misc_feature (192)..(192): Xaa can be any naturally occurring amino acid
  Transcript Sequence Number=SeqID_42761
  Gene Ontology: Mol. function=ceramidase activity; Cellular component =extracellular region; Biological process=sphingolipid metabolic process
  Homolog annotation: Hit_ID=A9YFM2; Match level="QueryCoverage=100%, HitCoverage=63%, E-value=0.0, Identity=77%"; Hit description=Neutral ceramidase
  Pfam annotation: Domain name=Ceramidase_alk; Domain location=1-497; Score=655.1; E_value=6.6e-194; Accession=PF04734.5; Description =Neutralalkaline non-lysosomal ceramidase
LHKISGLPRRVSSIIPEPTEITDDLVQLASSYEASGGRRLSGSSITRRIRSTQQNKPKFVSAFCQSNCGDVSPNVLGTFCIDTGLPCDFNHSTCNGKNELCYGRGPGYPDEFESTRIIGNRQFLKAVDLFNSASEEIQGRIDYRHTYLDFSQLEVNVPTSTGGQQVVKTCPAAMGFAFAAGTTDGPGAFDFXQGDTRHSAFWRLVRDVIRPPGPEQVKCQAPKPILLDTGEMKVPYDWAPAILPIQIIRIGQLVILCVPGEFTTMAGRRLRDAVKNVLTKSGQFHNNIHVVLAGLTNTYSQYITTFEEYQMQRYEGASTLYGPHTLSAYIQEFQRLATAMVSNEEVPTNLQPPDMLNRQIELLPGVIVDEAPPGVTFGDVSSDVPANSTFRKGSVVNATFYSACPRNDLLTDGTFALVEKLDGSNDWVPVYDDDDWSLRFKWSRHLPLSPISFATLVWTIPEDAPSGVYRFRHFGASKPLIGSVKYFTGTSSAFVVR

SEQ ID NO: 108736 - protein, 81 aa, Setaria italica
  Transcript Sequence Number=SeqID_42762
TKYSLLYIKTSMGGIAFLMASSFSVLLIISSLSPSCHASCIGRLCPPCIKPPSYRDCNKHYCQILCQMMRMPSDHAYCRNL

SEQ ID NO: 108737 - protein, 118 aa, Setaria italica
  Transcript Sequence Number=SeqID_42763
MGAKEKGEERDGHSTDVERDGKQGKGAESDYEPSRDSLSSQGEAASNEDTKAKRVSRVPKKLAKKESKENSPRSARSISSRQIHTKLQYISSNNPQNKSPKTNKVANGARTVEVKKTE

SEQ ID NO: 108738 - protein, 321 aa, Setaria italica
  misc_feature (94)..(94): Xaa can be any naturally occurring amino acid
  Transcript Sequence Number=SeqID_42764
  Gene Ontology: Mol. function=phosphatidylcholine-sterol O -acyltransferase activity; Cellular component=endoplasmic reticulum membrane; Biological process=lipid metabolic process
  Homolog annotation: Hit_ID=Q6K3D9; Match level="QueryCoverage=100%, HitCoverage=48%, E-value=1e-175, Identity=92%"; Hit description =Phosphatidylcholine acyltransferase-like
  Pfam annotation: Domain name=LACT; Domain location=1-321; Score =171.0; E_value=3.4e-48; Accession=PF02450.7; Description =Lecithin:cholesterol acyltransferase
PECKSRPDSGLSAITELDPGYITGPLSSVWKEWVKWCVEFGIEANAIIAVPYDWRLPPSMLEERDLYFHKLKLTFEIALKLRGGPSLVFAHSMXGNNVFRYFLEWLKLEIAPKHYIQWLDEHIHAYFAVGAPLLGSTEAVRAVLSGTTFGLPVSEGTARLMFNAFGSSLWLMPFSKYCKADNIYWKHFFEGKGGCPHRQQCDEAEYISDYSGWPTDLVRIEVPSVRDMGAYPSIMDITENITSSMECGKPTLLSFSAREVSDGTLFKTIEDYDPQSKALVYQLVKYYQGDPVLNPLTPWERPPIKNVFCIYGIDSKTEVGY

SEQ ID NO: 108739 - protein, 98 aa, Setaria italica
  misc_feature (62)..(98): Xaa can be any naturally occurring amino acid
  Transcript Sequence Number=SeqID_42765
LTDQFVKDILGGNKYPFTIGDYRLRVVSVTWKGIIVLYHTHWRILSDVHIYMTEKLICNLVXXXXXXXXXXXXXXXXXXXXXXXXXXXXXXXXXXXXX

SEQ ID NO: 108740 - protein, 31 aa, Setaria italica
  Transcript Sequence Number=SeqID_42766
DVTACLEFIYSNLMCETGTPPKIKEFRNCWS

SEQ ID NO: 108741 - protein, 45 aa, Setaria italica
  Transcript Sequence Number=SeqID_42767
THPARANPASDRLERQPPCQTTPHVQDSHHLMWKEATTWNLKSLT

SEQ ID NO: 108742 - protein, 193 aa, Setaria italica
  Transcript Sequence Number=SeqID_42768
  Gene Ontology: Mol. function=protein dimerization activity; Cellular component=nucleus; Biological process=regulation of transcription, DNA-dependent
  Homolog annotation: Hit_ID=A2ZRY8; Match level="QueryCoverage=89%, HitCoverage=91%, E-value=3e-43, Identity=56%"; Hit description=Auxin- responsive protein IAA4
  Pfam annotation: Domain name=AUX_IAA; Domain location=7-190; Score =26.4; E_value=2.9e-11; Accession=PF02309.8; Description=AUXIAA family
  Subcellular localization annotation: CTP_CleavageSite=60; ConfidenceScore=5.48e-01
MAECKRGDGGGMSPSSSMDSSTHPVLSTTSSGCRPASRRDLSTDLQLGLSLSPASSSLLVAETKSIPSTPRNQVLPDWPPIKPFLRSALTASARRRRTLFVKVYMEGVPIGRKLDLLLLDGYDSLLAKLRHMFKTPITYADVMEYHQRIPREKAAHVLTYEDQDGDWMMVGDVPWELFLASVKKLRIARTDKC

SEQ ID NO: 108743 - protein, 84 aa, Setaria italica
  Transcript Sequence Number=SeqID_42769
  Subcellular localization annotation: CTP_CleavageSite=23; ConfidenceScore=5.03e-01
MMGRNQVLPDWPPIKPFLRSALTASARRRRTLFVKVYMEGVPIGRKLDLLLLDGYDSLLAKLRHMFKTPITLCGRRLQLGTLSP

SEQ ID NO: 108744 - protein, 79 aa, Setaria italica
  Transcript Sequence Number=SeqID_42770
RMKHCQVLIKWVKLSSVCMEPTCLSCRGLAETSCEVPVWIIQTQHVNMPGRTEKPGHLFGPPCWYKFDFAPKIETDTHI

SEQ ID NO: 108745 - protein, 102 aa, Setaria italica
  misc_feature (25)..(25): Xaa can be any naturally occurring amino acid
  Transcript Sequence Number=SeqID_42771
  Pfam annotation: Domain name=DUF679; Domain location=1-89; Score =37.9; E_value=7.8e-14; Accession=PF05078.4; Description=Protein of unknown function (DUF679)
FSDDGGAAAGDGRDFSKYRLRFADXVHSAFAVAVFAAVALLADANTVACFYPSLKDQQKKVVMALPVVVGAVASVVFIVFPCTRHGIGYPPSKPETSALASQ

SEQ ID NO: 108746 - protein, 160 aa, Setaria italica
  misc_feature (155)..(155): Xaa can be any naturally occurring amino acid
  Transcript Sequence Number=SeqID_42772
  Gene Ontology: Mol. function=kinase activity; Biological process =protein amino acid phosphorylation
  Homolog annotation: Hit_ID=Q7XR01; Match level="QueryCoverage=100%, HitCoverage=22%, E-value=2e-38, Identity=48%"; Hit description =OSJNBa0015K02.12 protein
IPGVMALAFGKMALAPPVLADSRSFMPRMDGIITKAQDTRQFLSSLVWSIWEGMTLLIRAVHLTFLFFPATALAPFADKFSVAFRRRWLSLVRRTLEKAGPAFIKWGQWAATRPDLFPSDLCVELAKLHSAAPAHGFAYSKAAIEKAFGRELSEXFESFD

SEQ ID NO: 108747 - protein, 55 aa, Setaria italica
  Transcript Sequence Number=SeqID_42773
AIIHLKILSPKQVSMELFAFLGNMYFLVLSSITFYFITFIYVHTASAEKAIDTIL

SEQ ID NO: 108748 - protein, 82 aa, Setaria italica
  misc_feature (71)..(71): Xaa can be any naturally occurring amino acid
  Transcript Sequence Number=SeqID_42774
  Gene Ontology: Mol. function=protein kinase activity; Cellular component=integral to membrane
  Homolog annotation: Hit_ID=Q94HB9; Match level="QueryCoverage=59%, HitCoverage=6%, E-value=1e-09, Identity=53%"; Hit description =Putative leucine-rich repeat transmembrane protein kinase 1
  Pfam annotation: Domain name=LRRNT_2; Domain location=26-67; Score =30.4; E_value=7.3e-06; Accession=PF08263.4; Description=Leucine rich repeat N-terminal domain
MEALAAALAAGLLLALAAAPAGANTDSADAAALGNLYASWNGPSQLAGWSAGGGDPCGAAWQGVTCSGAGXTESSFRGIGLE

SEQ ID NO: 108749 - protein, 67 aa, Setaria italica
  Transcript Sequence Number=SeqID_42775
  Pfam annotation: Domain name=PSK; Domain location=5-66; Score=-10.9; E_value=0.1; Accession=PF06404.4; Description=Phytosulfokine precursor protein (PSK)
  Subcellular localization annotation: CTP_CleavageSite=30; ConfidenceScore=5.14e-01
LGKALSSLGSSHGAGTAATPEPCGGGGGARGSAGSRGSAGTGEARCETARWAEMHTDYIYTQDVKHP

SEQ ID NO: 108750 - protein, 59 aa, Setaria italica
  Transcript Sequence Number=SeqID_42776
  Subcellular localization annotation: CTP_CleavageSite=42; ConfidenceScore=5.60e-01
PKDSKQPNQSTKPSMSPTTVRLNFDRINRTAKRKSGKRISVRTNNINERNTAPPRYDWE

SEQ ID NO: 108751 - protein, 146 aa, Setaria italica
  Transcript Sequence Number=SeqID_42777
  Gene Ontology: Cellular component=integral to membrane
  Homolog annotation: Hit_ID=B9RCQ1; Match level="QueryCoverage=100%, HitCoverage=32%, E-value=1e-46, Identity=60%"; Hit description=Amino acid transporter, putative
AGLSKNVPPKDYSLSSSKSEQTFDAFLSISILASVFGNGILPEIQATLAPPAAGKMMKALVLCYSVIVFTFFLSSITGYWAFGSHVQSNVLKSLMPDSGPALAPTWLLGVAVLFVLLQLLAIGLVYSQVAYEIMEKSSADAAQDRF

SEQ ID NO: 108752 - protein, 94 aa, Setaria italica
  Transcript Sequence Number=SeqID_42778
  Gene Ontology: Mol. function=oxidoreductase activity; Cellular component=mitochondrial respiratory chain; Biological process =respiratory gaseous exchange
  Homolog annotation: Hit_ID=Q8GT70; Match level="QueryCoverage=98%, HitCoverage=28%, E-value=8e-46, Identity=92%"; Hit description =Alternative oxidase
  Pfam annotation: Domain name=AOX; Domain location=1-94; Score=-38.8; E_value=6.7e-11; Accession=PF01786.9; Description=Alternative oxidase
REWKWSCFRPWDTYTSDTSIDVKKHHEPTTLPDKAAYLMVKSLRVPMDLFFQRRHASHALLLETVAAVPGMVGGMLLHLRSLRRFEHSGGWIRA

SEQ ID NO: 108753 - protein, 175 aa, Setaria italica
  Transcript Sequence Number=SeqID_42779
  Gene Ontology: Cellular component=chloroplast
  Homolog annotation: Hit_ID=B6U2N6; Match level="QueryCoverage=92%, HitCoverage=35%, E-value=7e-64, Identity=77%"; Hit description=Amino acid/polyamine transporter II
  Subcellular localization annotation: CTP_CleavageSite=51; ConfidenceScore=5.09e-01
CRSARGGGGGGRLLVVSGKQLFVVLVALVILPTTWLRSLGVLAYVSASGVLASAVVVVCVLWAAVADGVGFRGQGRMLNVSGLPTALGLYTFCYCGHAIFPTLSNSMKEKKKFSKVLVICFAACTLNYGSMAILGYLMYGDDVKSQVTLNLPEGNISSKLAIYTTLISPFSKYAC

SEQ ID NO: 108754 - protein, 191 aa, Setaria italica
  misc_feature (100)..(100): Xaa can be any naturally occurring amino acid
  Transcript Sequence Number=SeqID_42780
  Subcellular localization annotation: CTP_CleavageSite=75; ConfidenceScore=5.85e-01
ASSAPAFAFAKSTSATPTTPVSLATSQAAPAPSLFSNTSAAGSTSATTSGFSFVSSSAASTPTLASVSVTGASTVASATAAAATSGSLFPTASTSGFSFXVAPSSSSAAAATATTTTVTSASTSAGMTTTSPLTGTTGFPSFNLQTTTPASTSSSFGVSNTAASTSATSTSTSQATSAAVQASSTGARLTN

SEQ ID NO: 108755 - protein, 282 aa, Setaria italica
  Transcript Sequence Number=SeqID_42781
  Gene Ontology: Mol. function=structural constituent of nuclear pore; Cellular component=nuclear pore; Biological process=positive regulation of epidermal growth factor receptor signaling pathway
  Homolog annotation: Hit_ID=B9RD41; Match level="QueryCoverage=73%, HitCoverage=25%, E-value=2e-84, Identity=70%"; Hit description =Structural constituent of nuclear pore, putative
  Pfam annotation: Domain name=Nsp1_C; Domain location=55-184; Score =28.9; E_value=7.5e-07; Accession=PF05064.5; Description=Nsp1-like C -terminal region
  Subcellular localization annotation: CTP_CleavageSite=55; ConfidenceScore=6.00e-01
MTTTSPLTGTTGFPSFNLQTTTPASTSSSFGVSNTAASTSATSTSTSQATSAAVQASSTGAATTTAITPAASQAPKLPSEIVGKSVEEIIRDWNNELQDRTAKFRKHATAIAEWDRRILQNRNVLIRLEAEVAKVVETQTGLERQLELIETHQREVDKALQGMEEEAERIFQDERVLLREDEAASARDTMYEQAEVVEHELQHMTEQVKSIIQTMNATQGAELEAADSMTPFDVAVRILDNQLRSLMWIDEKVNEFSGRIQRLPNNSASAERDSGIPRFWLS

SEQ ID NO: 108756 - protein, 349 aa, Setaria italica
  Transcript Sequence Number=SeqID_42782
  Subcellular localization annotation: CTP_CleavageSite=56; ConfidenceScore=5.84e-01
ASSAPTFGSSLFGASPAAAPASAAASSPFGFGSTGFSFGQATAAASSVASAPSLFRATPAASSAGTTPSLFGAATSATSSPGLFGAASAPASSPGLFGASATGSATTTPGLFGATTSAATTPGLFGATSAAATTPNLFGATSAAATTPSLFGAASSAASTPSLFSGASTGFGFGSSASGSTTTTAAASAPAFGFSFSSGAAVSSTPSTTASAPALGFGGATGSSLFASTTSAPLFSTTNASSPAPAATTTPSFGFSASPATTTSGPSFGFTPSPASATTGSAAPSLFSSASSAPAFAFAKSTSATPTTPVSLATSQAAPAPSLFSNTSAAATAAAATSGSLFPTASFLT

SEQ ID NO: 108757 - protein, 130 aa, Setaria italica
  misc_feature (125)..(125): Xaa can be any naturally occurring amino acid
  Transcript Sequence Number=SeqID_42783
  Gene Ontology: Mol. function=cation transmembrane transporter activity; Cellular component=membrane
  Homolog annotation: Hit_ID=Q84NH0; Match level="QueryCoverage=50%, HitCoverage=15%, E-value=3e-17, Identity=66%"; Hit description=Zinc transporter
  Subcellular localization annotation: CTP_CleavageSite=36; ConfidenceScore=5.34e-01
FLLPTPSLPEAETRAAFVPSLRLGRVGFSTPPRTPRCSAPAPLAGRRRGEARNHEMESHNSSHHQIAEVKMDISPSASGAAGNKICRGAACDFSDASNTSKDAKERFASMRKLIIAVILCIIFIXVEVVG

SEQ ID NO: 108758 - protein, 78 aa, Setaria italica
  Transcript Sequence Number=SeqID_42784
  Subcellular localization annotation: CTP_CleavageSite=26; ConfidenceScore=5.07e-01
TCYVTVTITSLLFSFLLLSLDTNKLLASSFFSMLVVAGFPIAYGISTVHLSSSLYLCIDLYLVFRWKAIIHHIIRLLK

SEQ ID NO: 108759 - protein, 199 aa, Setaria italica
  Transcript Sequence Number=SeqID_42785
  Gene Ontology: Mol. function=cation transmembrane transporter activity; Cellular component=membrane; Biological process=zinc ion transport
  Homolog annotation: Hit_ID=Q84NH0; Match level="QueryCoverage=79%, HitCoverage=38%, E-value=2e-77, Identity=91%"; Hit description=Zinc transporter
TSPSCLRSSLSPSSSGRRGWEARNHEMESHNSSHHQIAEVKMDISPSASGAAGNKICRGAACDFSDASNTSKDAKERFASMRKLIIAVILCIIFMTVEVVGGIKANSLAILTDAAHLLSDVAAFAISLFSLWAAGWEATPQQSYGFFRIEILGALVSIQLIWLLAGILVYEAIVRLINESDEVQGSLMFAVSVFWIVWH

SEQ ID NO: 108760 - protein, 83 aa, Setaria italica
  misc_feature (6)..(6): Xaa can be any naturally occurring amino acid
  misc_feature (15)..(15): Xaa can be any naturally occurring amino acid
  Transcript Sequence Number=SeqID_42786
  Gene Ontology: Mol. function=cation transmembrane transporter activity; Cellular component=membrane; Biological process=cation transport
  Homolog annotation: Hit_ID=B6TAC6; Match level="QueryCoverage=100%, HitCoverage=19%, E-value=1e-35, Identity=89%"; Hit description=Metal tolerance protein A2
VLMESXPREIDATRXSRGGVCEMDGVVAVHELHIWAITVGKVLLACHVTIAREADADQILDKVIGYIKTEYNISHVTIQIERE

SEQ ID NO: 108761 - protein, 312 aa, Setaria italica
  Transcript Sequence Number=SeqID_42787
  Gene Ontology: Mol. function=cation transmembrane transporter activity; Cellular component=membrane; Biological process=cation transport
  Homolog annotation: Hit_ID=B6TAC6; Match level="QueryCoverage=96%, HitCoverage=71%, E-value=1e-117, Identity=76%"; Hit description =Metal tolerance protein A2
  Pfam annotation: Domain name=Cation_efflux; Domain location=3-312; Score=99.9; E_value=8.9e-27; Accession=PF01545.13; Description =Cation efflux family
SRVLLLSIRPIDGFFRIEILGALVSIQLIWLLAGILVYEAIVRLINESDEVQGSLMFAVSAFGLFVNIIMAVLLGHDHGHGHGHSHGHGHSHDHGHGDSDDHSHHEEQEQGHVHRHEHSHGSSITVTTHHHHHPSTGQHHDAEEPLLKHEAGCEGTQSAAKAAKKPRRNINVHSAYLHVIGDSIQSVGVMIGGALIWYKPEWKIIDLICTLIFSVVVLFTTIRMLRNILEVLMESTPREIDATRLERGLCEMDGVVAVHELHIWAITVGKVLLACHVTIAREADADQILDKVIGYIKTEYNISHVTIQIERE

SEQ ID NO: 108762 - protein, 100 aa, Setaria italica
  Transcript Sequence Number=SeqID_42788
  Homolog annotation: Hit_ID=B6SSM9; Match level="QueryCoverage=95%, HitCoverage=28%, E-value=1e-20, Identity=64%"; Hit description =Legume lectins beta domain containing protein
  Subcellular localization annotation: CTP_CleavageSite=47; ConfidenceScore=5.63e-01
SMPSPGARVQYRTPIVFSSAPGLTFSTYFAFALPATASSLAFFLTPSAATHEPPALAVVFSEHRIRVDLAGRAARQANYSPTATATATRHAWIDYNATSA

SEQ ID NO: 108763 - protein, 72 aa, Setaria italica
  Transcript Sequence Number=SeqID_42789
  Gene Ontology: Mol. function=nucleotide binding; Biological process =defense response
  Homolog annotation: Hit_ID=Q53LS4; Match level="QueryCoverage=93%, HitCoverage=7%, E-value=1e-13, Identity=52%"; Hit description=NB-ARC domain containing protein, expressed
PKLQRYHLTFKPQSNSDDFRFGLEHLASLQNVTVVIVPTCARNVDISVAETTIRNATNIHPNQPIVEIHTWQ

SEQ ID NO: 108764 - protein, 116 aa, Setaria italica
  Transcript Sequence Number=SeqID_42790
  Gene Ontology: Mol. function=nucleoside-triphosphatase activity; Cellular component=intracellular; Biological process=ubiquitin -dependent protein catabolic process
  Homolog annotation: Hit_ID=UPI000173913E; Match level="QueryCoverage =94%, HitCoverage=17%, E-value=5e-44, Identity=77%"; Hit description =MCM9; ATP binding / DNA binding / DNA-dependent ATPase/ nucleoside -triphosphatase/ nucleotide binding
  Pfam annotation: Domain name=MCM; Domain location=1-93; Score=-206.0; E_value=0.00047; Accession=PF00493.15; Description=MCM235 family
NASDVKWTLPKLRRYINYVKRFKPVLTKEAERVISSYYQLQRRSGTHNAARTTVRMLESLIRLAQAHARLMFRNEVEQLDAIAAILCIESSTTTSPIVDIVGNALHSNFTDNPDEE

SEQ ID NO: 108765 - protein, 89 aa, Setaria italica
  Transcript Sequence Number=SeqID_42791
  Gene Ontology: Mol. function=binding
GADALVPYSPDSNLQLQLIDDDDIGVGSERYGHESKRDMGVMRVMIFLPPRYHLLFLMEVGCASTLVRIRTDHWPCLAYVDEYLEALIS

SEQ ID NO: 108766 - protein, 184 aa, Setaria italica
  Transcript Sequence Number=SeqID_42792
  Gene Ontology: Mol. function=helicase activity; Cellular component =mitochondrion
  Homolog annotation: Hit_ID=B9SY25; Match level="QueryCoverage=98%, HitCoverage=48%, E-value=2e-51, Identity=36%"; Hit description =Pentatricopeptide repeat-containing protein, putative
  Pfam annotation: Domain name=PPR; Domain location=11-45; Score=19.2; E_value=0.017; Accession=PF01535.12; Description=PPR repeat
  Pfam annotation: Domain name=PPR; Domain location=116-150; Score =30.5; E_value=6.9e-06; Accession=PF01535.12; Description=PPR repeat
  Pfam annotation: Domain name=PPR; Domain location=46-80; Score=39.5; E_value=1.3e-08; Accession=PF01535.12; Description=PPR repeat
  Pfam annotation: Domain name=PPR; Domain location=81-115; Score=38.7; E_value=2.3e-08; Accession=PF01535.12; Description=PPR repeat
  Pfam module annotation: Pfam domain module=PPR::PPR::PPR::PPR; Domain location=11-45::116-150::46-80::81-115
QRSHGLVPDAATYGPFLRSACAAKDARAALRVLDRMHMHNLTPNVFTYNAVIRLLCELGEVDEAYNILNEMANNGEMPDIWSYNTLLNAHCKLKEVNKALRLISRMDKESCLPDRHSYNMILKMLVSVGRVDRAIEVWDGMEKRGFHPGAATYAVMIHGLSCKKDRAEEACSYFLRMVDEGIPA

SEQ ID NO: 108767 - protein, 277 aa, Setaria italica
  Transcript Sequence Number=SeqID_42793
  Pfam annotation: Domain name=DUF1618; Domain location=77-206; Score =3.9; E_value=1.2e-05; Accession=PF07762.6; Description=Protein of unknown function (DUF1618)
MPATCNLRSVGLTPGLFAGDYVIAELQVGMRRAKLLRFFSRERLWIETDLPSPLSSMDREWAPSGVVAHEGRLWFLDLSWGLISCDPTTILPALRFHNLPPGRYIHEAKPFLHTIRCISVSNQMLRYVDIARDLDLDGRAAERKVVVWTGIPDPVSGDRDCSVRWLKTYEMSFKEIWNDPSYKDTQLPKMIPEIVLVNPRSPNVVYFFLRRSLFGVDVPAHRVVGFVKDAHKLVAPRCRRCVLPWDLAPSIANGLVEAIVPFQEQCGSSSTTPGTSD

SEQ ID NO: 108768 - protein, 69 aa, Setaria italica
  Transcript Sequence Number=SeqID_42794
  Subcellular localization annotation: CTP_CleavageSite=37; ConfidenceScore=5.14e-01
YHGRHKRTHSADICVPNHDSSSNTPDLSSGNKNTAASAMQLLQPDNATTRASVCLSCNLLTILLTPTHY

SEQ ID NO: 108769 - protein, 120 aa, Setaria italica
  Transcript Sequence Number=SeqID_42795
EGRKPEAGPPGGDKDETPVSTTTISQDMGRSQSFNSMQHGTEAPSPPVDKDFSRRDSFSALQPGNNVHRQNTEFNDHPSTQSPYNYSPPAPSQPQHPSPSQSYSSPSYQATDYPSSDSHK

SEQ ID NO: 108770 - protein, 144 aa, Setaria italica
  misc_feature (110)..(110): Xaa can be any naturally occurring amino acid
  misc_feature (133)..(133): Xaa can be any naturally occurring amino acid
  Transcript Sequence Number=SeqID_42796
  Gene Ontology: Mol. function=protein dimerization activity; Cellular component=nucleus; Biological process=regulation of transcription, DNA-dependent
  Homolog annotation: Hit_ID=Q0JKG7; Match level="QueryCoverage=91%, HitCoverage=47%, E-value=4e-53, Identity=78%"; Hit description=Auxin- responsive protein IAA5
  Pfam annotation: Domain name=AUX_IAA; Domain location=2-144; Score =113.7; E_value=6.1e-31; Accession=PF02309.8; Description=AUXIAA family
FPPPRRRPAAKAQVVGWPPVRNYRKNTLAASASKTKAPAEEAASGGGGPMYVKVSMDGAPYLRKVDIKMYSSYEDLSMALEKMFSCFITGQSGLRKSSTKDRLTKWLQDXDGLQDQEYVLTYEDKDGDWMLVXDLPWDLFSTIC

SEQ ID NO: 108771 - protein, 433 aa, Setaria italica
  Transcript Sequence Number=SeqID_42797
  Gene Ontology: Mol. function=protein binding
  Homolog annotation: Hit_ID=Q00V18; Match level="QueryCoverage=20%, HitCoverage=40%, E-value=5e-20, Identity=54%"; Hit description =Putative LYST-interacting protein LIP5 [Oryza sativa (ISS)
  Pfam annotation: Domain name=DUF605; Domain location=1-426; Score =351.7; E_value=1.4e-102; Accession=PF04652.8; Description=Protein of unknown function, DUF605
NSILISLMNQLEKDKKTLTLGPDDNLHLEGFALNVFAKADKQDRAGRADINTAKTFYAASIFFEILNQFGELQPDIEQKQKYAIWKAAEIRKALKEGRKPEAGPPGGDKDETPVSTTTISQDMGRSQSFNSMQHGTEAPSPPVDKDFSRRDSFSALQPGNNVHRQNTEFNDHPSTQSPYNYSPPAPSQPQHPSPSQSYSSPSYQATDYPSSDSHKQNPNHSSPPYTSTDYPTNEVHKPPSNYSPPPYTRTDYPSNDGYNPHSNDKPDVSPYPQTYQPPPYTIEPQHTSQNFYSTEAPAAPYNYPNFQSYPSFQDSTSPSVPTHQSPSVPTHQSSFYSASDGPAATSYSPASNPSAPTHYHSTADSSPQVTPAVPPASQYKYDSTYQPAVEKIAEAHKAARFAVGALAFDDVSVAVDHLKRALDLLTNPSAETH

SEQ ID NO: 108772 - protein, 85 aa, Setaria italica
  Transcript Sequence Number=SeqID_42798
  Gene Ontology: Mol. function=protein dimerization activity; Cellular component=nucleus; Biological process=regulation of transcription, DNA-dependent
  Homolog annotation: Hit_ID=Q0JKG7; Match level="QueryCoverage=98%, HitCoverage=30%, E-value=3e-37, Identity=85%"; Hit description=Auxin- responsive protein IAA5
  Pfam annotation: Domain name=AUX_IAA; Domain location=1-77; Score= -58.3; E_value=3.2e-05; Accession=PF02309.8; Description=AUXIAA family
PVIITGQSGLRKSSTKDRLTNGSKADGLQDQEYVLTYEDKDGDWMLVGDLPWDLFSTICRKLKIMRGSDAVGIAPRTIEQTGQNK

SEQ ID NO: 108773 - protein, 83 aa, Setaria italica
  Transcript Sequence Number=SeqID_42799
  Gene Ontology: Mol. function=zinc ion binding
  Homolog annotation: Hit_ID=Q7XDA5; Match level="QueryCoverage=90%, HitCoverage=25%, E-value=4e-22, Identity=76%"; Hit description=Zinc finger, C3HC4 type family protein, expressed
MISILAQERLLGFALGSVSMGGFVLHQRRAIYRSLAEADGSSYFYQPGEIISRKSSPELARVWNKAVDETLGRLVVYLSSRGW

SEQ ID NO: 108774 - protein, 68 aa, Setaria italica
  Transcript Sequence Number=SeqID_42800
SATPSHDIPFGLKCLSSPLTIYLNSTQVEGMDYLQGTFIKDNQLKIEILPEKLKWQNQEHNSSSLCFV

SEQ ID NO: 108775 - protein, 119 aa, Setaria italica
  Transcript Sequence Number=SeqID_42801
ANHQEKPTTSPPPPSPLQSQAAEGGGARPRLPGVGGAHAGGAGYPNPPEAAVPDAATLRDQWRFAVRQYSRWYSHAWGTAILAGAAFFALGWLVKGSNPLPSRAEPHDTNANSVAKEEG

SEQ ID NO: 108776 - protein, 165 aa, Setaria italica
  Transcript Sequence Number=SeqID_42802
QDATYARELTEANEPVGRTVKPAGGPGFKDVKWLLGGHKHGGGYGNEGGYGGGYGNNGGYGGGNDPPSYGGGYGPGYGGGYDGPGYGGGYKHHVHGGGGYGPGYGGGYGPSYGGGNSCPPCGSGNAGPGYGGGYGGGNGGGYRSGSGYGGGGGYGGGYGSSGTSP

SEQ ID NO: 108777 - protein, 148 aa, Setaria italica
  Transcript Sequence Number=SeqID_42803
APRCDKLPILTLGANLHFSPHLPPSGSRKSSLDRSKEDTLPSISNHPFLDYFLRIIPFQKSAQILLLHIHSIALSACLAARRLSAAAAPATRAAAPPWPLAPLKPHAMARRCPTREARGSVLLVPPTSARSKVKKYGKRKLEQNLNKK

SEQ ID NO: 108778 - protein, 64 aa, Setaria italica
  Transcript Sequence Number=SeqID_42804
RQVPRSPSLVEQVSKIVRNYYDTLLIICKLFHYFILLIICKSISLFHSFLIRRIRKESTCKYHW

SEQ ID NO: 108779 - protein, 193 aa, Setaria italica
  Transcript Sequence Number=SeqID_42805
  Gene Ontology: Mol. function=protein serine/threonine kinase activity; Cellular component=ubiquitin ligase complex; Biological process=ubiquitin-dependent protein catabolic process
  Homolog annotation: Hit_ID=B9RDS8; Match level="QueryCoverage=97%, HitCoverage=59%, E-value=3e-48, Identity=52%"; Hit description =Receptor protein kinase, putative
  Pfam annotation: Domain name=U-box; Domain location=145-192; Score= -3.1; E_value=0.0013; Accession=PF04564.7; Description=U-box domain
LLLESSVTGSDAHFTSQPMGTPAYMDPEFFGTGELTPQSDTYSFGVTILRLLTGMAPLRLIRVVQGALNDDDLHSVLDHSAGEWPLVQAEQLARIGLQCSELSRQKRPDLQRDVWRVIGPIIKEDHVPLSQSFRSMFSESSRTVAMPSYFLCPISQVLIRDPQVAADGFTYEADALRRWLDSGHDTSPMTNKT

SEQ ID NO: 108780 - protein, 206 aa, Setaria italica
  Transcript Sequence Number=SeqID_42806
  Homolog annotation: Hit_ID=B9R8H7; Match level="QueryCoverage=100%, HitCoverage=77%, E-value=6e-70, Identity=40%"; Hit description =Pentatricopeptide repeat-containing protein, putative
  Pfam annotation: Domain name=PPR; Domain location=133-167; Score =43.4; E_value=9e-10; Accession=PF01535.12; Description=PPR repeat
  Pfam annotation: Domain name=PPR; Domain location=168-202; Score=1.8; E_value=5.5; Accession=PF01535.12; Description=PPR repeat
  Pfam annotation: Domain name=PPR; Domain location=32-66; Score=34.9; E_value=3.3e-07; Accession=PF01535.12; Description=PPR repeat
  Pfam module annotation: Pfam domain module=PPR::PPR::PPR; Domain location=133-167::168-202::32-66
VKSALVDMYAKCGCIGDAKAGFEQLCDVDDVVLWTAMIAGHVQNGELEEALVVSAKMDKEGIMPSNLTITSVLRACACLAALEPGKQLHAQIIKCGFGLGGSVGSALSTMYSKCGNLEDGMVVFRSMPDKDVIAWNSIISGFSQNGCGNGALDLFEEMKLEGTAPDHITFINVLCACSHMGLVDRGWFYFRAMTKDYDLIPRLDHY

SEQ ID NO: 108781 - protein, 84 aa, Setaria italica
  Transcript Sequence Number=SeqID_42807
  Pfam annotation: Domain name=Transposase_23; Domain location=4-70; Score=-14.7; E_value=0.054; Accession=PF03017.6; Description =TNP1ENSPM transposase
FNFRIVQLRHENKPVAKGNLVTTDSTHVVGGNMLGYEYVAVAVHIVSDIGDEDLPRPYDNICTVRDAIGYVIAWPRSRVSLSPY

SEQ ID NO: 108782 - protein, 136 aa, Setaria italica
  Transcript Sequence Number=SeqID_42808
  Gene Ontology: Mol. function=protein serine/threonine kinase activity; Cellular component=chromatin; Biological process=protein amino acid phosphorylation
  Homolog annotation: Hit_ID=B9A1H1; Match level="QueryCoverage=97%, HitCoverage=12%, E-value=6e-27, Identity=50%"; Hit description =Putative LRR-kinase protein
  Pfam annotation: Domain name=LRR_1; Domain location=105-127; Score =4.4; E_value=44; Accession=PF00560.25; Description=Leucine Rich Repeat
  Pfam annotation: Domain name=LRR_1; Domain location=2-24; Score=7.3; E_value=12; Accession=PF00560.25; Description=Leucine Rich Repeat
  Pfam annotation: Domain name=LRR_1; Domain location=26-48; Score=8.2; E_value=8.1; Accession=PF00560.25; Description=Leucine Rich Repeat
  Pfam annotation: Domain name=LRR_1; Domain location=50-78; Score=0.2; E_value=2.7e+02; Accession=PF00560.25; Description=Leucine Rich Repeat
  Pfam annotation: Domain name=LRR_1; Domain location=80-102; Score =10.5; E_value=3; Accession=PF00560.25; Description=Leucine Rich Repeat
  Pfam module annotation: Pfam domain module=LRR_1::LRR_1::LRR_1::LRR _1::LRR_1; Domain location=105-127::2-24::26-48::50-78::80-102
  Subcellular localization annotation: CTP_CleavageSite=62; ConfidenceScore=5.15e-01
LSIKHFGVGENQFTGPLPLSLTNLTRLQVLLVGANSFTGVVPSKLGRLHNLQVFVLELNKFEANNEKKWEFISSLANCSRLQMLSFGQNRFAGKLPRSLANLSTNLQRLKASSVNISGFIPTMIGNLANLENLILV

SEQ ID NO: 108783 - protein, 179 aa, Setaria italica
  misc_feature (78)..(78): Xaa can be any naturally occurring amino acid
  Transcript Sequence Number=SeqID_42809
ARPLQCALLYALDPLPYIARSLLSGADKEPATSNFLSPIIAAPTEPAWRSRRNCSWAPSSISGAPAASSSEMPSSEPXPRSSRSTRSSGGSPPSTPPLASTLHARAAAEGRRSHQEEVAATWPSLAASSSPSGAPATSSSRCTRAAPSSSSPDLMTARHTEMSPQEKCGCLAASHLLQI

SEQ ID NO: 108784 - protein, 123 aa, Setaria italica
  Transcript Sequence Number=SeqID_42810
  Gene Ontology: Mol. function=RNA-directed DNA polymerase activity; Cellular component=nucleus; Biological process=RNA-dependent DNA replication
  Homolog annotation: Hit_ID=Q2QUC2; Match level="QueryCoverage=95%, HitCoverage=6%, E-value=2e-32, Identity=52%"; Hit description =Retrotransposon protein, putative, unclassified
RRLRGASTAPWLLIRDFNETMWGYEHFSACPRPERQMAAFREVLTYCGLTDLGFVGLPFIYDNGRDGNANVKDRLDRAVADTNWREIFGDATLFHLVSSRSDHCPLLLEIKKESWERHKPSQR

SEQ ID NO: 108785 - protein, 106 aa, Setaria italica
  Transcript Sequence Number=SeqID_42811
TKKLINGDWNTYDPFKSYGEWNTYFLFHDHALAYDPSESDDDVLDDYEMYQIEDEDVDEPIDEHSMRMEEPGEIPEDEEAMMLDYDAILYEQELDEHKPDEDSKMI

SEQ ID NO: 108786 - protein, 66 aa, Setaria italica
  Transcript Sequence Number=SeqID_42812
NLCMVAKSSPSIFHTHLKDIIDIWFGCWDKEENMLPRTARKSYSKGQVIHLPILLWFYIMWEMVLL

SEQ ID NO: 108787 - protein, 148 aa, Setaria italica
  Transcript Sequence Number=SeqID_42813
  Gene Ontology: Mol. function=transferase activity, transferring glycosyl groups; Biological process=metabolic process
  Homolog annotation: Hit_ID=C0LNQ9; Match level="QueryCoverage=95%, HitCoverage=29%, E-value=4e-54, Identity=71%"; Hit description=UDP -glucosyltransferase
WRTTNAPPPFPEELIETVRRRGKIVAWSPQREVLAHPAVGGFWTHCGWNSTLEAVCEGVPMLVHPCFGDQTVSARYVTHRWGTGLDVGRVFERTAMARTIRRLMARELGPQAPRERARLLMRQARHCVEEGGPASSALDDLVEYMWGL

SEQ ID NO: 108788 - protein, 599 aa, Setaria italica
  Transcript Sequence Number=SeqID_42814
  Gene Ontology: Cellular component=cytoplasm
  Homolog annotation: Hit_ID=A1Y2B7; Match level="QueryCoverage=96%, HitCoverage=96%, E-value=0.0, Identity=68%"; Hit description=Protein SUPPRESSOR OF GENE SILENCING 3 homolog
  Pfam annotation: Domain name=XS; Domain location=270-390; Score=-5.6; E_value=1.8e-05; Accession=PF03468.6; Description=XS domain
  Pfam annotation: Domain name=zf-XS; Domain location=201-239; Score =49.6; E_value=1.2e-11; Accession=PF03470.6; Description=XS zinc finger domain
  Pfam module annotation: Pfam domain module=XS::zf-XS; Domain location= 270-390::201-239
MSGSGDRRGGGPPGSDAGWETIGKKSKKPGQAAGKQWAPWGSTNAAPNTTRPAWGGNGSSQPSGTSWAQSSDRSAANRGNPRLPPQTRAMERELQAPRPIVTPPLANGWQWQSRSRPSASEGQQDDAPPPGGDPEEENVDGNDTSDDDDDLSDDISDEYDSDASEKSFETRKMNKWFKSFFEVLDTLSVEQINEQTRQWHCPACKNGPGAIDWYKGLQPLMTHARTKGSTRVKLHRELAALLEEELSRRGTSVVPAGEQFGKWKGLRESTDREIVWPPMVIVMNTLLEKDDDDKWKGMGNQELLDYFGEYAATKARHAYGPAGHRGMSVLIFESSAVGYMEAERLHRHFITQGTDRNTWQLRRVPFLPGGKRQLYGFLANKEDMETFNKHCQGKSRLKYEMRSHNEMVVIPMKQMSEDNQQLNYLKNKVVKTEQRSKAVEETLGVVTERLRETMKDMKIVKDKVQQKHMEHEQEMKYQEDFFHSQIESIHKITEAKEKEFEKLLQEERSKARRFDVDSGTTEDRRLRKEHVQKFIDGQVKDVAEFEAERDELIKAHEETKMKLKKEYMEKEVELEKELDAALTSLMEKHKPDTFQASSS

SEQ ID NO: 108789 - protein, 76 aa, Setaria italica
  Transcript Sequence Number=SeqID_42815
  Gene Ontology: Mol. function=naphthoate synthase activity; Biological process=menaquinone biosynthetic process
  Homolog annotation: Hit_ID=O22696; Match level="QueryCoverage=61%, HitCoverage=12%, E-value=4e-15, Identity=80%"; Hit description =Putative enoyl-CoA hydratase/isomerase
GVIILTGKGTKAFCSGGDQALRDSDGYVDFDSFGRLNVLDLQVSVRRAALTNLCTNILNYFWGTIFPRRTSFVLVL

SEQ ID NO: 108790 - protein, 337 aa, Setaria italica
  Transcript Sequence Number=SeqID_42816
  Gene Ontology: Mol. function=naphthoate synthase activity; Biological process=menaquinone biosynthetic process
  Homolog annotation: Hit_ID=B9SH93; Match level="QueryCoverage=100%, HitCoverage=97%, E-value=1e-148, Identity=76%"; Hit description =Naphthoate synthase, putative
  Pfam annotation: Domain name=ECH; Domain location=88-258; Score =232.5; E_value=1.1e-66; Accession=PF00378.12; Description=Enoyl-CoA hydrataseisomerase family
  Subcellular localization annotation: CTP_CleavageSite=64; ConfidenceScore=5.48e-01
MDAAERRLARVAGHLVPSFPVTHATTPPLVPSPTASSSSSSSSPAGDSYRRVHGDVPSEPPEWRAATDESGKEFVDIIYEKAVGEGIAKITINRPDRRNAFRPLTVKELMRAFNDARDDSSIGVIILTGKGTKAFCSGGDQALRDSDGYVDFDSFGRLNVLDLQVQIRRLPKPVIAMVAGYAVGGGHVLHMVCDMTIAADNAIFGQTGPKVGSFDAGYGSSIMSRLVGPKRAREMWFLSRFYTADEADKMGLVNTVVPLAELERETVKWCRQILRNSPMAIRVLKSALNAADDGHAGLQELGGNATLIFYGTEEAKEGKNAYMERRRPDFSKFPRKP

SEQ ID NO: 108791 - protein, 58 aa, Setaria italica
  Transcript Sequence Number=SeqID_42817
PNQVLANLHSGLHLWPGSPACNAACIASEQNGCTYSLAAVTDQPQILSHLNVCYFTLP

SEQ ID NO: 108792 - protein, 56 aa, Setaria italica
  Transcript Sequence Number=SeqID_42818
SQETKYWLYTREISFGSLLQREETTHRICQASLLLEMAAIDTNTNFGWRFSIRLNL

SEQ ID NO: 108793 - protein, 187 aa, Setaria italica
  Transcript Sequence Number=SeqID_42819
  Gene Ontology: Mol. function=electron carrier activity; Biological process=oxidation reduction
  Homolog annotation: Hit_ID=B9HL41; Match level="QueryCoverage=78%, HitCoverage=27%, E-value=2e-38, Identity=50%"; Hit description =Cytochrome P450
MELVFSSHQWLILPPLVLLCLLLSYLYTILWLRPERLRQKLRSQGVKGPKPSFLFGNIAEMRRIQKELAVPVQELEAKNTDKFSSDYTATIFPYFLHWSRIYGSIYLYSTGSIQALNITDPDMVKELANCKSLDLGKPSFLQKERGALLGMGILTSNGELWEHQRKVIAPEFFMEKVKVNESLKNLL

SEQ ID NO: 108794 - protein, 166 aa, Setaria italica
  Transcript Sequence Number=SeqID_42820
  Gene Ontology: Mol. function=electron carrier activity; Biological process=oxidation reduction
  Homolog annotation: Hit_ID=Q2RB99; Match level="QueryCoverage=99%, HitCoverage=26%, E-value=2e-63, Identity=68%"; Hit description =Cytochrome P450 family protein
ARTELLDVCQGKPIEFDMLRKLKMLTMVVQETLRLYPPAAFVTREALNDIKLGSLNIPEGTNIRIPIALVHRDPAIWGPNSDRFDPGRFANGIAGACKPPHMYMPFGVGTRTCAGQNLAMVELKVILSLLLSRFEFALSPKYVHCPAFRLTIEPGNGVPLILKKLY

SEQ ID NO: 108795 - protein, 70 aa, Setaria italica
  Transcript Sequence Number=SeqID_42821
  Gene Ontology: Mol. function=electron carrier activity
  Homolog annotation: Hit_ID=B9I787; Match level="QueryCoverage=88%, HitCoverage=12%, E-value=2e-12, Identity=53%"; Hit description =Cytochrome P450
ERERGTSAEIVVDESLRNFSADVISRTSFGSNFAAGKEIFNKIRQLQIAMAKQSILGVPGARYVEEIDLL

SEQ ID NO: 108796 - protein, 298 aa, Setaria italica
  misc_feature (22)..(22): Xaa can be any naturally occurring amino acid
  Transcript Sequence Number=SeqID_42822
  Gene Ontology: Mol. function=electron carrier activity; Biological process=oxidation reduction
  Homolog annotation: Hit_ID=Q2RB99; Match level="QueryCoverage=93%, HitCoverage=44%, E-value=1e-107, Identity=70%"; Hit description =Cytochrome P450 family protein
  Pfam annotation: Domain name=p450; Domain location=1-298; Score= -144.4; E_value=0.00011; Accession=PF00067.14; Description=Cytochrome P450
MFHTMSGSIYLYSTGSIQALNXTDPDMVKELANCKSLDLGKPSFLQKERGALLGMGILTSNGELWEHQRKVIAPEFFMEKVKGMLHVMVEAAMPMLTSWEKIFGREGGSAEIVVDESLRNFSADVISRTSFGSNFAAGKEIFNKIRQLQIAMAKQSILGVPGARYLPTKSNREIWSLDRSIRRLILNVAMKHEQDSVALSTDKDLLHSIIEGAKARHFASQTPEGFIIDNCKNIYFAGHETTSTTAAWCLMLLASHPEWQSRARTELLDVCQGKPIEFDMLRKLKMLTMVQVEEIDLL

SEQ ID NO: 108797 - protein, 219 aa, Setaria italica
  Transcript Sequence Number=SeqID_42823
  Gene Ontology: Mol. function=catalytic activity; Cellular component =membrane; Biological process=plant-type hypersensitive response
  Homolog annotation: Hit_ID=B6TB18; Match level="QueryCoverage=68%, HitCoverage=48%, E-value=7e-57, Identity=68%"; Hit description=Lipid phosphate phosphatase 3
  Subcellular localization annotation: CTP_CleavageSite=41; ConfidenceScore=5.34e-01
MMPISPTDRSAASKKKKRSSPPRRTEAPFGCVRYCQIGSASAAMASNEAMWGSTSSGGAAGPCAFPTVPRLLRSHVCDWIALFLLVAVDGALNLVESFHRFVGAGMMADLRYPMKTNTVPVWAVPLIAVIGPVVIFLMVYIRRRNVYDLHHAILGILFAVVITGVLTDAIKDAVGRPRPNFFWRCFPDGKAVYDNVTTGVICHGDPSAIKEGHKSFPSG

SEQ ID NO: 108798 - protein, 156 aa, Setaria italica
  misc_feature (80)..(80): Xaa can be any naturally occurring amino acid
  Transcript Sequence Number=SeqID_42824
  Gene Ontology: Mol. function=zinc ion binding
  Homolog annotation: Hit_ID=Q9ST50; Match level="QueryCoverage=98%, HitCoverage=17%, E-value=4e-69, Identity=79%"; Hit description =Transposase related protein
  Pfam annotation: Domain name=MULE; Domain location=34-134; Score =90.0; E_value=8.3e-24; Accession=PF10551.1; Description=MULE transposase domain
IPKPNAWKDGRQIFGRAFWCFPQSVEAFRHCRPVFSIDGMFLIGKYRGTLLIAISCDANNMLVALAFALVERENNDSWGXFLRLVRIHVVGPGRDVGVISDRHQGILHAVQEQIEGYAPLHHRWCTRHLAENLLRKDGVKDNFDLFQVAARQLEDY

SEQ ID NO: 108799 - protein, 124 aa, Setaria italica
  misc_feature (23)..(23): Xaa can be any naturally occurring amino acid
  Transcript Sequence Number=SeqID_42825
IKCWKQVKDSIPELPLSDGWGKXHSLFVKWKYVEAKAAAYYFHGLILDEGETDKAQEMAIAALQASEEFLNESKRASEAFHSAPPASRSPAPFGTTKYLLDMIPKDVQSKVQSYQDLYTQQIAS

SEQ ID NO: 108800 - protein, 130 aa, Setaria italica
  misc_feature (43)..(43): Xaa can be any naturally occurring amino acid
  Transcript Sequence Number=SeqID_42826
AAAYYFHGLILDEGETDKAQEMAIAALQASEEFLNESKRASEXAFHSAPPASRSPAPFGTTKYLLDMIPKDVQSKVQSYQDLYTQQIASNIGVSKIIATPPPLPDFPLALSPEDYELPQSDMLWKGANHL

SEQ ID NO: 108801 - protein, 42 aa, Setaria italica
  Transcript Sequence Number=SeqID_42827
RWSELLNVKHVKIDHDYQMKFSSWILLLIAEQKKLDRQFKNS

SEQ ID NO: 108802 - protein, 237 aa, Setaria italica
  Transcript Sequence Number=SeqID_42828
  Gene Ontology: Mol. function=protein serine/threonine kinase activity; Cellular component=plasma membrane; Biological process =protein amino acid phosphorylation
  Homolog annotation: Hit_ID=Q9SHI2; Match level="QueryCoverage=90%, HitCoverage=19%, E-value=2e-76, Identity=64%"; Hit description =Similar to leucine-rich receptor-like protein kinase
  Pfam annotation: Domain name=DUF2149; Domain location=3-95; Score= -17.6; E_value=0.075; Accession=PF09919.1; Description=Uncharacterized conserved protein (DU
  Pfam annotation: Domain name=Pkinase; Domain location=66-237; Score =13.1; E_value=2.8e-09; Accession=PF00069.17; Description=Protein kinase domain
  Pfam annotation: Domain name=Pkinase_Tyr; Domain location=66-236; Score=-11.3; E_value=5.6e-13; Accession=PF07714.9; Description =Protein tyrosine kinase
  Pfam module annotation: Pfam domain module=DUF2149::Pkinase::Pkinase _Tyr; Domain location=3-95::66-237::66-236
EKIISIASIVIALVSLVLIAVVCWAFRAKIPELVSSDERKTGFSGPHYCMKERVTYQELMKATEDFSESAVIGRGACGTVYKAVMPDGRKIAVKRLKSQGEGSNIDRSFRAEITTLGNVRHRNIVKLYGFCSHQDSNLILYEYMENGSLGELLHGSKDAYLLDWDTRYRIALGAAEGLRYLHSDCKPQVIHRDIKSNNILLDAMMEAHVGDFGLAKLIDISNSRTMSAVAGSYGYIA

SEQ ID NO: 108803 - protein, 217 aa, Setaria italica
  misc_feature (191)..(191): Xaa can be any naturally occurring amino acid
  Transcript Sequence Number=SeqID_42829
  Gene Ontology: Cellular component=plasma membrane
  Pfam annotation: Domain name=DUF632; Domain location=1-217; Score =229.5; E_value=8.6e-66; Accession=PF04782.4; Description=Protein of unknown function (DUF632)
MNAGSHASTLDRLYAWERKLYDEVKASSAICRQYDEKCRQLRHQESRGESQMSIDKTRAVVKDLHSRILVAIQRIDMISKNIEDLRDKELQPQLEELIGSLTRMWKTMLECHWNQHEIIKLVCNSGSMKISIRSESQLQATLLLQVELSTLCSNFQKWISSHRAYLNSLNSWLLKCVKSLQRRRKSSRKKXVEADPITKYAVAPIFKTCESWINLLD

SEQ ID NO: 108804 - protein, 197 aa, Setaria italica
  Transcript Sequence Number=SeqID_42830
  Gene Ontology: Cellular component=plasma membrane
  Homolog annotation: Hit_ID=A4ZGR0; Match level="QueryCoverage=93%, HitCoverage=70%, E-value=5e-19, Identity=34%"; Hit description =Transcription factor bZIP34 (Fragment)
  Pfam annotation: Domain name=DUF632; Domain location=1-118; Score= -79.4; E_value=0.00051; Accession=PF04782.4; Description=Protein of unknown function (DUF632)
VFLCNSGRKISIRSESQLQATLLLQVELSTLCSNFQKWISSHRAYLNSLNSWLLKCVKSLQRRRKSSRKKKVEADPITKYAVAPIFKTCESWINLLDDLPTKDLEDAIKGLATDINRSMPHQEKRRGSSKLTFSLSHSGRLNGELGDIHRSDPPMDLQSSLEMFLGKLENFSEVSLQKYKDLKEEIDEAKTNYEKWK

SEQ ID NO: 108805 - protein, 296 aa, Setaria italica
  Transcript Sequence Number=SeqID_42831
  Gene Ontology: Cellular component=plasma membrane
  Homolog annotation: Hit_ID=Q0GPD1; Match level="QueryCoverage=71%, HitCoverage=41%, E-value=1e-30, Identity=38%"; Hit description=BZIP transcription factor bZIP114 (Fragment)
  Pfam annotation: Domain name=DUF632; Domain location=127-296; Score =50.0; E_value=9.5e-12; Accession=PF04782.4; Description=Protein of unknown function (DUF632)
MGVNSQSERPKDGMIVDSQAERSKDGTRVDSQAERPKDNMRLDSQPERSKDGTRVDSQAEKPIDDAGVDSQTVRPKDDKRALDISMYESDGTPVASPVKEISTSTASLPMNGKSKEPFRDVRNVVRDLNSCMKEIEILFIKASDSGKEVPRMLEADKVNFRPLLPEEKAPGSTASGFFAKLFACCREEVPVPQPPPQAEVKYLTWHRSMSSLSSSSRNPLGTTTKDDTDGLTGNIFSGVYMNAGSHASTLDRLYAWERKLYDEVKASSAICRQYDEKWQLSFSLSRFTLLFCNTCI

SEQ ID NO: 108806 - protein, 102 aa, Setaria italica
  Transcript Sequence Number=SeqID_42832
  Gene Ontology: Mol. function=aminoacyl-tRNA ligase activity; Cellular component=cytoplasm; Biological process=tRNA aminoacylation for protein translation
  Homolog annotation: Hit_ID=B9F159; Match level="QueryCoverage=72%, HitCoverage=11%, E-value=1e-34, Identity=95%"; Hit description=Lysyl- tRNA synthetase
RFSNRSFLLGKKRYTIGKRKCGCQSNHRQVADVFRTRAKVVSEIRKTMESFGFIEVETPVLQGAAGGAEARPFITYHNSLQRDLYLRIATELHLKRMLVGGL

SEQ ID NO: 108807 - protein, 73 aa, Setaria italica
  Transcript Sequence Number=SeqID_42833
  Gene Ontology: Mol. function=aminoacyl-tRNA ligase activity; Cellular component=cytoplasm; Biological process=tRNA aminoacylation for protein translation
  Homolog annotation: Hit_ID=Q6K1T2; Match level="QueryCoverage=80%, HitCoverage=10%, E-value=3e-26, Identity=93%"; Hit description=Lysyl- tRNA synthetase
MLDITVGELSVYMKNFEILTKSLLPLPDKYHGLTDVDKRYRQRYVDMIANPEVADVFRTRAKVLATWSAEFAF

SEQ ID NO: 108808 - protein, 442 aa, Setaria italica
  Transcript Sequence Number=SeqID_42834
  Gene Ontology: Mol. function=aminoacyl-tRNA ligase activity; Cellular component=cytoplasm; Biological process=tRNA aminoacylation for protein translation
  Homolog annotation: Hit_ID=Q6K1T2; Match level="QueryCoverage=99%, HitCoverage=74%, E-value=0.0, Identity=88%"; Hit description=Lysyl -tRNA synthetase
  Pfam annotation: Domain name=tRNA-synt_2; Domain location=72-440; Score=363.8; E_value=3.3e-106; Accession=PF00152.12; Description =tRNA synthetases class II (D, K and N)
  Pfam annotation: Domain name=tRNA-synt_2b; Domain location=96-227; Score=-47.4; E_value=0.029; Accession=PF00587.17; Description=tRNA synthetase class II core domain (G, H, P, S and T)
  Pfam module annotation: Pfam domain module=tRNA-synt_2::tRNA-synt_2b; Domain location=72-440::96-227
TRELIQLYCEKDSLTVGIHQQLKAFIDIGDILGASGSIKKTEKGELSVYMKNFEILTKSLLPLPDKYHGLTDVDKRYRQRYVDMIANPEVADVFRTRAKVVSEIRKTMESFGFIEVETPVLQGAAGGAEARPFITYHNSLQRDLYLRIATELHLKRMLVGGLERVYEIGRIFRNEGISTRHNPEFTTIEMYEAYSDYESMMNMAEEIVTRCAMATHGKLKVDYQGTEISLERPWRRETMHSLVKEATGIDFNNFGQDVESAKIAARGLPGIKVGSSESTSLQSCSSVGHVLNEVFETFVESTLVQPTFVLDYPVEISPLAKPHRSYAGLTERFELFICGREIGNAFSELTDPIDQRSRFENQIKQHNAKRAASAKVKSTEDQGDEDDYSYEVCLDEDFLTSLEYGMPPASGMGLGIDRLVMLLTNSASIRDVIAFPVLKIQQ

SEQ ID NO: 108809 - protein, 58 aa, Setaria italica
  misc_feature (8)..(8): Xaa can be any naturally occurring amino acid
  Transcript Sequence Number=SeqID_42835
YQHCRNLXFSTAEGKQDLLEKLGLIELRTHQPISYLKWGLAPLTIVVHTSPSTMLHQS

SEQ ID NO: 108810 - protein, 332 aa, Setaria italica
  misc_feature (68)..(68): Xaa can be any naturally occurring amino acid
  Transcript Sequence Number=SeqID_42836
  Gene Ontology: Mol. function=transporter activity; Cellular component= membrane; Biological process=transport
  Homolog annotation: Hit_ID=Q6JN48; Match level="QueryCoverage=95%, HitCoverage=25%, E-value=1e-108, Identity=61%"; Hit description =Ethylene insensitive 2
  Pfam annotation: Domain name=Nramp; Domain location=2-246; Score= -261.6; E_value=0.069; Accession=PF01566.10; Description=Natural resistance-associated macrophage protein
  Subcellular localization annotation: CTP_CleavageSite=31; ConfidenceScore=5.16e-01
TVSHLGKRMAGTFNACLAGFALLCFVLGLLVSQPKVSINMNVMFPKLSGENAYSLMALLGGNVIAHNXYVHSSVVQIQRRSPAPTLGSLFHDHLFSLLFIFTGVFLVNYILISLAADESTNIVLSSFQDGIELMNQMFVSPAAPVVLLVILLFSSHIISLTSIVGSDVILKNFFGVKLPHSAHHLLLKGFAVIPTIYCAKVAGSEGVYQLLIICPVIQAMSVPSSVIPLFRVSSSRSIMGSYRISLYAEICAALAFLLMLFTNIIFAAEILFGDSTWTNNLKGNTGGLVLIPYTVMVLILSGTIAFTLFLAVTPLKSESNEAENYKEVSTSR

SEQ ID NO: 108811 - protein, 73 aa, Setaria italica
  Transcript Sequence Number=SeqID_42837
SKRSQCTVEHNFVKELIKATLLECHAHLSIAALHNHISPSKQAHMKMEMCRAAETKTNARKATAECGKSDQWQ

SEQ ID NO: 108812 - protein, 161 aa, Setaria italica
  misc_feature (34)..(34): Xaa can be any naturally occurring amino acid
  Transcript Sequence Number=SeqID_42838
  Gene Ontology: Mol. function=RNA-directed DNA polymerase activity; Cellular component=chromatin; Biological process=chromatin assembly or disassembly
  Homolog annotation: Hit_ID=Q8W150; Match level="QueryCoverage=100%, HitCoverage=16%, E-value=4e-41, Identity=56%"; Hit description =Polyprotein
TERVNRCMETFLRCFVNVCPGKWVDWIYLAEHFXYNSSWHSALGFSQFELLYRYSPKHFGIDTLSACPVPTLGEWLQEKVVMTELVQQHLSRAQHRMKLQADKNHSERSFSVGDLVYLKLQPYVQSSLAPRAKPEVGLSLILVPSSILSKVGSVADKLELP

SEQ ID NO: 108813 - protein, 124 aa, Setaria italica
  misc_feature (10)..(10): Xaa can be any naturally occurring amino acid
  Transcript Sequence Number=SeqID_42839
  Gene Ontology: Mol. function=RNA binding; Cellular component =mitochondrion
  Homolog annotation: Hit_ID=Q10QC8; Match level="QueryCoverage=97%, HitCoverage=49%, E-value=9e-57, Identity=46%"; Hit description=Salt -inducible protein, putative, expressed
  Pfam annotation: Domain name=PPR; Domain location=16-50; Score=41.6; E_value=3.2e-09; Accession=PF01535.12; Description=PPR repeat
  Pfam annotation: Domain name=PPR; Domain location=51-85; Score=45.8; E_value=1.7e-10; Accession=PF01535.12; Description=PPR repeat
  Pfam annotation: Domain name=PPR; Domain location=86-119; Score=20.3; E_value=0.0078; Accession=PF01535.12; Description=PPR repeat
  Pfam module annotation: Pfam domain module=PPR::PPR::PPR; Domain location=16-50::51-85::86-119
QFHNKMVENXFKPDVVTCNTLMNGLCQYGKLDKALKLFKSWVEKGKKVDVITYNTLIQALCKDGNVDMALHFFADMEIRGLQPDAFAYNVVLSALSEAGRSEEAQNMLNKLTESGKLSKSFLIL

SEQ ID NO: 108814 - protein, 395 aa, Setaria italica
  misc_feature (147)..(147): Xaa can be any naturally occurring amino acid
  Transcript Sequence Number=SeqID_42840
  Gene Ontology: Mol. function=catalytic activity; Cellular component =membrane; Biological process=protein complex assembly
  Homolog annotation: Hit_ID=B9SXA6; Match level="QueryCoverage=94%, HitCoverage=96%, E-value=1e-165, Identity=73%"; Hit description =Cytochrome C oxidase assembly protein cox15, putative
  Pfam annotation: Domain name=COX15-CtaA; Domain location=29-379; Score=247.4; E_value=3.4e-71; Accession=PF02628.7; Description =Cytochrome oxidase assembly protein
  Subcellular localization annotation: CTP_CleavageSite=34; ConfidenceScore=5.30e-01
MHRKMSTSTATLNSTMANGAANSGLKLLVTKGPQAQKAVGIWLFGCAAWVFSLVILGGITRLTRSGLSMTDWKFTGEIPPMSDEAWLLEFEKYKQSPEYKRVNKGMSLEDFKFIYWMEYGHRMWGRALGFVFAGPFAYFIAKGYVTXQLGLRLSALFALGGGQGLIGWWMVKSGLEEPTSEYVQPRVSPYRLATHLASAFAIYCGILWTALSVVMPDPPSGSMSWVNGAAKIRKLAIPVSAVVGITAISGAFVAGNDAGHAYNSFPKMGDTWIPEDVFSMEPFVRNFFENTSTVQLNHRILATATLLSVGGLWLGARKIDMHPAIKSLIGSTFGMAALQVTLGISTLLMYVPTSLGSAHQAGALTLLSLMILLTHTLRRPSPALLKSLANSVKSS

SEQ ID NO: 108815 - protein, 47 aa, Setaria italica
  Transcript Sequence Number=SeqID_42841
SISVKLFDTLFECFHLILFMKGKKHLAKTDCLFWLHAIQGFLSVSLR

SEQ ID NO: 108816 - protein, 39 aa, Setaria italica
  Transcript Sequence Number=SeqID_42842
FTNYVSRICSYISNYVFLVSSNVIDLELNSRFNLIHFYS

SEQ ID NO: 108817 - protein, 366 aa, Setaria italica
  Transcript Sequence Number=SeqID_42843
  Gene Ontology: Mol. function=transcription initiation factor activity; Cellular component=transcription factor TFIID complex; Biological process=transcription initiation
  Homolog annotation: Hit_ID=B2C6R6; Match level="QueryCoverage=45%, HitCoverage=25%, E-value=8e-44, Identity=52%"; Hit description =Cytokinin hypersensitive 1
  Pfam annotation: Domain name=TFIID_20kDa; Domain location=226-293; Score=148.0; E_value=2.9e-41; Accession=PF03847.5; Description =Transcription initiation factor TFIID sub
  Subcellular localization annotation: CTP_CleavageSite=23; ConfidenceScore=5.21e-01
QGTQLNNANTAQVLQGMQPMGVMGTMGMSQMRPNGTIPYGAQQRFAHAQMRPQASQQAALSPQKVAGQGLSRTASITALNSQLPGSSQNGQMVAMSMPQQQQQQQWLKQMQSSMSSPVSPQQQFQHQQRLMLMQQLQQKTGLSQQQLAQVQQQHPHLNAQQLIQQQHFLQQFQQQQQSLQSPRVSASGSQKSANHTGSQPGTPLSGGTMTGRSASQGAEGTSQLLGKRKIQDLVAQIDPLGRLDPEVEDLLLEMADDFIDSVTAFACTLAKHRKSSVVEAKDVLLHLEQNWHLSVPGFSREDKNPQRNSVKPSVDPQQPESDAAGVRGPGNKLIANNSVGNHQIRPPIAEPSAMPTMGPLSKAPRF

SEQ ID NO: 108818 - protein, 132 aa, Setaria italica
  Transcript Sequence Number=SeqID_42844
  Gene Ontology: Mol. function=phosphatidylcholine-sterol O -acyltransferase activity; Biological process=lipid metabolic process
  Homolog annotation: Hit_ID=B9SDQ9; Match level="QueryCoverage=99%, HitCoverage=24%, E-value=6e-48, Identity=64%"; Hit description =Phosphatidylcholine-sterol O-acyltransferase, putative
ETHDILSSTKLPESVKFYNIYGTDYDTPHTVCYGTEHHPVSNLNNLLYAQGKYVYVDGDGSVPVESAKADGLNAVARVGVAADHRGIVCSHHVFRIVQHWLHAGEPDPFYNPLNDYVILPTAYEIEKHHEKW

SEQ ID NO: 108819 - protein, 140 aa, Setaria italica
  Transcript Sequence Number=SeqID_42845
  Subcellular localization annotation: CTP_CleavageSite=87; ConfidenceScore=5.16e-01
KHRRIPVWLQRRCPPIGSKPCGPVRAIGASWFGGKALASPVFSSAGGSCGGRSVFIVGGWGVRVVGVFFRFSQGVELSFLGGSRFLAAAADRDCSCSIYGPNRFSFCSDPPKSGRCLCNNLLKLLICSSGEANRKLISRI

SEQ ID NO: 108820 - protein, 287 aa, Setaria italica
  misc_feature (261)..(261): Xaa can be any naturally occurring amino acid
  Transcript Sequence Number=SeqID_42846
  Gene Ontology: Mol. function=phosphatidylcholine-sterol O -acyltransferase activity; Biological process=lipid metabolic process
  Homolog annotation: Hit_ID=B9SDQ9; Match level="QueryCoverage=94%, HitCoverage=50%, E-value=2e-99, Identity=60%"; Hit description =Phosphatidylcholine-sterol O-acyltransferase, putative
AASKFCLTKATFSGAPGYITTSLLNGMSFVEGWESKFFISKWCMQQLLLECPSIYELLANPNFQWKDTPLLQIWRENLDNDGKKSALLESYEPAEAIKMIEEALSKNEIIADGMHIPVPLNLDILKWAKETHDILSSTKLPESVKFYNIYGTDYDTPHTVCYGTEHHPVSNLNNLLYAQGKYVYVDGDGSVPVESAKADGLNAVARVGVAADHRGIVCSHHVFRIVQHWLHAGEPDPFYNPLNDYVILPTAYEIEKHHEKXRDLTSVSEDWEIISPSDNQTLRPAEV

SEQ ID NO: 108821 - protein, 502 aa, Setaria italica
  misc_feature (295)..(295): Xaa can be any naturally occurring amino acid
  misc_feature (306)..(306): Xaa can be any naturally occurring amino acid
  Transcript Sequence Number=SeqID_42847
  Gene Ontology: Mol. function=phosphatidylcholine-sterol O -acyltransferase activity; Biological process=lipid metabolic process
  Homolog annotation: Hit_ID=B9SDQ9; Match level="QueryCoverage=99%, HitCoverage=99%, E-value=1e-172, Identity=56%"; Hit description =Phosphatidylcholine-sterol O-acyltransferase, putative
  Pfam annotation: Domain name=LACT; Domain location=52-387; Score= -46.5; E_value=2.5e-09; Accession=PF02450.7; Description =Lecithin:cholesterol acyltransferase
  Pfam annotation: Domain name=PGAP1; Domain location=26-399; Score= -82.2; E_value=0.024; Accession=PF07819.5; Description=PGAP1-like protein
  Pfam module annotation: Pfam domain module=LACT::PGAP1; Domain location=52-387::26-399
MTLLEELIRAIELWLRIVKEQVPLVDPTLDPVLLVPGIAGSILEAVDDAGNKERVWVRILAAEHEFREKLWSKFDASTGETVSVNEKTRIIVPEDRYGLYAIDTLDPDMIIGDETVYYYHDMIVEMIKWGYQEGKTLFGFGYDFRQSNRLSETLDRFSKKLESVYTASGGKKINLITHSMGGLLVKCFVSLHNDVFEKYVKSWIAIAAPFQGAPGYITTSLLNGMSFVEGWESKFFISKWCMQQLLLECPSIYELLANPNFQWKDTPLLQIWRENLDNDGKKSALLDVSTRLEIXKCFVNVKGKLXYWKLCTGYNIYGTDYDTPHTVCYGTEHHPVSNLNNLLYAQGKYVYVDGDGSVPVESAKADGLNAVARVGVAADHRGIVCSHHVFRIVQHWLHAGEPDPFYNPLNDYVILPTAYEIEKHHEKCGDLTSVSEDWEIISPSDNQTLRPAEVPPMVNTLTASWEGVEGTLEEAQATVIIHPRNKGRQHVEVRAVGVSHGG

SEQ ID NO: 108822 - protein, 89 aa, Setaria italica
  Transcript Sequence Number=SeqID_42848
SGVRDMAKSHSAVCKMILVVAMAIVANLLCFSADAGRAAFPSPPVVQDGECNSMAVPLSSTFPECDACCRKAGHPGGYIKGDQCLCNSG

SEQ ID NO: 108823 - protein, 239 aa, Setaria italica
  Transcript Sequence Number=SeqID_42849
  Gene Ontology: Mol. function=protein heterodimerization activity; Cellular component=microtubule; Biological process=cell division
  Homolog annotation: Hit_ID=Q7XKB3; Match level="QueryCoverage=97%, HitCoverage=24%, E-value=1e-105, Identity=81%"; Hit description =OSJNBa0064G10.18 protein
VNEITSYVEVSSKQRYKVGLSNWEGRDQSPSHEEPTTSSSSLAPTGRSYSSRGSNQASETPTIASDEDVLSLLMEQHELFLSSTRSRLTKLQIIHQMWVRNDIRGVLSAMEKMCDHAVSADMASVLMEKSETITLDLCTSILPVVTDLLESKTDRHLGVSLELLVKLVRTFGPMIHSTVSAGPSSVGVDLEAEQRRERCNLCFIELEKVKNKLPFLTRRKGAVANAAQELTLVFQEVMS

SEQ ID NO: 108824 - protein, 344 aa, Setaria italica
  misc_feature (337)..(337): Xaa can be any naturally occurring amino acid
  Transcript Sequence Number=SeqID_42850
  Homolog annotation: Hit_ID=Q7XKB3; Match level="QueryCoverage=100%, HitCoverage=38%, E-value=1e-109, Identity=59%"; Hit description =OSJNBa0064G10.18 protein
NVVPVIVPRTSSGGELATDSRSDAADVAPVLSKATRRVDPATDSRKESTDVEPVVPKASSRMEISSDSAPVVISKSSRRLESGADSKKESADAASVVVPRENTKMEMASDSAPVLSKASRKVDPGTDSKKESADAAPVIPRASSRTEMASDARREPSAGRISPFRIQSRYAELRKLTHAKVDANKVDSRSKNTETDDFNCQIFFPRRNGVFQTISSEETREDIKHGAVDRMAFSNPAELNASVRGENYVSRMRKPRDNCYVEVSRAGRARSSVSNWEGRDQSPSHEEPTTSSSSLAPTGRSYSSRGSNQASETPTIASDEDVLSLLMEQHELFLSSXTRSRLTK

SEQ ID NO: 108825 - protein, 132 aa, Setaria italica
  Transcript Sequence Number=SeqID_42851
  Gene Ontology: Mol. function=RNA-directed RNA polymerase activity
  Homolog annotation: Hit_ID=Q8LHH9; Match level="QueryCoverage=86%, HitCoverage=9%, E-value=5e-29, Identity=54%"; Hit description =Probable RNA-dependent RNA polymerase SHL2
VVTGEIYSLTERNKKKKNEIKERLKHAHSKLHQEFRNIFESIGADHGEISDDKKNLVYEMKASAWYQVTYHPYWIQCSRKMTEFDGKEMPARLSFAWIAVDYLAHIKMRCRGEVDASSKDRSLHFLRRYGQG

SEQ ID NO: 108826 - protein, 76 aa, Setaria italica
  Transcript Sequence Number=SeqID_42852
  Gene Ontology: Mol. function=magnesium ion binding; Cellular component=integral to membrane; Biological process=photosynthesis, light harvesting
  Homolog annotation: Hit_ID=P27523; Match level="QueryCoverage=98%, HitCoverage=27%, E-value=5e-25, Identity=78%"; Hit description =Chlorophyll a-b binding protein of LHCII type III, chloroplastic
  Subcellular localization annotation: CTP_CleavageSite=36; ConfidenceScore=5.04e-01
MASIMAAATSRVLAAKTLFLGQGRAAANASPLRDVAAAASGRITMSNDLWYGPDRVKYLGPFSAQTPSYLTGEFPP

SEQ ID NO: 108827 - protein, 504 aa, Setaria italica
  Transcript Sequence Number=SeqID_42853
  Gene Ontology: Mol. function=catalytic activity; Cellular component =chloroplast; Biological process=metabolic process
  Homolog annotation: Hit_ID=Q8L4V2; Match level="QueryCoverage=100%, HitCoverage=100%, E-value=0.0, Identity=63%"; Hit description=Fatty acyl coA reductase
  Pfam annotation: Domain name=NAD_binding_4; Domain location=22-328; Score=370.1; E_value=4.1e-108; Accession=PF07993.4; Description=Male sterility protein
  Pfam annotation: Domain name=Sterile; Domain location=406-504; Score =60.0; E_value=8.7e-15; Accession=PF03015.11; Description=Male sterility protein
  Pfam annotation: Domain name=adh_short; Domain location=18-185; Score= -57.9; E_value=0.089; Accession=PF00106.17; Description=short chain dehydrogenase
  Pfam module annotation: Pfam domain module=NAD_binding_4::Sterile::adh _short; Domain location=22-328::406-504::18-185
MVGTMEEATGIPGYFKNKGILITGSTGFLGKILVEKILRVQPDVKRIYLPVRAPDAASAKKRVETEVIGKELFGLLRETHGKGFQAFIEEKVVALAGDIIHENFGVEGAQLSEMTREINVIVNGAATTNFYERYDVALDVNVMGVKHMCQLARQCPNLEVILHVSTAYVAGERQGLIQERPFKYGETLRDDDGAQPRLDVDAELKLARDYQRQLAADDAEQKNERKAMKELGLARAREFGWPNTYVFTKALGEMTLGRLMGDGDVPVVIVRPSIITSIQRDPLPGWIEGTRTIDAIIIGYAKQNLSCFLADLDLTMDVIPGDMVESAMMAAAAAHASSPPPPPQTPPAVYHATSSLRNPAPYAVLYRTGMRYFNAHPRTGPDGRPVRTRRIHFFATVAAFTAYMVVRYRLPLELLRLLNLLCCGLLGRLCAELGRKYAFVMRLVDLYGPFSLFRGVFDDANVERLRLGMADGDRVVFNFDPKTLDWDDYFYRIHIPGVMKYVLK

SEQ ID NO: 108828 - protein, 301 aa, Setaria italica
  Transcript Sequence Number=SeqID_42854
  Gene Ontology: Mol. function=protein binding; Cellular component=cis -Golgi network; Biological process=ER to Golgi vesicle-mediated transport
  Homolog annotation: Hit_ID=Q9VW22; Match level="QueryCoverage=92%, HitCoverage=21%, E-value=4e-43, Identity=38%"; Hit description=CG8793
NVLAEMRSTLGLNDCKLLCINSSTEADGSNTDNSWLPYKALGLNNREGTCLLSMDDLNEIKDFMQDFASNHIIPYMEQKIRVLNQQVATTRKGFRNQIKNLWWRKRDDVPEAPNGPMYTFTSIESQIRVLGDFAFMLRDYELALSNYKLLATDYKLDKAWKRFAGVQEMSGLCYFMLDQSRKDAEYCMENAFSTYLRIGSSGQRNATRCGLWWAEMLKTRGQYREASSVYFRVSNEEPSLHSAVLLEQAASCYLLSSPPMLRKYGFHLILAGNSYYMSDQKQHAVRVYRNALFVYKQNPWS

SEQ ID NO: 108829 - protein, 79 aa, Setaria italica
  Transcript Sequence Number=SeqID_42855
KEVDASVTRDICVSVQSFKHVHYSLLLHEMYYHTVVNQSLGMISLIEIESCCHILLLTWSLPSNALSVFCLLDKHPFFG

SEQ ID NO: 108830 - protein, 85 aa, Setaria italica
  Transcript Sequence Number=SeqID_42856
  Homolog annotation: Hit_ID=B6U1R6; Match level="QueryCoverage=83%, HitCoverage=85%, E-value=3e-30, Identity=92%"; Hit description=Seed maturation protein PM41
MSGAQGAHPVGRTTPTTYESVGGGENRTRTDLRSREDQGAIQIEKVQDKVDDAAGRGVDQGTFGAKKEGRNADADAGATGTGTGA

SEQ ID NO: 108831 - protein, 208 aa, Setaria italica
  misc_feature (152)..(152): Xaa can be any naturally occurring amino acid
  Transcript Sequence Number=SeqID_42857
  Gene Ontology: Cellular component=intracellular; Biological process =signal transduction
  Homolog annotation: Hit_ID=Q10NV4; Match level="QueryCoverage=81%, HitCoverage=28%, E-value=1e-81, Identity=84%"; Hit description=PH domain containing protein, expressed
  Pfam annotation: Domain name=RhoGAP; Domain location=111-208; Score= -23.5; E_value=0.00033; Accession=PF00620.19; Description=RhoGAP domain
PIVTLGGIDLNNTASMIVKEERKTITVVFPDGRDGRTFTLKAETTEDLNEWRSALENALAQAPSVANTAGQHPVTTTDITEPAEAAVEQSEDKSVIGRPAEFALVDADGTTAFLEKALKFIEDYGVKVEGILRQSADVEEVKRRIRDYEKGXNEFSPEEDAHVIGDCIKYILREMPSSPVPASCCTSLVRAYRTDKTRRLDAMNRVIY

SEQ ID NO: 108832 - protein, 110 aa, Setaria italica
  misc_feature (90)..(90): Xaa can be any naturally occurring amino acid
  Transcript Sequence Number=SeqID_42858
  Gene Ontology: Mol. function=acyltransferase activity; Cellular component=integral to membrane; Biological process=metabolic process
  Homolog annotation: Hit_ID=B6U6X8; Match level="QueryCoverage=97%, HitCoverage=26%, E-value=2e-35, Identity=67%"; Hit description=1 -acyl-sn-glycerol-3-phosphate acyltransferase 4
SFSDKKCSKSQEYAAEYSLPILKNVLPKTKGFNSCLQEPRSSIDAVYDITIAYKHRLPTFLYNVYGIDPSKIHTISTTFKSLDIPTMEGXVAGWLIEQFGLKDELLSSSR

SEQ ID NO: 108833 - protein, 105 aa, Setaria italica
  misc_feature (95)..(95): Xaa can be any naturally occurring amino acid
  Transcript Sequence Number=SeqID_42859
  Gene Ontology: Mol. function=inositol or phosphatidylinositol phosphatase activity
  Homolog annotation: Hit_ID=B6SMK8; Match level="QueryCoverage=78%, HitCoverage=24%, E-value=2e-38, Identity=93%"; Hit description =Inositol-1-monophosphatase
SVRASVAAGAGGPGAAAVGEVATEQLVEVAQRAADAAGEVLRKYFRQRVEIIDKEDNSPVTIADREAEEAMVSVILKSFPTHAIFGEENGWRCVXNSADYVWVLT

SEQ ID NO: 108834 - protein, 78 aa, Setaria italica
  Transcript Sequence Number=SeqID_42860
HKLGTSTCRMAGPGVLEVDPVLGGVLEPKLADGATGSLPNPVAASELAPRGLQPGTYRSKNSRGPPLPAVGHDPSNRP

SEQ ID NO: 108835 - protein, 109 aa, Setaria italica
  Transcript Sequence Number=SeqID_42861
  Gene Ontology: Mol. function=electron carrier activity; Cellular component=extracellular region; Biological process=response to oxidative stress
  Homolog annotation: Hit_ID=Q9LSP0; Match level="QueryCoverage=92%, HitCoverage=31%, E-value=4e-10, Identity=35%"; Hit description =Peroxidase 29
MWYTSQECRDKGYEATLHLLCPKKIVSPLVMKVLVVPSDLMPTLFYTHYFRGATVGRGLFTVDTYTAGHVRWFAHDREGFFGAFASTFVKLAGFGVLTGEEGEIRKRWS

SEQ ID NO: 108836 - protein, 131 aa, Setaria italica
  Transcript Sequence Number=SeqID_42862
  Gene Ontology: Mol. function=heat shock protein binding
  Homolog annotation: Hit_ID=B6U0R7; Match level="QueryCoverage=100%, HitCoverage=55%, E-value=5e-61, Identity=85%"; Hit description=Heat shock protein binding protein
  Pfam annotation: Domain name=DnaJ; Domain location=65-130; Score =59.9; E_value=9.6e-15; Accession=PF00226.23; Description=DnaJ domain
RCMQDVFKKERSKCRDYRTWESHGPNFYQHSQRDDRYWDAEAFYANQRTNFRSMPRETMSYAMSRHYSILGLDRSRSEPFSDAEIKNAFRRKAMEYHPDQNQNNKEVAEAKFKEVMDSYEAIKSERRNANC

SEQ ID NO: 108837 - protein, 112 aa, Setaria italica
  Transcript Sequence Number=SeqID_42863
  Subcellular localization annotation: CTP_CleavageSite=4; ConfidenceScore=5.04e-01
TMSLAAHNFGTTCDSSHKTRRSFSFVLELLFHRDFCILNITRYSQMRRFFYGRFNFPAYFTWFLIFVVTTCFYRIILCCPIFHDFVVYFLQPKYELKIRVLKCWPFTANCYF

SEQ ID NO: 108838 - protein, 152 aa, Setaria italica
  Transcript Sequence Number=SeqID_42864
  Gene Ontology: Mol. function=protein serine/threonine kinase activity; Cellular component=cell surface; Biological process =protein amino acid phosphorylation
  Homolog annotation: Hit_ID=Q5N9Y5; Match level="QueryCoverage=87%, HitCoverage=19%, E-value=4e-42, Identity=58%"; Hit description =Putative S-domain receptor-like protein kinase
  Pfam annotation: Domain name=Pkinase_Tyr; Domain location=59-152; Score=-146.5; E_value=0.00055; Accession=PF07714.9; Description =Protein tyrosine kinase
PKTNTRTEDGGGSSISIRLAASEFSGTGNARKLVIGLAAAGSVAAVAAIVRDLQFVTKNFTEKLGGGAFGSVFKGSLPDATPVAVKKLEGVRQGEKQFRAEVSTIGTIQHVNLIRLLGFCSERTRRLLVYEHMPRGSLDRHLFGLAARARPE

SEQ ID NO: 108839 - protein, 354 aa, Setaria italica
  misc_feature (232)..(232): Xaa can be any naturally occurring amino acid
  Transcript Sequence Number=SeqID_42865
  Gene Ontology: Mol. function=protein serine/threonine kinase activity; Cellular component=cell surface; Biological process =protein amino acid phosphorylation
  Homolog annotation: Hit_ID=Q5N9Y5; Match level="QueryCoverage=94%, HitCoverage=40%, E-value=1e-117, Identity=65%"; Hit description =Putative S-domain receptor-like protein kinase
  Pfam annotation: Domain name=APH; Domain location=84-339; Score= -10.0; E_value=0.01; Accession=PF01636.15; Description=Phosphotransfer ase enzyme family
  Pfam annotation: Domain name=PAN_1; Domain location=14-87; Score =14.0; E_value=0.008; Accession=PF00024.18; Description=PAN domain
  Pfam annotation: Domain name=PAN_2; Domain location=4-71; Score=88.7; E_value=2.1e-23; Accession=PF08276.3; Description=PAN-like domain
  Pfam annotation: Domain name=Pkinase; Domain location=153-354; Score =100.9; E_value=4.4e-27; Accession=PF00069.17; Description=Protein kinase domain
  Pfam annotation: Domain name=Pkinase_Tyr; Domain location=154-354; Score=44.5; E_value=1.1e-16; Accession=PF07714.9; Description =Protein tyrosine kinase
  Pfam module annotation: Pfam domain module=APH::PAN_1::PAN _2::Pkinase::Pkinase_Tyr; Domain location=84-339::14-87::4-71::153 -354::154-354
DRDGQHQKNSKNDDDRFYTMDDARLPSSARSAAAASARDCELACLGNCSCTAYSYTGGGGCSLWYGDLINLQDTTASGGGSSISIRLAASEFSGTGNARKLVIGLAAAGSVAAVAAIVLATILILRSRRIKSLRRVEGSLMAFTYRDLQFVTKNFTEKLGGGAFGSVFKGSLPDATPVAVKKLEGVRQGEKQFRAEVSTIGTIQHVNLIRLLGFCSERTRRLLVYEHMPRGXPLDRHLFGASSQGGVLSWETRYQIALGIARGLEYLHDKCRDCIIHCDIKPENILLDEAFVPKVADFGLAKLMGRDFSRVLTTVRGTVGYLAPEWIGGAAVTTKADVFSYGMMLFEIVSSGTG

SEQ ID NO: 108840 - protein, 172 aa, Setaria italica
  Transcript Sequence Number=SeqID_42866
  Gene Ontology: Mol. function=nucleic acid binding; Cellular component= ribonucleoprotein complex; Biological process=regulation of alternative nuclear mRNA splicing, via spliceosome
  Homolog annotation: Hit_ID=B6UFA0; Match level="QueryCoverage=100%, HitCoverage=37%, E-value=5e-65, Identity=74%"; Hit description=RNA binding protein
  Pfam annotation: Domain name=RRM_1; Domain location=88-158; Score =87.4; E_value=5e-23; Accession=PF00076.14; Description=RNA recognition motif. (a.k.a. RRM, RBD, o
  Subcellular localization annotation: CTP_CleavageSite=73; ConfidenceScore=5.27e-01
NSIRGVNPELSPSSVQRSFNAMQLGSPYPAIPGMQYPGSYPGGLMNNRPFGNSNNSIKVPNSNATSTISSSPSSNAGGQIEGPPGANLFIYHIPQDYGDQELSSAFQSFGRVLSAKVFVDKATGVSKCFGFVSYDSPASAQAAINMMNGFQLGGKKLKVQLKRENNKHSKPY

SEQ ID NO: 108841 - protein, 315 aa, Setaria italica
  Transcript Sequence Number=SeqID_42867
  Gene Ontology: Mol. function=nucleic acid binding; Cellular component= ribonucleoprotein complex; Biological process=multicellular organismal development
  Homolog annotation: Hit_ID=B6UFA0; Match level="QueryCoverage=97%, HitCoverage=68%, E-value=1e-141, Identity=78%"; Hit description=RNA binding protein
  Pfam annotation: Domain name=RRM_1; Domain location=53-124; Score =72.2; E_value=1.9e-18; Accession=PF00076.14; Description=RNA recognition motif. (a.k.a. RRM, RBD, o
KVSRGCCFLICPSREEADKAVNAYHNKRTLPGASSPLQVKYADGELERLEHKLFIGMLPKNVTDTELTDLFSEYGNIKDLQILRGSQQTSKAGCAFLKYETKEQALAAIEALNGKHKIEGSSVPLVVKWADTEKERQARKAQKAQLQLSNIPNANPMQQSSLFGALQMGYMPQYNGFGYQPPGTYGLMQYPLSPMQNQGPFQNMVQPVNQGNSIRGVNPELSPSSVQRSFNAMQLGSPYPAIPGMQYPGSYPGGLMNNRPFGNSNNSIKVPNSNATSTISSSPSSNAGGQIEGPPGANLFIYHIPQDSETHWKVL

SEQ ID NO: 108842 - protein, 136 aa, Setaria italica
  Transcript Sequence Number=SeqID_42868
  Gene Ontology: Mol. function=nucleic acid binding; Cellular component= CCR4-NOT core complex; Biological process=regulation of transcription from RNA polymerase II promoter
  Homolog annotation: Hit_ID=Q9LSS9; Match level="QueryCoverage=48%, HitCoverage=6%, E-value=1e-19, Identity=57%"; Hit description =General negative transcription regulator-like
  Pfam annotation: Domain name=zf-C3HC4; Domain location=64-111; Score =3.2; E_value=0.044; Accession=PF00097.17; Description=Zinc finger, C3HC4 type (RING finger)
RRGGGGGGEREREKGEERVSGGRRRGELETLIPRRPATPIASAPPTFLASLRAVTMSTQINDKCPLCMDPLDLTDKQLKPCKCGYEICLYCWHRIMGMDQKDESGGRCPGCLTVYDKDRILETSARNQILKELCAD

SEQ ID NO: 108843 - protein, 596 aa, Setaria italica
  misc_feature (91)..(91): Xaa can be any naturally occurring amino acid
  Transcript Sequence Number=SeqID_42869
  Gene Ontology: Mol. function=binding; Cellular component=mitochondrion
  Homolog annotation: Hit_ID=B9R930; Match level="QueryCoverage=93%, HitCoverage=63%, E-value=0.0, Identity=73%"; Hit description =Pentatricopeptide repeat-containing protein, putative
  Pfam annotation: Domain name=PPR; Domain location=104-138; Score =30.7; E_value=6e-06; Accession=PF01535.12; Description=PPR repeat
  Pfam annotation: Domain name=PPR; Domain location=139-173; Score =49.8; E_value=1.1e-11; Accession=PF01535.12; Description=PPR repeat
  Pfam annotation: Domain name=PPR; Domain location=174-208; Score =42.0; E_value=2.4e-09; Accession=PF01535.12; Description=PPR repeat
  Pfam annotation: Domain name=PPR; Domain location=209-243; Score =45.3; E_value=2.4e-10; Accession=PF01535.12; Description=PPR repeat
  Pfam annotation: Domain name=PPR; Domain location=244-278; Score =36.4; E_value=1.1e-07; Accession=PF01535.12; Description=PPR repeat
  Pfam annotation: Domain name=PPR; Domain location=279-312; Score =27.7; E_value=4.8e-05; Accession=PF01535.12; Description=PPR repeat
  Pfam annotation: Domain name=PPR; Domain location=313-347; Score =26.8; E_value=9e-05; Accession=PF01535.12; Description=PPR repeat
  Pfam annotation: Domain name=PPR; Domain location=348-382; Score =24.2; E_value=0.00055; Accession=PF01535.12; Description=PPR repeat
  Pfam module annotation: Pfam domain module=PPR::PPR::PPR::PPR::PPR::PP R::PPR::PPR; Domain location=104-138::139-173::174-208::209-243::244 -278::279-312::313-347::348-382
  Subcellular localization annotation: CTP_CleavageSite=48; ConfidenceScore=5.16e-01
PSGLNGFSGSGNKFQSPTGAIKAHGGGPQSNLRSLKSLRAVEQYYHTLQQMKWGPMTEHVLDSLHCKIDAFQANQVLKLLHDHTIALGFFXWLKGQSGFKHDGHTYTTMIGILGQARQFGIMRKLLEEMSRAHCKPTVVTYNRIIHAYGRANYLREAVKVFEEMQEAGYEPDRVTYCTLIDIHAKAGYLDIAMDLYGRMQEVGLSPDTFTYSAMVNCLGKGGQLAAAYKLFCEMIENGCTPNLVTYNIMIALQAKARNYENVVKLYKDMQVAGFRPDKITYSIVMEVLGHCGHLDEAEAVFIEMRRDWTPDEPVYGLLVDLWGKVGNVDKALGWYQAMLQDGLQPNVPTCNSLLSAFLKINRFQDAYIVLQNMLAQGLVPSLQTYTLLLSCCTEAQTQMGLCCQLMSITGHPAHMFLLYLPDAEPGGQNVRDHTSYFLDMMHSEDRESKRGLIDAVIDFLHKSGLKEEAGLIWEVAAQKNVYPDSVREKSSSYWLINLHLMSEGTAVTALSRTLAWFHRQILTMGTAPERIDIVTGWGRRSRVTGSSLVRQSVQKLLNLFEFPFFTTRGNTGCFVGCGEPLNKWLHNPYVERMHLL

SEQ ID NO: 108844 - protein, 131 aa, Setaria italica
  misc_feature (124)..(124): Xaa can be any naturally occurring amino acid
  Transcript Sequence Number=SeqID_42870
  Gene Ontology: Mol. function=transporter activity; Cellular component= mitochondrial inner membrane; Biological process=transport
  Homolog annotation: Hit_ID=B6UAY5; Match level="QueryCoverage=93%, HitCoverage=37%, E-value=2e-54, Identity=88%"; Hit description =Protein brittle-1
  Pfam annotation: Domain name=Mito_carr; Domain location=3-79; Score =68.2; E_value=3e-17; Accession=PF00153.19; Description=Mitochondrial carrier protein
QDQAYCKLNPLDVVRTRLATQKTTRYYKGIFHAVSTICRDEGVKGLYKGLGATLLGVGPSIAISFSVYESLRSHWQMERPQDSTAIVSLFSGSLSGIASSTATFPLDLVKRPVLSNLACGTAAXKSTITGT

SEQ ID NO: 108845 - protein, 159 aa, Setaria italica
  misc_feature (136)..(136): Xaa can be any naturally occurring amino acid
  Transcript Sequence Number=SeqID_42871
  Gene Ontology: Mol. function=electron carrier activity; Cellular component=endoplasmic reticulum membrane; Biological process =oxidation reduction
  Homolog annotation: Hit_ID=B6SRJ8; Match level="QueryCoverage=100%, HitCoverage=30%, E-value=5e-62, Identity=79%"; Hit description =Cytochrome P450 CYP94B12
RALGVGSESRLREEIRVIHEAVMDLIHIRKKELALVNGGGGGNDGRRSDLLSRMMECGYPDEAIRDMVISFIMAGRDTTSSALTWFFWLLTRHRDVEREVLREVAGGGAGHHAAGGQGKMRVLHAALCETMRLYPXVAWDSKHAAAADVLPDGTRVERG

SEQ ID NO: 108846 - protein, 192 aa, Setaria italica
  misc_feature (149)..(149): Xaa can be any naturally occurring amino acid
  Transcript Sequence Number=SeqID_42872
  Gene Ontology: Mol. function=transaminase activity
  Homolog annotation: Hit_ID=Q6K6D8; Match level="QueryCoverage=88%, HitCoverage=24%, E-value=4e-10, Identity=28%"; Hit description =Aminotransferase-like protein
KEEQDTPNNSLFSFAVALSDDEEVASRQVTLSFVLDDVRAKLESIRTLLQEDIGRLVEDASPIRQLFSNVSGRVPEEVEEALAPAAYIESMWIPVFRALRHMADRAKLAKTREEEDSYKHRAQEVHHRIHFLENSRSGIVGTIDRLKRXRTELAKEMEQVTKEIAIEEQKLQVLPSIITDLKQERQHLAHEA

SEQ ID NO: 108847 - protein, 63 aa, Setaria italica
  Transcript Sequence Number=SeqID_42873
FCSVNDAPKKQAPINTSSPVSLDAAVSVHLICSSDSSTTFHVKIYYVLIKETHQILQLSLLKK

SEQ ID NO: 108848 - protein, 86 aa, Setaria italica
  Transcript Sequence Number=SeqID_42874
PRERDKSREPGSGGSLAFTGKKIISDLSGQNSQLQNIIALVSISLPLTLGGFPLVALCFCRAAPYYTCIHLRPHLNPFILKELEYI

SEQ ID NO: 108849 - protein, 76 aa, Setaria italica
  Transcript Sequence Number=SeqID_42875
  Gene Ontology: Mol. function=serine-type carboxypeptidase activity; Cellular component=extracellular region; Biological process =proteolysis
  Homolog annotation: Hit_ID=P07519; Match level="QueryCoverage=61%, HitCoverage=9%, E-value=8e-11, Identity=68%"; Hit description=Serine carboxypeptidase 1 chain B
MASPFPLLFFLGAAALLRTPAAAAPEEHLVTGLPGFHGDFPSNHYSGYVTVDEASGRSLFYYLALSERGPGADRLV

SEQ ID NO: 108850 - protein, 268 aa, Setaria italica
  misc_feature (236)..(236): Xaa can be any naturally occurring amino acid
  misc_feature (263)..(263): Xaa can be any naturally occurring amino acid
  Transcript Sequence Number=SeqID_42876
  Homolog annotation: Hit_ID=Q2HUK9; Match level="QueryCoverage=96%, HitCoverage=38%, E-value=2e-61, Identity=48%"; Hit description =Tetratricopeptide-like helical
TFKLRQVLNTACAHAGLVSEARDAFATMKSAYGLVPRAEHYCSMVDMYGRAGLLDDAMQFIQDSIPGEPGPEVWTAMLGACKMHKNFNLGVEVAERLIALEPENPSHCVLLSNIYALSGKMNHVEKVRNTMIKRRLKKQIGYSLIEIGGVAHLFRMGEKSHPQTRDIYQYLEELIHRITDAGYVPETDSVLHELEEEEREFALRYHGEKLAVAFGLMMSSGSASPIRIIKNLRICXDCHLAIKYMSAVENREIIVRDKHRFHXFKDGK

SEQ ID NO: 108851 - protein, 97 aa, Setaria italica
  Transcript Sequence Number=SeqID_42877
  Subcellular localization annotation: CTP_CleavageSite=33; ConfidenceScore=5.09e-01
VDSCMPYLHIMSLFYFSFFVVISMPYKLMVSFRVMAIRCLLKGTKSPVIHGTIFLPKVFSLCLSTPEIKLVESWLAYTFCIQPDIIPLVLESTTVHS

SEQ ID NO: 108852 - protein, 79 aa, Setaria italica
  Transcript Sequence Number=SeqID_42878
QSLLAAQQLQQLQIHSQHQQQQTHLQKQQQQQHLSTAQQHQLLQEALPFPGDLKMKGLAMPSHAPNAGASDNHAVKSEP

SEQ ID NO: 108853 - protein, 212 aa, Setaria italica
  Transcript Sequence Number=SeqID_42879
  Gene Ontology: Mol. function=nucleotide binding; Biological process =defense response
  Homolog annotation: Hit_ID=Q6WSR3; Match level="QueryCoverage=88%, HitCoverage=16%, E-value=6e-61, Identity=63%"; Hit description =Resistance protein T10rga2-1A
  Pfam annotation: Domain name=NB-ARC; Domain location=1-208; Score =13.6; E_value=4.2e-10; Accession=PF00931.14; Description=NB-ARC domain
KERSNRFCTWCKKHSPNNDGVETLIKELARLLEGKKCLIEFFMISSIAEWDNIFGSFPKLDGSCRIIVTTREESIAKHCSEKQENIYKLKVLDCKDAQDLFTRKVFKEDKDLDKHPELIEEAKMILKKCNGLPLAIVTIGGFLAKQQKVAVEWRKLNEHISAELEMNLELGAIKTILGKSYDGLPYHLKSCFLYASIFLEDHKISRRHLIRR

SEQ ID NO: 108854 - protein, 123 aa, Setaria italica
  Transcript Sequence Number=SeqID_42880
  Gene Ontology: Mol. function=sodium:hydrogen antiporter activity; Cellular component=integral to membrane; Biological process=sodium ion transport
  Homolog annotation: Hit_ID=Q2L3E0; Match level="QueryCoverage=73%, HitCoverage=19%, E-value=2e-40, Identity=86%"; Hit description =Sodium/hydrogen exchanger
NEPRPPHCQIPRQYQQALWYSGLRGAMAFALALQSVHDLPDGHGETIFTATTSIVVLTVLLIGGSTGTMLEALKVVGDSNRYHQLYEENSDGNDPGYMGQNYDEGPSTSSKFKSKLRDLRRSD

SEQ ID NO: 108855 - protein, 464 aa, Setaria italica
  Transcript Sequence Number=SeqID_42881
  Gene Ontology: Mol. function=glutamate N-acetyltransferase activity; Cellular component=chloroplast; Biological process=arginine biosynthetic process
  Homolog annotation: Hit_ID=B9SZB6; Match level="QueryCoverage=98%, HitCoverage=96%, E-value=1e-162, Identity=65%"; Hit description =Arginine biosynthesis protein argJ 1, putative
  Pfam annotation: Domain name=ArgJ; Domain location=68-464; Score =740.2; E_value=1.5e-219; Accession=PF01960.10; Description=ArgJ family
  Subcellular localization annotation: CTP_CleavageSite=33; ConfidenceScore=5.38e-01
MPPPSLLLLHSCAPLQPRPFRMNSRAAQSRVVVCSAASAEGFVPAAPILLSEGPWKQVEGGVTAAKGFKAAGIYGGLRAKGEKPDLALVACDVDATVAGAFTTNVVAAAPVLYCKNVLSTSKTGRAVLINAGQANAATGDLGYQDAVDSADAVAKLLNVSTDNILIQSTGVIGQRIKKEALLNSLPSLVGSLSSSVQGANSAAVAITTTDLVSKSIAVQTEIGGVAIRIGGMAKGSGMIHPNMATMLGVLTTDAQVSSDVWREMVRTSVSRSFNQITVDGDTSTNDCVIAMASGLSGLSGILSLDSTEAQQFQACLDAVMQGLAKSIAWDGEGATCLIEVTVSGANNEAEAAKIARAVASSSLVKAAVFGRDPNWGRIACSVGYSGIQFDANRLDISLGAIPLMKNGQPLPFDRSAASKYLKDAGDVHGTVNIDISVGSGGGNGKAWGCDLSYKYVEINAEYTT

SEQ ID NO: 108856 - protein, 63 aa, Setaria italica
  Transcript Sequence Number=SeqID_42882
  Homolog annotation: Hit_ID=Q9SRW5; Match level="QueryCoverage=100%, HitCoverage=40%, E-value=4e-09, Identity=45%"; Hit description =F20H23.7 protein
  Pfam annotation: Domain name=DUF1639; Domain location=1-37; Score =60.5; E_value=6.5e-15; Accession=PF07797.6; Description=Protein of unknown function (DUF1639)
KGSKLPQRPKKRAKVIQRTVNFVCPGTWLCDLTLERYEVREKKVSKKRPRGLKAMHDMDSDSE

SEQ ID NO: 108857 - protein, 39 aa, Setaria italica
  Transcript Sequence Number=SeqID_42883
  Homolog annotation: Hit_ID=B6SW65; Match level="QueryCoverage=100%, HitCoverage=5%, E-value=3e-15, Identity=100%"; Hit description =Topoisomerase-like protein
MAAEEGAMSPTRMLAEGHLRVATGGGAPADGGIAVRHLP

SEQ ID NO: 108858 - protein, 176 aa, Setaria italica
  Transcript Sequence Number=SeqID_42884
  Gene Ontology: Mol. function=lyase activity
  Homolog annotation: Hit_ID=B6SL02; Match level="QueryCoverage=98%, HitCoverage=35%, E-value=2e-31, Identity=44%"; Hit description =Ribosomal RNA apurinic site specific lyase
PFPNLRELGICSVVVKDGDIDSLVARSPLLEILNIQGSMKGLRLVGQSLRCVQICASMVESITLVSTPCLERLILWEVRASPNPASGLRTRIKIGTAPKLCVLGYLDPTQHLLEIGGTSIMPGIAPSASTILTSVKCLSLKVCFGANDAMKVPAFLKCFPNVEALHIMSAKCDEPA

SEQ ID NO: 108859 - protein, 174 aa, Setaria italica
  Transcript Sequence Number=SeqID_42885
  Homolog annotation: Hit_ID=Q53WP4; Match level="QueryCoverage=75%, HitCoverage=18%, E-value=2e-64, Identity=88%"; Hit description =Putative auxin-independent growth promoter
  Pfam annotation: Domain name=DUF246; Domain location=30-174; Score= -51.1; E_value=1.3e-11; Accession=PF03138.6; Description=Plant protein family
MKPESEGYRQCIERPKNHRRTNNATVPYLIVDANGGLNQMRMGISDMVAVAKIMNASLVIPTLDHQSFWTDPSDFKDIFDVDRFKETLKEDIVIVDSLPPDFRRVKHYVRAPTSWSRASFYRDFAKILRKFKVVRFTHTDSRIVNNGLAPSLQKLRCRANYKALQYRKEIEALG

SEQ ID NO: 108860 - protein, 284 aa, Setaria italica
  misc_feature (272)..(272): Xaa can be any naturally occurring amino acid
  Transcript Sequence Number=SeqID_42886
  Gene Ontology: Cellular component=chloroplast envelope
  Homolog annotation: Hit_ID=Q09S70; Match level="QueryCoverage=64%, HitCoverage=65%, E-value=3e-66, Identity=72%"; Hit description=Tic21
  Subcellular localization annotation: CTP_CleavageSite=62; ConfidenceScore=5.71e-01
MQALLLPARSAPPPPAVAASMLRQHAVSASACASQARRPLPGSAGRLRCGVRESTRRRLTAAAAAASSSSSGPIYPTPPPTEEEVERVKLEQVKKRLEKTARYFKNLGTLGFWSQLVCTIVSGGILSFSTVAMGKVTAPFTFYATAAGIAAAFVSVFWSFGYIRLSERLRRTAKEPAKAPPRADVVRSLKNGILLNMLGMGAAVLGMQATVGALVAKALTTSTVPYQAAPGQSPVLSIDVFLVQASANTILSHFLGLASSLELLRSVSLPPXAEAAPAPAPARA

SEQ ID NO: 108861 - protein, 334 aa, Setaria italica
  Transcript Sequence Number=SeqID_42887
  Gene Ontology: Cellular component=chloroplast envelope
  Homolog annotation: Hit_ID=A8J0N1; Match level="QueryCoverage=86%, HitCoverage=70%, E-value=1e-58, Identity=44%"; Hit description =Chloroplast lumenal protein
ADVDDGAGGNGEFPPGGGGGDGDNGGGGGGGGGGGDGEEGEDEFGPILSFEQVVQEAEKRGVSLPSLPADMVEAAKSVGIQKLLLLRYLDMQASVWPLGPAIRSCALLRNRMLVDPTFLFKIGTEIVIDTCCATFAEVQKRGEEFWSEFELYAADMLVGVVVNVALVGMLAPYARFGGRSASEGLLGRVRHAYDALPSSVFEAARPGCQFSVQQRIGTYFFKGILYGCVGFFCGIVGQGIANLIMTAKRSVKKSEDDVPVPPLLKTSALWGVFLGVSSNTRYQIINGLERLVEASPVAKRVPAASLAFTVGVRFANNVYGGMQFVDWARMTGCQ

SEQ ID NO: 108862 - protein, 113 aa, Setaria italica
  Transcript Sequence Number=SeqID_42888
  Gene Ontology: Cellular component=chloroplast envelope
  Homolog annotation: Hit_ID=A8J0N1; Match level="QueryCoverage=78%, HitCoverage=22%, E-value=2e-21, Identity=54%"; Hit description =Chloroplast lumenal protein
SNLPISSHCLCIICESQTFSFPSNLYRRSVKKSEDDVPVPPLLKTSALWGVFLGVSSNTRYQIINGLERLVEASPVAKRVPAASLAFTVGVRFANNVYGGMQFVDWARMTGCQ

SEQ ID NO: 108863 - protein, 387 aa, Setaria italica
  Transcript Sequence Number=SeqID_42889
  Gene Ontology: Mol. function=dopamine beta-monooxygenase activity; Biological process=histidine catabolic process
  Homolog annotation: Hit_ID=B9RNX5; Match level="QueryCoverage=98%, HitCoverage=40%, E-value=1e-135, Identity=63%"; Hit description =Dopamine beta-monooxygenase, putative
  Pfam annotation: Domain name=DOMON; Domain location=177-294; Score =46.8; E_value=8.6e-11; Accession=PF03351.9; Description=DOMON domain
MSRGGAFSFAKLNLSDASGGCVGPLDAEDKEDQARITAERKTPLVVTVGPALHYPNPPNYDKVLYINKKEAPLLKVERGVPVTFSVEAGHDVPLYITSDPVGGNATARNTPEVIYAGGPEAEGVRATPTELVWLPDRNTPDLVYYQSLYDQKMGWKIQVVDGGLSDMYNNSVLLDDQQVTFFWTLSGDSINIAARGEKKSGYLAIGFGSAMVNSYAYVGWVDGNGKGHVKSYWIDGKDGMSVHETHENVTHKRCRSENGAIVFEFTRPLTPSCSGRVECKNIIDPTTPLKVIWAMGAQWSSGPLSLKNMHSDTSNRPIRILLLSGLAEAVEDLRPVLAVHGFMMFVAWAYFSPRGIMAARYLKHLKGDLWFQAHTYLQYSSIAVMLL

SEQ ID NO: 108864 - protein, 145 aa, Setaria italica
  misc_feature (137)..(137): Xaa can be any naturally occurring amino acid
  Transcript Sequence Number=SeqID_42890
  Gene Ontology: Mol. function=nucleotide binding; Cellular component =intracellular; Biological process=small GTPase mediated signal transduction
  Homolog annotation: Hit_ID=B9RIC2; Match level="QueryCoverage=100%, HitCoverage=23%, E-value=3e-62, Identity=74%"; Hit description=GTP -binding protein enga, putative
  Pfam annotation: Domain name=MMR_HSR1; Domain location=1-114; Score= -2.7; E_value=0.0018; Accession=PF01926.15; Description=GTPase of unknown function
  Pfam annotation: Domain name=NOG1; Domain location=61-114; Score=1.7; E_value=0.0033; Accession=PF06858.6; Description=Nucleolar GTP -binding protein 1 (NOG1)
  Pfam module annotation: Pfam domain module=MMR_HSR1::NOG1; Domain location=1-114::61-114
RLYGRSYWGAQEFMVIDTGGVITLSKSQAGVMEELAVTTTVGMDGIPLATREAAIARMPSMIEKQAVAAVEEATVILFVVDGQDGLVAADIEISDWLRRNYSDKCVILAVNKCESPRKGQMQALDFWSLGFSPLPSXATTGTGTG

SEQ ID NO: 108865 - protein, 56 aa, Setaria italica
  Transcript Sequence Number=SeqID_42891
  Gene Ontology: Mol. function=lipoic acid binding; Cellular component =glycine cleavage complex; Biological process=glycine catabolic process
  Homolog annotation: Hit_ID=A3C6G9; Match level="QueryCoverage=87%, HitCoverage=29%, E-value=6e-19, Identity=91%"; Hit description =Glycine cleavage system H protein, mitochondrial
  Pfam annotation: Domain name=GCV_H; Domain location=2-53; Score= -24.3; E_value=6.8e-06; Accession=PF01597.11; Description=Glycine cleavage H-protein
PVAVNLPKLSETPGLINSSPYEDGWMIKVKPSSPGEADGLLDAAKYTKHCEEEDAH

SEQ ID NO: 108866 - protein, 163 aa, Setaria italica
  Transcript Sequence Number=SeqID_42892
  Gene Ontology: Mol. function=lipoic acid binding; Cellular component =glycine cleavage complex; Biological process=glycine catabolic process
  Homolog annotation: Hit_ID=A3C6G9; Match level="QueryCoverage=86%, HitCoverage=85%, E-value=1e-63, Identity=84%"; Hit description =Glycine cleavage system H protein, mitochondrial
  Pfam annotation: Domain name=GCV_H; Domain location=39-160; Score =257.4; E_value=3.4e-74; Accession=PF01597.11; Description=Glycine cleavage H-protein
MALRLWASSAAKALKLSGARAVAPAFSISRFFSTVHDGLKYTHSHEWVKHHEDGVVTVGITDHAQSHLGEVVFVELPEAGAQVSAGGSFGNVESVKATSDVNSPISGEVVEVNSKLSETPGLINSSPYEDGWMIKVKPSSPGEADGLLDAAKYTKHCEEEDAH

SEQ ID NO: 108867 - protein, 68 aa, Setaria italica
  Transcript Sequence Number=SeqID_42893
  Subcellular localization annotation: CTP_CleavageSite=58; ConfidenceScore=5.23e-01
MARLLVLRAAPYRHSSHLCAATLLVLSPSQHRHFASFPSSPHSAARRILPSPLRVPIRAVESSPGPTK

SEQ ID NO: 108868 - protein, 201 aa, Setaria italica
  misc_feature (20)..(20): Xaa can be any naturally occurring amino acid
  misc_feature (28)..(28): Xaa can be any naturally occurring amino acid
  misc_feature (104)..(104): Xaa can be any naturally occurring amino acid
  misc_feature (179)..(179): Xaa can be any naturally occurring amino acid
  Transcript Sequence Number=SeqID_42894
  Gene Ontology: Mol. function=protein binding; Cellular component =cytoplasm; Biological process=RNA metabolic process
  Homolog annotation: Hit_ID=B9SD55; Match level="QueryCoverage=99%, HitCoverage=24%, E-value=2e-67, Identity=65%"; Hit description =Regulator of nonsense transcripts, putative
INDEVKDGLMEELKTVNLSXKFVGEAVXYICTAKLRSTDIQAAVQICSLLHQRYMDFSPCLIQGLLKTFYPEMSGEPDLDKNARAMKKRSTLKLLMELYFVGIXEDVSTFTTIIKGLTSLEHLKDRETTQTNLSLLASFARQGKSFLGLQQHEQDAYDEFFTGLNITFDQKIFFKKAFXPYYDAASELLLSEHASLRVMEL

SEQ ID NO: 108869 - protein, 375 aa, Setaria italica
  Transcript Sequence Number=SeqID_42895
  Gene Ontology: Mol. function=transferase activity, transferring glycosyl groups
  Homolog annotation: Hit_ID=B6TPU8; Match level="QueryCoverage=99%, HitCoverage=93%, E-value=1e-165, Identity=79%"; Hit description =Transferase, transferring glycosyl groups
  Pfam annotation: Domain name=Glyco_transf_8; Domain location=89-346; Score=303.4; E_value=4.7e-88; Accession=PF01501.12; Description =Glycosyl transferase family 8
  Subcellular localization annotation: CTP_CleavageSite=68; ConfidenceScore=5.45e-01
MLWVARLSGFFSAAMVMVVLSPSLQSFPPAEAIRSSQFDGSVRFPGQIAGGARGIAFRRAPSFRNAADCGGGGKGNGTAANVCDPSLVHIAITLDEEYLRGSVAAVHSVVQHARCPESVFFHFLVSDPGLGDLVRAVFPQLRFKVYYFDPDRVRGLISTSVRQALEQPLNYARNYLADLLEPCVRRVIYLDSDLVLVDDVAKLWRTDLGGRTVGAPEYCHANFTKYFTGRFWSDQRFAGTFAGRRPCYFNTGVMVLDLERWRQAGYTQRIERWMEIQKSPPGRIYELGSLPPFLLVFAGHVAPIEHRWNQHGLGGDNVLGSCRDLHPGPVSLLHWSGSGKPWARLGAGRPCPLDALWAPFDLYGPAGAGAAEESR

SEQ ID NO: 108870 - protein, 137 aa, Setaria italica
  Transcript Sequence Number=SeqID_42896
  Gene Ontology: Mol. function=electron carrier activity; Cellular component=extracellular region; Biological process=response to oxidative stress
  Homolog annotation: Hit_ID=Q6Z3Y8; Match level="QueryCoverage=99%, HitCoverage=41%, E-value=9e-55, Identity=74%"; Hit description=Class III peroxidase 116
SSHSVGRVHCVSSVGRLYPAVDAGLDPAYGEYLRGRCPTADAREDTRDVAYARNDRATPMALDNMYYKNLLARRGLLLVDQRLADDPRTAPFVARMAADNGYFHDRFAAALLTLSENNPLGADEGEVRRDCRFVNPA

SEQ ID NO: 108871 - protein, 148 aa, Setaria italica
  Transcript Sequence Number=SeqID_42897
  Gene Ontology: Mol. function=exodeoxyribonuclease III activity; Cellular component=nucleus; Biological process=DNA repair
  Homolog annotation: Hit_ID=B9SNU5; Match level="QueryCoverage=98%, HitCoverage=48%, E-value=3e-54, Identity=69%"; Hit description=Rad1 DNA damage checkpoint protein, putative
TFTVKSAVLKETIDDLEWPGSSIQIRMQPDPPTVVFKGEGHGDLQVEFPYYANTDLLIVFQCDREVSYRYKYKFLRATTSNIPSSVMKENRRTKVTIGRGGMLKIQHLISLARPGMPYFRNIGGGTEQTSRIAHIEFFVKPEEDDSDA

SEQ ID NO: 108872 - protein, 554 aa, Setaria italica
  Transcript Sequence Number=SeqID_42898
  Gene Ontology: Mol. function=phosphotransferase activity, alcohol group as acceptor; Cellular component=peroxisome; Biological process= protein modification process
  Homolog annotation: Hit_ID=B6SKC9; Match level="QueryCoverage=99%, HitCoverage=99%, E-value=0.0, Identity=62%"; Hit description =Phosphatidylinositol 3-and 4-kinase family protein
  Pfam annotation: Domain name=PI3_PI4_kinase; Domain location=263-510; Score=281.3; E_value=2.1e-81; Accession=PF00454.19; Description =Phosphatidylinositol 3- and 4-kinase
  Pfam annotation: Domain name=ubiquitin; Domain location=114-185; Score=35.1; E_value=2.7e-07; Accession=PF00240.15; Description =Ubiquitin family
  Pfam annotation: Domain name=ubiquitin; Domain location=37-106; Score= 48.3; E_value=3e-11; Accession=PF00240.15; Description=Ubiquitin family
  Pfam module annotation: Pfam domain module=PI3_PI4_kinase::ubiquitin:: ubiquitin; Domain location=263-510::114-185::37-106
MSAAGVTTLSPLEDQLTLVPQCLFAAQPLDSILIFLAVPGMPLVPMRVLDSESVASVKLRIQRFRGFVATKQRLVFGGHDLTRNNSRVRDYGLADGNVLHLVVRLDEFRAITIETANGKKFKFQVESGHKVGYLKNKIAAETGEEIESLKDQKLVLGDEELEDHQLITDIAKKDDAVLHMFVREPAKVRTQKIDKETVLTVVTPGDEGNIHIDALNNTEHGHAPVEPIIVNRSVKLSPAIMQMISATIAGLENGYFPVMSAEGSGGVYFMKDQSGESNIAVFKPIDEEPMAENNPRGLPLSVDGEGLKRGTRVGEGALREVAAYVLDHPNDECRSEDGTGFSGVPPTALVRSFHMRKELKIGSLQIFVENQGSCEDMGPQAFPVKEVQKIAVLDIRLANADRHAGNILVCQDGDHVQLVPIDHGYCFPEKFEDCTFEWLYWPQARQPFGAETLAYIKLLDAGKDIALLKFHGWELSSQCARVLHVSTMLLKKGAERGLTPYDIGSIMCREMVNKESEIEALIEEAEDSILPETSDKTFLETVSEIMDRHLDNLL

SEQ ID NO: 108873 - protein, 61 aa, Setaria italica
  Transcript Sequence Number=SeqID_42899
YVVLSNKINHKNQNLHNVPDQFKEMLFLSSSTRSVQVNWTHHKKEVSYELIKKLQQSREEK

SEQ ID NO: 108874 - protein, 149 aa, Setaria italica
  Transcript Sequence Number=SeqID_42900
  Gene Ontology: Mol. function=peptide-N4-(N-acetyl-beta-glucosaminyl)as paragine amidase activity; Cellular component=vacuole
  Homolog annotation: Hit_ID=P81898; Match level="QueryCoverage=100%, HitCoverage=23%, E-value=6e-26, Identity=42%"; Hit description =Peptide-N4-(N-acetyl-beta-glucosaminyl)asparagine amidase A heavy chain
GAELLRTTTAEPTPDGVRWTVRKDVTRHSALLRSPTGGVLSVMLENLVNDQYTGVYNVSISFEFHGAPSYLADAGFSAGAGAVDRKPATPTLPESYFQPADLILPVSEATGNSSGFWFRIQNSSDSRSKIVTIPSSTYRAVLEVFVSPH

SEQ ID NO: 108875 - protein, 414 aa, Setaria italica
  Transcript Sequence Number=SeqID_42901
  Gene Ontology: Mol. function=triacylglycerol lipase activity; Cellular component=extracellular region; Biological process=lipid metabolic process
  Homolog annotation: Hit_ID=B6T9I6; Match level="QueryCoverage=100%, HitCoverage=100%, E-value=0.0, Identity=81%"; Hit description =Gastric triacylglycerol lipase
  Pfam annotation: Domain name=Abhydro_lipase; Domain location=41-111; Score=74.1; E_value=5.2e-19; Accession=PF04083.8; Description=ab -hydrolase associated lipase region
  Pfam annotation: Domain name=Abhydrolase_1; Domain location=125-406; Score=15.5; E_value=0.00031; Accession=PF00561.12; Description =alphabeta hydrolase fold
  Pfam module annotation: Pfam domain module=Abhydro_lipase::Abhydrolase _1; Domain location=41-111::125-406
MAQNLHVLCFLIFFIALNLQSVLSWRIQNSTNNIGDQCPPQPHPLGMCKSRVAAYGYPCEEYQVTTEDGYILSLKRIPHGVSNADNSTEDRTPVLLFHGLLVDGFCWVLSTPKQSLAFILADSGYDVWIANCRGTKSSRKHTSLTPEDPDFWDWTWDQLADYDLPAVLQFVYNQTGGKKVHYVGHSLGTLIILAAFSEHKLIDIVRSAVLLCPIAYLHRMKSRLIWLAARIFLAETIHMLGYHEFNPVGPVAQELLGEVCTDPEVDCYDIFSAVAGPDCCLNTSTTCIFLQHGPQSSSVKNMIHMSQLVRKAGIRKYDYGNKKENMKHYNQPEPPLYNLSSIPPHVPLFLTHGGQDFLGDVPDTRHLLRTLVRQHDSDDIEVLYMPDYAHGDFVMGYNAPQLIYKPMVEFFKRH

SEQ ID NO: 108876 - protein, 58 aa, Setaria italica
  Transcript Sequence Number=SeqID_42902
IMYVMMTSCIYCYFILARHSSTEVSLNRENGVGMSHMGLRVILSHIPHISCFSSACTS

SEQ ID NO: 108877 - protein, 56 aa, Setaria italica
  Transcript Sequence Number=SeqID_42903
CLRYDSETQLAHLPLHSSSHFFAFLLLHPHFNQSELPMQQAACCSLFLAFYFMRLQ

SEQ ID NO: 108878 - protein, 647 aa, Setaria italica
  Transcript Sequence Number=SeqID_42904
  Gene Ontology: Mol. function=double-stranded RNA binding; Cellular component=intracellular
  Homolog annotation: Hit_ID=C3SA83; Match level="QueryCoverage=99%, HitCoverage=90%, E-value=1e-171, Identity=64%"; Hit description=FHA domain protein
  Pfam annotation: Domain name=FHA; Domain location=50-117; Score=68.6; E_value=2.3e-17; Accession=PF00498.18; Description=FHA domain
PPAERQKQQRPRAPYVIPEWSAAPDHPFFLEVLKDGTIVDQLDVAKKGAYMFGRIDMCDFVLEHPTVSRFHAVLQFRNDGKVFLYDLGSTHGSFINKSQVKKKLYTEIHVGDVIRFGQSSRLYIFQGPSELMPPEKDMQKLRDAKIQQDMLDREASVLRAKTQAALAEGISWGMAEDAIEETAEDDADEITWQTYKGQLTDRQEKTRSKILKRMEKIANMKKEIDAIRVKDISQGGLTQGQQTQIARNEQRISQIMEELDNLEETLNDSIRESVGARSGKANRGSHKASLEEEDDILSDDDEFFDRTKKKSSQKSNEQQSVETADSLLEKKDSITSDIENKRKLLEEEKHKLAQGSTADLGDDLDAYMSGLSSQLVHDKIAQIQKELSDLQAELDRVVYLLKIADPMGEAARKRDLKPREAGPPASNDNPIPEAKKQNKVVKATSAVEKPKDSSNETSTNKPAKVETDTSKNQENGSKPAFSLPKPQWLGDKRIIEPEENFINEEKADAEEPDNFVDYKDRKAILSNSCSGKELEEAAPGLILRKRKSTDQSASSEANSSSVESEASVADAVALLLKHKRGLQTSEEMENEDEPHASKREGKKSKQKRVLGPARPDFLEAGPDSETWVPPEGQTGDGRTALNDRLGY

SEQ ID NO: 108879 - protein, 123 aa, Setaria italica
  Transcript Sequence Number=SeqID_42905
GRRRRRSWYNQLDFCRCFRTTHFTASVRNAMPPPAQSLITSLGNLLQHFTARDHHPLCLAHAASVAPRAATPRHASCRYAVVPPPRRTPTAHCYDSLVPRPLPLPHLCGTVSWPEHLHDQAPP

SEQ ID NO: 108880 - protein, 49 aa, Setaria italica
  misc_feature (32)..(32): Xaa can be any naturally occurring amino acid
  Transcript Sequence Number=SeqID_42906
SQGSSSKWSAEKIRGEYESLFDPVKATEEGRXVYFTGEVAPISRKLSFS

SEQ ID NO: 108881 - protein, 135 aa, Setaria italica
  misc_feature (79)..(79): Xaa can be any naturally occurring amino acid
  Transcript Sequence Number=SeqID_42907
  Gene Ontology: Mol. function=aminopeptidase activity; Cellular component=vacuole; Biological process=proteolysis
  Homolog annotation: Hit_ID=B9RDY5; Match level="QueryCoverage=100%, HitCoverage=26%, E-value=2e-44, Identity=62%"; Hit description =Proline iminopeptidase, putative
PSGGRLTPKMLQCLGLSGLGSGGGFERLHYLLERVWDPVLVPGAKRRISYYFLKEFEMWLGFDQNPLYALLHESIYCEXGSSSKWSAEKIRGEYESLFDPVKATEEGRPVYFTGEMVFPCMFDEIHALRDLKEAA

SEQ ID NO: 108882 - protein, 507 aa, Setaria italica
  Transcript Sequence Number=SeqID_42908
  Gene Ontology: Mol. function=aminopeptidase activity; Cellular component=vacuole; Biological process=proteolysis
  Homolog annotation: Hit_ID=B9RDY5; Match level="QueryCoverage=88%, HitCoverage=87%, E-value=1e-169, Identity=61%"; Hit description =Proline iminopeptidase, putative
  Pfam annotation: Domain name=Abhydrolase_1; Domain location=140-426; Score=15.7; E_value=0.0003; Accession=PF00561.12; Description =alphabeta hydrolase fold
  Subcellular localization annotation: CTP_CleavageSite=56; ConfidenceScore=5.56e-01
AAAIAVATATPAVAAPPLRRHPAFLPVPGAARLRLTSCRIPPPRGAAAAAMSSSARAEHEAGAWYAVPGLSLRDHRFAVPLDHSSPDSGATITVFAREVVAAGKEDASLPYLLYLQGGPGFESPRPTEAGGWLKKACEDHRVVLLDQRGTGLSTPLTPSSLSQITSPTKQVEYLKHFRADNIIKDAEFIRLRLVPDAKPWTVLGQSYGGFCAVTYLSFAPEGLKSVLLTGGLPPLGEPCTAQTVYRACFKQVQQQNEKYYKRYPQDIQVIHEIVRYLSETEGGGVALPSGGRLTPKMLQCLGLSGLGSGGGFERLHYLLERVWDPVLVPGAKRRISYYFLKEFEMWLGFDQNPLYALLHESIYCEGSSSKWSAEKIRGEYESLFDPVKATEEGRPVYFTGEMVFPCMFDEIHALRDLKEAAHLLAEKEDWPPLYDVSKLNNNKVPVAAAVYYEDMYVNFNIAKETASQIAGIRLWVTNEYMHSGIRDGGSHVFEHLMGLLNGKKPLF

SEQ ID NO: 108883 - protein, 97 aa, Setaria italica
  misc_feature (5)..(5): Xaa can be any naturally occurring amino acid
  Transcript Sequence Number=SeqID_42909
  Gene Ontology: Mol. function=aspartyl esterase activity; Cellular component=cell wall; Biological process=cell wall organization and biogenesis
  Pfam annotation: Domain name=Pectinesterase; Domain location=1-81; Score=-115.0; E_value=7e-13; Accession=PF01095.11; Description =Pectinesterase
PWKQXYSRVVFMQSYIGGVVRPEGWLAWDGEFALDTLYYGEYMNTGPGAGVGARVRWPGFHVMTSPAEAGNFTVAQFIEGNMWLPPTGVKYTAGLTS

SEQ ID NO: 108884 - protein, 63 aa, Setaria italica
  Transcript Sequence Number=SeqID_42910
  Gene Ontology: Mol. function=protein kinase activity; Biological process=protein amino acid phosphorylation
  Homolog annotation: Hit_ID=UPI000034F3C7; Match level="QueryCoverage =92%, HitCoverage=6%, E-value=1e-21, Identity=79%"; Hit description =protein kinase family protein
EVKEMGLLEIKHGLLQVAETLDFLHNNAHLAHRAISPETVFITSSGSWKLGGFGFALSVDQAT

SEQ ID NO: 108885 - protein, 669 aa, Setaria italica
  misc_feature (28)..(28): Xaa can be any naturally occurring amino acid
  misc_feature (651)..(651): Xaa can be any naturally occurring amino acid
  Transcript Sequence Number=SeqID_42911
  Gene Ontology: Mol. function=protein kinase activity; Cellular component=cytoplasmic vesicle; Biological process=protein amino acid phosphorylation
  Homolog annotation: Hit_ID=UPI000034F3C7; Match level="QueryCoverage =89%, HitCoverage=64%, E-value=0.0, Identity=68%"; Hit description =protein kinase family protein
  Pfam annotation: Domain name=HEAT; Domain location=355-391; Score =11.6; E_value=1.9; Accession=PF02985.14; Description=HEAT repeat
  Pfam annotation: Domain name=HEAT; Domain location=394-431; Score =6.0; E_value=9; Accession=PF02985.14; Description=HEAT repeat
  Pfam annotation: Domain name=Pkinase; Domain location=5-239; Score= -39.0; E_value=3.6e-06; Accession=PF00069.17; Description=Protein kinase domain
  Pfam module annotation: Pfam domain module=HEAT::HEAT::Pkinase; Domain location=355-391::394-431::5-239
DAARLVRLRHPGVLHVVQALDETKAAMXAMATEPVFASVSNALGCLDNVGKVPKELKGMEMGLLEIKHGLLQVAETLDFLHNNAHLAHRAISPETVFITSSGSWKLGGFGFALSVDQATGRLTSSQQFHYSDYDVEDTALPLQPSLNYTAPELVRSGDSKVGSACDMFSFGCLAYHLIARRPFLDCHNNVKMYMNALTYLTSEAFSNIPSDLVSDLQRMLSMDAVSRPSAMAFTGSSFFRDDTRLRALRFLDHLLERDNMQKTEFLKALSDMWKDFDSRVLRYKVLPPLCAELRNMVMQPMILPMVLTIAESQDKGDFELSTLPALVPVFTSASGETLLLLVKHADLIINKATQEHLISHVLPMLVRAYDDNDPRLQEEVLRRTVPLSRQLDIKLVKQAVLPRVHGLALKTTVAAVRVNALRCLGDLVPSVDKEGILGILETVRRCTAVDHSAPTLMCTLGVANAVYKQCGVEFAAEHVIPLIFPLLTAHQLNVQQFAKYMLFVKDITSKIEEKRGVTVTDNGNTEVKASPSLTNGIHSEPMPVQIPAAKSTTAWDEDWGPTKKTSAPSLSVDSSARTNQPSSDPFDFSTQTKQSTTLPFDFSTQTKQPSLVSQVTAATIPPAQPLPSLQSLAPSSGPQTSGSCVPVDIEXWPPRSSSSSILVLSNCRP

SEQ ID NO: 108886 - protein, 268 aa, Setaria italica
  Transcript Sequence Number=SeqID_42912
  Gene Ontology: Mol. function=protein kinase activity; Biological process=protein amino acid phosphorylation
  Subcellular localization annotation: CTP_CleavageSite=67; ConfidenceScore=5.75e-01
WIALQKQSTTLPFDFSTQTKQPSLVSQVTAATIPPAQPLPSLQSLAPSSGPQTSGSCVPVDIEWPPRSSSSSDFNAPLSVNKENDSGRLSSDVLDDVDPFADWPPKTSSATSISTIEHWANTNQSISGFSSGNIGLGGSGNSLGQMKSNQMSWSNTSNLMGMNSTGSYLNQGNTALGFGNPIGGLSTGLSNSSSSSAGQSMMQPKSDFGSLSMSTNNAAHGPPRLAPPPSAAVGRGRGRNQGQSALSRASRPPHSNSSSGQQPILDLL

SEQ ID NO: 108887 - protein, 61 aa, Setaria italica
  Transcript Sequence Number=SeqID_42913
QCRPGNKIKNVTWCLIAESTTFCAQQALAPMLLSDVFRIATLNRMYEHIKFILTSLYHPPF

SEQ ID NO: 108888 - protein, 115 aa, Setaria italica
  misc_feature (32)..(32): Xaa can be any naturally occurring amino acid
  misc_feature (68)..(68): Xaa can be any naturally occurring amino acid
  Transcript Sequence Number=SeqID_42914
  Gene Ontology: Mol. function=pseudouridine synthase activity; Biological process=pseudouridine synthesis
  Homolog annotation: Hit_ID=B4FYI2; Match level="QueryCoverage=86%, HitCoverage=32%, E-value=6e-29, Identity=49%"; Hit description =Pseudouridylate synthase
MFSVAVASSCLNGSDPEARHNEKFHQSSALEXDLSPPFDHTVISTENEIQCNRNAEGNGLPDDSSKRXIFKALERAKLMVASRKESCYSRCGRTDKGVSASGQVAAESQEIMSIG

SEQ ID NO: 108889 - protein, 301 aa, Setaria italica
  Transcript Sequence Number=SeqID_42915
  Gene Ontology: Mol. function=pseudouridine synthase activity; Cellular component=nucleus; Biological process=pseudouridine synthesis
  Homolog annotation: Hit_ID=B4FYI2; Match level="QueryCoverage=92%, HitCoverage=57%, E-value=1e-138, Identity=84%"; Hit description =Pseudouridylate synthase
  Pfam annotation: Domain name=PseudoU_synth_1; Domain location=136 -251; Score=89.1; E_value=1.6e-23; Accession=PF01416.12; Description =tRNA pseudouridine synthase
MAAAEGETAAALRAEVAALRMRVQELERENQRLAKVASSCTCGFKEENVGSVAVASSCLNGSDPEARHNEKFHQSSALEKDLSPPFDHTVISTENEIQCNRNAEGNGLPDDSSKRTKRTGHQVAILSHCPKRLVALKVMYFGQRFYGFSSEGNMEPTVESEIFKALERAKLMVASRKESCYSRCGRTDKGVSASGQVISLYLRSNIKDVGEDMLDERSEIDYVKVLNRILPRDIRVLGWCPVPADFHARFTCLGREYKYLFWRGDLDILEMQKAASKFIGEHDFRNFCKMDAANVSNYKRR

SEQ ID NO: 108890 - protein, 40 aa, Setaria italica
  Transcript Sequence Number=SeqID_42916
GSNSCRPIVLFRICFLVLLMYSYSFEGNFAVTLIHYPLLK

SEQ ID NO: 108891 - protein, 134 aa, Setaria italica
  Transcript Sequence Number=SeqID_42917
  Gene Ontology: Mol. function=binding; Cellular component =mitochondrial inner membrane; Biological process=transport
  Homolog annotation: Hit_ID=B6TN88; Match level="QueryCoverage=64%, HitCoverage=21%, E-value=1e-32, Identity=76%"; Hit description =Protein brittle-1
  Pfam annotation: Domain name=Mito_carr; Domain location=16-98; Score =79.1; E_value=1.6e-20; Accession=PF00153.19; Description =Mitochondrial carrier protein
VNSLYQRSYKNRTETSLATALLSATFATLMCYPLDTVRRQMQMKGTPYNTIFDAIPGIVERDGLIGLYRGFVPNALKNLPNSSIKLTAFDTVKSTHCLLFPSNAFSTSMNVYAKENSAEGPIWKGTEGCAACRS

SEQ ID NO: 108892 - protein, 67 aa, Setaria italica
  Transcript Sequence Number=SeqID_42918
  Gene Ontology: Mol. function=binding; Cellular component =mitochondrial inner membrane
  Homolog annotation: Hit_ID=B6TN88; Match level="QueryCoverage=79%, HitCoverage=13%, E-value=7e-19, Identity=86%"; Hit description =Protein brittle-1
  Pfam annotation: Domain name=Mito_carr; Domain location=12-67; Score=- 5.6; E_value=0.011; Accession=PF00153.19; Description=Mitochondrial carrier protein
KNFSGEKDGELTVFGRLAAGACAGMTSTLVTYPLDVLRLRLAVQSGHSTMSQVTTLVNANFCFWKSA

SEQ ID NO: 108893 - protein, 300 aa, Setaria italica
  Transcript Sequence Number=SeqID_42919
  Gene Ontology: Mol. function=binding; Cellular component =mitochondrial inner membrane; Biological process=transport
  Homolog annotation: Hit_ID=B6TN88; Match level="QueryCoverage=99%, HitCoverage=75%, E-value=1e-146, Identity=84%"; Hit description =Protein brittle-1
  Pfam annotation: Domain name=Mito_carr; Domain location=107-194; Score=96.1; E_value=1.2e-25; Accession=PF00153.19; Description =Mitochondrial carrier protein
  Pfam annotation: Domain name=Mito_carr; Domain location=201-285; Score=88.9; E_value=1.8e-23; Accession=PF00153.19; Description =Mitochondrial carrier protein
  Pfam annotation: Domain name=Mito_carr; Domain location=7-103; Score =118.5; E_value=2.2e-32; Accession=PF00153.19; Description =Mitochondrial carrier protein
  Pfam module annotation: Pfam domain module=Mito_carr::Mito_carr::Mito_ carr; Domain location=107-194::201-285::7-103
  Subcellular localization annotation: CTP_CleavageSite=42; ConfidenceScore=5.04e-01
LLALVPHSAALFAAGAAAGAAAKTVTAPLDRVKILMQTHSVRVAGETAKKGVGFLEAIADIGKEEGLKGYWKGNLPQVIRIIPYSAVQLFSYEVYKKIFRRKDGELTVFGRLAAGACAGMTSTLVTYPLDVLRLRLAVQSGHSTMSQVALNMLREEGLASFYGGLGPSLIGIAPYIAVNFCVFDLMKKSVPEKYKNRTETSLATALLSATFATLMCYPLDTVRRQMQMKGTPYNTIFDAIPGIVERDGLIGLYRGFVPNALKNLPNSSIKLTAFDTVKTLLATGQKELDKLIQENQEKTI

SEQ ID NO: 108894 - protein, 46 aa, Setaria italica
  Transcript Sequence Number=SeqID_42920
  Gene Ontology: Mol. function=binding; Cellular component =mitochondrial inner membrane
  Homolog annotation: Hit_ID=B6TN88; Match level="QueryCoverage=95%, HitCoverage=11%, E-value=9e-13, Identity=81%"; Hit description =Protein brittle-1
GFVPNALKSYTHSSIKLTAFDTVKTLLATGQKELDKLIQENQEKTI

SEQ ID NO: 108895 - protein, 116 aa, Setaria italica
  Transcript Sequence Number=SeqID_42921
  Subcellular localization annotation: CTP_CleavageSite=77; ConfidenceScore=5.43e-01
MSAENCLMASSEAAAIAGDGGLGGVKSRVFSTFFSSLFLPFLPLCSVLSPSCCVLVRFLTSHHTRSPANRVDVWCCGAQLRWSVPAGDPNVWGIGRMLGSVPVLKKDQPSRRVFFI

SEQ ID NO: 108896 - protein, 230 aa, Setaria italica
  misc_feature (160)..(160): Xaa can be any naturally occurring amino acid
  Transcript Sequence Number=SeqID_42922
  Subcellular localization annotation: CTP_CleavageSite=31; ConfidenceScore=5.00e-01
MGCFLGCFGGAKERRRRRKRSPAQSPNGRARAATRVTPKKVDLDGEAVSAAAPLLATLLELRDSTDDMCLAVVKKKVTFDPNVTTYEAAAIPEEDGEGADPEDDGASREKDWMLAPECAKSEAVPFNHRYSNCADSDNDSEYEDAEEEEYDEFEDDEEDXEEEDGLDECAIDDDDEEHGLLGIGRSEEEACESLFLLPISKTSKESGGQVAAPGVAAPEAPSVLNSVENL

SEQ ID NO: 108897 - protein, 124 aa, Setaria italica
  Transcript Sequence Number=SeqID_42923
PASKQGQQASSMEDKDKSDGWDEDLEEADELACVQKDPVSTSFLASGISRRNKSEKKPRFSIRGHDFVPYDVKTEILHIRGHEGTYGVPSTKLSQTMVSSQRNHFYPVNPPGISRRNKSEKNPD

SEQ ID NO: 108898 - protein, 89 aa, Setaria italica
  Transcript Sequence Number=SeqID_42924
GCDFRLARQCQWQYQYGMATPTELTRERCLDSLGKKGSSLLTRTRITNKALQGGEEERKEKVSYSIPFLASYPPSLCFLSQPEPARNRS

SEQ ID NO: 108899 - protein, 185 aa, Setaria italica
  Transcript Sequence Number=SeqID_42925
QHHACVRASARGEDVDHHPRPQPSGRGQIHGNINIVRIMDIPNASFVEMVELSWFKPDPERNVSFELQPHSSHRYRRWISLTQQGQNASLYYLYDRHLHDWSLGFPVMVVVETTYKPALSEKSINKTYYCWPVTFLRSYPSIPDGGEVACKTEEDLEYKVSWQNPPPAPSPPPAVAGNGTSPSGT

SEQ ID NO: 108900 - protein, 50 aa, Setaria italica
  Transcript Sequence Number=SeqID_42926
  Gene Ontology: Mol. function=oxidoreductase activity, acting on NADH or NADPH; Cellular component=mitochondrial respiratory chain complex I; Biological process=mitochondrial electron transport, NADH to ubiquinone
  Homolog annotation: Hit_ID=Q8LAL7; Match level="QueryCoverage=100%, HitCoverage=10%, E-value=4e-22, Identity=100%"; Hit description=NADH dehydrogenase
TCKDREIMRHDPHKLLEGCLIAGVGMRASAAYIYIRGEYVNERLNLEKAR

SEQ ID NO: 108901 - protein, 56 aa, Setaria italica
  Transcript Sequence Number=SeqID_42927
  Gene Ontology: Mol. function=oxidoreductase activity, acting on NADH or NADPH; Cellular component=plasma membrane; Biological process =mitochondrial electron transport, NADH to ubiquinone
  Homolog annotation: Hit_ID=Q8LAL7; Match level="QueryCoverage=91%, HitCoverage=10%, E-value=2e-19, Identity=84%"; Hit description=NADH dehydrogenase
  Pfam annotation: Domain name=NADH_4Fe-4S; Domain location=1-36; Score= 46.9; E_value=8e-11; Accession=PF10589.1; Description=NADH-ubiquinone oxidoreductase-F iron-sul
AKLESCGQCTPCREGTPWLWMIMERLKVGNAKLEEIDMLQEVTKQINFLQLCITNL

SEQ ID NO: 108902 - protein, 86 aa, Setaria italica
  Transcript Sequence Number=SeqID_42928
  Gene Ontology: Mol. function=oxidoreductase activity, acting on NADH or NADPH; Cellular component=plasma membrane; Biological process =mitochondrial electron transport, NADH to ubiquinone
  Homolog annotation: Hit_ID=Q8LAL7; Match level="QueryCoverage=74%, HitCoverage=13%, E-value=8e-31, Identity=96%"; Hit description=NADH dehydrogenase
  Pfam annotation: Domain name=NADH_4Fe-4S; Domain location=2-32; Score= 33.8; E_value=4e-07; Accession=PF10589.1; Description=NADH-ubiquinone oxidoreductase-F iron-sul
ICGQCTPCREGTPWLWMIMERLKVGNAKLEEIDMLQEVTKQIEGHTICALGDAAAWPVQGLIRHFRPELERRIRERAERELLAASA

SEQ ID NO: 108903 - protein, 43 aa, Setaria italica
  Transcript Sequence Number=SeqID_42929
  Gene Ontology: Mol. function=calcium ion binding
MTKVPGTPMEKPFFDSIPGTPVQKSVFDYSVPSTPMQNSVFDY

SEQ ID NO: 108904 - protein, 120 aa, Setaria italica
  Transcript Sequence Number=SeqID_42930
  Gene Ontology: Mol. function=monodehydroascorbate reductase (NADH) activity; Cellular component=cytoplasm; Biological process=oxidation reduction
  Homolog annotation: Hit_ID=Q9XFZ3; Match level="QueryCoverage=93%, HitCoverage=25%, E-value=7e-55, Identity=91%"; Hit description =Cytosolic monodehydroascorbate reductase
MAYTPGTLDHSRKSAEQAVKAIKGKESGESVPEYDYLPYFYSRSFDLGWQFYGDNVGETILFGDSDPASSKPKFGSYWIKDGKVLGAFLEGGSPDENTAIAKVAKTQPPVASIEELKRKA

SEQ ID NO: 108905 - protein, 144 aa, Setaria italica
  Transcript Sequence Number=SeqID_42931
  Gene Ontology: Mol. function=calcium ion binding; Cellular component =plasma membrane; Biological process=intracellular protein transport
  Homolog annotation: Hit_ID=UPI000034F3BF; Match level="QueryCoverage =100%, HitCoverage=11%, E-value=1e-27, Identity=53%"; Hit description= calcium-binding EF hand family protein
  Pfam annotation: Domain name=efhand; Domain location=16-44; Score =26.8; E_value=9e-05; Accession=PF00036.24; Description=EF hand
EEARNLFLSWRLPRDILRKVWDLSDQDKDGMLSFKEFCVAVYLMERHREHRPLPDVLPDGIWAEGTSLPSTGQFAGNPSGPPSHASTANRGMQGPHHGMLPPSMKPPSRRPLSLDADDTVKAEQQKPKIPVLEEHLVGQLSKEE

SEQ ID NO: 108906 - protein, 1176 aa, Setaria italica
  Transcript Sequence Number=SeqID_42932
  Gene Ontology: Mol. function=calcium ion binding; Cellular component =plasma membrane; Biological process=intracellular protein transport
  Homolog annotation: Hit_ID=UPI000034F3BF; Match level="QueryCoverage =100%, HitCoverage=97%, E-value=1e-178, Identity=38%"; Hit description=calcium-binding EF hand family protein
  Pfam annotation: Domain name=efhand; Domain location=15-43; Score =13.8; E_value=0.66; Accession=PF00036.24; Description=EF hand
  Pfam annotation: Domain name=efhand; Domain location=366-394; Score =14.7; E_value=0.38; Accession=PF00036.24; Description=EF hand
  Pfam annotation: Domain name=efhand; Domain location=400-428; Score =26.8; E_value=9e-05; Accession=PF00036.24; Description=EF hand
  Pfam module annotation: Pfam domain module=efhand::efhand::efhand; Domain location=15-43::366-394::400-428
EAVAFFKGSGLPQPVLAQIWTYADKNRTGFLGREDFYNSLKLVTVAQSGRELTPDIVRSALFGPAAAKIPAPRINISTAAPQTNSAASPPNATQALGSGQQNHAIRGPQVLPGASSNPQVRPPQPPNANAVPPAQGIASRPPVGGGPSGLNHTSSTTTNLATDWFSGKRSASPLGATSQAPTRGISPQANLNSAGISAQNSTPLPGYNSQTAGATTPANANSTNLNMMPSRPSVNDSKALVPLGNGLSSNSTFGVDPFSATPQAEQDSSLHPNVPNNLPSSTAPSSAAGPHHPPKPMQAGPAQVISPLPSHTSQLPHSQPAPRQQQFNSIPSTPGPVSANIPGGIPSNPNHSQAPWPKITQVDVRKYMIVFIKVDRDRDGKITGEEARNLFLSWRLPRDILRKVWDLSDQDKDGMLSFKEFCVAVYLMERHREHRPLPDVLPDGIWAEGTSLPSTGQFAGNPSGPPSHASTGLANRGMQGPHHGMLPPSMKPPSRRPLSLDADDTVKAEQQKPKIPVLEEHLVGQLSKEEQGTLEAKFKEASDADKKVQELEKEIQDSREKTEFYRTKMQELILYKSRCENRLNEVSESMSADKREVQSLAAKYDERCKKVGDVASKLTMDEATFREIQEKKLEIYNAIVKLQKGDESDEKLQERANKIQSDLEELVKSLNEQCKRYGLRAKPTTLVELPFGWQPGIQETAATWDEEWDRFGDEGFSVIKELTVEVEPPIVPKSEPTVEDVKVSANGASTEKEDKKGDKSTAAAVEQAVEPEATPSNSKPESVKSPPVSPVKNREDGSTEKQSGTNDISPRATESVSNRGATNSSAHGDNTYDGHSWAPSFDHGIDNDSLWNFGHKDGENGDSDLFFGPQGLPPIRTGGSSSSSLFAKEQKPSFDSVPGTPMEKPFFDSIPGTPVQKSVFDYSVPSTPMQNSVFDYSVPSTPMQKSLFDSVPGTPVQRSVFDSVPSTPMQKSVFDSVPSTPMQKPFFDSFPSTPMQRSLFDSGPSRAESPTAGSMYGNEQKGFFDSSVPSTPMYNSSFTPRYSEAGDDSFDTMSQYSSFGMHDNNSFGQRDSFSRFDSFRSNADNGGNDTFARFDSFRSISDQGGGNSFMRYDSMNSTSDHDRTDTFARFDSMKSSDYNNRGYSFDDEDPFGTGPFKPTETSSSPTKHGTDAWSAF

SEQ ID NO: 108907 - protein, 436 aa, Setaria italica
  misc_feature (33)..(33): Xaa can be any naturally occurring amino acid
  Transcript Sequence Number=SeqID_42933
  Gene Ontology: Mol. function=monodehydroascorbate reductase (NADH) activity; Cellular component=cytoplasm; Biological process=oxidation reduction
  Homolog annotation: Hit_ID=Q9XFZ3; Match level="QueryCoverage=100%, HitCoverage=100%, E-value=0.0, Identity=89%"; Hit description =Cytosolic monodehydroascorbate reductase
  Pfam annotation: Domain name=DAO; Domain location=8-415; Score=-52.2; E_value=0.03; Accession=PF01266.16; Description=FAD dependent oxidoreductase
  Pfam annotation: Domain name=Pyr_redox; Domain location=167-262; Score=101.9; E_value=2.3e-27; Accession=PF00070.19; Description =Pyridine nucleotide-disulphide oxidore
  Pfam annotation: Domain name=Pyr_redox_2; Domain location=8-305; Score=160.0; E_value=6.9e-45; Accession=PF07992.6; Description =Pyridine nucleotide-disulphide oxidore
  Pfam module annotation: Pfam domain module=DAO::Pyr_redox::Pyr_redox _2; Domain location=8-415::167-262::8-305
MASGKHFKYVILGGGVAAGYAAREFAKQGVKPXGELAVISKEAVAPYERPALSKGYLFPQNAARLPGFHVCVGSGGERQLPEWYTEKGIELILSTEIVKADLSTKTLTSAAGATFTYEILLIATGSSVIKLTDFGTQGADSNNILYLREIDDADKLVAAIQAKKGGKAVVIGGGYIGLEISAALKINDFDVTMVFPEPWCMPRLFTADIAAFYEAYYTNKGVKILKGTLAVGFDANANGDVTAVKLKDGTVLEADIVVVGVGARPLTTLFKGQVAEEKGGIKTDAFFETSVPGVYAIGDVATFPLKMYNELRRVEHVDHSRKSAEQAVKAIKGKESGESVPEYDYLPYFYSRSFDLGWQFYGDNVGETILFGDSDPASSKPKFGSYWIKDGKVLGAFLEGGSPDENTAIAKVAKTQPPVASIEELKKEGLQFASKI

SEQ ID NO: 108908 - protein, 132 aa, Setaria italica
  Transcript Sequence Number=SeqID_42934
  Homolog annotation: Hit_ID=UPI0001A7B11C; Match level="QueryCoverage =90%, HitCoverage=4%, E-value=2e-10, Identity=33%"; Hit description =binding
MTTWRGLIGAALSSYCELLLVNTNINSELSFFISLAKSHSTCPQVLSAVAEYLDSLQAVASLEVTKEFDPQNLLDLFSIFAVNLSSPNKDVRILTLRILSYFVKMDQRLGTNEERPHKRQRTEDSGEETAKC

SEQ ID NO: 108909 - protein, 583 aa, Setaria italica
  Transcript Sequence Number=SeqID_42935
  Gene Ontology: Mol. function=binding; Cellular component=cytosol
  Homolog annotation: Hit_ID=B6U4A9; Match level="QueryCoverage=99%, HitCoverage=84%, E-value=0.0, Identity=84%"; Hit description =Armadillo/beta-catenin-like repeat family protein
  Pfam annotation: Domain name=Arm; Domain location=12-52; Score=21.2; E_value=0.0042; Accession=PF00514.15; Description=Armadillobeta -catenin-like repeat
  Pfam annotation: Domain name=Arm; Domain location=267-307; Score=8.7; E_value=0.97; Accession=PF00514.15; Description=Armadillobeta-catenin- like repeat
  Pfam annotation: Domain name=Arm; Domain location=315-350; Score =19.2; E_value=0.017; Accession=PF00514.15; Description=Armadillobeta- catenin-like repeat
  Pfam annotation: Domain name=Arm; Domain location=352-392; Score =26.6; E_value=0.0001; Accession=PF00514.15; Description =Armadillobeta-catenin-like repeat
  Pfam annotation: Domain name=Arm; Domain location=395-435; Score=6.5; E_value=1.8; Accession=PF00514.15; Description=Armadillobeta-catenin -like repeat
  Pfam annotation: Domain name=Arm; Domain location=482-530; Score=3.4; E_value=4.6; Accession=PF00514.15; Description=Armadillobeta-catenin -like repeat
  Pfam annotation: Domain name=HEAT; Domain location=150-181; Score =9.7; E_value=3.2; Accession=PF02985.14; Description=HEAT repeat
  Pfam annotation: Domain name=HEAT; Domain location=18-54; Score=12.6; E_value=1.4; Accession=PF02985.14; Description=HEAT repeat
  Pfam annotation: Domain name=HEAT; Domain location=273-309; Score =14.2; E_value=0.56; Accession=PF02985.14; Description=HEAT repeat
  Pfam annotation: Domain name=HEAT; Domain location=316-352; Score =18.3; E_value=0.031; Accession=PF02985.14; Description=HEAT repeat
  Pfam annotation: Domain name=HEAT; Domain location=358-394; Score =12.1; E_value=1.6; Accession=PF02985.14; Description=HEAT repeat
  Pfam annotation: Domain name=HEAT; Domain location=405-437; Score =3.8; E_value=17; Accession=PF02985.14; Description=HEAT repeat
  Pfam annotation: Domain name=HEAT; Domain location=495-532; Score =2.3; E_value=26; Accession=PF02985.14; Description=HEAT repeat
  Pfam module annotation: Pfam domain module=Arm::Arm::Arm::Arm::Arm::Ar m::HEAT::HEAT::HEAT::HEAT::HEAT::HEAT::HEAT; Domain location=12 -52::267-307::315-350::352-392::395-435::482-530::150-181::18-54::273- 309::316-352::...
  Pfam module annotation: Domain location=358-394::405-437::495-532
AAAAVGSFSCGVDDGARAVLAAGAVGHLTRLLAHPDEKVVDASARALRMIYQSKLAPKFDVNNGKNMDFVLSLLNSENENVTELAATIISHSCENSSEQLSLCSAGVPQKLVSLFGGSMNLRDACLDSVTAVIRNNREVASTFASTDHGKGFRSVVGLIHDRSPRTRLLACLCLIALGHASPCHFQDKQIKTKLIMVLLELMEEPDHVGDEAPLALTTLIKDSLELQKQALTTNAVEKLSNHLLANSLETKRAVTILLALSELCSKLEESRSQLMSAEVSTLILEALKHDWADIRVAACSCLKNISRSPKVLSGGRLSCDTVIGPLVQLLYDSSTSVQVAALGAICNIAVNLTPRKSVLLHSGVVSQLVHLSKSMDPTLRLKSVWALRNIMFLLSPKDKDFIVKELTLSTLSSLICDSEHFVQEQTLALVHNLVDGYVESANYVIGEDGMVIDAIARQLNNASALGVCIQGMFVLANIAAGNEMNKEAVMNVLLPHRPDRIKPSFVVNFLQSKDKQLRVATLWCLLNLIYPKCEASSGRVIRLQTAGVIQQVKSMINDPCLDCKLRVRMLLEHCVDNADDCFM

SEQ ID NO: 108910 - protein, 85 aa, Setaria italica
  Transcript Sequence Number=SeqID_42936
  Gene Ontology: Mol. function=transcription regulator activity; Cellular component=nucleus; Biological process=regulation of transcription
  Homolog annotation: Hit_ID=B6TXZ4; Match level="QueryCoverage=97%, HitCoverage=95%, E-value=3e-29, Identity=80%"; Hit description=DNA binding protein
  Pfam annotation: Domain name=HLH; Domain location=4-53; Score=8.8; E _value=0.02; Accession=PF00010.18; Description=Helix-loop-helix DNA -binding domain
MSGRRGRISDDEINELISKLQALLPESSRRRNASRSSASKLLKETCSYIKSLHREVDDLSERLSGLMSTMDNDSPQAEIIRSLLR

SEQ ID NO: 108911 - protein, 122 aa, Setaria italica
  Transcript Sequence Number=SeqID_42937
  Gene Ontology: Mol. function=calcium ion binding
  Homolog annotation: Hit_ID=Q7G6C3; Match level="QueryCoverage=90%, HitCoverage=31%, E-value=8e-11, Identity=39%"; Hit description=F-box domain containing protein
PNPGVGGAVGRCRDFSLSSLPTVDHWSLADSRDGLLLFCSSCDRSTNDRDLPDLRDIPKHFAVCDPLSGHSILLPKPGAGLYLGSYYLGAALVISDKDEGGTGIFSFEVLIATYVLREGPCL

SEQ ID NO: 108912 - protein, 72 aa, Setaria italica
  Transcript Sequence Number=SeqID_42938
PQVFLIFQTICFFFHGPLLQRQPKKKDCRGMHISRESLGTIFLLDQTNMLLEHYWIHKMHAGPCFQTEKKNQ

SEQ ID NO: 108913 - protein, 84 aa, Setaria italica
  Transcript Sequence Number=SeqID_42939
NRQGSQPIPTTRMEAPASACSSELSEEQSADRTLSSTEMPAPRSVYLSRPSKSESVKESMSGGEPAPQTDVPIPSIPSNGHTTG

SEQ ID NO: 108914 - protein, 428 aa, Setaria italica
  Transcript Sequence Number=SeqID_42940
  Gene Ontology: Mol. function=aspartic-type endopeptidase activity; Cellular component=cell wall; Biological process=proteolysis
  Homolog annotation: Hit_ID=B6TE66; Match level="QueryCoverage=94%, HitCoverage=93%, E-value=0.0, Identity=84%"; Hit description =Aspartic proteinase nepenthesin-1
  Pfam annotation: Domain name=Asp; Domain location=75-425; Score= -156.3; E_value=0.00026; Accession=PF00026.15; Description=Eukaryotic aspartyl protease
MAATTLLVLLLAATAASAADLSVYHNVHPPSPSPLESIIALARADDARLLFLSSKAAASPGVTSAPVASGQAPPSYVVRAGLGTPVQQTLLALDTSADATWAHCAPCDTCPAGSRFIPASSSSYAALPCASDWCPLFQGQPCPANQDAGASLPTCAFSKPFADASFQASLGSDTLRLGKDAIANYAFGCVGAVTGPTTNLPKQGLLGLGRGPMSLLSQTGSRYNGVFSYCLPSYKSYYFSGSLRLGAAGQPRNARYTPLLSNPHRPSLYYVNVTGLSVGRAWVKVPAGAFAFDPATGAGTVIDSGTVITRWTAPVYAALREEFRRQVGAPSGYTSLGAFDTCFNTDEVAAGGAPAVTLHMDGGVDLTLPMENTLIHSSATPLACLAMAEAPQNVNSVVNVVANLQQQNVRVVVDVAASRVGFAREPCN

SEQ ID NO: 108915 - protein, 76 aa, Setaria italica
  misc_feature (32)..(32): Xaa can be any naturally occurring amino acid
  Transcript Sequence Number=SeqID_42941
  Gene Ontology: Mol. function=translation elongation factor activity; Cellular component=cytoplasm; Biological process=translational elongation
  Homolog annotation: Hit_ID=B6TAH3; Match level="QueryCoverage=98%, HitCoverage=30%, E-value=1e-32, Identity=92%"; Hit description =Elongation factor P
  Pfam annotation: Domain name=Elong-fact-P_C; Domain location=24-76; Score=45.2; E_value=2.5e-10; Accession=PF09285.3; Description =Elongation factor P, C-terminal
TDEMKVNLQYFDGRPMSATVPPRVTCTVVEAXQPNTKGLTAQPQYKRVVLDNGLTVLAPPFIEAGEQIVIITADDS

SEQ ID NO: 108916 - protein, 172 aa, Setaria italica
  Transcript Sequence Number=SeqID_42942
  Gene Ontology: Mol. function=translation elongation factor activity; Cellular component=cytoplasm; Biological process=translational elongation
  Homolog annotation: Hit_ID=B6TAH3; Match level="QueryCoverage=100%, HitCoverage=69%, E-value=1e-92, Identity=95%"; Hit description =Elongation factor P
  Pfam annotation: Domain name=EFP; Domain location=54-108; Score=48.8; E_value=2.1e-11; Accession=PF01132.12; Description=Elongation factor P (EF-P)
  Pfam annotation: Domain name=EFP_N; Domain location=3-47; Score=2.7; E_value=0.017; Accession=PF08207.4; Description=Elongation factor P (EF-P) KOW-like do
  Pfam annotation: Domain name=Elong-fact-P_C; Domain location=116-171; Score=86.8; E_value=7.9e-23; Accession=PF09285.3; Description =Elongation factor P, C-terminal
  Pfam module annotation: Pfam domain module=EFP::EFP_N::Elong-fact-P _C; Domain location=54-108::3-47::116-171
QRRGRIYQVIKAQHSHQGRGGATIQVELRDVDTGNKITERFRTDEALERVFVEEKLFTYLYQEGDTVTLMEPETFEQIEVSKDLFGKAAAYLKDEMKVNLQYFDGRPMSATVPPRVTCTVVEAQPNTKGLTAQPQYKRVVLDNGLTVLAPPFIEAGEQIVISTADDSYMTRA

SEQ ID NO: 108917 - protein, 37 aa, Setaria italica
  Transcript Sequence Number=SeqID_42943
MKINIPFMAHRFEVSVTAPSFMLNVFLVATRMLATKI

SEQ ID NO: 108918 - protein, 181 aa, Setaria italica
  misc_feature (124)..(124): Xaa can be any naturally occurring amino acid
  misc_feature (140)..(140): Xaa can be any naturally occurring amino acid
  misc_feature (152)..(152): Xaa can be any naturally occurring amino acid
  Transcript Sequence Number=SeqID_42944
  Gene Ontology: Mol. function=protein serine/threonine kinase activity; Cellular component=plasma membrane; Biological process =protein amino acid phosphorylation
  Homolog annotation: Hit_ID=Q01LH4; Match level="QueryCoverage=93%, HitCoverage=23%, E-value=4e-58, Identity=66%"; Hit description =B0222C05.5 protein
LVCRISPSRGEQDNVTLNTCRDAAFVAFVSQGNISTVDTAGCFFSVQGLSALQVNISGSAPAGLLAPDISPSPLTVQVPAVPPKHHRSYKLVLFPAIGALIIGLAVLLVTVLILLICRKNKELXKIEGNNPIDAWSFSCXKKGQEGNSTIFXRFSYKEMKKATRNFSTVLGRGENGTVISK

SEQ ID NO: 108919 - protein, 149 aa, Setaria italica
  Transcript Sequence Number=SeqID_42945
  Gene Ontology: Mol. function=sequence-specific DNA binding; Cellular component=nucleus
  Homolog annotation: Hit_ID=B3GW90; Match level="QueryCoverage=97%, HitCoverage=16%, E-value=1e-31, Identity=55%"; Hit description =Putative HD-ZIP IV family transcription factor OCL4
  Subcellular localization annotation: CTP_CleavageSite=69; ConfidenceScore=5.38e-01
MFGDCQVLSSMAAMAGASSSADALFIPNPGALAGFMSSSAAAMPFHHFSTTTASLILPKEEGGMMGALQAAKDEDMELEMDMELSGGSGSGHLDGLLSFADVDDDRPEQKPQHGGLDLQAADAGQPPQQQLATANGKKKRYHRHTAPSS

SEQ ID NO: 108920 - protein, 50 aa, Setaria italica
  Transcript Sequence Number=SeqID_42946
DDHYCRFQVSCGYAPVSWFLWRFYMLFSLISTNHKPQRHACVFNLYSLKP

SEQ ID NO: 108921 - protein, 56 aa, Setaria italica
  Transcript Sequence Number=SeqID_42947
  Gene Ontology: Mol. function=transcription regulator activity; Cellular component=nucleus; Biological process=regulation of transcription
  Homolog annotation: Hit_ID=C0JP15; Match level="QueryCoverage=87%, HitCoverage=14%, E-value=3e-15, Identity=73%"; Hit description =Putative basic helix-loop-helix protein BHLH10
IGKKVDISTMLDEAVQYVKFLHMQIKLLSSDEMWMYAPLAYDSVNIGIPLCSSVQE

SEQ ID NO: 108922 - protein, 541 aa, Setaria italica
  Transcript Sequence Number=SeqID_42948
  Gene Ontology: Mol. function=nucleotide binding; Cellular component =myosin complex; Biological process=signal transduction
  Homolog annotation: Hit_ID=Q7Y1D5; Match level="QueryCoverage=100%, HitCoverage=34%, E-value=0.0, Identity=67%"; Hit description =Putative myosin heavy chain
  Pfam annotation: Domain name=DIL; Domain location=361-468; Score =197.4; E_value=3.8e-56; Accession=PF01843.11; Description=DIL domain
TTLVDKLTAENENLKALVGSLETKIDETEQKFEEMKKAREEWMNKAADAESKINELTNTVLSFQEKVTTMEAENQLLRQQALLRTPVRTIPENASPKSNLTNGSPRSEQMTPHGTPPARKEYGSFAQPRASFFEKQHESVDALINCVSENIGFSEGKPVAAITIYKCLVHWKIFETEKTSVFDRLIQIFGSAMQKHDSNEDLAYWLSNSSTLLIMLQKSLKAAGTTGTSPQKRPQTQSSFLGRMVFRSSNITVDMDLVRQIEAKYPAFLFKQQLTAFVEGLYGMIRDNVKKDLSSLLSYAIQVPRTVKASMVRGRSFGSSSLPRGRSFSNQASYWQAMVDNLNELLKILQDNCVPSIFIRKIFTQVFSFINAQLFNSLLVRHECCSFSNGEYVKQGLAQLEAWCGEVKPEYAGSALDELKHIRQAVGFLVIFKKFRISYDEIVNDLCPVLSVQQLYKICTQYWDDKYNTESVSEEVLEEMRTSMTKESNQDTLENTFLLDDEISMPISLEEIADSMDAKEFQRVTPPQELTAMPAFQFLKS

SEQ ID NO: 108923 - protein, 409 aa, Setaria italica
  Transcript Sequence Number=SeqID_42949
  Gene Ontology: Mol. function=protein binding
  Pfam annotation: Domain name=DUF1719; Domain location=25-255; Score =359.9; E_value=4.7e-105; Accession=PF08224.3; Description=Domain of unknown function (DUF1719)
QECDDTLHRCKNRILEEEQIEQEVRNSAFPKRIAHATRSLISSAFGHDNQLRTSIVRRFEWYADGAGDFLRFIELGCTPHCHMPFNPFIKNFFAGKKLQHKIDQGNGSSFFILWLPFITAEHRVEVSLVFIQKDGNAPENNFYFSIMLQLSESTDIVGIAMKCLQLFTPLFKSKVEVIRNKIMKLPAQDFSWVPFVDSRQKEHWDNLVGCVSQWLRPDPSCCKKIDQHEAHHCSNTDTSDVSLEPVIEAHLECQVSLDGGEICLQDSEYLIAGLLFMPHGSSENLSPGDKSSAIAVNHSEEQHCMHRDITLTQLEEITLAKAVEYFRQNTDALVYQMLWKSKQGTAYIHVVKGSTKMQSTRRMIRGGKIVQQQERDHVVPQFLNLWVGHAPIRLQGSIVDWIQKEGKIS

SEQ ID NO: 108924 - protein, 112 aa, Setaria italica
  misc_feature (93)..(93): Xaa can be any naturally occurring amino acid
  Transcript Sequence Number=SeqID_42950
  Subcellular localization annotation: CTP_CleavageSite=96; ConfidenceScore=5.22e-01
SGSSSPSYTFHKVFNQDSGCFSWLQSYNLQAYHCIHTSRSVSSENQATVEPQQSPGAAVSVDNSGEPKPKRKKLKGRRAVTRFLKSLRWKRKXEIQRMTAEEKILYKLKLAQ

SEQ ID NO: 108925 - protein, 146 aa, Setaria italica
  Transcript Sequence Number=SeqID_42951
  Homolog annotation: Hit_ID=B6SGN7; Match level="QueryCoverage=86%, HitCoverage=41%, E-value=1e-38, Identity=72%"; Hit description =Embryonic protein DC-8
  Pfam annotation: Domain name=LEA_4; Domain location=25-68; Score =16.9; E_value=0.034; Accession=PF02987.8; Description=Late embryogenesis abundant protein
ELEPTLLADCAKIVSGVQQRAGRPARAAKDRTGDAAERAMDRAGEAKDRAVEGTKSAGEKVVEMTKDGASKVAETAQAISEKAKQAARGTWDAAKETAQSVKDSVVPDAADVDAAVKERDRIAREMDRVEQERNKREAREKGSGLP

SEQ ID NO: 108926 - protein, 65 aa, Setaria italica
  Transcript Sequence Number=SeqID_42952
RVETSYLSQYIQPPTANILDLVVIICIRNEIVNGTYGQRELSENAPVTNNKANCKTVLYLISHVV

SEQ ID NO: 108927 - protein, 237 aa, Setaria italica
  Transcript Sequence Number=SeqID_42953
  Homolog annotation: Hit_ID=A2Q2P3; Match level="QueryCoverage=73%, HitCoverage=8%, E-value=3e-11, Identity=28%"; Hit description=Zinc finger, N-recognin; WD40-like
NDDYLKPELGNVNVFLAFALSISNGASSHAGIDLPALIFELLELLHSDILGSSKLESWDFPRKGAWLSFILSLINADLQRQQVQVGAETEVDSHRKHEVQGEELFTHGNSLSIYLTKNIGRCLDTLSSLLEVYLHTFKKAYLSFLYSGKPSLDNSYPSLLLKHSVFDKSKHHLLFEKSGSYLEMLEPIYQLSSRIDGVTTKLGEGQENYFSLKCLLHGFPSAYPSSNSALLSWHSGD

SEQ ID NO: 108928 - protein, 64 aa, Setaria italica
  Transcript Sequence Number=SeqID_42954
VKSYSKIMKFESRNTCTSYEKKRRSNKLLVSEGKSWENIIYSFHNDGSIHLHNVYTLCFPSTKR

SEQ ID NO: 108929 - protein, 342 aa, Setaria italica
  Transcript Sequence Number=SeqID_42955
  Gene Ontology: Cellular component=cytoplasmic vesicle; Biological process=multicellular organismal development
  Homolog annotation: Hit_ID=B9T5V8; Match level="QueryCoverage=80%, HitCoverage=35%, E-value=6e-99, Identity=61%"; Hit description =Nucleotide binding protein, putative
  Pfam annotation: Domain name=WD40; Domain location=138-177; Score =42.3; E_value=1.9e-09; Accession=PF00400.24; Description=WD domain, G-beta repeat
  Pfam annotation: Domain name=WD40; Domain location=181-217; Score =19.2; E_value=0.017; Accession=PF00400.24; Description=WD domain, G -beta repeat
  Pfam annotation: Domain name=WD40; Domain location=97-134; Score =15.3; E_value=0.26; Accession=PF00400.24; Description=WD domain, G -beta repeat
  Pfam module annotation: Pfam domain module=WD40::WD40::WD40; Domain location=138-177::181-217::97-134
  Subcellular localization annotation: CTP_CleavageSite=31; ConfidenceScore=5.15e-01
MAENWLEHEKHTSTAAPSSGLVSRRQIPSPRRSRQRNIFHLLTQREVSPRTKHQARRIWNNSPICDPDLIELRFADADAKHGIFSWAESQSLHRWSAKYCPLLPPPRSTIAAAFSPDGKTLVSTHGDHTVKIIDCHTGKCLKVLSGHRRTPWVVRYHPLYSDILASGSLDHEVRLWDANTSDCIGSQDFHRPIASIAFHARGEILAVASGHKLYIWNYNKRDESSVPAIILKTRRSLRAVHFHPHGAPYLLTAEVNNIESADSPLTLSTSSGYSNYPSALFVTNTNSRFCPHLESNVPSPCLLLPAYLRDDGILHVLGNDSSSTSAQQRSSLVQVATLDTEN

SEQ ID NO: 108930 - protein, 581 aa, Setaria italica
  Transcript Sequence Number=SeqID_42956
  Gene Ontology: Mol. function=nucleotide binding; Cellular component =nucleus; Biological process=DNA replication initiation
  Homolog annotation: Hit_ID=Q2R482; Match level="QueryCoverage=100%, HitCoverage=60%, E-value=0.0, Identity=96%"; Hit description=DNA replication licensing factor MCM2, putative, expressed
  Pfam annotation: Domain name=AAA_3; Domain location=189-330; Score= -6.3; E_value=0.0018; Accession=PF07726.3; Description=ATPase family associated with various
  Pfam annotation: Domain name=AAA_5; Domain location=189-336; Score =11.0; E_value=0.00012; Accession=PF07728.6; Description=ATPase family associated with various
  Pfam annotation: Domain name=MCM; Domain location=131-476; Score =725.5; E_value=4.1e-215; Accession=PF00493.15; Description=MCM235 family
  Pfam annotation: Domain name=Mg_chelatase; Domain location=176-337; Score=-131.3; E_value=0.0011; Accession=PF01078.13; Description =Magnesium chelatase, subunit ChlI
  Pfam module annotation: Pfam domain module=AAA_3::AAA_5::MCM::Mg _chelatase; Domain location=189-330::189-336::131-476::176-337
SKCGTILGPFFQNSYTEVKVGSCPECQSKGPFTVNVEQTIYRNYQKLTLQESPGIVPAGRLPRYKEVILLNDLIDCARPGEEIEVTGIYTNNFDLSLNTKNGFPVFATVVEANYVAKKQDLFSAYKLTDEDKAEIEKLSKDPRIGERIVKSIAPSIYGHEDIKTAIALAMFGGQEKNIKGKHRLRGDINVLLMGDPGTAKSQFLKYVEKTGHRAVYTTGKGASAVGLTAAVHKDPVTREWTLEGGALVLADRGICLIDEFDKMNDQDRVSIHEAMEQQSISISKAGIVTSLQARCSVIAAANPIGGRYDSSKTFTQNVELTDPIISRFDILCVVKDIVDPFTDEMLARFVVDSHARSQPKGANLEDRVPTDVNDDPLAAARQADPDVLSQDMLKKYITYAKLNVFPKIHDADLDKISHVYAELRRESSHGQGVPIAVRHIESIIRMSEAHARMHLRSYVSQEDVDMAIRVLLDSFISTQKFGVQKALQKNFRKYMTYKKDYNELLLLLLRTLVKDALHFEEIVSGATSRLTHVEVKVEDLKNKAQEYEIYDLKPFFSSAHFRDNSFILDEGRGIIRHPVAA

SEQ ID NO: 108931 - protein, 162 aa, Setaria italica
  Transcript Sequence Number=SeqID_42957
  Homolog annotation: Hit_ID=B6U8E8; Match level="QueryCoverage=95%, HitCoverage=49%, E-value=6e-45, Identity=62%"; Hit description =Phloem-specific lectin
GDDDGGCWVWLDRATGARCYALSARRLSLPWDDGEFSWRFTPHPLSRFGEVAELVECTCLDIYGRLPTAALTPATPYAAYLIYDTAPEGHRGLSYPDQEAAVSLGGRVVARHDVCIRPDDAEARKFWDEPGGGDHREEPRRPRRREDGWWEMEMGRLPKNNG

SEQ ID NO: 108932 - protein, 275 aa, Setaria italica
  Transcript Sequence Number=SeqID_42958
GSVDVFSWISCLDLRTLAALTNSTLSSSSDPQNISFHFLIPEGDDDKVPYHTLKVVLPDSDLTVSSQRQIKDKLNVATPEGNFLWSFHKELSPLLIAKSQLSKKRYLYISADSIIKGKIEDLGRMDLGTYAIAATEDCSKHFGDYVNMDVLSDTQRAAAKSWVSKEDTCLLDFDVLLVEPRKLDKNLVDSIMSWTRVVTVANPRDRIRLAVALALYGKYLKLPSIWKRGDANADILNYDGPHKVCSEDGHQHEQSSDGENWRKYLHQKFEAILNA

SEQ ID NO: 108933 - protein, 60 aa, Setaria italica
  Transcript Sequence Number=SeqID_42959
  Gene Ontology: Cellular component=integral to membrane
  Homolog annotation: Hit_ID=Q5JLY8; Match level="QueryCoverage=100%, HitCoverage=8%, E-value=2e-15, Identity=88%"; Hit description=Golgin- 84
MASWLKVAEDLLEVVDRRAKIVATELSDEQSTSQPSGSNSQEVQAKKGKPREKGPLKLTS

SEQ ID NO: 108934 - protein, 65 aa, Setaria italica
  Transcript Sequence Number=SeqID_42960
YIFSDIKILMRISFQIHVALSRQGVNSTEQKATHGLVCVEVYELFVMVCGSYSIPGDKGITISWQ

SEQ ID NO: 108935 - protein, 194 aa, Setaria italica
  Transcript Sequence Number=SeqID_42961
  Gene Ontology: Mol. function=nucleotide binding; Cellular component =intracellular; Biological process=small GTPase mediated signal transduction
  Homolog annotation: Hit_ID=B6SSR2; Match level="QueryCoverage=100%, HitCoverage=100%, E-value=1e-103, Identity=93%"; Hit description=ADP- ribosylation factor
  Pfam annotation: Domain name=Arf; Domain location=5-177; Score=354.1; E_value=2.6e-103; Accession=PF00025.13; Description=ADP-ribosylation factor family
  Pfam annotation: Domain name=MMR_HSR1; Domain location=18-129; Score=- 9.3; E_value=0.0073; Accession=PF01926.15; Description=GTPase of unknown function
  Pfam annotation: Domain name=Miro; Domain location=19-129; Score =14.3; E_value=0.0005; Accession=PF08477.5; Description=Miro-like protein
  Pfam annotation: Domain name=Ras; Domain location=19-179; Score= -63.6; E_value=0.00016; Accession=PF00071.14; Description=Ras family
  Pfam annotation: Domain name=SRPRB; Domain location=15-183; Score= -47.5; E_value=0.00046; Accession=PF09439.2; Description=Signal recognition particle receptor beta su
  Pfam module annotation: Pfam domain module=Arf::MMR_HSR1::Miro::Ras::S RPRB; Domain location=5-177::18-129::19-129::19-179::15-183
MGQAFRKLFDAFFGTSEMRVVMLGLDAAGKTTILYKLHIGEVLSTVPTIGFNVEKVQYKNVMFTVWDVGGQEKLRPLWKHYFNNTDGLIYVVDSLDRERIGKAKAEFQAIINDPLMLNSVILVFANKQDMKGAMTPMEVCEGLGLYDLKNRIWHIQGSCALKGDGLYEGLDWLASTLKELQASGRLPSGGTLLF

SEQ ID NO: 108936 - protein, 211 aa, Setaria italica
  misc_feature (6)..(6): Xaa can be any naturally occurring amino acid
  misc_feature (16)..(16): Xaa can be any naturally occurring amino acid
  misc_feature (202)..(202): Xaa can be any naturally occurring amino acid
  Transcript Sequence Number=SeqID_42962
  Gene Ontology: Mol. function=Rab GDP-dissociation inhibitor activity; Cellular component=cytoplasm; Biological process=regulation of GTPase activity
  Homolog annotation: Hit_ID=Q706C9; Match level="QueryCoverage=100%, HitCoverage=47%, E-value=1e-103, Identity=82%"; Hit description=GDP dissociation inhibitor
  Pfam annotation: Domain name=GDI; Domain location=1-211; Score=185.3; E_value=1.7e-52; Accession=PF00996.10; Description=GDP dissociation inhibitor
DYKENXPSTHKGYDLXKLTTKQLISKYGLDDNTIDFIGHAVALHRDDSYLSEPAIDTVKRMKLYAESVARFQGGSPYIYPLYGLGELPQGFARLSAVYGGTYMLNKPECKVEFDDEGKVCGVTSEGETAKCKKVVCDPSYLPDKVRKVGKVFRAIAIMSHPIPNTAESHSVQIILPQKQLSRKSDMYVFCCSYSHNVASKGXFIAFVSAQA

SEQ ID NO: 108937 - protein, 585 aa, Setaria italica
  Transcript Sequence Number=SeqID_42963
  Gene Ontology: Mol. function=acid-amino acid ligase activity; Cellular component=intracellular; Biological process=ubiquitin -dependent protein catabolic process
  Homolog annotation: Hit_ID=Q2L3D3; Match level="QueryCoverage=100%, HitCoverage=68%, E-value=0.0, Identity=72%"; Hit description =Polyubiquitin-like protein
  Pfam annotation: Domain name=HECT; Domain location=275-585; Score =337.3; E_value=3e-98; Accession=PF00632.17; Description=HECT-domain (ubiquitin-transferase)
LYRLCRRSLASVLSNRPRLPPSMNSSTRLIEQILPFAREAVDLVLEGLASEPMVVSPIDLDEFSNFFKVMCQQARLWISGEGPMPRNLYSRESEHGNTWIWRFHNMSMDMLKRLDECLKKLEMDLSLSSESTGVMESQTVWAARSFILVVLTELDFISAIYEDVGHTLQLVLMAHRAPLNALVRCSKRNEHLHWLAKHKNLLCFEARRNLVFMMLPEGKDDFGELHEMLIDRSHLLDESFNYIAQAKHNELRGGLFMEFKNEEATGPGVLREWFCLVCQALFSPKQVLFSPCPEDKRRFYLNETSAVDPLHLKYFTFAGRIIGLALMHKVQVGIVLDRTLFLHLAGRSITLEDISVADPVKYASCKRILEMNAAEIDDLYLTFSRGAHELGTREIIDLCPGGQDISVNIRNREQYIDLLIKNTFVDSISAQLTHFTQGFTDILVNPERRKDFFECLDLEDLDRLLGGSNDTINLQDWKSHTQYNGYKEKDRLITWFWKAVERMPIEQQRQLLFFWTSVKYLPSEGFGGLSSKLYIYKTSDSPDRLPSSQTCFYRLCLPPYTSSKMVENQLQKITQEHVSCSFGTW

SEQ ID NO: 108938 - protein, 71 aa, Setaria italica
  Transcript Sequence Number=SeqID_42964
PIQFSNKTIHNQVQDRFYKDTITHSRFSNYAKFLKHCPRHMKEHSKEAILPTQMSRIIARSRIHQTQQLHI

SEQ ID NO: 108939 - protein, 120 aa, Setaria italica
  Transcript Sequence Number=SeqID_42965
  Subcellular localization annotation: CTP_CleavageSite=56; ConfidenceScore=5.34e-01
ASSRSRSLAGCLPAPPPRPATGGDRAPRRHCDPRHGSAAATGTEFQGASLNGRSPRSESASKIARKRVLYLKWGTVFPLCDLSPTSLHCSCYFFFTFGWTDPCDRGQEFIWCFMNSEGSA

SEQ ID NO: 108940 - protein, 95 aa, Setaria italica
  Transcript Sequence Number=SeqID_42966
  Subcellular localization annotation: CTP_CleavageSite=19; ConfidenceScore=5.19e-01
ALRRFCPSSRIPTCLAPPLASRAFGIHKAPNKFLTSVYTDLQRQTPVNRHNTLKPSPSRKLKIKDNSRSPTKITQPAELKPRLEAFPSNGKFVWV

SEQ ID NO: 108941 - protein, 616 aa, Setaria italica
  Transcript Sequence Number=SeqID_42967
  Gene Ontology: Mol. function=metal ion binding; Cellular component =plasma membrane
  Homolog annotation: Hit_ID=Q109J5; Match level="QueryCoverage=99%, HitCoverage=99%, E-value=0.0, Identity=86%"; Hit description =Dehydration-responsive protein, putative, expressed
  Pfam annotation: Domain name=DUF248; Domain location=91-602; Score =1202.7; E_value=0; Accession=PF03141.8; Description=Putative methyltransferase
  Pfam annotation: Domain name=Methyltransf_11; Domain location=218 -313; Score=35.3; E_value=2.5e-07; Accession=PF08241.4; Description =Methyltransferase domain
  Pfam annotation: Domain name=Methyltransf_12; Domain location=218 -311; Score=10.3; E_value=0.052; Accession=PF08242.4; Description =Methyltransferase domain
  Pfam module annotation: Pfam domain module=DUF248::Methyltransf _11::Methyltransf_12; Domain location=91-602::218-313::218-311
MRGRNDAGQSKRPIVLCCMMIVCLCLLFLYFSGSNGQAKSAAFEYGTKFSRTLGWGSDDGEDGSEESIFGTGDADDVKPKSFPVCDDRHSELIPCLDRNLIYQMRLKLDLNLMEHYERHCPPPERRFNCLIPPPHGYKVPIKWPKSRDVVWKANIPHTHLAKEKSDQNWMVEAGEKIKFPGGGTHFHHGADKYISNIANMLNFKDNNINNEGMLRTVLDVGCGVASFGGYLLSSNVIAMSLAPNDVHQNQIQFALERGIPAYLGVLGTKRLPYPSRSFELAHCSRCRIDWLQRDGILLLELDRLLRPGGYFAYSSPEAYAQDEEDLRIWKEMSALVERMCWKIAEKRNQTVIWVKPLNNDCYRRRAHGTKPPLCKSGDDPDSVWGVPMEACITPYPEQMHRDGGTGLAPWPARLTTPPPRLADLYVTADTFEKDTEMWQQRVENYWNLLGPKVKPDTIRNIMDMKANFGSFAAALKDKDVWVMNVVPHDGPSTLKIIYDRGLIGSNHDWCEAFSTYPRTYDLLHAWTVFSDLDKRGCSAEDLLLEMDRILRPTGFIIVRDKSAVIEFIKKYLHALHWEVITVVDAEPSPESEENEMILIIRKKLWLPEAGPQDSST

SEQ ID NO: 108942 - protein, 88 aa, Setaria italica
  Transcript Sequence Number=SeqID_42968
VVALCRTLGSRDTARICVCNPLVGTSTFLPPLPPLFVPEKTIFLEAGGSSFRLLTVMDNQRVLVLRVFSSQTGWWDAAVAAELPDNMV

SEQ ID NO: 108943 - protein, 91 aa, Setaria italica
  misc_feature (13)..(13): Xaa can be any naturally occurring amino acid
  Transcript Sequence Number=SeqID_42969
  Gene Ontology: Mol. function=microtubule motor activity; Cellular component=microtubule associated complex; Biological process =microtubule-based movement
  Homolog annotation: Hit_ID=Q93XF3; Match level="QueryCoverage=94%, HitCoverage=9%, E-value=4e-21, Identity=58%"; Hit description =Kinesin heavy chain (Fragment)
TCSTRQMLKKLPXLERESLYTKWGIDLNSKQRRLQLSRRIWTQTDMDHVRESAALVAKLVEHLEKGQAIKEMFGLRFTLNPRADRRSFSWQ

SEQ ID NO: 108944 - protein, 102 aa, Setaria italica
  Transcript Sequence Number=SeqID_42970
  Gene Ontology: Mol. function=sequence-specific DNA binding; Cellular component=nucleus; Biological process=regulation of transcription, DNA-dependent
  Homolog annotation: Hit_ID=Q6MW71; Match level="QueryCoverage=60%, HitCoverage=4%, E-value=5e-14, Identity=54%"; Hit description =B1340F09.12 protein
ELQTTEVDSSEDSTTPSRFSSGCLVRQAGAATDVNFLPADYRSSLHSKRMKNMQPGDAGAAVKYFQSMQMNNPSFFYAFQLDEDDKLTNIFWADSKSRTDFS

SEQ ID NO: 108945 - protein, 75 aa, Setaria italica
  misc_feature (28)..(28): Xaa can be any naturally occurring amino acid
  Transcript Sequence Number=SeqID_42971
  Gene Ontology: Mol. function=RNA-directed DNA polymerase activity; Cellular component=chromatin; Biological process=RNA-dependent DNA replication
  Homolog annotation: Hit_ID=Q2QSK7; Match level="QueryCoverage=97%, HitCoverage=7%, E-value=1e-12, Identity=47%"; Hit description =Retrotransposon protein, putative, LINE subclass
GGLGIPNLQIMSWALQMRWLWIQKNLFXQPWAGLKFPVHPQTKAIFCISVTTQVGNGPNSLFWSDRWLHGCSLSV

SEQ ID NO: 108946 - protein, 56 aa, Setaria italica
  Transcript Sequence Number=SeqID_42972
KTIDHEFLIQISLFLVKFMSYALYSRKTMQYGYFKFSSATCHVYLLGFLSNQIQYR

SEQ ID NO: 108947 - protein, 66 aa, Setaria italica
  misc_feature (11)..(11): Xaa can be any naturally occurring amino acid
  Transcript Sequence Number=SeqID_42973
  Gene Ontology: Mol. function=binding; Cellular component=mitochondrion
  Homolog annotation: Hit_ID=Q5W963; Match level="QueryCoverage=100%, HitCoverage=5%, E-value=1e-21, Identity=65%"; Hit description =PPR1106-17
RLAIAFGIISXPLGMPLRIFKNLRVCEDCHEAIKFISRAADREIVVRDLYRFHHFKSGSCSCEDFW

SEQ ID NO: 108948 - protein, 108 aa, Setaria italica
  Transcript Sequence Number=SeqID_42974
  Subcellular localization annotation: CTP_CleavageSite=28; ConfidenceScore=5.51e-01
APVLSDPVAFDAFPHPPKPKPISKSTTRSSRARSSRMSDPRYASYPYPAQGYYQGPYQGPPVMAPPQYQYGPPPPRRSPGFLEGCLAALCCCCLLDECCCDPSIIFVS

SEQ ID NO: 108949 - protein, 164 aa, Setaria italica
  Transcript Sequence Number=SeqID_42975
FKLRLQRNDPAMISQGCSFLPLCSPCRGIYVCPYFLMDVSLWIKEEEGSPDTPLFSGYVEIDTSFAGFGSVLIGRFQGEVYGLDMIFALLGDSIETVIEVKAEAKQPSDVRISASTSGFDEEISLYDGKFCGSGSMFKHIVAVKKQEELHIVLKMNESTYKWTF

SEQ ID NO: 108950 - protein, 72 aa, Setaria italica
  Transcript Sequence Number=SeqID_42976
  Gene Ontology: Mol. function=oxidoreductase activity, acting on NADH or NADPH; Cellular component=mitochondrial respiratory chain; Biological process=mitochondrial electron transport, NADH to ubiquinone
  Homolog annotation: Hit_ID=Q42577; Match level="QueryCoverage=100%, HitCoverage=33%, E-value=3e-26, Identity=77%"; Hit description=NADH -ubiquinone oxidoreductase 20 kDa subunit, mitochondrial
  Pfam annotation: Domain name=Oxidored_q6; Domain location=1-56; Score= 24.6; E_value=2.6e-07; Accession=PF01058.14; Description=NADH ubiquinone oxidoreductase, 20 Kd sub
PEPRWVISMGSCANGGGYYHYSYSVVRGCDRIVPVDIYVPGCPPTAEALLYGVLQLQKKINRRKDFLHWWTK

SEQ ID NO: 108951 - protein, 76 aa, Setaria italica
  Transcript Sequence Number=SeqID_42977
VGRRRGGGGGAAGSRGAEEEAGSGGGWIFGGLIKTLAEEIEAQRKEQEVIAAAAAEEEGKERERGAEADATADEEG

SEQ ID NO: 108952 - protein, 177 aa, Setaria italica
  Transcript Sequence Number=SeqID_42978
  Gene Ontology: Mol. function=nucleotide binding; Cellular component =protein complex; Biological process=barrier septum formation
  Homolog annotation: Hit_ID=B9SYZ1; Match level="QueryCoverage=85%, HitCoverage=37%, E-value=3e-47, Identity=62%"; Hit description=Cell division protein ftsZ, putative
  Pfam annotation: Domain name=Tubulin; Domain location=53-177; Score =80.5; E_value=5.9e-21; Accession=PF00091.17; Description=TubulinFtsZ family, GTPase domain
  Subcellular localization annotation: CTP_CleavageSite=43; ConfidenceScore=5.60e-01
MASSAAASSSASALVRLPGPAHLRAPPRSGWREHRQPRRATVRCSFAPVETARIKVVGVGGGGNNAVNRMIGSGLQGIEFYAINTDSQALITSQAQYPLQIGEQLTRGLGTGGNPNLGEQAAEESREAIATALRDSDLVFITAGMGGGTGSGAAPVVAQISKEAGYLTVGVVTYPFS

SEQ ID NO: 108953 - protein, 275 aa, Setaria italica
  Transcript Sequence Number=SeqID_42979
  Gene Ontology: Mol. function=nucleotide binding; Cellular component =protein complex; Biological process=barrier septum formation
  Homolog annotation: Hit_ID=Q9LKX6; Match level="QueryCoverage=81%, HitCoverage=54%, E-value=1e-106, Identity=84%"; Hit description=FtsZ1
  Pfam annotation: Domain name=Tubulin; Domain location=2-113; Score =43.6; E_value=7.6e-10; Accession=PF00091.17; Description=TubulinFtsZ family, GTPase domain
  Pfam annotation: Domain name=Tubulin_C; Domain location=116-238; Score=96.5; E_value=9.1e-26; Accession=PF03953.9; Description =TubulinFtsZ family, C-terminal domai
  Pfam module annotation: Pfam domain module=Tubulin::Tubulin_C; Domain location=2-113::116-238
GTSSILCSLLTAGMGGGTGSGAAPVVAQISKEAGYLTVGVVTYPFSFEGRKRSLQALEALEKLEKSVDTLIVIPNDKLLDVADENMPLQDAFLLADDVLRQGVQGISDIITIPGLVNVDFADVKAVMKNSGTAMLGVGVSSSKNRAQEAAEQATLAPLIGSSIEAATGVVYNITGGKDITLQEVNKVSQIVTSLADPSANIIFGAVVDDRYTGEIHVTIIATGFPQSFQKSLLADPKGARIAEAKEKAATFAHNKAAAAVVQPAPASAWSRRLFS

SEQ ID NO: 108954 - protein, 184 aa, Setaria italica
  Transcript Sequence Number=SeqID_42980
  Gene Ontology: Mol. function=protein serine/threonine kinase activity; Biological process=protein amino acid phosphorylation
  Homolog annotation: Hit_ID=Q0ZCC5; Match level="QueryCoverage=71%, HitCoverage=6%, E-value=1e-30, Identity=49%"; Hit description=CCHC -type integrase
  Pfam annotation: Domain name=Pkinase_Tyr; Domain location=67-184; Score=-109.0; E_value=1.8e-06; Accession=PF07714.9; Description =Protein tyrosine kinase
  Subcellular localization annotation: CTP_CleavageSite=7; ConfidenceScore=5.02e-01
TAKRRKSAMTYKVITVCLAFLLVITISGLLAWRYLPARNRNRARQQLLSSSVRAFSWKELYQATNGFEKLLGKGSFGKVYLGTMRSPQPHLVAVKKLIDSNEYSEQEFTNEVQSIGQIHHRNLVRMIGYCNEGNHRVLVFEFMPGGSLRSFLFNPEKQPPWRWRVGTYLAIARGLEYLHVRSCS

SEQ ID NO: 108955 - protein, 46 aa, Setaria italica
  Transcript Sequence Number=SeqID_42981
ALAGSSVLTMTLFRWGVCPSPVALSRCHRLGFTPGAWYPFANWRSS

SEQ ID NO: 108956 - protein, 151 aa, Setaria italica
  Transcript Sequence Number=SeqID_42982
  Gene Ontology: Mol. function=hydrolase activity; Biological process =metabolic process
  Homolog annotation: Hit_ID=B6U9V9; Match level="QueryCoverage=86%, HitCoverage=35%, E-value=9e-48, Identity=76%"; Hit description =Hsr203J
MAPANCQQQQQAPPQQVRAVDGRKVVDEVSGWLRVFDDGSVDRTWTGPPEALPLMEPVAPYAAPRDGHTLHDLPGEPNLRVYLPEVAKGSEDGGGARRLPVILQLHGGGFCISHPSWLMYHHFYARLACVVPAVVVAVELPLAPERRMPAH

SEQ ID NO: 108957 - protein, 91 aa, Setaria italica
  Transcript Sequence Number=SeqID_42983
  Gene Ontology: Mol. function=protein dimerization activity; Cellular component=nucleus; Biological process=regulation of transcription, DNA-dependent
  Homolog annotation: Hit_ID=Q5QNI5; Match level="QueryCoverage=100%, HitCoverage=32%, E-value=1e-15, Identity=53%"; Hit description=BZIP transcription factor RF2b-like
MAQLPPKIPTMAPAWPEFGGGHHHHAHHHHQRSPSVGTFLAAPMPPLPPPQQQHQQPSWVDEFLDFSAAKRGAHRRSVSDSVAFLEPGPDD

SEQ ID NO: 108958 - protein, 89 aa, Setaria italica
  Transcript Sequence Number=SeqID_42984
  Homolog annotation: Hit_ID=Q9M9N3; Match level="QueryCoverage=70%, HitCoverage=8%, E-value=1e-11, Identity=53%"; Hit description =T17B22.17 protein
CSAACLHSDWYNLQKKHVKPFWCGQFDECIEKGQASLQKKTHTEEKYAHRVKAIMHALEVQRSHFSLEGQLNTYESCASIKTKSVSKNI

SEQ ID NO: 108959 - protein, 195 aa, Setaria italica
  Transcript Sequence Number=SeqID_42985
  Gene Ontology: Mol. function=amino acid binding; Biological process =metabolic process
  Homolog annotation: Hit_ID=B6SYQ4; Match level="QueryCoverage=100%, HitCoverage=41%, E-value=9e-92, Identity=89%"; Hit description=ACR5
  Pfam annotation: Domain name=ACT; Domain location=121-189; Score =44.3; E_value=4.7e-10; Accession=PF01842.17; Description=ACT domain
  Pfam annotation: Domain name=ACT; Domain location=29-96; Score=25.4; E_value=0.00023; Accession=PF01842.17; Description=ACT domain
  Pfam module annotation: Pfam domain module=ACT::ACT; Domain location =121-189::29-96
EMVDEFEKLVIRMNPPRVSVDNDSDMTATLVKVDSANKYGTLLEVVQVLTDLKLTIKRAYITSDGEWFMDVFHVVDQDGNKLYDGQVIDRIEQSLGAGSLSFRAAPERSVGVEAEAEESQTTIELIGRDRPGLLSEVFAVLTDLRCNIVASEVWTHDARVAALVRVTDADAGGAVEDPARLDTVKRLLRHVLRGS

SEQ ID NO: 108960 - protein, 182 aa, Setaria italica
  Transcript Sequence Number=SeqID_42986
  Gene Ontology: Mol. function=small conjugating protein ligase activity; Cellular component=nucleoplasm; Biological process =ubiquitin-dependent protein catabolic process
  Homolog annotation: Hit_ID=B4FCG1; Match level="QueryCoverage=100%, HitCoverage=100%, E-value=3e-85, Identity=84%"; Hit description =Ubiquitin carrier protein
  Pfam annotation: Domain name=UQ_con; Domain location=42-178; Score =234.7; E_value=2.3e-67; Accession=PF00179.18; Description=Ubiquitin -conjugating enzyme
  Subcellular localization annotation: CTP_CleavageSite=28; ConfidenceScore=5.04e-01
MARGENQESQTGNVPAASAAAGPKPASSAAGKGAEGQSVVRRLQSELMALMMGGDPGVSAFPDGDNIFNWVGTIAGSAGTAYEGTSYRLALAFTAEYPYKPPKVRFDTPCFHPNVDTHGNICLDILQDKWSSAYDVRTILLSIQSLLGEPNNDSPLNTQAAALWANQEEFRKMVEKLYKPAA

SEQ ID NO: 108961 - protein, 57 aa, Setaria italica
  Transcript Sequence Number=SeqID_42987
  Homolog annotation: Hit_ID=B6T670; Match level="QueryCoverage=96%, HitCoverage=29%, E-value=7e-22, Identity=89%"; Hit description =Ribosomal protein L37
RTKGIAYDENKRYSNVGKMFQEAPHLPTDTVVALFDELVINTKKLVTATSKGIEKWR

SEQ ID NO: 108962 - protein, 61 aa, Setaria italica
  Transcript Sequence Number=SeqID_42988
SSDNLHPIFFYSTQQCILLAYGHTDSPDYHSHRKFTSLAHRAAALPSRRRSPSARRRRLPP

SEQ ID NO: 108963 - protein, 364 aa, Setaria italica
  misc_feature (34)..(34): Xaa can be any naturally occurring amino acid
  misc_feature (182)..(182): Xaa can be any naturally occurring amino acid
  Transcript Sequence Number=SeqID_42989
  Gene Ontology: Mol. function=metal ion binding; Biological process =ubiquitin-dependent protein catabolic process
  Homolog annotation: Hit_ID=Q2R2G7; Match level="QueryCoverage=94%, HitCoverage=89%, E-value=1e-128, Identity=67%"; Hit description=RWD domain containing protein, expressed
  Pfam annotation: Domain name=RWD; Domain location=6-116; Score=75.0; E_value=2.8e-19; Accession=PF05773.14; Description=RWD domain
  Pfam annotation: Domain name=zf-C3HC4; Domain location=126-197; Score= 20.0; E_value=0.00053; Accession=PF00097.17; Description=Zinc finger, C3HC4 type (RING finger)
  Pfam module annotation: Pfam domain module=RWD::zf-C3HC4; Domain location=6-116::126-197
MAALAEAEEEVRLELEAVAAVYGDDVRVLRDLPXHLVVHVRPRTADDSSQQFVELFLGIKASSQYPNEPPHIYAVESKGLDEDRQSYLIRSIQNKAKELSNYPMLVTLCEEAGEILSNMNHPAGDCPLCLYPLMREDKDGSELPFMKLMSCYHCFHSDCIMRWWEWLQHGDANLKERNTRGXKHYNVNQNKGFCPVCRKVFDEKDIEHVRDLPAITLFLGELAYRLESLTLDLGEDEKELFHSEAEQIRRKRIESLVNLQQECNGLIEPKKDLAIQPGMYVTLPPSTPDTAAEENADPSEDTPTSTSGTEQRSQVNNTSSNKPKNSGYRRRNRANTSRRQPHGQPHRQPGMQQWQRKEADTSQQ

SEQ ID NO: 108964 - protein, 236 aa, Setaria italica
  Transcript Sequence Number=SeqID_42990
  Gene Ontology: Cellular component=integral to membrane
  Homolog annotation: Hit_ID=Q8LD36; Match level="QueryCoverage=92%, HitCoverage=87%, E-value=1e-65, Identity=57%"; Hit description =Contains similarity to nodulin MtN3 protein
  Pfam annotation: Domain name=MtN3_slv; Domain location=132-218; Score= 109.2; E_value=1.4e-29; Accession=PF03083.8; Description=MtN3saliva family
  Pfam annotation: Domain name=MtN3_slv; Domain location=9-98; Score =94.4; E_value=4e-25; Accession=PF03083.8; Description=MtN3saliva family
  Pfam module annotation: Pfam domain module=MtN3_slv::MtN3_slv; Domain location=132-218::9-98
MVNADAVRNIVGICGNIISFGLFLSPLPTFVQIVKKRDVEQFVPDPYLATFLNCALWVFYGLPIVHPNSILVVTINGTGLAIEVVYLSVFFAYAPRPKRLKMLGVLAVELVFVVAIAAGVLLGAHTHEKRSLIVGSVCIFFGTLMYAAPLTVMKRVITTKSVEYMPFTLSFVSFLNGICWTTYALIRFDIFITIPNGIGTFLSSAQLILYFCYYGSTPKNDKSVELPVTASDDSNN

SEQ ID NO: 108965 - protein, 60 aa, Setaria italica
  Transcript Sequence Number=SeqID_42991
  Subcellular localization annotation: CTP_CleavageSite=37; ConfidenceScore=5.03e-01
IPRTLIFSTASKSYPPDLITENMRRQNRLLANTNKVSLSSGKRKRDLLRYLASYAVCGVV

SEQ ID NO: 108966 - protein, 161 aa, Setaria italica
  Transcript Sequence Number=SeqID_42992
  Gene Ontology: Mol. function=protein serine/threonine kinase activity; Biological process=protein amino acid phosphorylation
  Homolog annotation: Hit_ID=Q5ZC61; Match level="QueryCoverage=83%, HitCoverage=22%, E-value=2e-31, Identity=51%"; Hit description =Putative receptor serine/threonine kinase PR5K
MPPLLLLLLASFLLPPPAASAGTAQPSSCWPKTCGGLNITYPFWLEERDRPPCGPPAFQLKCNSSGAFMVKSVYQAYRVVSIFAENQSLHVVDINLPLDTGCPAPTFNVSLVPRPLAFSKANKELLFIGKCTAGSQPEDSTGFHSLPCDRSSFVRLGDGRN

SEQ ID NO: 108967 - protein, 144 aa, Setaria italica
  misc_feature (27)..(27): Xaa can be any naturally occurring amino acid
  Transcript Sequence Number=SeqID_42993
HNTSSSTIENQLLPPSSLPSTHFKFFXQVGPEGLSGTACLPELDGNLMHSDINNSEVTPDVSLNSDPLSNSSGPARISSMSSDCKSGHGLSSLRSLGGHNIVHGSKSLQLFYSDGQEVLGNISTTKLGGPSRKRSLSEILLNTP

SEQ ID NO: 108968 - protein, 55 aa, Setaria italica
  Transcript Sequence Number=SeqID_42994
FSLHLRSSMLFSISSIVLSPRIGYGGACFKQFRLISFLCFIYSSANNISGRSTDV

SEQ ID NO: 108969 - protein, 1175 aa, Setaria italica
  Transcript Sequence Number=SeqID_42995
  Gene Ontology: Mol. function=binding; Cellular component=plasma membrane; Biological process=ubiquitin-dependent protein catabolic process
  Homolog annotation: Hit_ID=Q86VP6; Match level="QueryCoverage=98%, HitCoverage=94%, E-value=0.0, Identity=39%"; Hit description=Cullin -associated NEDD8-dissociated protein 1
  Pfam annotation: Domain name=HEAT; Domain location=120-156; Score =19.5; E_value=0.014; Accession=PF02985.14; Description=HEAT repeat
  Pfam annotation: Domain name=HEAT; Domain location=201-240; Score =4.3; E_value=15; Accession=PF02985.14; Description=HEAT repeat
  Pfam annotation: Domain name=HEAT; Domain location=321-356; Score =2.4; E_value=25; Accession=PF02985.14; Description=HEAT repeat
  Pfam annotation: Domain name=HEAT; Domain location=36-71; Score=1.4; E_value=33; Accession=PF02985.14; Description=HEAT repeat
  Pfam annotation: Domain name=HEAT; Domain location=461-497; Score =5.7; E_value=9.9; Accession=PF02985.14; Description=HEAT repeat
  Pfam annotation: Domain name=HEAT; Domain location=509-547; Score =8.5; E_value=4.5; Accession=PF02985.14; Description=HEAT repeat
  Pfam annotation: Domain name=HEAT; Domain location=552-586; Score =0.6; E_value=42; Accession=PF02985.14; Description=HEAT repeat
  Pfam annotation: Domain name=HEAT; Domain location=592-628; Score =3.8; E_value=17; Accession=PF02985.14; Description=HEAT repeat
  Pfam annotation: Domain name=HEAT; Domain location=802-837; Score =12.9; E_value=1.3; Accession=PF02985.14; Description=HEAT repeat
  Pfam annotation: Domain name=HEAT; Domain location=882-918; Score =19.8; E_value=0.011; Accession=PF02985.14; Description=HEAT repeat
  Pfam annotation: Domain name=HEAT; Domain location=962-993; Score =8.7; E_value=4.2; Accession=PF02985.14; Description=HEAT repeat
  Pfam annotation: Domain name=TIP120; Domain location=995-1162; Score =303.0; E_value=6.3e-88; Accession=PF08623.2; Description=TBP (TATA -binding protein) -interacting protein 120 (TIP120)
  Pfam module annotation: Pfam domain module=HEAT::HEAT::HEAT::HEAT::HEA T::HEAT::HEAT::HEAT::HEAT::HEAT::HEAT::TIP120; Domain location=120 -156::201-240::321-356::36-71::461-497::509-547::552-586::592 -628::802-837::882-918::962-993::995-1162
PKLTSTRCWCSCIWSGESSGLAVNSLAPLVKKVGEDKVVEMTNKLCDKLINGKEQHRDTASIALKTIIAEVTTSSLAEKILLSLAPQLIKGVNSAKGAEIKCECLDILGDVLHRFGNLITKDHEYMLTALLSQLGSNQASVRKKSVSCIASLAPSLSDDLLAKTTLQVVQLLKNRSAKSEITRTNIQMIGSLSRSVGYRFGPHLGETVPLLISYCRSASENDEELREYSLQALESFMLRCPRDISPYCEGILNLALEYVSYDPNFTDSMEEDTDEEGLEEDDDDESANEYTDDEDASWKVRRASAKCLSAVIVSRPEMLSKMYLEACPKLIERFREREENVKMDIFNTFIELLRQTGNVTKGQGDIDESSPRWLLKQEVPKVVKSINRQLREKSIKTKVGAFSVLKELVVVLPDCLADHFGSLVPGIEKALTDKSSTSNLKIEALVFTRLVMASHFPSVFHPYIQAFSAPILSAIGDRYYKVTAEALRVCGELVRVLRPNLEASAVDFRPYIGPIYNAILGRLANQDQDQEVKECAISCMSLVVSTFGDGLQRELPACLPILVDRMGNEITRLTAVKAFSVIANSPLRIDLSFVLDHVVSELTAFLRKANRALRQATLGTLNSLVVTYGGQIGSSSYETIIAELSTLISDMDLHMTALALELCCTIMVDRKSIQNVGLAVRNKVLPQALILIRSALLQGQALQALQRFFASLVQSANTSFDALLDSLISVAKPSQSGGLAKQALSSIAKCVAVLCLAAGDQKCAATIEMLKGILKDDSASNSAKQHMALLCLGEIGRRKDLSNHVQIENIVIESFQSPFEEIKSAASYALGNIAVGNLSKYLPFILDQIDNQQKKQYLLLHSLKEVIVRQTVDHNGQSELQDSNIEKILALLFNHCESEEEGVRNVVAECLGKIALIEPKKLIPALKVRTSSPAANTRSTVAIAIKYSIVERPEKIDEIMYSEISTFLMLIKDSDRHVRRAAVLALSTAAHNKPSLIKGLLPELLPLLYDQTVIKQELIRTVDLGPFKHVVDDGLELRKAAFECVDTLLDSCLDQVNPSSFIVPFLLSGLGDHYDVKMPCHLILSKLADKCPSAVLAVLDSIVEPIEKTINHKPKGDAVKQEVDRNEDMIRSALRAISSLSRISGSDYSIRFKNLMNKIVSTPALAEKYNSVRSE

SEQ ID NO: 108970 - protein, 142 aa, Setaria italica
  misc_feature (55)..(55): Xaa can be any naturally occurring amino acid
  Transcript Sequence Number=SeqID_42996
  Gene Ontology: Mol. function=transferase activity, transferring glycosyl groups; Cellular component=integral to membrane; Biological process=cellulose biosynthetic process
  Homolog annotation: Hit_ID=B9SE80; Match level="QueryCoverage=95%, HitCoverage=12%, E-value=3e-57, Identity=78%"; Hit description =Cellulose synthase A catalytic subunit 6 [UDP-forming], putative
MRLWCLQEKFEKRFGQSHAFLASTLLENGEGCRFDMLKSLDDCIHVLSCGYENKXWGKEVGWIYGSVTEDILTGFKMHCHGWRSVYCMPRRPAFKGSAPINLTDRLHQVLRWALGSVEIFLSKHCPIWYGYRCGLKPLERLS

SEQ ID NO: 108971 - protein, 109 aa, Setaria italica
  Transcript Sequence Number=SeqID_42997
  Gene Ontology: Mol. function=hydrolase activity; Cellular component =cytoplasm; Biological process=embryonic development ending in birth or egg hatching
  Homolog annotation: Hit_ID=B9SJ31; Match level="QueryCoverage=100%, HitCoverage=11%, E-value=3e-47, Identity=79%"; Hit description =Cleavage and polyadenylation specificity factor, putative
  Pfam annotation: Domain name=RMMBL; Domain location=49-91; Score =41.8; E_value=2.7e-09; Accession=PF07521.4; Description=RNA -metabolising metallo-beta-lactamase
SGGFSLEAFKKWAPSEKNLITLPGYCVAGTVGHKLMSGKTTKIVLDKDTHIDVRCQIHQLAFSPHTDSKGIMDLTEFLSPKHVILVHGVKPQMAFLKERIESELGMPCF

SEQ ID NO: 108972 - protein, 120 aa, Setaria italica
  Transcript Sequence Number=SeqID_42998
  Gene Ontology: Mol. function=transporter activity; Cellular component= membrane; Biological process=oligopeptide transport
  Homolog annotation: Hit_ID=Q852P5; Match level="QueryCoverage=96%, HitCoverage=19%, E-value=3e-45, Identity=75%"; Hit description =Nitrate transporter
MASVLPETASDGKALTDAWDYKGRPASRATTGGWACAAMILGAELFERMTTLGIAVNLVPYMTGTMHLGNAAAANTVTNFIGTSFMLCLLGGFVADSYLGRYLTIAVFTAVQATGVMILT

SEQ ID NO: 108973 - protein, 100 aa, Setaria italica
  misc_feature (55)..(55): Xaa can be any naturally occurring amino acid
  Transcript Sequence Number=SeqID_42999
  Gene Ontology: Mol. function=transporter activity; Cellular component= membrane; Biological process=oligopeptide transport
  Homolog annotation: Hit_ID=Q05085; Match level="QueryCoverage=71%, HitCoverage=12%, E-value=6e-26, Identity=80%"; Hit description =Nitrate/chlorate transporter
WLFLVKGAELFERMTTLGIAVNLVPYMTGTMHLGNAAAANTVTNFIGTSFMLCLXGGFVADSYLGRYLTIAIFTAVQATVRRLWPARLDPCIPLLFTPQR

SEQ ID NO: 108974 - protein, 448 aa, Setaria italica
  Transcript Sequence Number=SeqID_43000
  Gene Ontology: Mol. function=transporter activity; Cellular component= membrane; Biological process=oligopeptide transport
  Homolog annotation: Hit_ID=B9SUW7; Match level="QueryCoverage=97%, HitCoverage=75%, E-value=1e-145, Identity=60%"; Hit description =Oligopeptide transporter, putative
  Pfam annotation: Domain name=PTR2; Domain location=1-372; Score =356.0; E_value=6.8e-104; Accession=PF00854.13; Description=POT family
  Pfam annotation: Domain name=TatC; Domain location=246-428; Score= -72.7; E_value=0.06; Accession=PF00902.10; Description=Sec -independent protein translocase protein (TatC)
  Pfam module annotation: Pfam domain module=PTR2::TatC; Domain location=1-372::246-428
ADAKGASPDCVPANGTQPGVLYLGLYLTALGTGGLKSSVSGFGSDQFDEAHDGERSKMLRFFNWFYFFVSIGALLAVTVLVYVQDNVGRRWGYGVCAAGILVGLAVFLLGTRRYRFKKLVGSPLTQVAAVTAAAWSKRALPLPSDPNTLYDVDDAAAAGADVKGKQKLPHSKECRFLDHAAIVDGESPASASKWTLCTRTDVEEVKQVVRMLPIWATTIMFWTIHAQMTTFSVAQAEVMDRGIGGPGFLIPAGSLTVFLIGSILLTVPLYDRLIAPVVKRLTGNPHGLSPLQRVFVGLFLSVAGMAVAALIERHRQTTSEHGVTITVFLLMPQFVLVGAGEAFTYMGQLAFFLRECPKGMKTMSTGLFLSTCALGFFFSTLLVTIVGKVTGHGGHGGWLADNLNDGRLDYFYWLLAVISAINLVLFTLAARGYVYKEKRLADAGIELA

SEQ ID NO: 108975 - protein, 595 aa, Setaria italica
  Transcript Sequence Number=SeqID_43001
  Gene Ontology: Mol. function=transporter activity; Cellular component= membrane; Biological process=oligopeptide transport
  Homolog annotation: Hit_ID=Q852P5; Match level="QueryCoverage=99%, HitCoverage=99%, E-value=0.0, Identity=60%"; Hit description=Nitrate transporter
  Pfam annotation: Domain name=DctM; Domain location=40-489; Score= -242.3; E_value=0.077; Accession=PF06808.4; Description=DctM-like transporters
  Pfam annotation: Domain name=MFS_1; Domain location=42-523; Score =24.3; E_value=0.00051; Accession=PF07690.8; Description=Major Facilitator Superfamily
  Pfam annotation: Domain name=PTR2; Domain location=104-515; Score =467.5; E_value=2e-137; Accession=PF00854.13; Description=POT family
  Pfam module annotation: Pfam domain module=DctM::MFS_1::PTR2; Domain location=40-489::42-523::104-515
MVGLLPETNAAAETDVLLDAWDFKGRPAPRASTGRWGAAAMILVAELNERLTTLGIAVNLVTYLTATMHLGNAESANVVTNFMGTSFMLCLLGGFVADSFLGRYLTIAIFTAVQASGVTILTISTAAPGLRPATCPSNDASCSRATGPQLGVLYIALYLTALGTGGLKSSVSGFGSDQFDETDRGEKNQMMRFFNWFFFFISLGSLLAVTVLVYVQDNLGRPWGYGACAASIAAGLVIFLAGTRRYRFKKLAGSPLTQIAAVVVAAWRKRHLELPADPDMLYDIDVGKVAAAEEGSTKKSKRKEKLPHTDQFRFLDHAAINEDPAAEPSKWRLATRTDVEEVKTVVRMLPIWATTIMFWTVYAQMTTFSVSQATTMDRRIGPSFQIPAGSLTVFFVGSILLTVPIYDRIVVPVARRLNGNPHGLTPLQRIGVGLVLSVIAMAGAAATEIRRLRVARDAAVPAGGVVPMSVFWLIPQFFLVGAGEAFTYIGQLDFFLRECPKGMKTMSTGLFLSTLSLGFFVSSALVTCVHKVTGDRHAWIADDLNKGRLDNFYWLLAVICLVNLLVYLVAARWYKYKAGRPGADGSINADEPMLH

SEQ ID NO: 108976 - protein, 408 aa, Setaria italica
  Transcript Sequence Number=SeqID_43002
  Gene Ontology: Mol. function=protein dimerization activity; Cellular component=nucleus; Biological process=regulation of transcription, DNA-dependent
  Homolog annotation: Hit_ID=Q653H7; Match level="QueryCoverage=100%, HitCoverage=58%, E-value=0.0, Identity=87%"; Hit description=Auxin response factor 18
  Pfam annotation: Domain name=Auxin_resp; Domain location=3-86; Score =173.7; E_value=5.4e-49; Accession=PF06507.5; Description=Auxin response factor
VEASKLAVSGQPFEVVYYPRASTPEFCVKAGAVRAAMRTQWCAGMRFKMAFETEDSSRISWFMGTVSAVQVADPIRWPNSPWRLLQVAWDEPDLLQNVKRVSPWLVELVSNMPAIHLSPFSPPRKKLCVPLYAELPLEGQFPTPMFHGSPLGRGVGPMCYFPDGTPAGIQGARHAQFGISLSDLHLNKLQSSLSPHGLHHLDHGMQPRIAAGLIIGHPAARDDISCLLTIGTPQNKKSDVKKAPPQLMLFGKPILTEQQISLGTAGGFPLSTPKRSPSDDNAEKTVSNSDISSPGSNQDGTSSGGAPSCQDNKVLDLGLETGHCKVFMQSEDVGRTLDLSDVGSYEELYQRLADMFGIEKAELMSHVFYRDASGALKHTGDKPFSEFTKTTRRLTILTDTASSDSLAR

SEQ ID NO: 108977 - protein, 155 aa, Setaria italica
  misc_feature (43)..(43): Xaa can be any naturally occurring amino acid
  misc_feature (109)..(109): Xaa can be any naturally occurring amino acid
  misc_feature (124)..(124): Xaa can be any naturally occurring amino acid
  Transcript Sequence Number=SeqID_43003
  Homolog annotation: Hit_ID=Q84S70; Match level="QueryCoverage=81%, HitCoverage=18%, E-value=4e-30, Identity=48%"; Hit description=Kelch- like protein
  Pfam annotation: Domain name=Dev_Cell_Death; Domain location=27-152; Score=206.1; E_value=9.1e-59; Accession=PF10539.1; Description =Development and cell death domain
CFWNIDLCIIGISFYLLPDWNGLACCFGCKHNTMNECLTKQLXIGLPSGHISYVKNVKPGMPLFLFNYSDRKMHGIFEAACAGKLNIDQFAWSDGGRIKTQFPAQVLVXNNTQCYPVPESHFKXVISDNYHRPRHFYFELDHAQTSALIIFCFKP

SEQ ID NO: 108978 - protein, 147 aa, Setaria italica
  misc_feature (125)..(125): Xaa can be any naturally occurring amino acid
  Transcript Sequence Number=SeqID_43004
  Gene Ontology: Mol. function=phosphoinositide binding; Biological process=cell communication
  Homolog annotation: Hit_ID=UPI000034F14F; Match level="QueryCoverage =87%, HitCoverage=17%, E-value=8e-20, Identity=45%"; Hit description =phox (PX) domain-containing protein
  Pfam annotation: Domain name=PX; Domain location=1-101; Score=50.9; E_ value=5.1e-12; Accession=PF00787.16; Description=PX domain
FLKSVVFYRIHVGIQSPEGFSSSHGILRRFSDFLKLSSDLKSAFPRKDVPLAPPKHAFLRINSSRLLLEERRHALEEWMQKLLSDIDLSRSAPVAAFLELEAAARSYFQDRNGRPSEAGSSAKSXTDSSPHPDGPASGSLAESNQIT

SEQ ID NO: 108979 - protein, 197 aa, Setaria italica
  misc_feature (57)..(57): Xaa can be any naturally occurring amino acid
  misc_feature (108)..(108): Xaa can be any naturally occurring amino acid
  misc_feature (125)..(125): Xaa can be any naturally occurring amino acid
  misc_feature (142)..(142): Xaa can be any naturally occurring amino acid
  misc_feature (162)..(162): Xaa can be any naturally occurring amino acid
  Transcript Sequence Number=SeqID_43005
  Gene Ontology: Mol. function=phosphoinositide binding; Biological process=cell communication
  Homolog annotation: Hit_ID=UPI000034F14F; Match level="QueryCoverage =88%, HitCoverage=24%, E-value=3e-31, Identity=48%"; Hit description =phox (PX) domain-containing protein
SKQKLSRLLITMQRRIGTAKTDMEDLIARLNQEAAVKEYLTTKVKDLEVELEATKQXGRETLQQAILAERERITQMQWDMDELRRKYSEMESNLKVEQNEKTRVESEXTSSSGENETLLEELEMXKEVESLKQHLGEVEAKXSKADIKVLVKEVKSLRNSQXEMKKVLHQYIEEKTPLVLRRQHEACRQRRARIREG

SEQ ID NO: 108980 - protein, 155 aa, Setaria italica
  misc_feature (44)..(44): Xaa can be any naturally occurring amino acid
  Transcript Sequence Number=SeqID_43006
  Homolog annotation: Hit_ID=Q9SRS8; Match level="QueryCoverage=54%, HitCoverage=84%, E-value=1e-13, Identity=47%"; Hit description =F21O3.9 protein
PNGRRLEDVLAELEPYTQFTIEQNPMSSRLCVDDPEADYSNQWXFEKLVFRNSITGVRRDRKYAIQAKNAYATGVHMSENVIGNTTHKTEHLIRYYHYHNTINVLDEVCREFVPIPPKGGLTWSEKTPWYYDDSMKRVANAVREFERETIGDVRL

SEQ ID NO: 108981 - protein, 580 aa, Setaria italica
  Transcript Sequence Number=SeqID_43007
  Gene Ontology: Mol. function=phosphoinositide binding; Biological process=cell communication
  Homolog annotation: Hit_ID=UPI000034F14F; Match level="QueryCoverage =92%, HitCoverage=77%, E-value=5e-62, Identity=34%"; Hit description =phox (PX) domain-containing protein
FTISLLRLNSSRLLLEERRHALEEWMQKLLSDIDLSRSAPVAAFLELEAAARSYFQDRNGRPSEAGSSAKSSTDSSPHPDGPASGSLAESNQINEVLTRGSSLTGATGNGVLGEAILDQSDDHVSSVSNHRKGSLNFLEHDGRNGLASSYRGVVSEEAHDSNPGHARKDSAESIGSDLSSLRGSELSVPGANSSLWDGPVDLPSAMDAHISQTEHLTGLDMQLLYDVDAQVILPNDQKQKLSRLLITMQRRIGTAKTDMEDLIARLNQEAAVKEYLTTKVKDLEVELEATKQKGRETLQQAILAERERITQMQWDMDELRRKYSEMESNLKVEQNEKTRVESEKTSSSGENETLLEELEMKQKEVESLKQHLGEVEAKSKADIKVLVKEVKSLRNSQKEMKKVLHQYIEEKTDLERVVNREKQRSTRLRLSREKILHECRLLRERLQECSAKFLAEEQDNFTVDPSSLPDALDLLATSDNRIRLLVAEAQLLAREDEQGSSDDGDNSDSISSLTMGSEDASVTDEDTTKMLSDLLIDNAQLRMRLNAVIRNAVNTAVKPEREGSGEVLPKRTVLNWLLDR

SEQ ID NO: 108982 - protein, 107 aa, Setaria italica
  Transcript Sequence Number=SeqID_43008
  Gene Ontology: Mol. function=cysteine-type peptidase activity; Biological process=ubiquitin-dependent protein catabolic process
  Homolog annotation: Hit_ID=B9FRW0; Match level="QueryCoverage=72%, HitCoverage=8%, E-value=1e-12, Identity=43%"; Hit description =Ubiquitin carboxyl-terminal hydrolase
  Subcellular localization annotation: CTP_CleavageSite=65; ConfidenceScore=5.37e-01
SSNPQKNMQKIDGACVGTGTSAPSANADVPKSGPSSSVDQTQSRKNVDAKLGAPQPVSIWASDLMEATVPSWDGIDMPNTKVAAQQYLKRKSIGYVFEFRTFFVFPR

SEQ ID NO: 108983 - protein, 76 aa, Setaria italica
  Transcript Sequence Number=SeqID_43009
  Subcellular localization annotation: CTP_CleavageSite=52; ConfidenceScore=5.15e-01
MAPQLKKVNLKSKKFVRYPVVNMWLGSKKLLAASLKPGKKTKHTRTRRRAVVCKDMANISCLGDSMNEQLPSGLTP

SEQ ID NO: 108984 - protein, 147 aa, Setaria italica
  misc_feature (124)..(124): Xaa can be any naturally occurring amino acid
  Transcript Sequence Number=SeqID_43010
  Gene Ontology: Mol. function=cysteine-type peptidase activity; Biological process=ubiquitin-dependent protein catabolic process
  Homolog annotation: Hit_ID=B9FRW0; Match level="QueryCoverage=84%, HitCoverage=13%, E-value=3e-58, Identity=82%"; Hit description =Ubiquitin carboxyl-terminal hydrolase
  Pfam annotation: Domain name=UCH; Domain location=1-105; Score=-52.5; E_value=0.00072; Accession=PF00443.21; Description=Ubiquitin carboxyl- terminal hydrolase
TSSLLQLSACSGHTGIAFDPREKIDKKVDFQPVLDLKPFVSDSKGTDFKYSLYGVLVHAGWNTQSGHYYCFVRTSSGMWHNLDDNQVRQVREADVLKQKAYMLFYVRDSIRNPVVRRDNSTANXPTKKTPEKISTLNGITQCCALHY

SEQ ID NO: 108985 - protein, 903 aa, Setaria italica
  misc_feature (676)..(676): Xaa can be any naturally occurring amino acid
  misc_feature (866)..(866): Xaa can be any naturally occurring amino acid
  Transcript Sequence Number=SeqID_43011
  Gene Ontology: Mol. function=cysteine-type peptidase activity; Cellular component=cytoplasm; Biological process=ubiquitin-dependent protein catabolic process
  Homolog annotation: Hit_ID=B9FRW0; Match level="QueryCoverage=97%, HitCoverage=97%, E-value=0.0, Identity=60%"; Hit description =Ubiquitin carboxyl-terminal hydrolase
  Pfam annotation: Domain name=UCH; Domain location=87-391; Score =231.5; E_value=2.1e-66; Accession=PF00443.21; Description=Ubiquitin carboxyl-terminal hydrolase
MALVSTAAAPEGVLHRRIEFHLARRPHASVTVGGGGFRMETLNPDAAGKAGAGAAAGSSEGEARRPEKGDAGGIDPELSVARIYLGRIGAGLQNLGNTCYLNSVLQCLTYTEPFAAYLQSGKHGSSCRTSGFCALCALQKHVKTALQSTGKIVTPSLIVKNLRCISRSFRNSRQEDAHELMVNLLESMHKCCLPSGVPSESQSAYDKSLVHKIFGGRLRSQVKCTRCSHCSNKFDPFLDLSLDIAKATTLVRALQNFTEEELLDGGQKQYQCDRCRQKVVAKKRFTIDKAPNVLTVHLKRFSPFNPREKIDKKVDFQPVLDLKPFVSDSKGTDFKYSLYGVLVHAGWNTQSGHYYCFVRTSSGMWHNLDDNQVRQVREADVLKQKAYMLFYVRDSIRNPVVRRDNSTANLPTKKTPEKISTLNGITQSSVKAQHLNGSSPFGDKTHITSSGYSSNLGKSSAGHFSKNEVKAEDVAASQSNAPLSTQALESRNNGATLPLKSMQCSVNGQKAVETKGDAGGNTSVASPMVNGVGTLSKADKLTSQPPTTPFSKPAAHINDTSAGFAVQTPSKKDPIVSNGIVPGSGSLTSSEKTKDLPGSVEQANAIAKALPMSQDNTAPELAQVTCGQQVSSGGSVQVAVAASCNGTTAKKVNLKSKKFVRYPVVNMWLGSKKLIXASLKPGKKTKHTRTRRRAVVCKDMANISCLGDSMNEQLTSTSATAQSETVEHTSDCRKRSHASSRPEDDPQSSKNMQKIDGACVGTGTSAPSANADVPKSGPSSSVDQTQSRKNVDAKLGAPQPVSIWASDLMEATVPSWDGIDMPNTKVAAQQYLKRKSIGYVLDEWDEEYDRGKTKKVRNSKQDFGGXPNPFQEEADYISQRRSKQKSYQGKSWNKPNMTERLRI

SEQ ID NO: 108986 - protein, 87 aa, Setaria italica
  Transcript Sequence Number=SeqID_43012
FYFYLNFGLLQLQGKGLSCLSTLLLRLALVQLWSNVYLISSTCTTWIDTVNLLQGINPLGARSLNCSPTMSERNLRPKYSTLLLHQK

SEQ ID NO: 108987 - protein, 138 aa, Setaria italica
  Transcript Sequence Number=SeqID_43013
  Homolog annotation: Hit_ID=B6T4Z4; Match level="QueryCoverage=91%, HitCoverage=38%, E-value=1e-58, Identity=89%"; Hit description=SLL2
EQRKYLDKLRRIGFRSNINFLVDDVLESKVERRFELVMDEGTLDAIGLHPDGPVKRMMYWQSVASLVSPGGILVITSCSRTKDELVQEVENFNQRKLGAMGSEGLPASDTAVFSYLDHVRSYPNVDSSCITTVAFLHK

SEQ ID NO: 108988 - protein, 330 aa, Setaria italica
  Transcript Sequence Number=SeqID_43014
  Gene Ontology: Mol. function=methyltransferase activity; Biological process=metabolic process
  Homolog annotation: Hit_ID=B6T4Z4; Match level="QueryCoverage=100%, HitCoverage=100%, E-value=1e-142, Identity=78%"; Hit description=SLL2
  Pfam annotation: Domain name=Methyltransf_11; Domain location=164 -267; Score=33.4; E_value=9.2e-07; Accession=PF08241.4; Description =Methyltransferase domain
  Pfam annotation: Domain name=Methyltransf_12; Domain location=164 -265; Score=48.8; E_value=2.1e-11; Accession=PF08242.4; Description =Methyltransferase domain
  Pfam module annotation: Pfam domain module=Methyltransf _11::Methyltransf_12; Domain location=164-267::164-265
MAGIRWPPEDPEIFPSRMVGSGVWVPVGPPGEMASDDDRSVAADSWSIKSDYGSTLDDEQRYADTAEVLLASSSASAAAAPSASVAANPSSDFSFDKDVPDSGDVEPPLLAMQNFQDGAYAEDLANFHERSHADDWFGTEVMDVRVGWTKNLCSSKDLPSCSVLDIGTGSGRLLQQLAKQGFSDLTGIDYSEGAIELARNLAIRDGFEHINFLVDDVLESKVERRFELVMDEGTLDAIGLHPDGPVKRMMYWQSVASLVSPGGILVITSCSRTKDELVQEVENFNQRKLGAMGSEGLPASDTAVFSYLDHVRSYPNVDSSCITTVAFLHK

SEQ ID NO: 108989 - protein, 56 aa, Setaria italica
  Transcript Sequence Number=SeqID_43015
TEDDNSGTHNNAKTIWILKTNKHHRPRTFCTKSIRNQYSLKIFLIIFLLLKHLLLL

SEQ ID NO: 108990 - protein, 133 aa, Setaria italica
  Transcript Sequence Number=SeqID_43016
  Subcellular localization annotation: CTP_CleavageSite=63; ConfidenceScore=5.54e-01
LTSQTKNLLHKINPKPVFPNVSNCQPKIFFSQEIYNKLSQDNSTSRSSLSFSYCSNISFCSPCCHYKTNMRVEPISVDMINRIEILECLKKMRAVHPAKSNSGNKGSIMKYLKRSIKKYQFGGTSIKNSKKLL

SEQ ID NO: 108991 - protein, 77 aa, Setaria italica
  Transcript Sequence Number=SeqID_43017
  Gene Ontology: Mol. function=transporter activity; Cellular component= integral to membrane; Biological process=RNA-dependent DNA replication
  Homolog annotation: Hit_ID=Q7FS87; Match level="QueryCoverage=94%, HitCoverage=5%, E-value=1e-23, Identity=80%"; Hit description =Putative glycerol 3-phosphate permease
  Subcellular localization annotation: CTP_CleavageSite=55; ConfidenceScore=5.40e-01
VTAIIDGTGSAGAAVGPLLTGYISAKSWTAVFTMLMVSALVAGLLLSRLVMAEVSAKLESQRSAAATGLPVSSVEEA

SEQ ID NO: 108992 - protein, 153 aa, Setaria italica
  misc_feature (10)..(10): Xaa can be any naturally occurring amino acid
  Transcript Sequence Number=SeqID_43018
  Gene Ontology: Mol. function=transferase activity; Cellular component= chloroplast
  Homolog annotation: Hit_ID=B9SM34; Match level="QueryCoverage=98%, HitCoverage=72%, E-value=2e-22, Identity=30%"; Hit description =Pentatricopeptide repeat-containing protein, putative
  Pfam annotation: Domain name=PPR; Domain location=120-153; Score =30.0; E_value=9.6e-06; Accession=PF01535.12; Description=PPR repeat
  Pfam annotation: Domain name=PPR; Domain location=15-49; Score=23.7; E_value=0.00074; Accession=PF01535.12; Description=PPR repeat
  Pfam annotation: Domain name=PPR; Domain location=50-84; Score=27.4; E_value=5.8e-05; Accession=PF01535.12; Description=PPR repeat
  Pfam annotation: Domain name=PPR; Domain location=85-119; Score=45.7; E_value=1.8e-10; Accession=PF01535.12; Description=PPR repeat
  Pfam module annotation: Pfam domain module=PPR::PPR::PPR::PPR; Domain location=120-153::15-49::50-84::85-119
YRLVLSSDSXEVNAYTLNIMVHTNCKTLEFDKVDAVISEMEKRCVFPDVVTHNVMVDARFRAGDVDAAMAVVDSMANKGLKPGIVTYNSVLKGLCKHRRLDKAKEVFRAMDQCGVAADVWSFNILIGGFCRVGEVEEAVKFYKEMQQRWLFTT

SEQ ID NO: 108993 - protein, 129 aa, Setaria italica
  Transcript Sequence Number=SeqID_43019
  Subcellular localization annotation: CTP_CleavageSite=51; ConfidenceScore=5.09e-01
HGVVLQLGQVPRDRHLEIPIHGRSAARGARRALSPPSVSSRPLSNKQQRERGSHRPCPWSWSWRAPCGVSFTVRTLARPVCWAPPPPRPTHPIGRSAAGRVAANQGELLPPGGAPPPQLRSQQIKHGNR

SEQ ID NO: 108994 - protein, 81 aa, Setaria italica
  Transcript Sequence Number=SeqID_43020
  Homolog annotation: Hit_ID=B2D0N6; Match level="QueryCoverage=83%, HitCoverage=7%, E-value=1e-15, Identity=67%"; Hit description =Respiratory burst oxidase-like protein B2
MAGTEAAHDLGSSRRSQDDTATLIPHSGNLEESSGRGVKTTRFKDDDEVVEITLDVQRDSVAIEDVRAVDDSGSGHGGGFD

SEQ ID NO: 108995 - protein, 883 aa, Setaria italica
  Transcript Sequence Number=SeqID_43021
  Gene Ontology: Mol. function=electron carrier activity; Cellular component=integral to membrane; Biological process=oxidation reduction
  Homolog annotation: Hit_ID=B2D0N6; Match level="QueryCoverage=98%, HitCoverage=97%, E-value=0.0, Identity=81%"; Hit description =Respiratory burst oxidase-like protein B2
  Pfam annotation: Domain name=FAD_binding_8; Domain location=570-691; Score=196.3; E_value=8.1e-56; Accession=PF08022.4; Description=FAD -binding domain
  Pfam annotation: Domain name=Ferric_reduct; Domain location=372-530; Score=180.9; E_value=3.6e-51; Accession=PF01794.11; Description =Ferric reductase like transmembrane component
  Pfam annotation: Domain name=NADPH_Ox; Domain location=112-210; Score= 212.0; E_value=1.5e-60; Accession=PF08414.2; Description=Respiratory burst NADPH oxidase
  Pfam annotation: Domain name=NAD_binding_6; Domain location=697-866; Score=230.2; E_value=5.1e-66; Accession=PF08030.4; Description =Ferric reductase NAD binding domain
  Pfam annotation: Domain name=efhand; Domain location=211-239; Score =27.9; E_value=4.2e-05; Accession=PF00036.24; Description=EF hand
  Pfam annotation: Domain name=efhand; Domain location=255-283; Score =6.2; E_value=4.4; Accession=PF00036.24; Description=EF hand
  Pfam module annotation: Pfam domain module=FAD_binding_8::Ferric _reduct::NADPH_Ox::NAD_binding_6::efhand::efhand; Domain location=570- 691::372-530::112-210::697-866::211-239::255-283
LFNSLLLVGLTLVSNSTSGRGVKTTRFKDDDEVVEITLDVQRDSVAIEDVRAVDDSGSGHGGGFDGMSLVSPSSSRSGKLASKLRQVTNGLKLKNSSNRPQQTQVGKNVRKRLDRSKSGAVVALKGLQFVTAKVGQDGWAAVEKRFNQLQVDGVLLRSRFGKCIGMDGSDEFAVQVFDSLARKRGIVKQVLTKDELKDFWEQLSDQGFDNRLRTFFDMVDKNADGRITAEEVKEIITLSASANKLSKLKERAEEYAALIMEELDPTNLGYIELEDLEALLLQSPSQAAARSTITHSSKLSKALSMRLATNEDNGPFYHYWQEFLYFLEENWKRIWVMTLWLSICIGLFIWKFIQYRNRAVFHIMGYCVTTAKGAAETLKFNMALVLFPVCRNTITWIRSKTKIGAVVPFNDNINFHKVIAAGVAVGVALHAGAHLTCDFPRLLHASDAAYEPMKPFFGEKKPPNYWWFVKGTEGWTGVVMLVLMAIAFVLAQPWFRRNRLKDSNPLKKMTGFNAFWFTHHLFVIVYTLLVVHGICLYLSREWYKKTTWMYLAVPVLLYVSERIIRLFRSHDAVRIQKVAVYPGNVLALYMSKPPGFRYRSGQYIFINCRAVSPYEWHPFSITSAPGDDYLSVHIRTRGDWTSRLRTVFSEACRPPTDGESGLLRADLSKGITESNARFPKLLIDGPYGAPAQDYREYDVLLLIGLGIGATPLISIVKDVLNHIQQGGSVAGTEPEGSGRAKKRPFMTKRAYFYWVTREEGSFEWFRGVMNEVAEKDKDRVIELHNHCSSVYEEGDARSALIVMLQELQHAKKGVDILSGTSVKTHFARPNWRKVFKHVAVNHDNQRVGVFYCGEPVLVPQLRQLSADFTHKTNTRFEFHKENF

SEQ ID NO: 108996 - protein, 141 aa, Setaria italica
  Transcript Sequence Number=SeqID_43022
TKANKGSQKRMPNPLARHLRPPKLRSFPVDHHQPRRPEPNRRLPRCQTRDAGDDAIPATSPASNRLVLIHGHPTSSAAPFALGTPCRHPSRGSRSSRLTTGVNRVMLVHTLCLSKCPNESEDPRRLNIAVRFSVVCADQQR

SEQ ID NO: 108997 - protein, 218 aa, Setaria italica
  misc_feature (51)..(51): Xaa can be any naturally occurring amino acid
  misc_feature (90)..(90): Xaa can be any naturally occurring amino acid
  Transcript Sequence Number=SeqID_43023
  Gene Ontology: Mol. function=aspartic-type endopeptidase activity; Cellular component=chromatin; Biological process=RNA-dependent DNA replication
  Homolog annotation: Hit_ID=Q6UUS2; Match level="QueryCoverage=87%, HitCoverage=26%, E-value=5e-73, Identity=68%"; Hit description =Putative gag-pol protein
  Pfam annotation: Domain name=Retrotrans_gag; Domain location=114-212; Score=42.4; E_value=1.8e-09; Accession=PF03732.9; Description =Retrotransposon gag protein
MPPKKQGRARPASGAQADGTSQAELLAAMREMQNEMRTLRQTARAGAAQPXPTTSTQEVAAPVGPESGVLLREWVGMKLDSFDGSGTPIXAADWLSYVEDKMEAFEVSAHDRVRYGAQLLKGEAQQGWKGVQSARTAAHGSLTWPEFVRQFERRFYPVTFLDKMKIELNNYVQERKTVAEYEVGFNQIVRFVPHVAHDDAEKARQFRQGLKPSIRHVL

SEQ ID NO: 108998 - protein, 71 aa, Setaria italica
  Transcript Sequence Number=SeqID_43024
CSLLPSPLIRIRRALMQWSVDANIFPWKHFFVYLTYFFAVVKLSFTKICLPAFSFWFNTHLHYFHFVGFVN

SEQ ID NO: 108999 - protein, 1058 aa, Setaria italica
  misc_feature (30)..(30): Xaa can be any naturally occurring amino acid
  misc_feature (729)..(729): Xaa can be any naturally occurring amino acid
  Transcript Sequence Number=SeqID_43025
  Gene Ontology: Cellular component=late endosome; Biological process =protein transport
  Homolog annotation: Hit_ID=Q5KMS0; Match level="QueryCoverage=39%, HitCoverage=22%, E-value=7e-43, Identity=26%"; Hit description =Autophagy-related protein 2
  Pfam annotation: Domain name=ATG_C; Domain location=956-1053; Score =122.3; E_value=1.6e-33; Accession=PF09333.3; Description=ATG C terminal domain
SSMRQELIKSSELLLHVKLSCVSVQVCKKXCGLLNKLLDHVLDGISNEETSTSENCKDKSVPNDICIQTSVIFECSILEICTELDETVEVGPLLQTELEGSWSSLKLKVSNFSLFSYSNVGRLNNASFLWVNHGEAELWGSVSVKDDKVPGESKDFLIVVCKDSACRRGDGEGTNVLSIGTAGCSVTHIRNPKLKENYTSVGVRSGTIVAPGGRMDWINAMCLLFSSGSDGTGKSDNSNTVNSSRSGEPYASSFFLELTDVAVSYEPHFKYFTLTAEATDPKFFSCILAASSFKLHNKSSSASAATDFDIQLRDLGVLLSESSGSKNVTCGYGVDYLRQAGYVKVAQNTFIEASLRIDSSFWKLEILDSQFDIATCRDTTYGLIRLGSQLQQLYGPDMRDALDHLQSRWNSVQQANKQNIAADASDKSESSLENMTDSGDCQSDGLLDDIIENAFYTEDYMANDFWESNCCHSVSSSETDDGFELNTATSHVLLRSSLVTSETNVTQIPLRQDSCPDQIIDSYYMPELHQSSSAPCIEEHKCTSGGESEDGGWYNNVPLTIVENHVSKKKSKKGEQILQQEVKASVCHLNTDDESCNLKGKILIHDIDVKWRLYAGNDWLLPQKDPTSFACTDGRDRSSSLEFSLTGLSIQLDMYPDGDVSISKLSIAAQDLSLCDQSIHAPWKLVLGCYNSKDYPRESCSSVFRFELESVRPEPHAPLEDYRLHLEIXLPLQLHLDQGQLNFLIKFFQNDLCNNDPHLQSEKEIFNVKSTSYGRNTVVDEALLPFFQKFDVKPLVLHINYIPRQFDPIALGKGNYAELLNILPWKGIDLKLKHVSAMGVYGWNSICDTVAAEWLEDISKNQVHKLLKGLPPIRSLVAVSSGTKKLVSLPIKSYKKDRKLLKGMQRGAVAFIRSVSIEAVGLGVHLAAGAHDMLVKTERALTAVPPPLASCEAKRTKHNIRANQPESAQQGIKQAYESLTDGFGKTASALISNPIKAYNRAGAGSALATAICGAPAAAVAPVSASARAFHCALVGLRNSLDPEHKKESMCKYHGPSQL

SEQ ID NO: 109000 - protein, 220 aa, Setaria italica
  misc_feature (101)..(101): Xaa can be any naturally occurring amino acid
  Transcript Sequence Number=SeqID_43026
  Gene Ontology: Mol. function=DNA binding; Cellular component=nucleus; Biological process=regulation of transcription
  Homolog annotation: Hit_ID=Q7XVZ6; Match level="QueryCoverage=89%, HitCoverage=20%, E-value=2e-99, Identity=89%"; Hit description =OSJNBa0020I02.14 protein
  Pfam annotation: Domain name=Myb_DNA-binding; Domain location=59-103; Score=38.2; E_value=3.4e-08; Accession=PF00249.23; Description=Myb -like DNA-binding domain
  Pfam annotation: Domain name=Myb_DNA-binding; Domain location=7-53; Score=51.6; E_value=2.9e-12; Accession=PF00249.23; Description=Myb -like DNA-binding domain
  Pfam module annotation: Pfam domain module=Myb_DNA-binding::Myb_DNA -binding; Domain location=59-103::7-53
MRIMIKGGVWKNTEDEILKAAVMKYGKNQWARISSLLVRKSAKQCKARWYEWLDPSIKKTEWTREEDEKLLHLAKLMPTQWRTIAPIVGRTPSQCLERYEXLLDAACAKDENYEPNDDPRKLRPGEIDPNPESKPARPDPVDMDEDEKEMLSEARARLANTRGKKAKRKAREKQLEEARRLASLQKRRELKAAGIDTRRNKRKPVKIKRKIKNKKRKNKK

SEQ ID NO: 109001 - protein, 107 aa, Setaria italica
  Transcript Sequence Number=SeqID_43027
KVEQYKLVEGNEPAGVGTPIHGGRSCSESLSLPVVAPEDMNKDDSQVMDKKVIIFGIYIGIGCILLAALVAGAVVLIGNGVGVSGSLQLQMMKILVLHMLTSSSTIF

SEQ ID NO: 109002 - protein, 69 aa, Setaria italica
  Transcript Sequence Number=SeqID_43028
  Subcellular localization annotation: CTP_CleavageSite=33; ConfidenceScore=5.09e-01
NFLRQPVMTTPQAIANTLGRPATNLTHAPSRLMGAGIAYNAPPPHLRNFVNLLQPSRGGAAGFDRQLQL

SEQ ID NO: 109003 - protein, 207 aa, Setaria italica
  misc_feature (18)..(18): Xaa can be any naturally occurring amino acid
  Transcript Sequence Number=SeqID_43029
  Homolog annotation: Hit_ID=Q9S823; Match level="QueryCoverage=82%, HitCoverage=19%, E-value=6e-12, Identity=33%"; Hit description =F1C9.4 protein
LELLQLLSDEAPSTMTFXTVTANKDRHYIYEILSASGLLRSELSSKMIPCRFQRNTPLSFEVRSQFQLPSYTINPEVFLILEQAKPAAGKLHRKLIFDLANELIAQKIHGGGSVRQQVQMIICKKSSGWHLFKELCSEIEMLQPEASIIRFSEEEEEERKLAKNAVHEMGKWKSFDSELQGVVLDIERHIFKNLIDEVISSEAMRKV

SEQ ID NO: 109004 - protein, 154 aa, Setaria italica
  Transcript Sequence Number=SeqID_43030
  Gene Ontology: Mol. function=mismatched DNA binding; Cellular component=synaptonemal complex; Biological process=mismatch repair
  Homolog annotation: Hit_ID=A4URL6; Match level="QueryCoverage=99%, HitCoverage=18%, E-value=4e-64, Identity=71%"; Hit description=MutS -like protein 5
  Pfam annotation: Domain name=MutS_III; Domain location=18-154; Score=- 51.3; E_value=0.00014; Accession=PF05192.10; Description=MutS domain III
DEGGASIAIDSVAQISLDKFLKLDATAHEALQIFQVDKHPSYMGIGRAKEGFSVFGMLNKCVTPMGRRLLRAWFLRPIIDIDVINNRLNTITFFLCCEEVMSALCETLKSVRDVPHMLKKFNSPSSFCTSSDWNTFLKCICSLLHINKIFEVGN

SEQ ID NO: 109005 - protein, 99 aa, Setaria italica
  Transcript Sequence Number=SeqID_43031
  Gene Ontology: Mol. function=hydrolase activity, acting on glycosyl bonds; Cellular component=extracellular region; Biological process =cell wall organization and biogenesis
  Homolog annotation: Hit_ID=P26216; Match level="QueryCoverage=96%, HitCoverage=23%, E-value=5e-38, Identity=80%"; Hit description =Exopolygalacturonase
VTLSKNPCSIIDMKYCPNKICTKNGASKVTIKDVTFKNITGTSATPEAVSLLCSDKLPCTGVTMDNIKVEYKGTNNKTMAVCQNAKGSATGCLKELACF

SEQ ID NO: 109006 - protein, 37 aa, Setaria italica
  Transcript Sequence Number=SeqID_43032
HINEIAKMDLSIIEGLLFVQQPGSFTFSIVYLKMLKI

SEQ ID NO: 109007 - protein, 85 aa, Setaria italica
  Transcript Sequence Number=SeqID_43033
LPSTSSIFRLRHMLQVYTYSTSHRFFAAPIGHLVLVMCMKDIRSTYLNLIQAAFFDCDASERGAPGGTIEQPGFTAFCYLAACRR

SEQ ID NO: 109008 - protein, 139 aa, Setaria italica
  misc_feature (19)..(19): Xaa can be any naturally occurring amino acid
  Transcript Sequence Number=SeqID_43034
  Gene Ontology: Mol. function=metal ion binding; Cellular component =nucleus
  Homolog annotation: Hit_ID=Q10J83; Match level="QueryCoverage=73%, HitCoverage=9%, E-value=3e-25, Identity=61%"; Hit description=JmjC domain containing protein, expressed
GHPAGNLKSCIKVALDFVXPENIGECVKLTGEFRRLPSSHKANEDKLEIKKMALHALNEVVNFLDPCTSEGLESGAGEASNVAKSVDEKPPPLKRQGGRQSGEVSQGDDPKSEEGGGKGSDEAAAVNNEPKRRSRKRGG

SEQ ID NO: 109009 - protein, 134 aa, Setaria italica
  Transcript Sequence Number=SeqID_43035
  Subcellular localization annotation: CTP_CleavageSite=25; ConfidenceScore=5.33e-01
PSGRVPTSLRTSGRAAEWLAPSGLRAPTRPPPSAAVALLTEAAARTHASFAVPLPAELQLGRTPTRAELPSASPARPQPHRIPVRPPATRVAELLPHLSAANLRAGARCALTSWWWSRSLQICHRGRRIRSVIP

SEQ ID NO: 109010 - protein, 155 aa, Setaria italica
  Transcript Sequence Number=SeqID_43036
  Gene Ontology: Mol. function=nucleoside-triphosphatase activity; Cellular component=cytoplasm; Biological process=Golgi organization and biogenesis
  Homolog annotation: Hit_ID=Q40495; Match level="QueryCoverage=99%, HitCoverage=20%, E-value=1e-60, Identity=74%"; Hit description=N -ethylmaleimide sensitive fusion protein
FCYVKVISAETMIGCSESSKCAQICKVFEDAYKSSLSIIILDDIERLLEYVAIGPRFSNLISQTLLVLLKRVPPKGKNLLVIGTTSEVGFLESIGMCDVFSVTYHVPKLKKEDAKKVLQHLNVFNEGDIDAAAEALDDMPLKKLYTLVEMAAQGR

SEQ ID NO: 109011 - protein, 101 aa, Setaria italica
  Transcript Sequence Number=SeqID_43037
  Subcellular localization annotation: CTP_CleavageSite=49; ConfidenceScore=5.20e-01
FYTRCMYHLQFNSSCQEPSRFVTFTVTDLLLISTTTMSHTRDVLSVSVICNNGPARSIENSSARHGKLWSGMPSSPTLSQIPSEEHWCSCNGIHLQVSTIS

SEQ ID NO: 109012 - protein, 100 aa, Setaria italica
  Transcript Sequence Number=SeqID_43038
  Gene Ontology: Mol. function=nucleic acid binding; Cellular component= intracellular; Biological process=response to DNA damage stimulus
  Homolog annotation: Hit_ID=B6T9I0; Match level="QueryCoverage=100%, HitCoverage=26%, E-value=5e-48, Identity=90%"; Hit description =Splicing factor 45
MVGPGEVDDELEDEVASECAKYGTVTRVLIFEITQADFPAEEAVRIFIQFERAEEATKALIDLQGRFFGGRLVQSSFFDEERFGRNELAPMPGEVPGFFD

SEQ ID NO: 109013 - protein, 113 aa, Setaria italica
  Transcript Sequence Number=SeqID_43039
GYMRHLPTSLICPKNPRMPCISERREYLCTISFRYFFYFFHQQNCSSKVGTCMWLHIFHQNYFAFSPYFSLFLSCPLPVAAILQSLGLVRYRVASCLGVVVGVGCHTSPALTL

SEQ ID NO: 109014 - protein, 63 aa, Setaria italica
  Transcript Sequence Number=SeqID_43040
HGEVRITALSWKRKKNKTSHALLSLALELFNFIAGVNLKLRKVEIHTEDLLFIRYLKFLVPQL

SEQ ID NO: 109015 - protein, 85 aa, Setaria italica
  Transcript Sequence Number=SeqID_43041
  Subcellular localization annotation: CTP_CleavageSite=37; ConfidenceScore=5.26e-01
GSAFAAALVLPSSVAVVVVDPGSRLARWLRQPSREARSGVGWGSIHQTVPPFVPPADRCDVLRGIHCLLKIAHRRRVVLQGGACE

SEQ ID NO: 109016 - protein, 78 aa, Setaria italica
  Transcript Sequence Number=SeqID_43042
  Homolog annotation: Hit_ID=B6UBV0; Match level="QueryCoverage=74%, HitCoverage=34%, E-value=2e-14, Identity=74%"; Hit description =Threonine endopeptidase
MALTARAALVRVLPPRPSPTSQLKQGLGGRGRASLAVRVKDSDDYGALLSEKPAAQAKRDGWEGFGRGVTSAAEEEKE

SEQ ID NO: 109017 - protein, 56 aa, Setaria italica
  Transcript Sequence Number=SeqID_43043
  Homolog annotation: Hit_ID=B6U240; Match level="QueryCoverage=80%, HitCoverage=9%, E-value=1e-15, Identity=91%"; Hit description=Cell division cycle protein 20
  Pfam annotation: Domain name=WD40; Domain location=3-41; Score=26.0; E_value=0.00015; Accession=PF00400.24; Description=WD domain, G-beta repeat
GSTSELVTVDEDSGPITSVSWAPDGRHIAVGLNSSDVQLWDTSSTPASRLFPRAPL

SEQ ID NO: 109018 - protein, 92 aa, Setaria italica
  Transcript Sequence Number=SeqID_43044
KERLCLDLQLMPHQTSSLDVASKGENILHRTALMTGIQITNDRRSSKIVGLCIVISEARPQRVLSEVKGSAILHFNLRLYMWRLCCSVPVML

SEQ ID NO: 109019 - protein, 470 aa, Setaria italica
  Transcript Sequence Number=SeqID_43045
  Gene Ontology: Mol. function=protein binding; Cellular component =phagocytic vesicle; Biological process=ubiquitin-dependent protein catabolic process
  Homolog annotation: Hit_ID=B6U240; Match level="QueryCoverage=100%, HitCoverage=100%, E-value=0.0, Identity=88%"; Hit description=Cell division cycle protein 20
  Pfam annotation: Domain name=WD40; Domain location=182-220; Score =26.0; E_value=0.00015; Accession=PF00400.24; Description=WD domain, G-beta repeat
  Pfam annotation: Domain name=WD40; Domain location=224-261; Score =11.8; E_value=1.6; Accession=PF00400.24; Description=WD domain, G -beta repeat
  Pfam annotation: Domain name=WD40; Domain location=266-304; Score =43.2; E_value=1e-09; Accession=PF00400.24; Description=WD domain, G -beta repeat
  Pfam annotation: Domain name=WD40; Domain location=317-358; Score =20.4; E_value=0.0075; Accession=PF00400.24; Description=WD domain, G- beta repeat
  Pfam annotation: Domain name=WD40; Domain location=405-443; Score =33.5; E_value=8.5e-07; Accession=PF00400.24; Description=WD domain, G-beta repeat
  Pfam module annotation: Pfam domain module=WD40::WD40::WD40::WD40::WD4 0; Domain location=182-220::224-261::266-304::317-358::405-443
  Subcellular localization annotation: CTP_CleavageSite=14; ConfidenceScore=5.16e-01
MDVGSRSISSVKSRAAAAPRPPLQEAGSRPYMPPLSSGSRNPSAKCYGDRFIPDRSAMDMDMAHYLLTEPKKDKENAAASPSKEAYRRLLAEKLLNNRTRILAFRNKPPEPENVTGADAASSHHAKPAKQRRHIPQSAERTLDAPELVDDYYLNLLDWGSNNVLSIALGDTVYLWDASSGSTSELVTVDEDSGPITSVSWAPDGRHIAVGLNSSDVQLWDTSSNRLLRTLRGMHEARVGSLAWNNSILTTGSMDGKIVNNDVRIRNHVVQTYEGHSQEVCGLKWSGSGQQLASGGNDNLLHIWDVSMASSMPSAGRNQWLHRLDDHMAAVKALAWCPFQSNLLATGGGGSDRCIKFWNTHTGACLNSVDTGSQVCALLWNKNERELLSSHGFTHNQLTLWKYPSMVKMAELTGHTSRVLFMAQSPDGCTVASAAADETLRFWNVFGAPEAPKPAAKASHTGMFNSFNHIR

SEQ ID NO: 109020 - protein, 40 aa, Setaria italica
  Transcript Sequence Number=SeqID_43046
  Gene Ontology: Mol. function=transferase activity, transferring glycosyl groups; Cellular component=integral to membrane
  Homolog annotation: Hit_ID=Q67VS7; Match level="QueryCoverage=97%, HitCoverage=7%, E-value=7e-11, Identity=69%"; Hit description =Probable mannan synthase 9
FCGCYDVTVGNNHYYIFLFLQSIAFFIVGLGYVGTFVPHS

SEQ ID NO: 109021 - protein, 59 aa, Setaria italica
  Transcript Sequence Number=SeqID_43047
RASTSTPFNSLYILGTQNNNYYSCQFLLSDMIFPLITFMVITGTCCIDPNLIDIVFVCS

SEQ ID NO: 109022 - protein, 65 aa, Setaria italica
  Transcript Sequence Number=SeqID_43048
  Subcellular localization annotation: CTP_CleavageSite=25; ConfidenceScore=5.25e-01
LWLNLSRHNPFSVTLFNCLSKWVPKSSIYKNGQSRWPVMLTNYCRQANREIFSSNVCDQSHHMEN

SEQ ID NO: 109023 - protein, 239 aa, Setaria italica
  misc_feature (127)..(127): Xaa can be any naturally occurring amino acid
  Transcript Sequence Number=SeqID_43049
LVWLQDIRLENSDISEDVICENIFSRLPFKLVTCLKTVSGHSCTKIINSAMFAAKQARLCPSCPALIQISSHVDSDGRYNYYLNLISSTPAIVGVPSSRLNFLGCRMNKYDGFSLLASTKLVLSYYXTPEDIRPRVHTILIANPATQQAQPIPGAEHHLIRGRAVGLVFDPPNEQASANKHKIKIDPPIELSSAKDNKFKIVQAFPFKNTNNTSVEFRFVTFSSDTGRWVMSSTYSLIG

SEQ ID NO: 109024 - protein, 70 aa, Setaria italica
  Transcript Sequence Number=SeqID_43050
HCMLDSPTSRLIIAMRVVFFFLPFFYENTRGKCVCNFKESAIVGIYPRPQPLEPCTQPLVHMAAYVLVSI

SEQ ID NO: 109025 - protein, 181 aa, Setaria italica
  Transcript Sequence Number=SeqID_43051
  Gene Ontology: Mol. function=protein serine/threonine kinase activity; Biological process=protein amino acid phosphorylation
  Homolog annotation: Hit_ID=Q5F1Y3; Match level="QueryCoverage=99%, HitCoverage=23%, E-value=2e-57, Identity=61%"; Hit description =Putative wall-associated kinase 4
TRGTFGYLDPEYYYTGLLTEKSDVYSFGVILVELLTRKKPIFLNCLGEKQNLHHYFLQALRDKTTMDVVDSQVVLEASQGEIDEIALVAEMCLRTKGETRPKMKEVELRLQLLKANISKTCKKGSKRGRETKQSLSSEYRSTSLTMTKGAEIGLVANPSSQAVSRCYTMEQEMIHSAEFPR

SEQ ID NO: 109026 - protein, 70 aa, Setaria italica
  Transcript Sequence Number=SeqID_43052
  Gene Ontology: Cellular component=integral to membrane
  Homolog annotation: Hit_ID=Q5JLY8; Match level="QueryCoverage=100%, HitCoverage=9%, E-value=2e-31, Identity=92%"; Hit description=Golgin- 84
MQAELQKMRVEMAGMRRDAEHYSRQEHVELEKRYRELTDLLYHKQTQLESMATEKAALEFQLEKSLKQFH

SEQ ID NO: 109027 - protein, 221 aa, Setaria italica
  Transcript Sequence Number=SeqID_43053
  Gene Ontology: Cellular component=integral to membrane
  Homolog annotation: Hit_ID=Q5JLY8; Match level="QueryCoverage=100%, HitCoverage=30%, E-value=1e-95, Identity=80%"; Hit description =Golgin-84
QKKPSEEANQVLQMQAWQEEVERARILQRKCEAKISSLEAELQKMRVEMAGMRRDAEHYSRQEHVELEKRYRELTDLLYHKQTQLESMASEKAALEFQLEKSLKQFHEVQIEAERSKSTRRSASSWEEDSDIKALEPLPLHHRHMATANQQLQKAAKLLDTGAVRATRFLWRHPVARVSLLFYLVFVHLFLMHLLHRLQDFASREGTSGMGDLALANGNLP

SEQ ID NO: 109028 - protein, 444 aa, Setaria italica
  Transcript Sequence Number=SeqID_43054
  Gene Ontology: Mol. function=nucleic acid binding; Cellular component= intracellular; Biological process=transport
  Homolog annotation: Hit_ID=B6T5S5; Match level="QueryCoverage=100%, HitCoverage=100%, E-value=1e-157, Identity=66%"; Hit description=RNA binding protein
  Pfam annotation: Domain name=NTF2; Domain location=10-126; Score =119.0; E_value=1.5e-32; Accession=PF02136.12; Description=Nuclear transport factor 2 (NTF2) domain
  Pfam annotation: Domain name=RRM_1; Domain location=310-379; Score =36.9; E_value=7.9e-08; Accession=PF00076.14; Description=RNA recognition motif. (a.k.a. RRM, RBD, o
  Pfam module annotation: Pfam domain module=NTF2::RRM_1; Domain location=10-126::310-379
MASAAAATQVGTYFIRNYYNLLQQNPDVVHQFYSDASTMVRVDDLTGANTTVNTMMDIHSLIMSLNFTQIEIKTANFVSSWDDGVLVMVSGLVQTKEFSHQRKFIQTFFLAPQEKGYFILNDYFHFVDQEQVQPAPLISQDDYESNLASNTVVETVPEYIHEEETQTTQITSEGRDVVDSYAYSEAPQQVVSSDNWGDEPLPEEPPSSFSNEIAVAPEEPVQPPPVPTPHVEEPVGEPVKKTYASILKTAKAPPAFPVAQQVPVSKPSHPATESNQAQHLVMASSMVADKPRSDVYGEVAAHDDEESKSVYVGNVPSSVSEADLENEFKKFGRLIPDGVAIRSRKETGGYYAFVEFEELSGVHNALKASPIEINGRQIYVEERKPNSGIRGGRRGGRGRFGGGGRGYARGGGDEYNGGNRGRSNGYGRVPHQERGILGSHAQRN

SEQ ID NO: 109029 - protein, 55 aa, Setaria italica
  Transcript Sequence Number=SeqID_43055
  Gene Ontology: Mol. function=protein serine/threonine kinase activity; Biological process=protein amino acid phosphorylation
  Homolog annotation: Hit_ID=Q25AF1; Match level="QueryCoverage=70%, HitCoverage=2%, E-value=5e-12, Identity=82%"; Hit description =H0525G02.12 protein
MFHCRVLRNCRISDNLASVNFSQFATLTLLDLSFNNITGQVPQALPNLNLLNFLF

SEQ ID NO: 109030 - protein, 68 aa, Setaria italica
  Transcript Sequence Number=SeqID_43056
MRRPGPSCSCRHGSAALPTLLLLLLLLAASAQAQQARTRTDPVEAAAVNAVFAKLGQTASSAWNISGD

SEQ ID NO: 109031 - protein, 101 aa, Setaria italica
  Transcript Sequence Number=SeqID_43057
  Gene Ontology: Mol. function=protein serine/threonine kinase activity; Biological process=protein amino acid phosphorylation
  Homolog annotation: Hit_ID=Q7XTP2; Match level="QueryCoverage=100%, HitCoverage=10%, E-value=1e-17, Identity=48%"; Hit description =OSJNBa0093O08.5 protein
  Pfam annotation: Domain name=LRR_1; Domain location=23-45; Score =13.3; E_value=0.85; Accession=PF00560.25; Description=Leucine Rich Repeat
  Pfam annotation: Domain name=LRR_1; Domain location=47-69; Score =11.5; E_value=1.9; Accession=PF00560.25; Description=Leucine Rich Repeat
  Pfam annotation: Domain name=LRR_1; Domain location=71-93; Score=5.2; E_value=31; Accession=PF00560.25; Description=Leucine Rich Repeat
  Pfam module annotation: Pfam domain module=LRR_1::LRR_1::LRR_1; Domain location=23-45::47-69::71-93
  Subcellular localization annotation: CTP_CleavageSite=11; ConfidenceScore=5.05e-01
QYLSLGINSLSGSVPKELGNLTNLVSLSFSSNNLNGSLPLELGNLVKLEQLYIDSAGLSGSLPSSLSSLTRMKILWASDNDFTGQIPDYIGNWANLTDLRF

SEQ ID NO: 109032 - protein, 139 aa, Setaria italica
  misc_feature (62)..(62): Xaa can be any naturally occurring amino acid
  Transcript Sequence Number=SeqID_43058
  Gene Ontology: Mol. function=protein serine/threonine kinase activity; Biological process=protein amino acid phosphorylation
  Homolog annotation: Hit_ID=Q7XTP5; Match level="QueryCoverage=99%, HitCoverage=10%, E-value=3e-48, Identity=69%"; Hit description =OSJNBa0093O08.2 protein
  Pfam annotation: Domain name=Pkinase; Domain location=1-138; Score= -109.4; E_value=0.056; Accession=PF00069.17; Description=Protein kinase domain
  Pfam annotation: Domain name=Pkinase_Tyr; Domain location=1-138; Score=-123.9; E_value=1.7e-05; Accession=PF07714.9; Description =Protein tyrosine kinase
  Pfam module annotation: Pfam domain module=Pkinase::Pkinase_Tyr; Domain location=1-138::1-138
IISQVQHRNLVKLYGCCLEGENPLLVYEYLENGSLDKALFGTGSFNLMQLYITPALQEFIVXLKHSFAGSGRKNLDWLTRFGICLGIARGLAYLHEESSIRVVHRDIKASNILLDTNFNPKISDFGLAKLYDDKKTHVS

SEQ ID NO: 109033 - protein, 143 aa, Setaria italica
  Transcript Sequence Number=SeqID_43059
  Gene Ontology: Mol. function=protein serine/threonine kinase activity; Biological process=protein amino acid phosphorylation
  Homolog annotation: Hit_ID=Q7XTP6; Match level="QueryCoverage=98%, HitCoverage=13%, E-value=8e-30, Identity=51%"; Hit description =OSJNBa0093O08.1 protein
  Pfam annotation: Domain name=LRR_1; Domain location=34-56; Score =16.3; E_value=0.13; Accession=PF00560.25; Description=Leucine Rich Repeat
  Pfam annotation: Domain name=LRR_1; Domain location=58-77; Score=4.1; E_value=50; Accession=PF00560.25; Description=Leucine Rich Repeat
  Pfam annotation: Domain name=LRR_1; Domain location=80-103; Score =14.1; E_value=0.57; Accession=PF00560.25; Description=Leucine Rich Repeat
  Pfam annotation: Domain name=LRR_1; Domain location=9-32; Score=11.0; E_value=2.4; Accession=PF00560.25; Description=Leucine Rich Repeat
  Pfam module annotation: Pfam domain module=LRR_1::LRR_1::LRR_1::LRR _1; Domain location=34-56::58-77::80-103::9-32
LATLSNLVELTSLVLRNCRISDNLASVNFSQFATLTLLDLSFNNITGQVPQALPNLNLLNFLFLGNNSLSGSLPSSIGTSLKNLDFSYNQLSGNFPSWVSPNLKLNLVANNFVINNSNNSALPSGLGCLQRDTPCFLGSPHVH

SEQ ID NO: 109034 - protein, 154 aa, Setaria italica
  misc_feature (26)..(26): Xaa can be any naturally occurring amino acid
  Transcript Sequence Number=SeqID_43060
  Gene Ontology: Mol. function=metalloendopeptidase activity; Cellular component=mitochondrial respiratory chain; Biological process =proteolysis
  Homolog annotation: Hit_ID=B9RQC8; Match level="QueryCoverage=89%, HitCoverage=27%, E-value=1e-52, Identity=73%"; Hit description =Mitochondrial processing peptidase alpha subunit, putative
SWSRYGDTIENAFSAFNSVYNNSGLXFGIYAVTSPDFSSKAVDLAAGELLEIATPGKVSQEQLDRAKEATKSAVLMNLESRSIASEDIGRQVLTYGERKPIEYFLKTVEEITLNDISSTAKKIMSSPLTMASWGDVIHVPSFESVQDRKVLLTY

SEQ ID NO: 109035 - protein, 116 aa, Setaria italica
  Transcript Sequence Number=SeqID_43061
  Gene Ontology: Mol. function=protein serine/threonine kinase activity; Biological process=protein amino acid phosphorylation
  Homolog annotation: Hit_ID=Q7XTP2; Match level="QueryCoverage=97%, HitCoverage=11%, E-value=1e-26, Identity=54%"; Hit description =OSJNBa0093O08.5 protein
  Pfam annotation: Domain name=LRR_1; Domain location=24-46; Score=8.6; E_value=7; Accession=PF00560.25; Description=Leucine Rich Repeat
  Pfam annotation: Domain name=LRR_1; Domain location=48-70; Score =14.5; E_value=0.44; Accession=PF00560.25; Description=Leucine Rich Repeat
  Pfam annotation: Domain name=LRR_1; Domain location=72-94; Score =10.7; E_value=2.8; Accession=PF00560.25; Description=Leucine Rich Repeat
  Pfam annotation: Domain name=LRR_1; Domain location=96-115; Score =2.3; E_value=1.1e+02; Accession=PF00560.25; Description=Leucine Rich Repeat
  Pfam module annotation: Pfam domain module=LRR_1::LRR_1::LRR_1::LRR _1; Domain location=24-46::48-70::72-94::96-115
CCFRNLGQNYLTGPLPSFLGKLTAMQYMDLGINSLSGSVPKELGNLTNLVWLSFSSNNLNGSLPLELGNLVKLEQLYIDSAGLSGPLPSSLSSLTRMKTLWASDNDFTGQIPDYIG

SEQ ID NO: 109036 - protein, 37 aa, Setaria italica
  Transcript Sequence Number=SeqID_43062
FRFAFGVVVLETLAGRPNFDNTLDEDKVYILEWVSSL

SEQ ID NO: 109037 - protein, 180 aa, Setaria italica
  Transcript Sequence Number=SeqID_43063
  Gene Ontology: Mol. function=protein serine/threonine kinase activity; Biological process=protein amino acid phosphorylation
  Homolog annotation: Hit_ID=Q7XTP6; Match level="QueryCoverage=78%, HitCoverage=14%, E-value=6e-46, Identity=65%"; Hit description =OSJNBa0093O08.1 protein
  Pfam annotation: Domain name=LRR_1; Domain location=104-126; Score =0.7; E_value=2.3e+02; Accession=PF00560.25; Description=Leucine Rich Repeat
  Pfam annotation: Domain name=LRR_1; Domain location=128-150; Score =13.4; E_value=0.82; Accession=PF00560.25; Description=Leucine Rich Repeat
  Pfam annotation: Domain name=LRR_1; Domain location=152-174; Score =12.0; E_value=1.5; Accession=PF00560.25; Description=Leucine Rich Repeat
  Pfam module annotation: Pfam domain module=LRR_1::LRR_1::LRR_1; Domain location=104-126::128-150::152-174
MRRPGPSCSCRHGSAALPTLLLLLLLLLAASAQAQQARTRTDPVEAAAVNAVFAKLGQTASSAWNISGDPCTGAATDGTNIDTDPTFNPAIKCECSGQNNTVCHVTKLKIYALNAVGAIPAELQNLTRLTNLNLAQNYLTGPLPSFLGKLTAMQYLDLGINSLSGSVPKELGNLTNLVWL

SEQ ID NO: 109038 - protein, 529 aa, Setaria italica
  misc_feature (377)..(377): Xaa can be any naturally occurring amino acid
  Transcript Sequence Number=SeqID_43064
  Gene Ontology: Mol. function=protein serine/threonine kinase activity; Biological process=protein amino acid phosphorylation
  Homolog annotation: Hit_ID=Q00RQ9; Match level="QueryCoverage=99%, HitCoverage=55%, E-value=0.0, Identity=73%"; Hit description =H0525G02.11 protein
  Pfam annotation: Domain name=Pkinase; Domain location=217-486; Score =172.7; E_value=1e-48; Accession=PF00069.17; Description=Protein kinase domain
  Pfam annotation: Domain name=Pkinase_Tyr; Domain location=217-486; Score=134.8; E_value=2.8e-37; Accession=PF07714.9; Description =Protein tyrosine kinase
  Pfam annotation: Domain name=SKG6; Domain location=147-184; Score =24.3; E_value=0.00048; Accession=PF08693.2; Description =Transmembrane alpha-helix domain
  Pfam module annotation: Pfam domain module=Pkinase::Pkinase _Tyr::SKG6; Domain location=217-486::217-486::147-184
IYSSRQFQNTLDSELFQTARMSPSSLRYYGIGLENGNYTVTLQFAEFDFEDMQTWKSLGKRVFDIYVQGERKEQNFDIRKAAGGKSYTAVTRKYTVPVTRNFLEIHLFWAGKGTCCIPSQGYYGPSISALSATPNFKPTVRNAAHAAQTKRTSNTGVAVGVGVGAAVLGLLVLSGLYVLRQKSRKLSLDKRELYSFVGRPNVFSYSYGELRTASENFNSTNLLGEGGYGAVYKGKLTDGSMVAVKQLSETSRQGKKQFIAEIETISQVQHRNLVKLYGCCLEGENPLLVYEYLENGSLDKALFGSGRKNLDWLTRFGICLGIARGLAYLHEESSIRVVHRDIKASNILLDTNFNPKISDFGLAKLYDDKKTHVSTKXVAGTFGYLAPEYAMRGHVTEKVDVFAFGVVILETIAGRPNYDDRLDEDSAYLLEWVWQLYEEGRPLDVVDPSLMEFVSDEVLRAIRVGLLCIQSSPRQRPSMSKVVSMLTEDIEVPEAVTKPSYVTEWQASSSKREVGMSASSYLSSIEEGR

SEQ ID NO: 109039 - protein, 253 aa, Setaria italica
  Transcript Sequence Number=SeqID_43065
  Gene Ontology: Mol. function=protein serine/threonine kinase activity; Biological process=protein amino acid phosphorylation
  Homolog annotation: Hit_ID=Q7XTP6; Match level="QueryCoverage=86%, HitCoverage=21%, E-value=1e-96, Identity=77%"; Hit description =OSJNBa0093O08.1 protein
LGLGCLQRDTPCFLGSSESSSVVVDCGSSRFISGSNNGSDNSIYQPDYTDLGPASYYVTGAPTWGVSNVGRFMDSQNGSYIIYSSRQFQNTLDSELFQTARMSPSSLRYYGIGLENGNYTVTLQFAEFDFEDMQTWKSLGKRVFDIYVQGERKEQNFDIRKAAGGKSYTAVTRKYTVPVTRNFLEIHLFWAGKGTCCIPSQGYYGPSISALSATPSTPVVYKPTFLYCLDNFRGVNLVPIRRMLMTEPTLLHV

SEQ ID NO: 109040 - protein, 808 aa, Setaria italica
  Transcript Sequence Number=SeqID_43066
  Gene Ontology: Mol. function=protein serine/threonine kinase activity; Biological process=protein amino acid phosphorylation
  Homolog annotation: Hit_ID=Q7XTP6; Match level="QueryCoverage=96%, HitCoverage=78%, E-value=0.0, Identity=70%"; Hit description =OSJNBa0093O08.1 protein
  Pfam annotation: Domain name=LRR_1; Domain location=119-141; Score =14.1; E_value=0.6; Accession=PF00560.25; Description=Leucine Rich Repeat
  Pfam annotation: Domain name=LRR_1; Domain location=143-162; Score =9.2; E_value=5.4; Accession=PF00560.25; Description=Leucine Rich Repeat
  Pfam annotation: Domain name=LRR_1; Domain location=165-188; Score =14.1; E_value=0.57; Accession=PF00560.25; Description=Leucine Rich Repeat
  Pfam annotation: Domain name=LRR_1; Domain location=46-68; Score =11.8; E_value=1.7; Accession=PF00560.25; Description=Leucine Rich Repeat
  Pfam annotation: Domain name=LRR_1; Domain location=94-117; Score =10.4; E_value=3.1; Accession=PF00560.25; Description=Leucine Rich Repeat
  Pfam annotation: Domain name=Pkinase; Domain location=494-762; Score =155.9; E_value=1.2e-43; Accession=PF00069.17; Description=Protein kinase domain
  Pfam annotation: Domain name=Pkinase_Tyr; Domain location=494-762; Score=132.7; E_value=1.1e-36; Accession=PF07714.9; Description =Protein tyrosine kinase
  Pfam module annotation: Pfam domain module=LRR_1::LRR_1::LRR_1::LRR _1::LRR_1::Pkinase::Pkinase_Tyr; Domain location=119-141::143 -162::165-188::46-68::94-117::494-762::494-762
MHIRDVLLTVLFHATQSYLLLFFVFRWASDNDFTGQIPDYIGNWANLTDLRFQGNSFQGPLPTTLSNLVELTNLRIGDIVNGSSSLAFISNMTSLNTLVLRNCRISDNLASVNFSQFATLTLLDLSFNNITGLVPQALLNLNSLSFLFLGNNSLSGSLPSSIGTSLKNLDFSYNQLSGNFPSWVSPNLKLNLVANNFVINNSNNSALPSGLGCLQRDTPCFLGSPQSSSFAVDCGSRRSMSGSDNSMYQPDSADLGPASYYVTGAPTWGVSNVGRFMDATNNSYIIYSSLQYQNTLDSELFQTARMSPSSLRYYGIGLENGNYTVTLQFAEFDFEDMQTWKSLGKRVFDIYIQGERKEQNFDIRKEAGGRSYTAVKKHYIVPVTRNFLEIHLFWAGKGTCCIPSQGYYGPAISALSATPAPNAARKRSKNKTGAIVGAAVGAVVVGLIVLTGLYVRRQKSRKLSLEQQDLYNTVGRPNLFTYSYGELKTASENFNSSNFLGEGGYGSVYKGKLSDGSVVAVKQLSETSRQGKKQFITEIETISQVQHRNLVKLYGCCLEGNNPLLVYEYLDNGSLDKALFGNGRLNLDWPTRFEICLGIARGLAYLHEESSIRVVHRDIKASNVLLDANLNSKISDFGLAKLYDDKNTHISTKVAGTFGYLAPEYAMRGHLSEKVDVFAFGVVILETIAGRPNYDGRLGEDKAYLLEWVWQLYEDDHPLDVTDPRLTEFNSEEVLRAIRVGLLCIQSSPRQRPPMSRVVSMLVGDIEVPEAVTKPSYVIEWQSNTMGTSSSEPGAKAMSLSSVIDEGR

SEQ ID NO: 109041 - protein, 83 aa, Setaria italica
  Transcript Sequence Number=SeqID_43067
TMHITIHIIIWLQEEHQIWPIGHPISDHPQLFNISLEAISISLHSTNKRSRPNVGLPQSTRSPPDHTSCSRCRSALVKSKYCN

SEQ ID NO: 109042 - protein, 93 aa, Setaria italica
  Transcript Sequence Number=SeqID_43068
  Gene Ontology: Mol. function=metal ion binding
  Homolog annotation: Hit_ID=B6T3T2; Match level="QueryCoverage=100%, HitCoverage=29%, E-value=6e-38, Identity=92%"; Hit description=DHHC zinc finger domain containing protein
  Subcellular localization annotation: CTP_CleavageSite=38; ConfidenceScore=5.06e-01
MSRLATGLHRLRRSSSSPWEVLWSALASCGLVIFSQLAVAMVPRLFPSLSLLAMLPIAGLVFLAAIVLGRLWRRFIGVAASAPLFVLFNILLL

SEQ ID NO: 109043 - protein, 99 aa, Setaria italica
  Transcript Sequence Number=SeqID_43069
FVLSFSPVPIELLSFAQMTMKRYKIEGLREAGYSKNEEMAKRNPALAAMNQKFRMINVLSSLASPAAWPSTPDTSPASSTRDCLTEGFAMPDLRTLNLA

SEQ ID NO: 109044 - protein, 58 aa, Setaria italica
  Transcript Sequence Number=SeqID_43070
MTMKRYKIEGPREAGYSKNGEMAKRNPALAAMNQKFRMIHVLSSLASPVSFGSLTIHS

SEQ ID NO: 109045 - protein, 163 aa, Setaria italica
  misc_feature (18)..(18): Xaa can be any naturally occurring amino acid
  misc_feature (71)..(71): Xaa can be any naturally occurring amino acid
  Transcript Sequence Number=SeqID_43071
  Gene Ontology: Mol. function=translation initiation factor activity; Biological process=translation
  Homolog annotation: Hit_ID=Q70Z43; Match level="QueryCoverage=60%, HitCoverage=9%, E-value=9e-39, Identity=86%"; Hit description =Translation initiation factor 3
MYYLNLEEHERIRREIEXEKNKAEARKLLEDLTKKGGKKHVVVEGELTKEAIMELALNEQLKERQEMEEKXLRSLTKTMDYLERAKRQEEAPLIEQAFQKRLEEEKILHEQEQLREIELSKQHHAGDLQEKNRLSRMLEHKNCFPGKNSFLTSVVVLVSFGSF

SEQ ID NO: 109046 - protein, 295 aa, Setaria italica
  misc_feature (58)..(58): Xaa can be any naturally occurring amino acid
  misc_feature (64)..(64): Xaa can be any naturally occurring amino acid
  Transcript Sequence Number=SeqID_43072
  Gene Ontology: Mol. function=translation initiation factor activity; Cellular component=centrosome; Biological process=translation
  Homolog annotation: Hit_ID=Q9XHR2; Match level="QueryCoverage=91%, HitCoverage=27%, E-value=1e-119, Identity=79%"; Hit description =Eukaryotic translation initiation factor 3 subunit A
  Pfam annotation: Domain name=PCI; Domain location=130-268; Score =26.0; E_value=0.00016; Accession=PF01399.19; Description=PCI domain
IRNKERLYRSVEDIHGLMSMVKKMPKPSVLVVYYAKLTEIFWISDSHLYHAYAWLKLXFNLQKXYNKNLSQKDLQLIASSVLLAALSVAPYDQKYGASHLETENEKERYMRMANLVNFSLDSKRENRELPSRASLLSELVSKGVLSCASQEVRDLYNLLEHEFLPLDLASKVQPLLSKISKIGGKLSSASSVPEVKLSQYISALEKLTTLRVLQQASQIFQSMKIDMLSRMIPFFDFAVVEKISVDAAKRNFVAIKVNHLSGAVHFGTVDIESDGLSRNNLQVVFRTRIYFKIKS

SEQ ID NO: 109047 - protein, 132 aa, Setaria italica
  Transcript Sequence Number=SeqID_43073
  Gene Ontology: Mol. function=structural constituent of ribosome; Cellular component=intracellular; Biological process=metabolic process
  Homolog annotation: Hit_ID=Q8SB40; Match level="QueryCoverage=78%, HitCoverage=12%, E-value=3e-37, Identity=66%"; Hit description =Putative ribosomal protein
  Pfam annotation: Domain name=Plant_tran; Domain location=67-125; Score=2.9; E_value=1e-07; Accession=PF04827.6; Description=Plant transposon protein
TLGFPGMIGSIGCMHCAWKNCPKDWATMFTRGDKKNPTMILEAVSMHFCTASAYNDINVLNKSSLFIDAIKGEATRLQFVVNGNQYDMGYYLADGIYPEWAAFVKSREIEEKNKAEARKLLEDLTKKGGKKT

SEQ ID NO: 109048 - protein, 108 aa, Setaria italica
  Transcript Sequence Number=SeqID_43074
  Gene Ontology: Mol. function=translation initiation factor activity; Biological process=translation
  Homolog annotation: Hit_ID=Q70Z43; Match level="QueryCoverage=45%, HitCoverage=4%, E-value=7e-16, Identity=85%"; Hit description =Translation initiation factor 3
FCFVLQNAFQERIVQRRETEFGRLKKERDERINQLISSRKRERETVRKLMYYLNLEEQRIERLREEEEARKREEEEKRKREEAERKAKLDAIAEKQRQRERELEERKG

SEQ ID NO: 109049 - protein, 993 aa, Setaria italica
  Transcript Sequence Number=SeqID_43075
  Gene Ontology: Mol. function=translation initiation factor activity; Cellular component=centrosome; Biological process=translation
  Homolog annotation: Hit_ID=Q9XHR2; Match level="QueryCoverage=80%, HitCoverage=82%, E-value=0.0, Identity=80%"; Hit description =Eukaryotic translation initiation factor 3 subunit A
  Pfam annotation: Domain name=PCI; Domain location=372-510; Score =26.0; E_value=0.00016; Accession=PF01399.19; Description=PCI domain
MATFAKPENALKRAEELIHVGQKQAALQALHDLITSKRYRSWQKPLEKIMMKYVELCVDLRKGRFAKDGLIQYRIVCQQVNVSSLEDVIKHFMQLSNERAEQAKSQAEALEDALDVEDLEADKRPEDLMLSFVSGEKGKDRSDKEVVTPWFKFLWETYRTVLEILRNNSKLEALYAMTAHRAFQFCKQYKRTTEFRRLCEIIRNHLANLNKYRDQRDRPDLTAPESLQLYLDTRVEQLKVATELSLWQEAFRSVEDIHGLMSMVKKMPKPSVLVVYYAKLTEIFWISDSHLYHAYAWLKLFNLQKSYNKNLSQKDLQLIASSVLLAALSVAPYDQKYGASHLETENEKERYMRMANLVNFSLDSKRENRELPSRASLLSELVSKGVLSCASQEVRDLYNLLEHEFLPLDLASKVQPLLSKISKIGGKLSSASSVPEVKLSQYISALEKLTTLRVLQQASQIFQSMKIDMLSRMIPFFDFAVVEKISVDAAKRNFVAIKVNHLSGAVHFGTVDIESDGLSEHLSVLADSLNKARNQIRPPVKKPSKLGESLISLAGVVENEHRRLLARKSIIEKRKEDLERQILEKEKEEESKRLSIQKKSADEERNRLLYEQKQREHERIRREIEEKNKAEARKLLEDLTKKGGKKHVVVEGELTKEAIMELALNEQLKERQEMEKKLQKLAKTMDYLERAKRQEEAPLIEQAFQKRLEEEKILHEQEQLREIELSKQHHAGDLQEKNRLSRMLEHKNAFQERIVQRRETEFGRLKKERDERINQLISSRKRERETVRKLMYYLNLEEQRIERLREEEEARKREEEEKRKREEAERKAKLDAIAEKQRQRERELEEKEKARKEQLLRGSEPARVAEAAPVAQPPREPAAAPAAAAAAAAAAAAAPAPGKYVPKFKLRGSDSSSSAGGSQRPADLRTREDDRWGPREERPRPDVRPVRQDGPPARQDAPPAARPDGPPSTERWRGSRFPSNSSSSSSTWGRPRN

SEQ ID NO: 109050 - protein, 76 aa, Setaria italica
  Transcript Sequence Number=SeqID_43076
PQLQNIYNMSTSYNQNVPLQLSVALSQFNYLYKCDFITPKLTSPHYLCSSVTTPFLLQINAELYFNSSQIVTADRY

SEQ ID NO: 109051 - protein, 72 aa, Setaria italica
  Transcript Sequence Number=SeqID_43077
  Gene Ontology: Mol. function=oxidoreductase activity; Cellular component=mitochondrial matrix; Biological process=oxidation reduction
  Homolog annotation: Hit_ID=Q8LST4; Match level="QueryCoverage=81%, HitCoverage=10%, E-value=9e-20, Identity=77%"; Hit description =Mitochondrial aldehyde dehydrogenase
YLRPACRSRSGSQRGARISLSPGKTFPTLDPRTGEVIARVAEGDSEDIDRAVAAARKAFDEGPWPRMTAYVR

SEQ ID NO: 109052 - protein, 96 aa, Setaria italica
  misc_feature (9)..(9): Xaa can be any naturally occurring amino acid
  misc_feature (72)..(72): Xaa can be any naturally occurring amino acid
  Transcript Sequence Number=SeqID_43078
  Subcellular localization annotation: CTP_CleavageSite=15; ConfidenceScore=5.15e-01
SSPPNPSPXPPTPPDANAPTPLPHSSPAPVSSPLPPTDSPDNDEEDDGLDPLFSETVGAGGWDPLGAPAEGXDGDEEELLGGGLIEELRRENSVKK

SEQ ID NO: 109053 - protein, 443 aa, Setaria italica
  Transcript Sequence Number=SeqID_43079
  Gene Ontology: Mol. function=oxidoreductase activity; Cellular component=extracellular region; Biological process=lignin catabolic process
  Homolog annotation: Hit_ID=Q339K6; Match level="QueryCoverage=95%, HitCoverage=68%, E-value=1e-140, Identity=59%"; Hit description =Laccase-15
  Pfam annotation: Domain name=Cu-oxidase; Domain location=2-138; Score= 104.4; E_value=3.9e-28; Accession=PF00394.14; Description=Multicopper oxidase
  Pfam annotation: Domain name=Cu-oxidase_2; Domain location=270-412; Score=163.7; E_value=5.5e-46; Accession=PF07731.6; Description =Multicopper oxidase
  Pfam module annotation: Pfam domain module=Cu-oxidase::Cu-oxidase_2; Domain location=2-138::270-412
MARNMTKGIFLSYASASTVNGLVGDLFNCSGVTKEGYVLDVEPGKTYLLRIINAGLFSEFYLKIAGHKFTVVAADANYVSPFTTDVIAIAAGETVDALLIANAAPGRYYMVALPNQAPLPATQTPEYATRGMVRYKVSHSTCTSSTTVSSCQGTEEEEKGYRGTSGDAPIVPKMPDIHDTITSFYFHGNLTSLHHQGQLPVQQQVDERLFIVLGLGTICKKGQFCKRGSSDEDLLVATMNNASFQHPTAIPTLLEAHYYHTGLINGTTQELPKRPPLLFNFTDEALIPFGPKEMRLEPTYKATLVRRFRHGAVVEIVFQSTAILQGDSNPMHLHGHDMIVLAQGLGNYDPAKAVATYNLVNPLVKNTVLVPNLGWIAIRFVANNPGAWFMHCHYEFHLSMGMAAVFIVEDGPTNDTSLPRLPVNFPTIGQDINLMPNDLYLKT

SEQ ID NO: 109054 - protein, 166 aa, Setaria italica
  Transcript Sequence Number=SeqID_43080
MAAITGKDKEEPLELKQGGSKVFSKLFTRESSAAAPSFRVYYGVASAGSVPFMWESQPGTPKNDAISTATLPPLTPPPSYYTARQQVTHHRHHKSSAGGGGKKHSKQYMSLFSAILPKIILHRRSSRSSSSGSPSASSCSSSSSAFSSAASSASSLSFRSAQSPAA

SEQ ID NO: 109055 - protein, 86 aa, Setaria italica
  Transcript Sequence Number=SeqID_43081
  Homolog annotation: Hit_ID=B6SVD2; Match level="QueryCoverage=55%, HitCoverage=10%, E-value=7e-09, Identity=64%"; Hit description =Mitochondrial chaperone BCS1
QRRGQDREREERGFTHHPHHAVPRKALAAAASAAASLMLVRSVANELLPDEVLDMLRSGVGRLRSRMSSQHTITIEKKVDGLTNNQ

SEQ ID NO: 109056 - protein, 64 aa, Setaria italica
  misc_feature (22)..(22): Xaa can be any naturally occurring amino acid
  Transcript Sequence Number=SeqID_43082
  Gene Ontology: Mol. function=ubiquitin-protein ligase activity; Cellular component=ubiquitin ligase complex; Biological process =ubiquitin-dependent protein catabolic process
  Homolog annotation: Hit_ID=B9RJ04; Match level="QueryCoverage=93%, HitCoverage=14%, E-value=4e-12, Identity=58%"; Hit description =Ubiquitin-protein ligase, putative
GGRAASPEVLREMARVGAVGKXCCVLQADCDAAVKEAARAVLRLHSGVWSGSPCVSAYLLSRYL

SEQ ID NO: 109057 - protein, 50 aa, Setaria italica
  Transcript Sequence Number=SeqID_43083
SPPSLVILQVKQKNKKKKTVSLNDLPRFVHKKEIHLSVSPLLLVNTIHSS

SEQ ID NO: 109058 - protein, 91 aa, Setaria italica
  Transcript Sequence Number=SeqID_43084
VAFALAAYMVLAPVARSTAIAIFMISPLPVLYRNVEKIFKWGFLARARLVRMGPIPTILNFFAVVVIQMILMDLWPLIATFAWAAFARIHH

SEQ ID NO: 109059 - protein, 75 aa, Setaria italica
  Transcript Sequence Number=SeqID_43085
  Subcellular localization annotation: CTP_CleavageSite=33; ConfidenceScore=5.25e-01
LLNLVITFPKAFTFPKAIASVPRMFVSLSPSACCMDPEYYISISHRARFKLSSSFQSSYTFWSITSKHDSLFIKK

SEQ ID NO: 109060 - protein, 109 aa, Setaria italica
  misc_feature (6)..(6): Xaa can be any naturally occurring amino acid
  Transcript Sequence Number=SeqID_43086
  Gene Ontology: Mol. function=protein binding; Cellular component =intracellular
  Homolog annotation: Hit_ID=Q01GI2; Match level="QueryCoverage=76%, HitCoverage=8%, E-value=3e-09, Identity=36%"; Hit description=[S] KOG1972 Uncharacterized conserved protein
  Pfam annotation: Domain name=DUF1740; Domain location=1-75; Score= -85.3; E_value=0.084; Accession=PF08424.2; Description=Protein of unknown function (DUF1740)
GLVDIXVNLCRFEWQTGHRELATGLFQAQMEFSLFSPPLYLTTSSKQRLFEHFWNSGGARIGEDGALGWSAWLAKDEESRQNLAAQENSQETETGGWSGWFDTSVGCFG

SEQ ID NO: 109061 - protein, 398 aa, Setaria italica
  Transcript Sequence Number=SeqID_43087
  Homolog annotation: Hit_ID=Q67UH7; Match level="QueryCoverage=85%, HitCoverage=87%, E-value=2e-81, Identity=48%"; Hit description =Mitochondrial transcription termination factor-like
  Pfam annotation: Domain name=mTERF; Domain location=60-367; Score =20.3; E_value=2.2e-09; Accession=PF02536.6; Description=mTERF
  Subcellular localization annotation: CTP_CleavageSite=34; ConfidenceScore=5.61e-01
MPLLFHPAASPLAVVSLLPPPCRLRLRLRVTLTRAGAAATSTAATPAPSTAPASTFAVEDYLVASCHLTPPQALKASKNLAHLKSASNADAVLAFLAGLGLSSKEVAALVASNPRVLCARIDRSLAPISAELRALGLSPSQIARLAQIGGRYFLCRSFVSKVRFWLPLFGSPERLLQASDWNYWLLTSDLEKVVEPNVAFLKQCGLSAVDISKLLVAAPRLVTMHPEYVQDAVRRATQLGVAPGSQMFRHALSTAGCIGQEKVDAKVAVLKETLGWSQEEVNLAVSKAPRILVASEERLRRNAEFLLNEVGLPPQYIARRSVLLMYSLERRIVPRHLVLKALKDMGLVEQDRCFFNVVAPTKEKFLEKFVAPYEESIPGLADAYESACSGKVPEGFQL

SEQ ID NO: 109062 - protein, 334 aa, Setaria italica
  Transcript Sequence Number=SeqID_43088
  Homolog annotation: Hit_ID=Q5ZA32; Match level="QueryCoverage=100%, HitCoverage=24%, E-value=1e-135, Identity=73%"; Hit description=WD -40 repeat protein-like
  Pfam annotation: Domain name=WD40; Domain location=168-207; Score =27.0; E_value=7.8e-05; Accession=PF00400.24; Description=WD domain, G-beta repeat
  Pfam annotation: Domain name=WD40; Domain location=287-326; Score =35.0; E_value=2.9e-07; Accession=PF00400.24; Description=WD domain, G-beta repeat
  Pfam module annotation: Pfam domain module=WD40::WD40; Domain location=168-207::287-326
  Subcellular localization annotation: CTP_CleavageSite=47; ConfidenceScore=5.59e-01
RGPYLHYPQDPHAMPRPVVSFPMPNPNLNPTRTLTQRRRPGPNPGVRLMQLLGNSGPTQLETAVSMPPPTSEFAQPLPAMPSAPPARMLSSTSSKVPRGRLLGGGERAVHDIDSRLPGEAQPPQLEVTPITKYTSDPGLVLGRQIAVNRTYIVYGLKLGNIRVLNINTALRSLLRGHTQRVTDMAFFAEDVHRLASASVDGRIYVWRIDEGPDDENKPQITGKIEIAIQIVGEVEAYHPRICWHSHKQEILFVGIGNCVLRIDTTRVGRGRDFAVEEPVKCHLEKLIDGVRLVGKHDGDVTDLSISQWMSTRLASGSKDGMVKIWDDRKPNPLS

SEQ ID NO: 109063 - protein, 106 aa, Setaria italica
  Transcript Sequence Number=SeqID_43089
FPRWTNCSDTYSDGPWLGHLNTIAWILEYHDLDLAMVWFAYLNTMIWTLPMVWFAYLGPRKPTKHILDKILVPIIILSLNHQNHKLRTNGAMLATRCMVECLELGR

SEQ ID NO: 109064 - protein, 87 aa, Setaria italica
  Transcript Sequence Number=SeqID_43090
  Homolog annotation: Hit_ID=A5Z1R3; Match level="QueryCoverage=44%, HitCoverage=43%, E-value=4e-10, Identity=66%"; Hit description =Ethphon-induced protein
  Pfam annotation: Domain name=DUF581; Domain location=4-52; Score =45.6; E_value=1.9e-10; Accession=PF04570.6; Description=Protein of unknown function (DUF581)
PAGEPSAPALDACALCAQPLGRDSDIFMYRGDTPFCSEDCRHEQMQLDAVSARRAARSAGRRHQQYSSSGTDSPRRGQESRKVSVAS

SEQ ID NO: 109065 - protein, 103 aa, Setaria italica
  Transcript Sequence Number=SeqID_43091
  Homolog annotation: Hit_ID=A5Z1R3; Match level="QueryCoverage=39%, HitCoverage=46%, E-value=2e-09, Identity=63%"; Hit description =Ethphon-induced protein
  Pfam annotation: Domain name=DUF581; Domain location=16-68; Score =52.8; E_value=1.3e-12; Accession=PF04570.6; Description=Protein of unknown function (DUF581)
MAAAAHLACAFFFDAEPLGEPGRHALDACALCSKPLSRNSDIFMYKGDTPFCSEDCRDEQMQFDAIRARQAARSSAGRRQPYSSGTESRRGHQESRKVSAVAS

SEQ ID NO: 109066 - protein, 100 aa, Setaria italica
  Transcript Sequence Number=SeqID_43092
  Pfam annotation: Domain name=DUF581; Domain location=12-64; Score =58.0; E_value=3.7e-14; Accession=PF04570.6; Description=Protein of unknown function (DUF581)
MAASVAFFFDAEPLGEPGRHALDACALCSKPLTRNSDMFMYKGDTPFCSEECRYEQMHHDAAYARQAGSRRKQQQAQRGGGRHEGGASVPAKADVSVASY

SEQ ID NO: 109067 - protein, 245 aa, Setaria italica
  misc_feature (134)..(134): Xaa can be any naturally occurring amino acid
  misc_feature (138)..(138): Xaa can be any naturally occurring amino acid
  Transcript Sequence Number=SeqID_43093
  Gene Ontology: Mol. function=signal transducer activity; Cellular component=plasma membrane; Biological process=response to light stimulus
  Homolog annotation: Hit_ID=B9SND2; Match level="QueryCoverage=91%, HitCoverage=35%, E-value=9e-78, Identity=64%"; Hit description =Signal transducer, putative
  Pfam annotation: Domain name=NPH3; Domain location=143-245; Score= -81.6; E_value=3.9e-05; Accession=PF03000.6; Description=NPH3 family
EVDISDIPGGPAAFEICAKFCYGMIVTLNALVPTAARCAAEYLEMFETIDKGNLIYKIDVFLSASIFRTWKDSIIVLQSTKSLQQWTENLKVINHCVDSIASKASMDPSEVDWSYTYNRKKLPSESGLRFTHLXVRKXQTVPRDWWVEDLCDLEVCLYKKVILAIKAKGRTSSDVIGEALRAYACRRLFSSLDNAVNNGLDCTKHCAALETIISLLPTEKGSVSCGLLLKLLRASCLLGSGETYR

SEQ ID NO: 109068 - protein, 117 aa, Setaria italica
  Transcript Sequence Number=SeqID_43094
  Gene Ontology: Cellular component=nucleus; Biological process=cell division
  Homolog annotation: Hit_ID=Q2RAC5; Match level="QueryCoverage=100%, HitCoverage=23%, E-value=5e-53, Identity=83%"; Hit description =Cyclin-T1-3
EIYDKQKELISHGKRVVLVTLGFDLNIHHAYKPLVEAIRRFNVGGANALPQVAWNFVNDGLRTSLCLQFEPHHIAAGAIFLAAKFLKVKLPSDGDKIWWQDFDVTPRQLEEVSNQML

SEQ ID NO: 109069 - protein, 213 aa, Setaria italica
  misc_feature (16)..(16): Xaa can be any naturally occurring amino acid
  misc_feature (121)..(121): Xaa can be any naturally occurring amino acid
  Transcript Sequence Number=SeqID_43095
  Gene Ontology: Mol. function=protein binding; Cellular component =nucleus; Biological process=cell division
  Homolog annotation: Hit_ID=Q2QQS5; Match level="QueryCoverage=99%, HitCoverage=41%, E-value=2e-66, Identity=61%"; Hit description =Cyclin-T1-4
TVCMFLAGKVEETPRXLKDVIVVSYEIIHKKDPNAGQRIKQQKEIYDKQKELILLGERVVLVTLGFDLNIHHAYKPLVEAIRRFNVGGANALPQVAWNFVNDGLRTSLCLQFEPHHIAAGXFDVTPRQLEEVSNQMLELYEQNRTTQAQASQGSEAEGSSAGARNPHSSVKSEANSKEPSAHGYHQASKLPNSSLTGAPGHHDVGHSNSDKHI

SEQ ID NO: 109070 - protein, 599 aa, Setaria italica
  Transcript Sequence Number=SeqID_43096
  Gene Ontology: Cellular component=nucleus; Biological process=cell division
  Homolog annotation: Hit_ID=Q2QQS5; Match level="QueryCoverage=98%, HitCoverage=100%, E-value=1e-174, Identity=58%"; Hit description =Cyclin-T1-4
  Pfam annotation: Domain name=Cyclin_N; Domain location=34-178; Score =52.3; E_value=1.9e-12; Accession=PF00134.15; Description=Cyclin, N -terminal domain
MAMVPSDSSHHGVVDNSPNGFTQGRREEARKLGPSWYFSRKEIEENSPSRRDGIDLKRENSLRKSYCSFLQDLGMKLKVPQVSIATAMVFCHRFYLRQSHAKNDRRIIATVCMFLAGKVEETPRPLKDVIVVSYEIIHKKDPNAGQRIKQQKEIYDKQKELILLGERVVLVTLGFDLNIHHAYKPLVEAIRRFNVGGANALPQVAWNFVNDGLRTSLCLQFEPHHIAAGAIFLAAKFLKVKLPSDGDKIWWQDFDVTPRQLEEVSNQMLELYEQNRTTQAQASQGSEAEGSSAGARNPHSSVKSEANSKEPSAHGYHQASKLPNSSLTGAPGHHDVGHSNSDKHISGPKMLQNDNGNHGGSKDKSSKSGIKSDAGTDRSHRDKKSSPGQHHSKSSHEFRNPKEEHQPHRSHDNSNETRDGVLGGNEAPGVSSSRMDAMNKIDKDKVKAALEKRRKSKGGVATNVNVMDDDDLLERELEHGVELAVEDEKIKQDKRQNLSHGSMPPPDLQHVDLAMENGHNGEQSVATTADDGEFPRNSKEQHPQPFDKQSDGYEHKSQQDDHILKHDKGHDAQLAGRHEQNGRDDYKRPKLEGAQDNKV

SEQ ID NO: 109071 - protein, 145 aa, Setaria italica
  misc_feature (53)..(53): Xaa can be any naturally occurring amino acid
  misc_feature (80)..(80): Xaa can be any naturally occurring amino acid
  Transcript Sequence Number=SeqID_43097
  Gene Ontology: Mol. function=phosphatase activity
  Homolog annotation: Hit_ID=B6T776; Match level="QueryCoverage=97%, HitCoverage=45%, E-value=8e-43, Identity=70%"; Hit description=CTD small phosphatase-like protein
  Subcellular localization annotation: CTP_CleavageSite=31; ConfidenceScore=5.02e-01
RSCSRLLRGHPSCAQLLSFVGFRYPSSPGPAASEPSPEVAFMPLRSEIPADVXPAPRLHLTPLGRLTVVLDLDETLVSAXESSSLPVIVRTQAVEAGLHCFDMECISSDKDVDGKQKVNHVTVFERPGLHEFLQKTSEFADLILF

SEQ ID NO: 109072 - protein, 71 aa, Setaria italica
  Transcript Sequence Number=SeqID_43098
  Gene Ontology: Mol. function=phosphatase activity
  Homolog annotation: Hit_ID=B6T776; Match level="QueryCoverage=87%, HitCoverage=19%, E-value=7e-28, Identity=95%"; Hit description=CTD small phosphatase-like protein
YQWIVHDYREFREHVKDLSCVSKDFCRIVIVDNNPFSFILQPLNGIPCVPFSAGQHSDDQLMTVIFPLLKH

SEQ ID NO: 109073 - protein, 81 aa, Setaria italica
  Transcript Sequence Number=SeqID_43099
  Homolog annotation: Hit_ID=B9RUK2; Match level="QueryCoverage=85%, HitCoverage=10%, E-value=4e-15, Identity=53%"; Hit description =Pentatricopeptide repeat-containing protein, putative
EEGCVFSDRVHFQMISLLGAQKDFKALETLVGELSHDPSIDKRELYLVAAGIYERADKFDKASQIISQIRSSNGFDVRKFR

SEQ ID NO: 109074 - protein, 58 aa, Setaria italica
  Transcript Sequence Number=SeqID_43100
  Gene Ontology: Mol. function=phosphatase activity
  Homolog annotation: Hit_ID=B6T776; Match level="QueryCoverage=58%, HitCoverage=10%, E-value=3e-12, Identity=97%"; Hit description=CTD small phosphatase-like protein
IVIVDNNPFSFILQPLNGIPCVPFSAGQHSDDQVTDDEHQSSTVSDHQNVVQLFTPSL

SEQ ID NO: 109075 - protein, 356 aa, Setaria italica
  misc_feature (86)..(86): Xaa can be any naturally occurring amino acid
  misc_feature (94)..(94): Xaa can be any naturally occurring amino acid
  Transcript Sequence Number=SeqID_43101
  Gene Ontology: Mol. function=phosphatase activity; Cellular component= mitochondrial inner membrane presequence translocase complex; Biological process=intracellular protein transmembrane transport
  Homolog annotation: Hit_ID=B6T776; Match level="QueryCoverage=86%, HitCoverage=98%, E-value=1e-142, Identity=83%"; Hit description=CTD small phosphatase-like protein
  Pfam annotation: Domain name=NIF; Domain location=97-293; Score=85.0; E_value=2.6e-22; Accession=PF03031.10; Description=NLI interacting factor-like phosphatase
  Subcellular localization annotation: CTP_CleavageSite=23; ConfidenceScore=5.16e-01
MAAAEVYSPTAAAAAQQQQRGKVASQAWRTVVGWIGFLLQVLLQILRGTPSCAQLLSFVGFRYPLLSGPAASEPSPEVAFMPLRSXIPADVAPXAPAAPPEPLGRLTVVLDLDETLVSAYESSSLPVIVRTQAVEAGLHCFDMECISSDKDVDGKQKVNHVTVFERPGLHEFLQKTSEFADLILFTAGLEGYARPLVDRIDVHNRFRLRLYRPSTVTTEFREHVKDLSCVSKDFCRIVIVDNNPFSFILQPLNGIPCVPFSAGQHSDDQLMTVIFPLLKHLSLQKDVRPVLHERFHMPEWFQKHGIPKLIRQYAGSHKIKLPLVDAWVMAKLADQRLQRLEVLLSSKQADHLEVHP

SEQ ID NO: 109076 - protein, 181 aa, Setaria italica
  Transcript Sequence Number=SeqID_43102
  Gene Ontology: Mol. function=phosphatase activity; Cellular component= nucleus; Biological process=biological_process
  Homolog annotation: Hit_ID=B6T776; Match level="QueryCoverage=90%, HitCoverage=52%, E-value=2e-90, Identity=96%"; Hit description=CTD small phosphatase-like protein
  Pfam annotation: Domain name=NIF; Domain location=1-161; Score=52.9; E_value=9.9e-13; Accession=PF03031.10; Description=NLI interacting factor-like phosphatase
CIVCIGKTSKVVILLLYKDVDGKQKVNHVTVFERPGLHEFLQKTSEFADLILFTAGLEGYARPLVDRIDVHNRFRLRLYRPSTVTTEFREHVKDLSCVSKDFCRIVIVDNNPFSFILQPLNGIPCVPFSAGQHSDDQLMTVIFPLLKHLSLQKDVRPVLHERFHMPEWFQKHGIPQTNQAV

SEQ ID NO: 109077 - protein, 94 aa, Setaria italica
  Transcript Sequence Number=SeqID_43103
RRSAAIRRPPGSDIPGAITGERLACLASRGSIACAGQEDTAAAPLSEEESAGVVAEPRAVQGRRRLDRWDQRTGQPMGCESWARMDVVSNWRVV

SEQ ID NO: 109078 - protein, 67 aa, Setaria italica
  misc_feature (16)..(16): Xaa can be any naturally occurring amino acid
  Transcript Sequence Number=SeqID_43104
  Gene Ontology: Mol. function=structural constituent of ribosome; Cellular component=ribonucleoprotein complex; Biological process =translation
  Homolog annotation: Hit_ID=P12151; Match level="QueryCoverage=100%, HitCoverage=78%, E-value=3e-29, Identity=94%"; Hit description=30S ribosomal protein S16, chloroplastic
  Pfam annotation: Domain name=Ribosomal_S16; Domain location=1-46; Score=70.5; E_value=6.3e-18; Accession=PF00886.11; Description =Ribosomal protein S16
IVAIDVRSRREGRDLXKVGFYDPIKNQTCLNVPAILYFLETGAQPTRTVYDILRKAEFFKDKERTLS

SEQ ID NO: 109079 - protein, 146 aa, Setaria italica
  misc_feature (66)..(66): Xaa can be any naturally occurring amino acid
  Transcript Sequence Number=SeqID_43105
  Gene Ontology: Cellular component=exocyst; Biological process =exocytosis
  Homolog annotation: Hit_ID=Q5SML2; Match level="QueryCoverage=97%, HitCoverage=31%, E-value=7e-14, Identity=31%"; Hit description =Leucine zipper-containing protein-like
VLSKSEEFPNQSLGFLFLLNNSHFIQQSNCVLYLSKSYEVTLTRKLERYMESYIQVSWAPVLSCSXPRCFRRNYSPLPYKFQSEFLKTYNTQKLWKVPDPELRKTLPRAITEKIVSGYTEYIEDNKITTLNSLPDLEEMLQELFQG

SEQ ID NO: 109080 - protein, 53 aa, Setaria italica
  Transcript Sequence Number=SeqID_43106
QDRQAFLTGNNPLAKDLTLKELYNMQSRLAQEKARETSYRQRFQMPELQGLIQ

SEQ ID NO: 109081 - protein, 126 aa, Setaria italica
  misc_feature (110)..(110): Xaa can be any naturally occurring amino acid
  Transcript Sequence Number=SeqID_43107
  Homolog annotation: Hit_ID=B6SWQ7; Match level="QueryCoverage=69%, HitCoverage=16%, E-value=1e-13, Identity=48%"; Hit description=Smr domain containing protein
EGKVTKNTLNVPISGFGSSRGSQLLGGSYNGHHDMISTNTLQNIAGIQTGPAWLENDAAASAYLEPKDEVHDLASLRHAFLEQDRQAFLTGNNPLAKDLTLKELYNMQSXVAQEKARETSYRQRFQ

SEQ ID NO: 109082 - protein, 513 aa, Setaria italica
  Transcript Sequence Number=SeqID_43108
  Homolog annotation: Hit_ID=B9RQZ0; Match level="QueryCoverage=98%, HitCoverage=39%, E-value=1e-61, Identity=33%"; Hit description =Pentatricopeptide repeat-containing protein, putative
  Pfam annotation: Domain name=PAM2; Domain location=12-29; Score=26.5; E_value=0.00011; Accession=PF07145.7; Description=Ataxin-2 C-terminal region
  Pfam annotation: Domain name=Smr; Domain location=439-513; Score =25.1; E_value=9.6e-05; Accession=PF01713.13; Description=Smr domain
  Pfam module annotation: Pfam domain module=PAM2::Smr; Domain location= 12-29::439-513
MSTEDKKLSMLNKGTALNPNAEEFVPSSLRTVNDASRRSDAALVVSGPSKETSTDQPESIIRSNSDEEAHQYWQQQLPDDITPDFKVLGQDETSGPDSLTLTGLSINDGIGASMFSPNQTLSMQHRASPFIRDRLGTRPKIEFSGPAYLDERSQATIMSPTAGSMSPTAAPWVKTVRNGGQYNSSRRDAGHYNGDSSIGASLHNITDAYHGSKRSLSSTMDIMSHLENKVDGRLSQNLRSLSFGHSSPPSPASYGQNGLGNYNKEAFGLPNSPYRSHSAILTEDVVSPSTGREHVSLDAPRGRYKTANVPISGFGSSRGSQLLGGSYNGHHDMISTNTLQNIAGIQTGPAWLENDAAASAYLEPKDEVHDLASLRHAFLEQDRQAFLTGNNPLAKDLTLKELYNMQSRLAQEKARETSYRQRFQMPELQGLIQEQNPPIDLCGLHVSEALHVLNYELNNRRKIVRSTGRRFQAIIISSARTPARLNAAVEQYLLEHGLHYTQAQPGLFRVLLQ

SEQ ID NO: 109083 - protein, 172 aa, Setaria italica
  Transcript Sequence Number=SeqID_43109
  Gene Ontology: Cellular component=chloroplast
  Homolog annotation: Hit_ID=B9SVI6; Match level="QueryCoverage=87%, HitCoverage=37%, E-value=6e-23, Identity=36%"; Hit description =Pentatricopeptide repeat-containing protein, putative
  Pfam annotation: Domain name=PPR; Domain location=11-45; Score=2.7; E_ value=4.3; Accession=PF01535.12; Description=PPR repeat
  Pfam annotation: Domain name=PPR; Domain location=111-145; Score =27.4; E_value=6e-05; Accession=PF01535.12; Description=PPR repeat
  Pfam module annotation: Pfam domain module=PPR::PPR; Domain location =11-45::111-145
  Subcellular localization annotation: CTP_CleavageSite=53; ConfidenceScore=5.49e-01
LLLLSHLPASSLSSFSFNSLIRASPSVLALRLFDQMRRRGVPADPYTLPFLIRACNGSDPPLCKSLHGQGVRLGYGCHLFTQTALMNMYFACGSVVAARRVFEEMPARDVVAWTGLVSGYVDSGMYLKAVEVFQEMRGADYLVWPNEATVVSVASACTGLGSLEYATGLHSY

SEQ ID NO: 109084 - protein, 325 aa, Setaria italica
  Transcript Sequence Number=SeqID_43110
  Homolog annotation: Hit_ID=Q9LNV0; Match level="QueryCoverage=43%, HitCoverage=37%, E-value=8e-18, Identity=40%"; Hit description =F22G5.35
  Pfam annotation: Domain name=C2; Domain location=47-137; Score=39.6; E_value=1.2e-08; Accession=PF00168.22; Description=C2 domain
  Subcellular localization annotation: CTP_CleavageSite=53; ConfidenceScore=5.28e-01
MASPSPSSPLHPHQHQHPLPPNAHPQFQAPPPSMPPPPAAPPKAFDLEVTVVSGKHLKNVNWRRGDLRAYVVAYLDPSRRAATRPDDAGGCKPAWNERLVLPLPPHLSPHDPSILLSLDVFHSKPSDSPKPLVGSARSPLRDLLFPTNPNPSHDSAASPLVSLPLLRPSGRPQGKLRIRVAIRERSPPPPEPQYPPPSSSPYYFPPPPPPAYSAPPQYGSEQYYRPSGYYSAPAPPPQYEYTGGPSAPVDYSRQYEQRGRTGGGDSGSGRYGVGTGLAVGAVAGALGGLAIGEGVKYKEEKAAERVEEKVVPAGRDDYSEYRGDY

SEQ ID NO: 109085 - protein, 684 aa, Setaria italica
  Transcript Sequence Number=SeqID_43111
  Gene Ontology: Mol. function=protein binding; Biological process =protein metabolic process
  Homolog annotation: Hit_ID=Q6Z517; Match level="QueryCoverage=100%, HitCoverage=66%, E-value=0.0, Identity=74%"; Hit description=101 kDa heat shock protein; HSP101-like protein
  Pfam annotation: Domain name=AAA_2; Domain location=327-475; Score= -42.2; E_value=0.02; Accession=PF07724.6; Description=ATPase family associated with various
DGGKAVVSEMARLLRRFGAGKVWAVGTAACATYLRCKVYHPTMEAEWDLQAVPIARGAPLAGAALRPAGTGLLGNSVGMLSPTLRPVPVTPTAPRWPPGAGTDQPLMARPAMCLLCKGSYDRELAKLAAERKEKPASRPEAAKPGLPHWLQPSSDQTQTKEQELKWKETAQELEKKWRETCARTHGTRAGAPALSMPLAAFGPRPPIEPKLQLARGAIPTLKMNTNWEKAEGTPTSELRKSPPGSPVKTDLVLGPLDPGATVDKDQKENYTEGLTAMQKAKISGISDIESFKRLLKGLTEKVSWQSDAASAIAAVVIQCRSGSGKRRKIGTRGDMWLLFVGPDQAGKRKMVNALSELMVNTQPVVVNFGGDSRLAKDGNRLNAGFWGKTSLDRITEAVRQNPFSVIVLEGIDQVDAVVRGKIKRAMETGRLPDSRGREVSLGNVIFVLTTNWLPEELKGPKFETLLQDEGRMFEVANSNWQLELSIGDKQVKHRADWLCDDARPAKLAKELSSGHGLSLDLNLAVGALDDTESSRNSSDLSVEQEQEKGHLSVKCITPAPDSDLLNLVDDAIVFRPVDFGPFRKNVTDCMAAKFESLIGSSNSFRIDEDAIDRMAGSVWLTDEKLEDWAEKVLMPSIERLWRNMKHHNGRAVVRLAAVADKALPRWGGGREGLPATVPIAIDGM

SEQ ID NO: 109086 - protein, 80 aa, Setaria italica
  Transcript Sequence Number=SeqID_43112
NLVLSDILRKKGLDMTSVLFHIVLHSDDFLEILIVIRSRSNALHPCNNCEGDETIRKSTWFHQRPVLMLIISHTYMPPYL

SEQ ID NO: 109087 - protein, 55 aa, Setaria italica
  Transcript Sequence Number=SeqID_43113
IYMRNLIVISCMRRGQKDQIQFRHDGISQAAILGDGGTGWRLDKKMLNCPSLERL

SEQ ID NO: 109088 - protein, 275 aa, Setaria italica
  Transcript Sequence Number=SeqID_43114
  Gene Ontology: Mol. function=binding; Cellular component =intracellular; Biological process=RNA processing
  Homolog annotation: Hit_ID=O64496; Match level="QueryCoverage=99%, HitCoverage=20%, E-value=2e-81, Identity=51%"; Hit description =F20D22.14 protein
  Pfam annotation: Domain name=DUF946; Domain location=1-275; Score =286.3; E_value=6.8e-83; Accession=PF06101.3; Description=Plant protein of unknown function (DUF946)
WLPTAPEGYKAVGAVVTATSDKPSRDEVRCVRADFTDACETEESLLSSDKDGFSAATLRPSVRGIDARGVHAGTFLAQSSVTPANASSLACLKNNSASYTSSMPDLAQVNSLLAAYAPHVYLHPNEPYFPSSVTWFFENGALLYQKGSQTATPVAADGSNLPQGGGNDGGYWLDLPVDNKQREKVKRGDLASAKVYVQAKPMLGGTVTDLAVWIFYPFNGPARAKVGLLTIPLGEIGEHVGDWEHVTLRVSNFSGELRRMYFSQHSAGTWVEASQ

SEQ ID NO: 109089 - protein, 82 aa, Setaria italica
  misc_feature (1)..(1): Xaa can be any naturally occurring amino acid
  Transcript Sequence Number=SeqID_43115
XPGARFRFRPLSSSSAAGVELDVDAIASALANNSWSQTKPDGSGATENELCAIQEARFAPGSGRTGGREGGRRRGVVGWGAV

SEQ ID NO: 109090 - protein, 223 aa, Setaria italica
  Transcript Sequence Number=SeqID_43116
  Gene Ontology: Mol. function=binding; Cellular component=mitochondrion
  Homolog annotation: Hit_ID=B9S5H2; Match level="QueryCoverage=99%, HitCoverage=78%, E-value=3e-60, Identity=33%"; Hit description =Pentatricopeptide repeat-containing protein, putative
  Pfam annotation: Domain name=PPR; Domain location=120-154; Score =16.8; E_value=0.089; Accession=PF01535.12; Description=PPR repeat
  Pfam annotation: Domain name=PPR; Domain location=165-199; Score =29.3; E_value=1.5e-05; Accession=PF01535.12; Description=PPR repeat
  Pfam annotation: Domain name=PPR; Domain location=22-56; Score=34.0; E_value=5.9e-07; Accession=PF01535.12; Description=PPR repeat
  Pfam module annotation: Pfam domain module=PPR::PPR::PPR; Domain location=120-154::165-199::22-56
PHPDHLAAARRLFDEMPQRDAVTWNTLLGAYARRGLMDEAQSLFNDMPQRNTTSWNTMVTGFFAVGQAKKALDVFEAMPVKDSASLSAMVSGFIRNGWLREADVLLTKHLRATDMDKAVDAYSTLIAAYGQAGRVADARRLFDMIPKEQSQHKGHKRRVFERNVVSWNSMMMCYIRTGDVCSARALFDEMPGKDLVSWNTMIAGYTQASDMEEAEKLFGSARA

SEQ ID NO: 109091 - protein, 105 aa, Setaria italica
  Transcript Sequence Number=SeqID_43117
  Gene Ontology: Mol. function=nucleic acid binding; Cellular component= ribonucleoprotein complex; Biological process=nuclear mRNA splicing, via spliceosome
  Homolog annotation: Hit_ID=Q8L3W7; Match level="QueryCoverage=86%, HitCoverage=86%, E-value=5e-45, Identity=96%"; Hit description=Small nuclear ribonucleoprotein-like protein
  Pfam annotation: Domain name=LSM; Domain location=23-102; Score=66.5; E_value=1e-16; Accession=PF01423.14; Description=LSM domain
MAEENQAGKKEEEEFSTGPLSVLMMSVKNNTQVLINCRNNKKLLGRVRAFDRHCNMVLENVREMWTEVPKTGKGKKKALPVNKDRFISKMFLRGDSVIIVLRNPK

SEQ ID NO: 109092 - protein, 73 aa, Setaria italica
  Transcript Sequence Number=SeqID_43118
  Homolog annotation: Hit_ID=B6TZ04; Match level="QueryCoverage=72%, HitCoverage=23%, E-value=2e-09, Identity=70%"; Hit description=Zinc finger, C2H2 type family protein
  Pfam annotation: Domain name=zf-C2H2; Domain location=47-69; Score =17.0; E_value=0.077; Accession=PF00096.18; Description=Zinc finger, C2H2 type
PATKRPRLLQPLQQQQQQSPAADHAELCLGRQPLLLAPQQPAKPRVHECPVCGLEFAIGQALGGHMRRHRAEA

SEQ ID NO: 109093 - protein, 310 aa, Setaria italica
  Transcript Sequence Number=SeqID_43119
  Homolog annotation: Hit_ID=UPI0001A7B04F; Match level="QueryCoverage =99%, HitCoverage=24%, E-value=3e-42, Identity=34%"; Hit description =REF4 (REDUCED EPIDERMAL FLUORESCENCE 4)
GALWTQKVRRWHDFIVLSCLRSPFGRDKDAVAQLIQSCFSSFLLSSSGGSDITANRGVGALLGDSITNQGLRLPMAPGFIYLRTCRTFHDTYFVSEVILKQVIEWSHKLANGWSFNGPPQLKSGRTPLSCAASMAHQVAMLGGGLLCIAGGPLVVQVLYEETLPTLLLSAREQSLKDPGPVSSTLQGYAMANMLFFCGSLLWGADRISPVMKLSFLSRRPRVVGTHMDFIAGVLDGHILLGCNPGTWKAYVSRFVFLVVKFVPSWLRDIKLDTLKKIAAGLRSWHEHDLALSLLERGGPQAISAVVETLL

SEQ ID NO: 109094 - protein, 177 aa, Setaria italica
  Transcript Sequence Number=SeqID_43120
  Gene Ontology: Mol. function=binding
  Homolog annotation: Hit_ID=Q9AUY1; Match level="QueryCoverage=97%, HitCoverage=30%, E-value=1e-72, Identity=80%"; Hit description =Armadillo/beta-catenin-like repeat family protein, expressed
  Pfam annotation: Domain name=Arm; Domain location=110-150; Score =29.8; E_value=1.1e-05; Accession=PF00514.15; Description =Armadillobeta-catenin-like repeat
  Pfam annotation: Domain name=Arm; Domain location=69-109; Score=18.1; E_value=0.036; Accession=PF00514.15; Description=Armadillobeta -catenin-like repeat
  Pfam module annotation: Pfam domain module=Arm::Arm; Domain location =110-150::69-109
ELLARLQIGQTEAKNRAVDGLLEALRKDEKSVLAVLGRANVSAMVQLLTASAPVVRGKAATVVCQVAESGSCDGLLVSEGVLPPLIRLAESGSLVGREKAALTLQRLSVSPDVARAIVGHGGAGPLIEICQTGDSVSQSAAAGALKNLSAVPEVRQALADEGIVRVMVTLLDWRRRG

SEQ ID NO: 109095 - protein, 100 aa, Setaria italica
  misc_feature (67)..(67): Xaa can be any naturally occurring amino acid
  Transcript Sequence Number=SeqID_43121
AAVQGPATAAGDRRATRSAADRRGSNRRRRREEEEDKGEPQALADVAVAPCGRGADRGGEGRGTGGXSGGSDMPGDVPTSPAPAPPSASSSSQHHHHRGP

SEQ ID NO: 109096 - protein, 51 aa, Setaria italica
  Transcript Sequence Number=SeqID_43122
  Homolog annotation: Hit_ID=UPI0000163086; Match level="QueryCoverage =98%, HitCoverage=12%, E-value=2e-15, Identity=66%"; Hit description =lipoyltransferase, putative
YLRVFSYLGFCGDCHNAAKLISKIEDRKIILRDTTRFHHFRGGSCSCGDYW

SEQ ID NO: 109097 - protein, 47 aa, Setaria italica
  Transcript Sequence Number=SeqID_43123
RSNSQDKFFSRSMQQELREWYLIPAIREAKELLPNQAAAFAERIQAR

SEQ ID NO: 109098 - protein, 449 aa, Setaria italica
  Transcript Sequence Number=SeqID_43124
  Gene Ontology: Mol. function=protein serine/threonine kinase activity; Biological process=protein amino acid phosphorylation
  Homolog annotation: Hit_ID=C4P7R9; Match level="QueryCoverage=97%, HitCoverage=100%, E-value=0.0, Identity=80%"; Hit description=CBL -interacting protein kinase 19
  Pfam annotation: Domain name=NAF; Domain location=312-371; Score =97.0; E_value=6.6e-26; Accession=PF03822.6; Description=NAF domain
  Pfam annotation: Domain name=Pkinase; Domain location=12-266; Score =353.9; E_value=3.1e-103; Accession=PF00069.17; Description=Protein kinase domain
  Pfam annotation: Domain name=Pkinase_Tyr; Domain location=12-264; Score=51.3; E_value=3.9e-17; Accession=PF07714.9; Description =Protein tyrosine kinase
  Pfam module annotation: Pfam domain module=NAF::Pkinase::Pkinase_Tyr; Domain location=312-371::12-266::12-264
MTEKGNILMQRYEMGKLLGKGSFAKVYHARCVNTSHSVAIKVIDKDKIFKCGLMDQISREISVMKLVKHPNIVQMYEVMATKTKIYFVLEYVKGGELFNKVQRGRLKEDVARKYFQQLISAIDFCHSRGVYHRDLKPENLLLDESRNLKISDFGLSALPDCKRQDGLLHTSCGTPAYVAPEVISRKGYDGAKADIWACGVILYVLLAGYLPFQDKNLVDMYKKICKAQLKWPSWFSSDIRKLLRRLLHPNPSARISIAEIMEHPWFRIGHPNHGKLFDYTMNSTDNVMPIDMNLALDHSNANTVGGNQAVEKLTNLNAFDIISLSNGFDLSGIFEENSNKEEAKFTSTNTASTIITKLEEIAMSLRLKITKKCGGLLKMECSKPGRKGVMSLNAEVFHITPNFHLVEIKKTNGDTLEYQKVMKQVMRPALKDIVWAWQGEQPEKEKQQS

SEQ ID NO: 109099 - protein, 287 aa, Setaria italica
  Transcript Sequence Number=SeqID_43125
  Gene Ontology: Mol. function=protein binding; Biological process =ubiquitin-dependent protein catabolic process
  Homolog annotation: Hit_ID=B6UFI4; Match level="QueryCoverage=100%, HitCoverage=100%, E-value=1e-137, Identity=80%"; Hit description =ATPP2-A13
  Pfam annotation: Domain name=F-box; Domain location=20-67; Score =27.0; E_value=7.5e-05; Accession=PF00646.25; Description=F-box domain
MGAGASDLAGMEPSGKVARAGLGDLPELCAAEVLLHLDAPDICRLARLNRAFRGAAAADFVWEAKLPENYGRLLRFVDGAEEGEMGKMDIFARLAKPVPFDGGRREFWVEKTKGGICMALSSKALVITGIDDRRYWVNMPTTESRFHSIAYLQQIWWFEVVGEVDFCFPVGTYSLYFRLHLGKSSTRFGRHICSTEQIHGWDKKPVRFQFSASDGQHAVSQCYLDEPGSWILYHVGDFVASGSEQPIKLKFSLAQIDCTHTKGGLCVDSVLIYPKGFEPERVIRSQK

SEQ ID NO: 109100 - protein, 60 aa, Setaria italica
  Transcript Sequence Number=SeqID_43126
  Homolog annotation: Hit_ID=B6UFI4; Match level="QueryCoverage=93%, HitCoverage=18%, E-value=7e-15, Identity=66%"; Hit description=ATPP2- A13
FTFLVYGEVFQRVLFCFVRQEFWVEKTKGGICMALSSKALVITGIDDRRYWVNMPTTESR

SEQ ID NO: 109101 - protein, 206 aa, Setaria italica
  Transcript Sequence Number=SeqID_43127
  Gene Ontology: Mol. function=iron-sulfur cluster binding; Biological process=abscisic acid biosynthetic process
  Homolog annotation: Hit_ID=Q6Z351; Match level="QueryCoverage=98%, HitCoverage=15%, E-value=1e-73, Identity=69%"; Hit description =Putative aldehyde oxidase-like protein
  Pfam annotation: Domain name=FAD_binding_5; Domain location=8-191; Score=172.3; E_value=1.4e-48; Accession=PF00941.13; Description=FAD binding domain in molybdopterin dehydrogenase
NTSNIQMIQGGWYHPRSIKEYYELIDSCLCSDSVKMVVGNTSTGVPGYKDQDLYNKYIDIGGIPELSHIVKRESGFEIGAATTISRTIEILMQECESISSPNGSVVFRKLADHMSKVATPFVRNTASIGGNIILAQKYPFPSDIATILLSAGTTVCLQDVAGQRQITLEEFLEQPPLDSTTLLLSIFIPHWVSDYQAETSFVYFVN

SEQ ID NO: 109102 - protein, 119 aa, Setaria italica
  Transcript Sequence Number=SeqID_43128
  Gene Ontology: Mol. function=protein binding
  Homolog annotation: Hit_ID=B9RV68; Match level="QueryCoverage=82%, HitCoverage=45%, E-value=5e-14, Identity=45%"; Hit description=GTP binding protein, putative
  Pfam annotation: Domain name=DUF567; Domain location=1-119; Score =33.5; E_value=4.3e-07; Accession=PF04525.4; Description=Protein of unknown function (DUF567)
MAIVGAEYCDPEERVLTVRKTSHFSPGDGFAAYDSRTGGLAFRADTYGRGHGGGAASSGELALLGPAGEPLLTVRRRRPSLHQRWEGFLGSRADGQKPLFSARRSSILGRRRGRGPSSS

SEQ ID NO: 109103 - protein, 218 aa, Setaria italica
  misc_feature (12)..(12): Xaa can be any naturally occurring amino acid
  Transcript Sequence Number=SeqID_43129
QLVPTLPSTPVXAPKTAPTTAESVVTSTGKDVGPNNNSTDEDDMEEEAPSASAELNLGALGGFGLGSQPSSSPQKSNPFGTSFGTSENKSSGTPFALTTSPGQLFRPASLSIPSAQPAQPSQSTSSSAFSSTFSSGFTGFGQPAQLGSVHQAGFGQPAQIQSGFGQPAQIVSGPQSGFGQPAQIGVGQQSGFGQPAQFGAQQALGSVLGSLGQSRQLG

SEQ ID NO: 109104 - protein, 39 aa, Setaria italica
  Transcript Sequence Number=SeqID_43130
  Gene Ontology: Mol. function=nucleic acid binding
  Homolog annotation: Hit_ID=Q84UQ3; Match level="QueryCoverage=100%, HitCoverage=10%, E-value=1e-11, Identity=87%"; Hit description=Zinc finger CCCH domain-containing protein 56
SQRSTNLNQRSGQVQRPIQKWKGPDKISRIYGDWIDENE

SEQ ID NO: 109105 - protein, 300 aa, Setaria italica
  misc_feature (114)..(114): Xaa can be any naturally occurring amino acid
  Transcript Sequence Number=SeqID_43131
  Gene Ontology: Mol. function=nucleic acid binding
  Homolog annotation: Hit_ID=Q84UQ3; Match level="QueryCoverage=92%, HitCoverage=79%, E-value=1e-116, Identity=71%"; Hit description=Zinc finger CCCH domain-containing protein 56
  Pfam annotation: Domain name=zf-CCCH; Domain location=115-141; Score =28.0; E_value=3.8e-05; Accession=PF00642.16; Description=Zinc finger C-x8-C-x5-C-x3-H type (and similar)
  Pfam annotation: Domain name=zf-CCCH; Domain location=179-205; Score =49.3; E_value=1.5e-11; Accession=PF00642.16; Description=Zinc finger C-x8-C-x5-C-x3-H type (and similar)
  Pfam annotation: Domain name=zf-CCCH; Domain location=37-62; Score =37.2; E_value=6.6e-08; Accession=PF00642.16; Description=Zinc finger C-x8-C-x5-C-x3-H type (and similar)
  Pfam module annotation: Pfam domain module=zf-CCCH::zf-CCCH::zf-CCCH; Domain location=115-141::179-205::37-62
  Subcellular localization annotation: CTP_CleavageSite=57; ConfidenceScore=5.25e-01
TKKKARGGGGAGGGAGGGDGGGGSSTSKSRAIGKMFFKTKLCCKFRAGTCPYVTNCNFAHGMEELRKPPPNWQEIVAAHEEATEQREEHQIPIMTSGSVVAGDGGGAGSQGGRXYKGRHCKKFYTEEGCPYGDACTFLHDEQSKARESVAISLSPTVGGGGYNAAAAANGAMVQKPSNWKTRICNKWEMTGYCPFGSKCHFAHGAAELHKYGGGLVDIDGRDVASTPDSKQAGASAKAPADSAAASTAIPPHADVYHLGIQSQRSTNLNQRSGQVQRPIQKWKGPDKISRIYGDWIDENE

SEQ ID NO: 109106 - protein, 105 aa, Setaria italica
  misc_feature (59)..(59): Xaa can be any naturally occurring amino acid
  Transcript Sequence Number=SeqID_43132
NRSIVEPATTVGVNSKPDIEKILSEVILTTQRHGLNEKAAKSDVLETSWLLPPCEFFQXENVDEIPSMRDETMTYNVSNGATSTWKIRRLTFHPSQYSSCNDVFF

SEQ ID NO: 109107 - protein, 64 aa, Setaria italica
  Transcript Sequence Number=SeqID_43133
SMLEETTVISHYYVIKATLTFKKILLIRTASCKRIIHWLREYLGLVLSTRSKTYENTWVGLFSV

SEQ ID NO: 109108 - protein, 96 aa, Setaria italica
  Transcript Sequence Number=SeqID_43134
KTSYTSYFVHANRQYGGHTILYRQHIKEQCIHLPWEPPNLVFTHSQLYTEKLLHDPTLGYHTDSPRSTEHLVLRQFMIMKMEDRRPATECSAALCS

SEQ ID NO: 109109 - protein, 130 aa, Setaria italica
  misc_feature (54)..(54): Xaa can be any naturally occurring amino acid
  Transcript Sequence Number=SeqID_43135
  Gene Ontology: Cellular component=extracellular region
  Homolog annotation: Hit_ID=Q850K7; Match level="QueryCoverage=86%, HitCoverage=37%, E-value=2e-25, Identity=54%"; Hit description =Expansin-like B1
  Pfam annotation: Domain name=DPBB_1; Domain location=24-112; Score =1.7; E_value=0.0044; Accession=PF03330.10; Description=Rare lipoprotein A (RlpA)-like double
VSNKDFSAGACEYGAFGATLNNGDVSASASLYRNGVGCGACYQVNSFPPAVVVXTTKHNSFDQTKIVCDCQQVRCTNPHYCSPSGVTIVITDSGASNGTDFIPEAKTTTLRLGNRGQETKERLGRQTTRL

SEQ ID NO: 109110 - protein, 240 aa, Setaria italica
  misc_feature (203)..(203): Xaa can be any naturally occurring amino acid
  misc_feature (225)..(225): Xaa can be any naturally occurring amino acid
  misc_feature (232)..(232): Xaa can be any naturally occurring amino acid
  Transcript Sequence Number=SeqID_43136
  Gene Ontology: Cellular component=mitochondrion
  Homolog annotation: Hit_ID=Q8LI18; Match level="QueryCoverage=100%, HitCoverage=53%, E-value=1e-111, Identity=56%"; Hit description =Selenium-binding protein-like
  Pfam annotation: Domain name=PPR; Domain location=119-153; Score =14.8; E_value=0.16; Accession=PF01535.12; Description=PPR repeat
  Pfam annotation: Domain name=PPR; Domain location=155-188; Score=4.4; E_value=2.7; Accession=PF01535.12; Description=PPR repeat
  Pfam annotation: Domain name=PPR; Domain location=84-118; Score=32.9; E_value=1.3e-06; Accession=PF01535.12; Description=PPR repeat
  Pfam module annotation: Pfam domain module=PPR::PPR::PPR; Domain location=119-153::155-188::84-118
ALGIFHRMLQAGVRPVPVTFSSLIPICGNLASLRFGKQLHAYVIQGGFEDNVFISSSLIDMYCKCGEISIARCIFDRMPSPDIVSRTAMIMGYALHGPAREALVLFEKMELGNVKPNHITFLAVLTACSHAGLLDKGRKYFNSMSEQYGIVPTLEHCAAFADILGRAGELDEAYSFISKMQIKPTPCVWSTLLRACRVHKNTXLAEEVAKKIMELEPRSISSHVXLSNVYSXSGRWNEAA

SEQ ID NO: 109111 - protein, 65 aa, Setaria italica
  Transcript Sequence Number=SeqID_43137
HSLDDTYFNCMYPSIMVLHTWLHGKLISFDYGSYIPRYTFSWLVKPMWLIISKFHSFALGIHYFA

SEQ ID NO: 109112 - protein, 78 aa, Setaria italica
  Transcript Sequence Number=SeqID_43138
KLEWCIIHFAATFINWVINNKIRSRIVEHRNCPKACSTSLIRFYQVIVAWDLCHSAFYGDPHMCLFNHNNVFLAYSTP

SEQ ID NO: 109113 - protein, 486 aa, Setaria italica
  Transcript Sequence Number=SeqID_43139
  Gene Ontology: Mol. function=transferase activity; Cellular component= chloroplast envelope; Biological process=biosynthetic process
  Homolog annotation: Hit_ID=B9SZD5; Match level="QueryCoverage=82%, HitCoverage=88%, E-value=0.0, Identity=88%"; Hit description =Glycosyltransferase, putative
  Pfam annotation: Domain name=Glycos_transf_1; Domain location=265 -429; Score=106.7; E_value=7.7e-29; Accession=PF00534.12; Description= Glycosyl transferases group 1
  Subcellular localization annotation: CTP_CleavageSite=46; ConfidenceScore=5.72e-01
MAAAGAVVPRPPPPLPITAFPSSSWPRLSPRYPLRLRSMLRRPLPCAAASSSSVLMPDPDLEPEPAHEDESRPRRIALFVEPSPFAYVSGYKNRFQNFIKYLREMGDEVIVVTTHEGVPQEFHGAKLIGSWSFPCPWYQKVPLSLALSPRIIGEVARFKPDIIHASSPGIMVFGALIIAKLLCVPLVMSYHTHVPIYIPRYTFSWLVKPMWLIIKFLHRAADLTLVPSVAIGRDLQAARVTAANKIRLWNKGVDSESFHPRFRNKEMRSRLTNGEPEKPLILYVGRLGVEKSLDFLKRVMDRLPGSRIAFIGDGPFRAELEQMFSGMPAVFTGTLQGEELSQAYASGDVFVMPSESETLGFVVLEAMSSGVPVVGARAGGIPDIIPEDQEGKTSFLYTPGDVDDCVSKIERLLSCEELRETMGRAARKEMEKFDWRAATRKIRNEQYSAAIWFWRKKRAQLLRPVQWVVRKLVRPTTPGAAVAKQS

SEQ ID NO: 109114 - protein, 59 aa, Setaria italica
  Transcript Sequence Number=SeqID_43140
SKISSSQELLNADVCYPWYAGYPFSDDRTLGLVNSRICFSVSLVGYWHRQNVACTLIQN

SEQ ID NO: 109115 - protein, 94 aa, Setaria italica
  Transcript Sequence Number=SeqID_43141
YMPTLSMAMIVPKVINKLLGRTRQPNWFVFQNYDRLQENRNVLFNFHCAQIVSSISSIGHRQYDYIKYALGDIKGYINRTVADLYCRLHPYEQK

SEQ ID NO: 109116 - protein, 133 aa, Setaria italica
  misc_feature (98)..(98): Xaa can be any naturally occurring amino acid
  Transcript Sequence Number=SeqID_43142
AHLIHSVTDKLTVLTKDAAAQKGCSRGECLAFVERVTRACVEVIGELGGSSLCDIADVIPFSSITAPATAEPEVVNQRGMEEEINNSMVPDQDTEAAXQLEKQSQSPDGYKQAKRTAPSGLSGKRKRGRSGPR

SEQ ID NO: 109117 - protein, 133 aa, Setaria italica
  Transcript Sequence Number=SeqID_43143
  Gene Ontology: Mol. function=threonine-type endopeptidase activity; Cellular component=proteasome core complex; Biological process =ubiquitin-dependent protein catabolic process
  Homolog annotation: Hit_ID=Q6H800; Match level="QueryCoverage=100%, HitCoverage=65%, E-value=3e-72, Identity=96%"; Hit description =Proteasome subunit beta type
  Pfam annotation: Domain name=Proteasome; Domain location=5-133; Score= 42.8; E_value=1.3e-09; Accession=PF00227.18; Description=Proteasome A- type and B-type
MSIFEYNGSAVVAMVGKNCFAIASDRRLGVQLQTIATDFQRVFKVHDKLYIGLSGLATDAQTLYQRLVFRHKLYQLREERDMKPETFASLVSALLYEKRFGPYFCQPVIAGLGENDEPFICTMDCIGAKELAK

SEQ ID NO: 109118 - protein, 86 aa, Setaria italica
  Transcript Sequence Number=SeqID_43144
  Gene Ontology: Mol. function=threonine-type endopeptidase activity; Cellular component=proteasome core complex; Biological process =ubiquitin-dependent protein catabolic process
  Homolog annotation: Hit_ID=Q9LST7; Match level="QueryCoverage=94%, HitCoverage=39%, E-value=6e-37, Identity=87%"; Hit description =Proteasome subunit beta type-3
MYLPTDCLGAKELAKDFVVSGTASESLYGACESMYKPNMEPDELFETVSQALMSSVDRDCLSGWGGYVVIVTPTEVREHVVKGRMD

SEQ ID NO: 109119 - protein, 204 aa, Setaria italica
  Transcript Sequence Number=SeqID_43145
  Gene Ontology: Mol. function=threonine-type endopeptidase activity; Cellular component=proteasome core complex; Biological process =ubiquitin-dependent protein catabolic process
  Homolog annotation: Hit_ID=Q9LST7; Match level="QueryCoverage=100%, HitCoverage=100%, E-value=1e-110, Identity=91%"; Hit description =Proteasome subunit beta type-3
  Pfam annotation: Domain name=Proteasome; Domain location=5-189; Score= 194.3; E_value=3.3e-55; Accession=PF00227.18; Description=Proteasome A-type and B-type
MSIFEYNGSAVMAMVGKNCFAIASDRRLGVQLQTIATDFQRVFKIHDKLYIGLSGLGTDAQTLYQRLVFRHKLYQLREERDMKPETFASLVSALLYEKRFGPYLCQPVIAGLGEDNEPFICTMDCLGAKELAKDFVVSGTASESLYGACESMYKPNMEPDELFETVSQALMASVDRDCLAGWGGYVVIVTPTEVQERVVKGRMD

SEQ ID NO: 109120 - protein, 112 aa, Setaria italica
  Transcript Sequence Number=SeqID_43146
  Subcellular localization annotation: CTP_CleavageSite=54; ConfidenceScore=5.57e-01
GSRSSPVLLLIPQAKPVGGSETGPVSTCGRTASHPLALSSVPRSSERRRLPIVVASPATGGMGEEDQRKQVVGSERDQELERRPGEEGEEEEAKKAAPGEAEAGAGAGADAP

SEQ ID NO: 109121 - protein, 76 aa, Setaria italica
  Transcript Sequence Number=SeqID_43147
SMLPTSTPRPLWISPCYVTCKLTRCTIMMALPTIRRAPRNHHVFMLSQELECLHNRFVAQASSDSLEKQLYAFGSI

SEQ ID NO: 109122 - protein, 154 aa, Setaria italica
  misc_feature (128)..(128): Xaa can be any naturally occurring amino acid
  misc_feature (146)..(146): Xaa can be any naturally occurring amino acid
  Transcript Sequence Number=SeqID_43148
  Gene Ontology: Mol. function=protein tyrosine kinase activity; Biological process=protein amino acid phosphorylation
  Homolog annotation: Hit_ID=Q94LI5; Match level="QueryCoverage=100%, HitCoverage=32%, E-value=5e-19, Identity=35%"; Hit description =Putative wall-associated protein kinase
PCRGICENAPGYYECKCPSGYHSADPLNIPCNPNSPLAAKIVTGGISGLFIIAIVVFIFLLGKEKRKMKEFFRKNGGPIIEKVNKIKLFKREELEPILKTSNRIGQGGFGEVYMGYLRDEIRPVAVKXPKIDVKLANQFANEVIIXQSRVLHKN

SEQ ID NO: 109123 - protein, 128 aa, Setaria italica
  Transcript Sequence Number=SeqID_43149
  Gene Ontology: Mol. function=methionine adenosyltransferase activity; Cellular component=cytoplasm; Biological process=one-carbon compound metabolic process
  Homolog annotation: Hit_ID=P24260; Match level="QueryCoverage=48%, HitCoverage=15%, E-value=4e-21, Identity=77%"; Hit description=S -adenosylmethionine synthetase 2
  Pfam annotation: Domain name=S-AdoMet_synt_C; Domain location=70-128; Score=6.4; E_value=0.00087; Accession=PF02773.8; Description=S -adenosylmethionine synthetase, C-te
  Subcellular localization annotation: CTP_CleavageSite=20; ConfidenceScore=5.54e-01
MVFSSRYFSGMMGLMTCSLRSAAISSLVTVSSCWVEMRTVWTRTGTMAPPSLTYSTVTIFHLNPSGRFVIGGPHGDAGLTGRKIIIDTYGGWGAHGGGAFSGKDPTKVDRSGAYIARRARPLATMLLA

SEQ ID NO: 109124 - protein, 119 aa, Setaria italica
  Transcript Sequence Number=SeqID_43150
  Gene Ontology: Mol. function=RNA polymerase II transcription factor activity; Cellular component=nucleus; Biological process =transcription initiation from RNA polymerase II promoter
  Homolog annotation: Hit_ID=B6T7E5; Match level="QueryCoverage=65%, HitCoverage=14%, E-value=9e-19, Identity=65%"; Hit description =Transcription initiation factor IIF, alpha subunit
SWEDDEENEEEGGLSKSGKELKKLLGRAAGLNDSDADEDEEEEDQEDESSPVLAPKQKDQVKDEPVDNSPAKQTPSGHARSTPPASKFKQKRKSGADDTKTSGGRQDLQKKRQKVGNTE

SEQ ID NO: 109125 - protein, 89 aa, Setaria italica
  misc_feature (57)..(57): Xaa can be any naturally occurring amino acid
  Transcript Sequence Number=SeqID_43151
  Gene Ontology: Mol. function=RNA polymerase II transcription factor activity; Cellular component=nucleus; Biological process =transcription initiation from RNA polymerase II promoter
  Homolog annotation: Hit_ID=B6T7E5; Match level="QueryCoverage=68%, HitCoverage=11%, E-value=5e-10, Identity=59%"; Hit description =Transcription initiation factor IIF, alpha subunit
LRYLQDDEENEEEGGLSKSGKELKKLLGRAAGLNDSDADEDEEEEDQEDESSPVLAXKQKDQVKDEPVDNSPAKQTPSGHARSTPPAPK

SEQ ID NO: 109126 - protein, 252 aa, Setaria italica
  misc_feature (17)..(17): Xaa can be any naturally occurring amino acid
  Transcript Sequence Number=SeqID_43152
  Gene Ontology: Mol. function=RNA polymerase II transcription factor activity; Cellular component=nucleus; Biological process =transcription initiation from RNA polymerase II promoter
  Homolog annotation: Hit_ID=B6T7E5; Match level="QueryCoverage=100%, HitCoverage=48%, E-value=1e-89, Identity=71%"; Hit description =Transcription initiation factor IIF, alpha subunit
  Pfam annotation: Domain name=TFIIF_alpha; Domain location=1-249; Score=-40.3; E_value=1.1e-06; Accession=PF05793.4; Description =Transcription initiation factor IIF, a
FDLDDEIEKGDDWEHEXTFTDDDEAVDIDPEERADLAPEIPAPPEIKQDDEENEEEGGLSKSGKELKKLLGRAAGLNDSDADEDEEEEDEDESSPVLAPKQKDQVKDEPVDNSPAKQTPSGHARSTPPASKFKQKRKSGADDTKTSGGAASKKAKDTKASGIKEEAPASAKPTSKTSALSKSGTNVSPVTEDEIRSVLLAVAPVTTQDLVSRFKSRLRGPEDKNAFAEILKKISKIQKTNGHNYVVLRDDKK

SEQ ID NO: 109127 - protein, 283 aa, Setaria italica
  misc_feature (233)..(233): Xaa can be any naturally occurring amino acid
  Transcript Sequence Number=SeqID_43153
  Gene Ontology: Mol. function=methionine adenosyltransferase activity; Cellular component=cytoplasm; Biological process=one-carbon compound metabolic process
  Homolog annotation: Hit_ID=P50299; Match level="QueryCoverage=64%, HitCoverage=45%, E-value=2e-82, Identity=85%"; Hit description=S -adenosylmethionine synthetase 1
  Pfam annotation: Domain name=S-AdoMet_synt_C; Domain location=129 -272; Score=270.5; E_value=3.8e-78; Accession=PF02773.8; Description =S-adenosylmethionine synthetase, C-te
  Pfam annotation: Domain name=S-AdoMet_synt_M; Domain location=53-127; Score=-16.9; E_value=7.1e-05; Accession=PF02772.8; Description=S -adenosylmethionine synthetase, cent
  Pfam module annotation: Pfam domain module=S-AdoMet_synt_C::S-AdoMet _synt_M; Domain location=129-272::53-127
  Subcellular localization annotation: CTP_CleavageSite=24; ConfidenceScore=5.18e-01
QGARERRWRRTPARGSGGRGRWPRCSWPPAWRCRRRCGSTFGWGSFSGSKVTTAVGSPAAVGVDDDLAAGEAGVAVRPADDEAARRVEVEDGLLVEVLLKEHVIKPIIPEKYLDEKTIFHLNPSGRFVIGGPHGDAGLTGRKIIIDTYGGWGAHGGGAFSGKDPTKVDRSGAYIARQAAKSIVASGLARRCLVQVSYAIGVPEPLSVFVDSYGTGKIPDKEILKIVKENFDFXGPGYCITINLDLKKGGNRFIKTAAYGHFGRDDTDFTWEVVKPLKFDKASA

SEQ ID NO: 109128 - protein, 325 aa, Setaria italica
  misc_feature (116)..(116): Xaa can be any naturally occurring amino acid
  misc_feature (154)..(154): Xaa can be any naturally occurring amino acid
  Transcript Sequence Number=SeqID_43154
  Gene Ontology: Mol. function=methionine adenosyltransferase activity; Cellular component=cytoplasm; Biological process=one-carbon compound metabolic process
  Homolog annotation: Hit_ID=P50299; Match level="QueryCoverage=89%, HitCoverage=73%, E-value=1e-153, Identity=89%"; Hit description=S -adenosylmethionine synthetase 1
  Pfam annotation: Domain name=S-AdoMet_synt_C; Domain location=173 -314; Score=290.5; E_value=3.6e-84; Accession=PF02773.8; Description =S-adenosylmethionine synthetase, C-te
  Pfam annotation: Domain name=S-AdoMet_synt_M; Domain location=49-171; Score=324.2; E_value=2.6e-94; Accession=PF02772.8; Description=S -adenosylmethionine synthetase, cent
  Pfam module annotation: Pfam domain module=S-AdoMet_synt_C::S-AdoMet _synt_M; Domain location=173-314::49-171
  Subcellular localization annotation: CTP_CleavageSite=24; ConfidenceScore=5.58e-01
LYATPAARSASPPTTSASTPTAARCSSTSSSSPPTIAQGVHGHFTKRPEEIGAGDQGHMFGYATDETPELMPLSHVLATKLGARLTEVRKNGTCAWLRPDGKTQVTVEYVNEGGAXVPVRVHTVLISTQHDETVTNDEIAADLKEHVIKPIIPXKYLDEKTIFHLNPSGRFVIGGPHGDAGLTGRKIIIDTYGGWGAHGGGAFSGKDPTKVDRSGAYIARQAAKSIVASGLARRCLVQVSYAIGVPEPLSVFVDSYGTGKIPDKEILKIVKENFDFRPGMITINLDLKKGGNRFIKTAAYGHFGRDDTDFTWEVVKPLKFDKASA

SEQ ID NO: 109129 - protein, 210 aa, Setaria italica
  Transcript Sequence Number=SeqID_43155
  Gene Ontology: Mol. function=transferase activity; Cellular component= integral to membrane; Biological process=vesicle-mediated transport
  Homolog annotation: Hit_ID=B6TVP5; Match level="QueryCoverage=100%, HitCoverage=100%, E-value=1e-106, Identity=89%"; Hit description =VAMP-like protein YKT62
  Pfam annotation: Domain name=Synaptobrevin; Domain location=114-200; Score=51.0; E_value=4.6e-12; Accession=PF00957.13; Description =Synaptobrevin
  Subcellular localization annotation: CTP_CleavageSite=56; ConfidenceScore=5.47e-01
MKITALLVVKPSTSGAGSSSSGGGSGPEAVVLANATDVSHFGYFQRSAAREFIVFVARTVAQRTQPGQRQSVQHEEYKVHSHNRNGLCAVAFMDDHYPVRSAFSLLNKVLDEYQKDFGDSWKSATADGTQQWPFLTDALTKFQDPAEADKLMKIQRDLDETKIILHKTIESVLERGERLDSLVEKSSDLSAASQMFYKQAKKTNQCCTIL

SEQ ID NO: 109130 - protein, 93 aa, Setaria italica
  Transcript Sequence Number=SeqID_43156
PDEIPMSHVCPRSGPPLALAGRHRRRPHGARAVAPKCEAHPSHPPLPTRRAVSAATLLLAALPFPASSAQLEAEATAEGQGESGVPDGLELER

SEQ ID NO: 109131 - protein, 47 aa, Setaria italica
  Transcript Sequence Number=SeqID_43157
HISSCFSSCIYNVQLIIIQVWATILFFFAFLLLAFIYIFIYLTTSYI

SEQ ID NO: 109132 - protein, 163 aa, Setaria italica
  Transcript Sequence Number=SeqID_43158
VLGSDGNCDAPPKQDQDGVLRPASLRRMLMLGDSSVDFLLDFGYFDEDGDRFAFADRVLKHGGILAIPIDTLSAFSLPQNYCVIYTRRFAEAFVAVKKITPAGDNGDAGARMDDSSLASLKEGVVSSEPPETASPELKNMGRKLLLSDRRGSLQMPHQDHSQS

SEQ ID NO: 109133 - protein, 114 aa, Setaria italica
  Transcript Sequence Number=SeqID_43159
LALTAAPSVARGDHVEVFPRRLGPINFAVLPSNRWWALHRHHPQPLQLSLVKENGTPTRCTGANFGWIDGNCWNICLISKKARDRWKCSFISVLCSGIWWASRERRVFVPCFPL

SEQ ID NO: 109134 - protein, 153 aa, Setaria italica
  Transcript Sequence Number=SeqID_43160
  Homolog annotation: Hit_ID=B6TXW7; Match level="QueryCoverage=57%, HitCoverage=28%, E-value=4e-31, Identity=80%"; Hit description =Adhesin FhaB
PRPRTDDDQPIPALPPPPRPHKDKKEKIATAKKRRRAERAAEADGERTSRTDVTVIDTSIDGWKAAKVLIRRGDIWKVRDKKPSAVSELEDAIAKGKRRAGLVSKLQRDKEKEKLKEKEATTSGYIQAGSGDVTKESDDSDKVLVVHQSQKAK

SEQ ID NO: 109135 - protein, 239 aa, Setaria italica
  misc_feature (109)..(109): Xaa can be any naturally occurring amino acid
  Transcript Sequence Number=SeqID_43161
  Gene Ontology: Mol. function=cysteine-type peptidase activity; Cellular component=cytoplasm; Biological process=ubiquitin-dependent protein catabolic process
  Homolog annotation: Hit_ID=Q0J0M6; Match level="QueryCoverage=93%, HitCoverage=21%, E-value=8e-97, Identity=77%"; Hit description =Ubiquitin carboxyl-terminal hydrolase
  Pfam annotation: Domain name=UCH; Domain location=15-232; Score= -12.5; E_value=1.8e-06; Accession=PF00443.21; Description=Ubiquitin carboxyl-terminal hydrolase
YLLFRFKPPYLFNCCILKGLPNLGNTCFFNAVLQNLLALDSLRRKMLGPDVPTGALAMSLKKLFAETSASNHAGGALSPKNLFSSICSKYPQFRGYQMQDSHELLRCFXDGLRTEETEARKLAEEASDAGVPTIVDSIFGGLLSSTVSSTECSHSSVKHDQFLDLSLPVPSRRPPTKSVSSPPAKRTKQSIRDRNKSRRYGKIPARASPSVESNKEKIQTIAERNNSQIPGSELEQVVS

SEQ ID NO: 109136 - protein, 122 aa, Setaria italica
  Transcript Sequence Number=SeqID_43162
  Gene Ontology: Mol. function=tRNA (guanine-N7-)-methyltransferase activity; Biological process=glycolysis
  Homolog annotation: Hit_ID=Q337T1; Match level="QueryCoverage=85%, HitCoverage=15%, E-value=3e-19, Identity=53%"; Hit description =Phosphoglycerate kinase
MQACNFQLSSPMSLWLEPWLPSAGFQVATHSGYLSGGPGLSRLKCRVQCSQLWHSTSPVDNQKEKDRYSCIDQSTSYLHVQSLRNFPTEKLCGEVVVVRLDSALLLGHLGPCTFALERALLT

SEQ ID NO: 109137 - protein, 47 aa, Setaria italica
  Transcript Sequence Number=SeqID_43163
TKRSMPFFVLLKAFIVSFQKRLILLRYKNTALPHLNQLCSCLFNLNT

SEQ ID NO: 109138 - protein, 112 aa, Setaria italica
  misc_feature (1)..(18): Xaa can be any naturally occurring amino acid
  Transcript Sequence Number=SeqID_43164
  Subcellular localization annotation: CTP_CleavageSite=72; ConfidenceScore=5.45e-01
XXXXXXXXXXXXXXXXXXNRPAHFFFCRLACSFLSHGARSSVSFRREGGSGHAQRNSSPRDCAEKLRQAIPREAVESSNKYYKSEHLCRYLKLCTAVHPIQSSVSPLQCAEA

SEQ ID NO: 109139 - protein, 169 aa, Setaria italica
  Transcript Sequence Number=SeqID_43165
  Gene Ontology: Mol. function=electron carrier activity; Cellular component=anchored to membrane
  Homolog annotation: Hit_ID=B6TWI8; Match level="QueryCoverage=73%, HitCoverage=59%, E-value=8e-56, Identity=84%"; Hit description=Early nodulin-like protein 3
  Pfam annotation: Domain name=Cu_bind_like; Domain location=38-128; Score=87.6; E_value=4.4e-23; Accession=PF02298.9; Description =Plastocyanin-like domain
  Subcellular localization annotation: CTP_CleavageSite=17; ConfidenceScore=5.12e-01
MAAHGRAMRCVLLACLVAASASSTASAFVFKAGGTGEWRVPAQPAGANASNAYNAWAQRNRFRVGDAIAFTYQPGNDSVLLVDRKAYDACDTGAPMDTFTDGNTVFTFTHSGPFYFISGNKDNCNRDEKLIVVVMGERAAVANATQPGAGLAPSPNSGPYSAYSPPPLS

SEQ ID NO: 109140 - protein, 128 aa, Setaria italica
  Transcript Sequence Number=SeqID_43166
  Homolog annotation: Hit_ID=Q84S70; Match level="QueryCoverage=99%, HitCoverage=17%, E-value=1e-61, Identity=84%"; Hit description=Kelch- like protein
  Pfam annotation: Domain name=Dev_Cell_Death; Domain location=1-127; Score=219.7; E_value=7.4e-63; Accession=PF10539.1; Description =Development and cell death domain
QECHSRQLFGLPRAHISYVRNIKEGLPLFLFNYDDRKLYGIYEAAGNGKFCPESNAWSNDGQGKTSYPAQVAMRVRVWCFPLAENQFRNAIVANYYQKNTPSIPGQKLHYFQFELDHAQTRVLMDMFT

SEQ ID NO: 109141 - protein, 76 aa, Setaria italica
  misc_feature (61)..(61): Xaa can be any naturally occurring amino acid
  Transcript Sequence Number=SeqID_43167
MFFSASAEAAAERAAREARIKAERAAVERATAEARERAIEKAKAEKALAEARERRERYRSXSFKEGFKSNRVGVFC

SEQ ID NO: 109142 - protein, 77 aa, Setaria italica
  Transcript Sequence Number=SeqID_43168
  Gene Ontology: Mol. function=heat shock protein binding; Cellular component=plasma membrane
  Homolog annotation: Hit_ID=Q9XHV5; Match level="QueryCoverage=94%, HitCoverage=5%, E-value=7e-36, Identity=94%"; Hit description =10A19I.11
MKSEAIVSTLQYILGADSGWQPVPLTDLITAVAVKKAYRKATLCVHPDKLQQRGATIRQKYICEKVFDLLKDAWNKF

SEQ ID NO: 109143 - protein, 73 aa, Setaria italica
  Transcript Sequence Number=SeqID_43169
EVASNLIKRELDQEVHGSMGHGEAENVEEGMDGLVSDVNDKEADETPFLLPHSLLHHDPLISLLQCLFLPFCL

SEQ ID NO: 109144 - protein, 662 aa, Setaria italica
  Transcript Sequence Number=SeqID_43170
  Gene Ontology: Mol. function=heat shock protein binding
  Homolog annotation: Hit_ID=Q9XHV5; Match level="QueryCoverage=98%, HitCoverage=46%, E-value=1e-132, Identity=45%"; Hit description =10A19I.11
QIFGRFDFADFALPYEDLFGGPGAEPEEKEPEIASPSSGSSRSSIKKDFSQLEDEPPALPQHYQILDHHHHFKDHKFSPISFSPETESQQFVMSYNKTTERRPDDLIEMPTCTVEPSMDFVIDSRNLSHGPATNHVSRTDNGTMANDDSDKNPSSVSASVRSPESDFIVDQKQPSASWTPISGNVSANENHKTSDSHSTRSTVTPDYAFLRGSDTDAQAQSVKVQPLLRQQPKLINKRESAAKGGINLVNHSHTPTAAAHNSSSSNMPHADKKAGANPTSASAAMKEAMDFAEARLKAAKELLEIKGDSFKLRKKPSHHRSTRSTEIKAPVSVEVDTSEQILSVKKSSEEEKNHDDSLSDKHKKLSVDRFYHFDDNGKKVFPLEKPQKMMQRSTESCQISSKLEKLGKWKSGNDFFELTGDDQKCKTDEARREDDKCEQMNPITSVINDHSETELSAADSDLARYEKLWEVNDGRNLGVKHVDLREGKTVPVDKDRASVILEASMENMAHQETNNSISEGLVTPEVAKESHDTDECLELPSTSDASTKLDVIKDMRGSLPEPCSSGNASDFRDLGNSIPKVSPVAGTSQDTNSKLVLEVPCNGGMQCTSGSNEKLQEPSDVPNAAVSQGSNIKSLILEELKESDVCDTFPRPRPSKIEQEAE

SEQ ID NO: 109145 - protein, 793 aa, Setaria italica
  Transcript Sequence Number=SeqID_43171
  Gene Ontology: Mol. function=heat shock protein binding; Cellular component=plasma membrane
  Homolog annotation: Hit_ID=Q8RYN2; Match level="QueryCoverage=97%, HitCoverage=52%, E-value=1e-173, Identity=50%"; Hit description =Auxilin-like protein
  Pfam annotation: Domain name=DnaJ; Domain location=720-789; Score= -12.2; E_value=0.071; Accession=PF00226.23; Description=DnaJ domain
  Pfam annotation: Domain name=TolA; Domain location=398-772; Score= -151.4; E_value=0.07; Accession=PF06519.3; Description=TolA protein
  Pfam module annotation: Pfam domain module=DnaJ::TolA; Domain location=720-789::398-772
RVVLLPKQEPTDSHLKQCSGVGNEGHGNDGQFEISCMNSLPAEVHADLEMSCSFLEPCLSGGHANGNKNNSDFTAQETPLVGNSNQGNNNKEGLELPCTDEFSCTSARSQVLQEPANVPNTDEIKEGLVKISKLEESAKPYEIFEKEMLFNFVDEACLQNKNERVNEVTSESLIHEEMTKHGIEENEDARGYFQEGDVDQVSGSPEEEGYLTSGSAIANESEYEEAEVDAFLGEGKLVESNVRTCGTCDEDPYQFQESQGSWGPQDLENRMDRVEDIVSHGEEREVQKSLLENVDKILVEEVLSHDGKEGQKSMETCVYRRADGVYEEVNVRSDTDDDQFDSVHEFITDEGADYAMKMGTLSNNLQASFSEACTSMKHLSQNTESVSAEKDDFLKNLEVDCREADRKIPTEKITTLEEGQNTGSKVEERDKVAEDTASETVLESREENIGVQRTKVRNDVKETGEIEKEVLTRLDEEKEKVRKLEKEKEQDKERQRRELEEEKEREMERAKDRLAVQRATREAHERAFAEVRAKAERIALERITSARQRASAEAHEKEEKTTCQAALEKASREARMKAERAAVERATAEARERAIEKAKAAADAKERMERFRGSFKDSFKAPNQDNQHEVQFQKTASNNHGKSKDIEVVEVESALRHKAKSERHQRTAERAAKALAEKNMRDMLAQREQAEKHRLAEFLDPEVKRWSNGKEGNLRALLSTLQYILGSDSGWQPVPLTELITAAGVKKAYRKATLCVHPDKVQQRGATIRQKYICEKVFDLLKEAWNKYNSEER

SEQ ID NO: 109146 - protein, 710 aa, Setaria italica
  misc_feature (10)..(10): Xaa can be any naturally occurring amino acid
  Transcript Sequence Number=SeqID_43172
  Gene Ontology: Mol. function=heat shock protein binding; Cellular component=plasma membrane
  Homolog annotation: Hit_ID=Q9XHV5; Match level="QueryCoverage=100%, HitCoverage=49%, E-value=8e-91, Identity=54%"; Hit description =10A19I.11
  Pfam annotation: Domain name=DnaJ; Domain location=637-710; Score= -9.4; E_value=0.038; Accession=PF00226.23; Description=DnaJ domain
MQCTSGSNEXLQEPSDVPNAAVSQGSNIKSLILEELKESDVCDTFPRPRPSKIEQEAETYGREKFSFIDGSLLHNKGAKINEVLFEEVDKVEIEEKVSPYTLPEETVVDLDAECPEDENDIILQNDNLADREESNMLNVFEVASNLIKRELDQEVHGSMGHGEAENVEEGMDGLVSDVNDKEADETPLENTDKTGSEEGSDPCNWEDQKSPESTNRGQSDVDAKCDTTCDEVGSESFSGDEVAIKAASDSATRTTINSKDEQAPSSEMYTRMQHSMQKDDSATSQTSCTVPSLGETGEISNSGERELPTERSTCEEKSRASKMEEKDTAARISKAEHGPSPFETTHASPASAETWKKDSLGVQRAKERENITRADSAFEKDNWSSRKTQEAKESERRLQKERELAEEKERRKLEEEERERERKKDRLAVERATREAHERAFAEAREMAEKMALERITAARQRASAEAREKEERASAEAAAERAAREARIKAERAAVERATAEARERAIEKAKAEKALAEARERRERYRSSFKEGFKSNRDIRQESQFQRAASSNFSRNPDSVNRVVEVESALRHKARLERHQRTAERVTKALAEKNMRDVLAQREQAEKHRLSEFLDPEIKRWSNGKEGNLRALLSTLQYILGADSGWQPVPLTDLITAVAVKKAYRKATLCVHPDKLQQRGATIRQKYICEKVFDLLKDAWNKFTSEER

SEQ ID NO: 109147 - protein, 98 aa, Setaria italica
  Transcript Sequence Number=SeqID_43173
ELLLPHTRTRARRPVLPRGGMEVMRRSVHEGQVKKMGGEDNWKEERCGPQRDREWRRKGGEGKEGKEGGRRRGSSQRRRRGGSTSTAGRKAGKKMYSC

SEQ ID NO: 109148 - protein, 109 aa, Setaria italica
  Transcript Sequence Number=SeqID_43174
  Gene Ontology: Mol. function=protein serine/threonine kinase activity; Biological process=protein amino acid phosphorylation
  Homolog annotation: Hit_ID=A8W3Q3; Match level="QueryCoverage=88%, HitCoverage=14%, E-value=2e-11, Identity=41%"; Hit description =Flagellin-sensing 2-like protein (Fragment)
  Pfam annotation: Domain name=LRR_1; Domain location=30-52; Score =12.4; E_value=1.3; Accession=PF00560.25; Description=Leucine Rich Repeat
  Pfam annotation: Domain name=LRR_1; Domain location=6-28; Score=4.2; E_value=47; Accession=PF00560.25; Description=Leucine Rich Repeat
  Pfam annotation: Domain name=LRR_1; Domain location=78-100; Score =13.1; E_value=0.95; Accession=PF00560.25; Description=Leucine Rich Repeat
  Pfam module annotation: Pfam domain module=LRR_1::LRR_1::LRR_1; Domain location=30-52::6-28::78-100
EVVVVQHELLELYDNNFTGGIPPELGDLRSLQLLDLGNNTLHGGIPGRLCNCSAMWAFGAVNNNLTGALPDCIGDLSNLRFLVLFNNGLDGDLPPSFAKLTQMETLDLS

SEQ ID NO: 109149 - protein, 60 aa, Setaria italica
  Transcript Sequence Number=SeqID_43175
VECSISLFTSVRSGSFVDVFVILLFHDSIWLHSGTALIELEECSALSSELYARYSCRELL

SEQ ID NO: 109150 - protein, 70 aa, Setaria italica
  misc_feature (65)..(65): Xaa can be any naturally occurring amino acid
  Transcript Sequence Number=SeqID_43176
  Gene Ontology: Mol. function=zinc ion binding
MDSSQDSQEERHQRRENGEETEKAADYGSALSRKEATEELLGCIVHSEEEAYRLYCDYGHRIGFXVRKGK

SEQ ID NO: 109151 - protein, 167 aa, Setaria italica
  Transcript Sequence Number=SeqID_43177
FKLCNPGIINLNLLFAREMKQQKCCDDIPDLLVQFWDLPMALQEVSVTVVLPSQVHNCFSLAIGDIVVELNTGAFHSPRGERKNWMELLENAVLINMDSLIATLYNQPCKRFRYEAHAEVVFSHQAWPFLLLLIAKNLQLPWDPGGTMILMKILFHRLGGKSDLKKG

SEQ ID NO: 109152 - protein, 77 aa, Setaria italica
  Transcript Sequence Number=SeqID_43178
YSDSGSHPREIFMGGERPGRLNGARYNKSMIGWLSVPCQVPHQQLLPREQRPRPSYHHMAPICYHQIDWCSDPHVEY

SEQ ID NO: 109153 - protein, 93 aa, Setaria italica
  Transcript Sequence Number=SeqID_43179
IILIALLHQKISVEIFTAGITHGAEHRIFTRITLLFSREDVPPFPSLSALVLLYHSRSYERNTSRKLKFPLKSVTEIKSPAISLRHLRAALPC

SEQ ID NO: 109154 - protein, 162 aa, Setaria italica
  misc_feature (12)..(12): Xaa can be any naturally occurring amino acid
  misc_feature (35)..(35): Xaa can be any naturally occurring amino acid
  Transcript Sequence Number=SeqID_43180
  Gene Ontology: Mol. function=acyltransferase activity; Cellular component=integral to membrane; Biological process=metabolic process
  Homolog annotation: Hit_ID=B6SRR0; Match level="QueryCoverage=86%, HitCoverage=26%, E-value=6e-62, Identity=82%"; Hit description =Glycerol-3-phosphate acyltransferase 8
AADAARIAELLXGRADVVVCPEGTTCREPALLRFXSALFAELTDRIVPVALEARQGTYYGSTARGWKWLDPYFFYMNPRPGYEVAFLPALRAEETCGGGGRSAVEVANHVQRVIAKELGFDCTTLTRKDKYMKLAGNDGTVVVGKKGCRDDDDAGSGSKKLA

SEQ ID NO: 109155 - protein, 56 aa, Setaria italica
  Transcript Sequence Number=SeqID_43181
IYISMNFISLILELPFQSVSFLVSLICLRLAACMVLQAERYMCCLPKCFFCQPKST

SEQ ID NO: 109156 - protein, 129 aa, Setaria italica
  misc_feature (119)..(119): Xaa can be any naturally occurring amino acid
  Transcript Sequence Number=SeqID_43182
  Gene Ontology: Mol. function=DNA binding; Cellular component =intracellular
  Homolog annotation: Hit_ID=B9RDU5; Match level="QueryCoverage=86%, HitCoverage=37%, E-value=6e-30, Identity=54%"; Hit description=DNA binding protein, putative
  Pfam annotation: Domain name=ELM2; Domain location=19-75; Score=20.1; E_value=0.0012; Accession=PF01448.16; Description=ELM2 domain
MQHDSSDGCRFTSQQKNEIPIGPGYQAQVPQWTGEVPVNYDDPETLKWLGTKVWPPINGNCKALFCGDPIGKGREVVCGCNLPGSVECVRFHVAERRFKLKRELGAAFYAWGFDRMGEXIALSWTDEEE

SEQ ID NO: 109157 - protein, 54 aa, Setaria italica
  Transcript Sequence Number=SeqID_43183
SMDQGVLQTSHDQRSELLNRFELWASHINLTVYYISGTSISTLRSQQSALSSPI

SEQ ID NO: 109158 - protein, 101 aa, Setaria italica
  Transcript Sequence Number=SeqID_43184
RLQWSFQELKLWNKSVTCSCFFVFGYLQLPVLIWLICESFVNKMCSSRCCNMIFHIQQQCLGSKTRGIGSTSLRHVSTLKSQVRNRNSSLVHCFNLSNLPR

SEQ ID NO: 109159 - protein, 60 aa, Setaria italica
  Transcript Sequence Number=SeqID_43185
KNMGRLAKWQPTNKAYGFKQGQLIEFKGDYIESLHFTHYWFIGERVSPDSIGKKHPSDQQ

SEQ ID NO: 109160 - protein, 59 aa, Setaria italica
  Transcript Sequence Number=SeqID_43186
IHYKSGKYSVLRYLHDCILDVVKRDKEHLPPKTEKKLIEVRKVWIKEYYRHLMTKDRSY

SEQ ID NO: 109161 - protein, 206 aa, Setaria italica
  misc_feature (189)..(189): Xaa can be any naturally occurring amino acid
  misc_feature (205)..(205): Xaa can be any naturally occurring amino acid
  Transcript Sequence Number=SeqID_43187
  Homolog annotation: Hit_ID=Q9LI74; Match level="QueryCoverage=100%, HitCoverage=22%, E-value=8e-36, Identity=42%"; Hit description =Protein CHUP1, chloroplastic
MLVRLGFVVVASVAALTLKRVNSGGRHNKDNGQARERKDKTHHSEHGEKEEEKEEVKTISGIINSARSLDDDDDDMLSEIESLLSGDIDIPIPSDRFDVNGRSQYNAHMANEAAEIDRLRSLVREMEEREVKLEGELLEYYGMKEMETDVTELQKQLKTKTAEINMLNNTINSMQAERKKLQDEVARGXGSQEELEAATSKIKEXQ

SEQ ID NO: 109162 - protein, 173 aa, Setaria italica
  Transcript Sequence Number=SeqID_43188
  Gene Ontology: Cellular component=chloroplast
  Homolog annotation: Hit_ID=B6T2V3; Match level="QueryCoverage=60%, HitCoverage=61%, E-value=1e-51, Identity=97%"; Hit description =Photosystem II 11 kD protein
  Subcellular localization annotation: CTP_CleavageSite=28; ConfidenceScore=5.62e-01
MRTASSPVPAAVLAAPSSAAAVVKPPPRAAAPAANAAAVSTGRRDVLAGTGLAAVLLALGPACGAARAADDEYVSETKEVIGKVRSTINKDKSDPDVADAVAELRELSNSWVAKYRREKSLLGRPSFREMYSALNAVSGHYISFGPTAPIPAKRRARILEEMDTAEKALLRGR

SEQ ID NO: 109163 - protein, 39 aa, Setaria italica
  Transcript Sequence Number=SeqID_43189
LAAGLQAQGLRSLRLGDWDEFLLFIADFSSDDCSRTIQH

SEQ ID NO: 109164 - protein, 59 aa, Setaria italica
  Transcript Sequence Number=SeqID_43190
  Gene Ontology: Mol. function=protein dimerization activity
FSGPVEQPNWMEINQSVSRIAPREPNEDEFESFIEGVDDEMIQGAAQGIQEDDDDSACG

SEQ ID NO: 109165 - protein, 307 aa, Setaria italica
  misc_feature (14)..(14): Xaa can be any naturally occurring amino acid
  Transcript Sequence Number=SeqID_43191
  Homolog annotation: Hit_ID=B9SMG7; Match level="QueryCoverage=91%, HitCoverage=23%, E-value=4e-70, Identity=47%"; Hit description =Nucleotide binding protein, putative
VQRLEKEIAAPAPXPALAAFPLFVTRICFSPLWRQILFVTFPRELIVFDLSYSTALSVTPLPRGFGKFLDVMADPDLDLLYCTHVDGKLSIWKRKEGEQVHLLCAVEELMPSIGTVVPPPAVLATTIWQSESIFRNIDKQCQDLSQTNASLSFITDTNSEQNVYKGTLTYVTSISEDGKIWSWLLTFDKSAHPNKANLGRLNHSHAATANTGSNRPDFTIKINLMGQLHLLSSTVTTLAVPSPSLLATVARGGNNPAPAVPLVALGTQNGTIEVVDVVANAVSVSFSVHSSTVRGLRWLGNSRLCFY

SEQ ID NO: 109166 - protein, 196 aa, Setaria italica
  Transcript Sequence Number=SeqID_43192
RTKTCANAEDGNMVQMGAQEGNQGAQEVVLGLQAPIQEGVGLGQNVAQEGHMFVNLNINMVLTQDQQVNFSHLPKNITGSMSSLLPDCLSTPKDFNMEKQRPGQNPNVYRLWAQHFSPVGCPEQVTQIPSDWAAFFINMLMSPEHFDWAKQFLASKTWEFLLSCSNQTALMAFAIPQKCPSSTPFICSLSQEEVGT

SEQ ID NO: 109167 - protein, 78 aa, Setaria italica
  Transcript Sequence Number=SeqID_43193
YLTVINWSTATDIYKPLLQFTQRYMILTERHFENEKYVEWPWSSTINFQLNLCALKISSYVLHELFIQSVGSSNLHCG

SEQ ID NO: 109168 - protein, 124 aa, Setaria italica
  Transcript Sequence Number=SeqID_43194
  Gene Ontology: Mol. function=DNA binding; Biological process =regulation of transcription, DNA-dependent
  Homolog annotation: Hit_ID=B9GXG3; Match level="QueryCoverage=66%, HitCoverage=17%, E-value=8e-29, Identity=73%"; Hit description=High mobility group family
  Pfam annotation: Domain name=HMG_box; Domain location=49-117; Score =68.0; E_value=3.6e-17; Accession=PF00505.11; Description=HMG (high mobility group) box
EKEEEEQKKIMKQEALQLLKKKEKADNIIKKTKEKRQKKKQENVDPSRPKKPASSFLLFSKEARKQLLEERPGINNSTLNALISVKWKELSGEERQAWNDKAAPAMAAYKKEMEEYTKAHSSSA

SEQ ID NO: 109169 - protein, 62 aa, Setaria italica
  Transcript Sequence Number=SeqID_43195
  Subcellular localization annotation: CTP_CleavageSite=32; ConfidenceScore=5.15e-01
LSLVAELSGPQKQGCFPATNQRSEPAPCGRCASSLLSSRCRGTQDLPAPSRHGGAFCCLTHA

SEQ ID NO: 109170 - protein, 88 aa, Setaria italica
  misc_feature (40)..(40): Xaa can be any naturally occurring amino acid
  misc_feature (52)..(52): Xaa can be any naturally occurring amino acid
  misc_feature (62)..(62): Xaa can be any naturally occurring amino acid
  Transcript Sequence Number=SeqID_43196
EMQAKVAKEMQGVDPNATTSENKEEMDARSVFVGNVSLLXSSLSIKVLASGXISAQVLVLAXWGKEKEEKSYKEVLRKKRREKMKNRK

SEQ ID NO: 109171 - protein, 46 aa, Setaria italica
  Transcript Sequence Number=SeqID_43197
  Subcellular localization annotation: CTP_CleavageSite=9; ConfidenceScore=5.10e-01
SLYFIFFLYFFLLFSNHFFLFFIFFSFFFFKNFFIGFFLFFFPPLS

SEQ ID NO: 109172 - protein, 191 aa, Setaria italica
  Transcript Sequence Number=SeqID_43198
  Gene Ontology: Mol. function=nucleic acid binding; Cellular component= nucleus; Biological process=nuclear-transcribed mRNA poly(A) tail shortening
  Homolog annotation: Hit_ID=B4FZJ1; Match level="QueryCoverage=100%, HitCoverage=93%, E-value=4e-82, Identity=79%"; Hit description =Polyadenylate-binding protein 2
  Pfam annotation: Domain name=RRM_1; Domain location=84-152; Score =80.3; E_value=6.7e-21; Accession=PF00076.14; Description=RNA recognition motif. (a.k.a. RRM, RBD, o
MEDEEHEVYGQEIPVDGEDVDMSGAGDDAAKLQELDEMKRRLKEMEEEAAALREMQAKVAKEMQGVDPNATTSENKEEMDARSVFVGNVDYACTPEEVQQHFNSCGTVNRVTILTDKFGQPKGFAYVEFVEVEAVQEAVKLNESELHGRQLKVAPKRTNVPGMKQPRGRGFNPYHGHPYMRPYGYSPSGYG

SEQ ID NO: 109173 - protein, 233 aa, Setaria italica
  Transcript Sequence Number=SeqID_43199
  Gene Ontology: Mol. function=drug transporter activity; Cellular component=membrane; Biological process=multidrug transport
  Homolog annotation: Hit_ID=B6TU04; Match level="QueryCoverage=79%, HitCoverage=38%, E-value=4e-72, Identity=75%"; Hit description =Antiporter/ drug transporter/ transporter
  Pfam annotation: Domain name=MatE; Domain location=46-206; Score =102.3; E_value=1.7e-27; Accession=PF01554.10; Description=MatE
MTPPPPPPAEPEAPPPPPHHKHKHKHKQEQERWLAELRAQRGIALPLVGMNLTWFAKLAVTTAFLGRLGEMELAAGTLGYSFANVTGFAVLSGLCGAMEPICGQAHGARNVGLLRRTLLMATVMLLAASVPIALLWLRVDAVLLRFGQQPDIAATARTYVLCLLPDLAVTSFLNPLKAYLSSQEVTLPPLFAAALGLALHIPLTLCLSRTMGIRGVAAAVCLSDLAVAAMIAA

SEQ ID NO: 109174 - protein, 594 aa, Setaria italica
  misc_feature (514)..(514): Xaa can be any naturally occurring amino acid
  Transcript Sequence Number=SeqID_43200
  Gene Ontology: Mol. function=ferredoxin-nitrite reductase activity; Cellular component=chloroplast; Biological process=electron transport chain
  Homolog annotation: Hit_ID=P17847; Match level="QueryCoverage=92%, HitCoverage=97%, E-value=0.0, Identity=89%"; Hit description =Ferredoxin--nitrite reductase, chloroplastic (Fragment)
  Pfam annotation: Domain name=NIR_SIR; Domain location=204-364; Score =180.8; E_value=4e-51; Accession=PF01077.14; Description=Nitrite and sulphite reductase 4Fe-4S domain
  Pfam annotation: Domain name=NIR_SIR_ferr; Domain location=126-196; Score=92.9; E_value=1.1e-24; Accession=PF03460.9; Description =NitriteSulfite reductase ferredoxin-like half domain
  Pfam annotation: Domain name=NIR_SIR_ferr; Domain location=385-454; Score=90.6; E_value=5.6e-24; Accession=PF03460.9; Description =NitriteSulfite reductase ferredoxin-like half domain
  Pfam module annotation: Pfam domain module=NIR_SIR::NIR_SIR_ferr::NIR_ SIR_ferr; Domain location=204-364::126-196::385-454
  Subcellular localization annotation: CTP_CleavageSite=55; ConfidenceScore=5.74e-01
MASSASLQRFLPPSAHASSSSSSRRRPGRARAAVSLPSSSPPSAGEVPAERLEPRVEERVGGYWVLKEKYRTGLNPQEKVKIEKEPMGLFMEGGIKDLAKIPMEEIDAAKVTKDDVDVRLKWLGLFHRRKHQYGRFMMRLKLPNGVTTSEQTRYLASVIEAYGEDGCADVTTRQNWQIRGVTLPDVPAILEGLRAVGLTSLQSGMDNVRNPVGNPLAGIDPDEIVDTRPYTNLLSSYITNNSQGNPTITNLPRKWNVCVIGSHDLYEHPHINDLAYMPAVKDGKFGFNLLVGGFISPKRWGEALPLDAWVPGDDIIPVCKAILEAFRDLGNRGNRQKTRMMWLIDELGMEVFRSEVEKRMPNGVLERAAPEDLIDAKWERRDYLGVHPQKQEGLSYVGLHVPVGRLQASDMFELARLADEYGTGELRLTVEQNIVLPNVRNERLDALLAEPLLQERLSPQPSLLLKGLVACTGKQFCGQAIIETKARALQVTREVEKRVSVPRPVRMHWTGCPXNSCAQVQVADIGFMGCLTKGSDGKVCEAADIFVGGRVGSDSHLADVYKKAVPCDDLVPVVADILVERFGAVPREREEDEE

SEQ ID NO: 109175 - protein, 66 aa, Setaria italica
  Transcript Sequence Number=SeqID_43201
  Subcellular localization annotation: CTP_CleavageSite=58; ConfidenceScore=5.10e-01
TSAMAASPYLLLVLLLFHPAVAPAYRAPPPSQTPPPRPPQKVQVWPKPVSISWTDAVYAPLSPSFS

SEQ ID NO: 109176 - protein, 91 aa, Setaria italica
  Transcript Sequence Number=SeqID_43202
  Subcellular localization annotation: CTP_CleavageSite=33; ConfidenceScore=5.46e-01
KSTPGALSHTSQIVRIPAPHRSRRPRHRPAAIRATKPRLLLPRPAPLPGDPLPALRTARGGRRRRRRERCGLGGGSAAEKPHTQEFGRGRM

SEQ ID NO: 109177 - protein, 152 aa, Setaria italica
  misc_feature (20)..(20): Xaa can be any naturally occurring amino acid
  misc_feature (48)..(48): Xaa can be any naturally occurring amino acid
  misc_feature (56)..(56): Xaa can be any naturally occurring amino acid
  Transcript Sequence Number=SeqID_43203
  Gene Ontology: Mol. function=nucleotide binding; Biological process =defense response
  Homolog annotation: Hit_ID=Q84KC8; Match level="QueryCoverage=99%, HitCoverage=9%, E-value=1e-55, Identity=68%"; Hit description=NBS -LRR disease resistance protein homologue
  Pfam annotation: Domain name=NB-ARC; Domain location=1-152; Score= -117.5; E_value=0.042; Accession=PF00931.14; Description=NB-ARC domain
KGKEKGNMVMVTTRIPEVAXMVKTVDSWLELGRLEAEDFHRFFEACVXFGEEQSFXDHDALLGVGEQILDKLKGFPLAAKTVGRLLRKQLNLDHWRRVLDSKEWELQTSDNDIMPALKLSYDYLPFHLQQCFSYCALFPEGIEFDSKELIHF

SEQ ID NO: 109178 - protein, 112 aa, Setaria italica
  Transcript Sequence Number=SeqID_43204
SPPPPPGRCTRGEDGHHDLQPREHREGQEYHWYQELVRRTLGPGKRGQWTWKDPRRAAWLVKLGPLFEDLRGPPKSMLTQIGGGGGGGGKRAGGGAGGGGGGGRIMASEDEG

SEQ ID NO: 109179 - protein, 96 aa, Setaria italica
  Transcript Sequence Number=SeqID_43205
  Pfam annotation: Domain name=DUF581; Domain location=11-68; Score =82.5; E_value=1.5e-21; Accession=PF04570.6; Description=Protein of unknown function (DUF581)
EVEEGAAGCYFVVKCAAGAAPAADDFLSTCFTCKKKLEGNDIYIYRGEKAFCSANCRDQEIQLEEEAENNTASISPRSSCSSIHEDIFMAGMVVAT

SEQ ID NO: 109180 - protein, 84 aa, Setaria italica
  Transcript Sequence Number=SeqID_43206
  Pfam annotation: Domain name=DUF581; Domain location=41-78; Score =16.6; E_value=0.00019; Accession=PF04570.6; Description=Protein of unknown function (DUF581)
ARGPNPKTTHIFGDCILEPHTVGDSDEAAMEVEEGAAGCYFVVKCAAGAAPAADDFLSTCFTCKKKLEGNDIYIYRAEWSQTPP

SEQ ID NO: 109181 - protein, 263 aa, Setaria italica
  Transcript Sequence Number=SeqID_43207
  Homolog annotation: Hit_ID=Q6V8P1; Match level="QueryCoverage=43%, HitCoverage=85%, E-value=4e-18, Identity=46%"; Hit description =Putative senescence-associated protein SAG102 (Fragment)
  Pfam annotation: Domain name=DUF581; Domain location=165-222; Score =82.5; E_value=1.5e-21; Accession=PF04570.6; Description=Protein of unknown function (DUF581)
NCLLSPRLRLKSNSSLPKDCGGGGGGYSPPELGKTMSCPAPDTAAAAGMSVPCSRFHHGDLKSGPEATQSDGAQLSNGKRHSFDLGKLPGPGSLPASIAAGTRGFIGSVSASEIEQSDDYTRIIARGPNPKTTHIFGDCILEPHTVGDSDEAAMEVEEGAAGCYFVVKCAAGAAPAADDFLSTCFTCKKKLEGNDIYIYRGEKAFCSANCRDQEIQLEEEAENNTASISPRSSCSSIHEDIFMAGMVVVDVVPSYGPHVVLTN

SEQ ID NO: 109182 - protein, 281 aa, Setaria italica
  Transcript Sequence Number=SeqID_43208
  Gene Ontology: Mol. function=oxidoreductase activity; Cellular component=endoplasmic reticulum membrane; Biological process =oxidation reduction
  Homolog annotation: Hit_ID=O24479; Match level="QueryCoverage=91%, HitCoverage=79%, E-value=9e-86, Identity=59%"; Hit description=B -keto acyl reductase
  Pfam annotation: Domain name=adh_short; Domain location=13-187; Score= 53.4; E_value=8.9e-13; Accession=PF00106.17; Description=short chain dehydrogenase
PPPPRPLRRRYGEWAVVTGATDGIGRALAFRLAAAGLGVVLVGRNPDKLATVTADLKAKHPAAQVRIFVLDFTADDAAAKVGALGEFLRGLDVGVLVNNVGASYPYARYFHEVDEELTRKLIRLNVEAVTRVTHAVLPGMVERGRGAIMNMGSGASAIMPSDPLYTLYVATKAYVDQFSRCMYVEYKSKGIDVQCQVPIQVATKLASIRKPTFLAPSPEAYARAAVRRIGYEPRCTPYWTHALVGLLISLVPEPIADRMFLHRNLSIRARGRAKDAKKKAL

SEQ ID NO: 109183 - protein, 122 aa, Setaria italica
  Transcript Sequence Number=SeqID_43209
  Gene Ontology: Mol. function=oxidoreductase activity; Cellular component=endoplasmic reticulum membrane; Biological process =oxidation reduction
  Homolog annotation: Hit_ID=Q6K5K6; Match level="QueryCoverage=72%, HitCoverage=35%, E-value=9e-32, Identity=68%"; Hit description =Putative b-keto acyl reductase
MRTGDKTSCGLFASYVDQFSRCMYVEYKSKGIDVQCQVPIQVATKLASIRKPTFLAPSPEAYARAAVRRIGYEPRCTPYWTHALVGLLISLVPEPIADRMFLHRNLSIRARGRAKDAKKKAL

SEQ ID NO: 109184 - protein, 217 aa, Setaria italica
  Transcript Sequence Number=SeqID_43210
  Homolog annotation: Hit_ID=B6TBA2; Match level="QueryCoverage=100%, HitCoverage=51%, E-value=1e-110, Identity=88%"; Hit description =Kelch motif family protein
GSRTDSTEWYDATARSWRVAASMPRDRAGCVGFVAHGAGDGGEDEFWVMGGYDGYTTLAGVVPNDVYCRNAVALGLWSGKWREIGNMWEEGERRRLGPVAALSADDGRITEVFMLDGNDVFRYDFALNRWLREATMRRMIPNTESCGFVSMNGELYVLRSAKVPVEPSGPWRQLKKKLALEFQVYNPGTKKWRVLTTHPPVHAPIDFRTAALCTVEL

SEQ ID NO: 109185 - protein, 156 aa, Setaria italica
  misc_feature (15)..(15): Xaa can be any naturally occurring amino acid
  misc_feature (148)..(148): Xaa can be any naturally occurring amino acid
  Transcript Sequence Number=SeqID_43211
  Gene Ontology: Mol. function=microtubule motor activity; Cellular component=microtubule associated complex; Biological process =microtubule-based movement
ITRKIKKLEETMEHXERTQTSVSTSTIYNQPLSEDLKTDMSKNTKNSKNRREVSSRLPSFMKPTASSQQRIGLTKHIPVSNRTKPPIPPKRRPSSVYAESVRLPVNRTTWQSECSSECSISMTSNMFWMPSVQDGTECSQQDTSEYEXQQVIFSED

SEQ ID NO: 109186 - protein, 68 aa, Setaria italica
  Transcript Sequence Number=SeqID_43212
SHGIPQPLWLYLYCRNTKTRYSLSLFSIIRLWRRDGRAVQGVALELLCRLLFTEGSNPLLLVLLIHQC

SEQ ID NO: 109187 - protein, 510 aa, Setaria italica
  Transcript Sequence Number=SeqID_43213
  Gene Ontology: Mol. function=acid phosphatase activity; Cellular component=plasma membrane; Biological process=polyphosphate metabolic process
  Homolog annotation: Hit_ID=B6TC70; Match level="QueryCoverage=95%, HitCoverage=93%, E-value=0.0, Identity=83%"; Hit description=Acid phosphatase
  Pfam annotation: Domain name=Acid_phosphat_A; Domain location=57-430; Score=204.4; E_value=3e-58; Accession=PF00328.14; Description =Histidine acid phosphatase
QLLLLVAAALRAAASLRRAAGAGEFDVRRHLSTVTRYDVARGSNSVNSMPTIPDGCRVIHLNLVARHGTRAPTKKRIKELDRLSIRLEALINEAKQGLKSDSLKKIPSWIKGWESRWKGRTKGGELTSEGEEELYNLATRVKERFQDLFDDEYHPDVYSIRATQVSRASASAVAFGLGLLSGKGKLGPGNNRAFSVLSESRASDICLRFFDSCETYKAYRKRKEPDVKKQKEPVLEHVTAALVNRYHLNFTTQDVSSLWFLCKQEASLLNITNQACGLFNEAEVYFLEWTDDLEGFVLKGYGESINYRMGLPLLKDVVQSMEEAIIAKEEHHPDGTYEKARLRFAHAETVVPFSCLLGLFLEGSDFEKIQREEALDLPPMPPQGRNWKGSVVAPFAGNNMLVLYQCPGKTSDGSTFGSQNNSYVIQVLHNEIPVLMPGCGNKDFCPFEEFKEKIVKPHLKHDYDMICKIKPPVAGEEPATFSSKVSGFFTGLLSQKGYRVASAESVKTEL

SEQ ID NO: 109188 - protein, 133 aa, Setaria italica
  Transcript Sequence Number=SeqID_43214
  Gene Ontology: Mol. function=protein binding
  Homolog annotation: Hit_ID=B9RSS8; Match level="QueryCoverage=97%, HitCoverage=31%, E-value=4e-26, Identity=50%"; Hit description =Speckle-type POZ protein, putative
  Pfam annotation: Domain name=BTB; Domain location=65-133; Score=5.4; E_value=0.0051; Accession=PF00651.23; Description=BTBPOZ domain
GCSRVYTWSGELNFMKTCELETSPYLKDDRIVIECDIAVVVGTLVHASETVCEIYVPPSDLMDDLRKLLEAEKRTDITFKVEEEVFQAHKFVLAMRSPVFEAELYGPMADKRRQIMIIEDMQPAVFKALLHFI

SEQ ID NO: 109189 - protein, 165 aa, Setaria italica
  Transcript Sequence Number=SeqID_43215
  Gene Ontology: Mol. function=nucleic acid binding
  Homolog annotation: Hit_ID=Q69UJ0; Match level="QueryCoverage=96%, HitCoverage=79%, E-value=2e-44, Identity=53%"; Hit description =Putative RNA-binding protein RBP37
  Pfam annotation: Domain name=RRM_1; Domain location=1-61; Score=28.4; E_value=3e-05; Accession=PF00076.14; Description=RNA recognition motif. (a.k.a. RRM, RBD, o
  Pfam annotation: Domain name=RRM_1; Domain location=91-159; Score =28.6; E_value=2.6e-05; Accession=PF00076.14; Description=RNA recognition motif. (a.k.a. RRM, RBD, o
  Pfam module annotation: Pfam domain module=RRM_1::RRM_1; Domain location=1-61::91-159
HTVTEQILAELFQSCGNVVDCRICGDPSNGLRYGFVEFQHEEEAYAALFLDGIIIGISPLRVLPSRTAICPVNPRFLPQSEDEWEICSRTIYCTNISKTVQSSNLKAYCEAYFGKVCRLKLLDNGKRSTNLAFIEFAEVDGATAALASTTIFAGGLRARIVVPIP

SEQ ID NO: 109190 - protein, 169 aa, Setaria italica
  Transcript Sequence Number=SeqID_43216
  Gene Ontology: Cellular component=chloroplast
QAAQRLDGRFSISRRLAEASRAARERAVEIDAELGIGRRWRSFSVDFSRNWPRYRRELNDFMATPIGRALATLFFLWLALSGWLFRIFIFGTFVLPFAAPLFLGTFANRVAIEGTCPACKRRFVGYRSQVIRCMNCQNIVWQPNNSSSGGARSSRRAEADVIDVEYEEK

SEQ ID NO: 109191 - protein, 182 aa, Setaria italica
  misc_feature (29)..(29): Xaa can be any naturally occurring amino acid
  Transcript Sequence Number=SeqID_43217
  Gene Ontology: Mol. function=protein serine/threonine phosphatase activity; Cellular component=protein serine/threonine phosphatase complex; Biological process=protein amino acid dephosphorylation
  Homolog annotation: Hit_ID=B6TAL6; Match level="QueryCoverage=97%, HitCoverage=45%, E-value=7e-93, Identity=94%"; Hit description =Catalytic/ protein phosphatase type 2C
  Pfam annotation: Domain name=PP2C; Domain location=1-182; Score= -54.3; E_value=0.01; Accession=PF00481.13; Description=Protein phosphatase 2C
ENGTISENVVRSAFAATEEGFLTLVRRTXFIKPLIAAVGSCCLVGVIWRGTLYVANLGDSRAVIGRLGRSNKIVAEPLTRDHNASMEEVRHELISRHPDDSQIVVLKHGVWRIKGIIQVSRTIGDAYLKRREFALDPSITRFRLSEPLRRPVLTAEPSIYTRALHPQDKFIIFASDGHTSLS

SEQ ID NO: 109192 - protein, 132 aa, Setaria italica
  Transcript Sequence Number=SeqID_43218
  Homolog annotation: Hit_ID=A8I426; Match level="QueryCoverage=100%, HitCoverage=9%, E-value=5e-60, Identity=81%"; Hit description =Required to maintain repression 1
DKPEQDGAIDMLWADFDFALESENIGTYYDDEGQEEGNQLEFALAPVTPCSRGKHEFIIDDQIGIRCKYCSLVNLEIKFMFPSLVSGFAEKSAWPNAKGVKNALMFHDLYDEAGGATEHSQDFHLYGTVWDL

SEQ ID NO: 109193 - protein, 209 aa, Setaria italica
  Transcript Sequence Number=SeqID_43219
  Gene Ontology: Mol. function=protein serine/threonine kinase activity; Biological process=protein amino acid phosphorylation
  Homolog annotation: Hit_ID=B8QUI7; Match level="QueryCoverage=67%, HitCoverage=27%, E-value=1e-35, Identity=61%"; Hit description=NPKL1
AVHRIGYTDAVPEVPAWMSAEAKDFLARCFARNPRDRCTAAQLLEHPFLASAGCGVKTEEVAARWVSPKSTLDAALWESDSDDSDDEGDVSESPTQRIKELAGACSALPDWDSDEGDWIQVLNEQCDKACHLVPVKEAAKEMAGEDKRLLLLSEALETKVDFIDADAESDDPECSAAVGLTAPSIEQQEDCCSCSWSDPSVIAVATCRI

SEQ ID NO: 109194 - protein, 52 aa, Setaria italica
  Transcript Sequence Number=SeqID_43220
  Gene Ontology: Mol. function=calcium-dependent phospholipid binding; Cellular component=cytoplasm
  Homolog annotation: Hit_ID=Q43863; Match level="QueryCoverage=86%, HitCoverage=14%, E-value=3e-17, Identity=93%"; Hit description =Annexin-like protein RJ4
NSRPQLLVPLVSAYRYDGPEVNTRLAHSEAKILHEKIHHKAYSDDEIIRTPH

SEQ ID NO: 109195 - protein, 314 aa, Setaria italica
  Transcript Sequence Number=SeqID_43221
  Gene Ontology: Mol. function=calcium-dependent phospholipid binding; Cellular component=cytoplasm
  Homolog annotation: Hit_ID=Q43863; Match level="QueryCoverage=100%, HitCoverage=100%, E-value=1e-162, Identity=89%"; Hit description =Annexin-like protein RJ4
  Pfam annotation: Domain name=Annexin; Domain location=15-80; Score =101.1; E_value=3.8e-27; Accession=PF00191.12; Description=Annexin
  Pfam annotation: Domain name=Annexin; Domain location=170-235; Score =68.1; E_value=3.3e-17; Accession=PF00191.12; Description=Annexin
  Pfam annotation: Domain name=Annexin; Domain location=245-310; Score =101.9; E_value=2.1e-27; Accession=PF00191.12; Description=Annexin
  Pfam annotation: Domain name=Annexin; Domain location=87-152; Score =80.5; E_value=6.2e-21; Accession=PF00191.12; Description=Annexin
  Pfam module annotation: Pfam domain module=Annexin::Annexin::Annexin:: Annexin; Domain location=15-80::170-235::245-310::87-152
MATLKVPATVPAVADDCEQLRKAFQGWGTNEALIISILGHRDAAQRRAIRRAYAETYGEELLRSITDEISGDFERAVILWTLDPAERDAVLANEAARKWQPGNRVLVEIACTRGSAQLFAVRQAYHERFKRSLEEDIAAHVTGDFRKLLVPLVSAYRYDGPEVNTRLAHSEAKMLHEKIHHKAYSDDEIIRILTTRSKAQLLATFNYYNDAFGHPINKDLKADPKDEYLKTLRAIIRCLTCPDRYFEKVVRQAIAGLGTDESSLTRVITTRAEVDLKHIKEAYQKRNSVPLERAVAGDTSGDYESMLLALLGQE

SEQ ID NO: 109196 - protein, 92 aa, Setaria italica
  Transcript Sequence Number=SeqID_43222
ISFLSALSICQELVVAALNLLWLWLCLIHTVACLVVSCANFTTSRSCMCFHYTLSVYNLELVTSYELTSVILAIRSDVYLGWQSGYNPYSQR

SEQ ID NO: 109197 - protein, 94 aa, Setaria italica
  Transcript Sequence Number=SeqID_43223
  Gene Ontology: Cellular component=integral to membrane; Biological process=transport
  Homolog annotation: Hit_ID=B6SSF8; Match level="QueryCoverage=76%, HitCoverage=34%, E-value=1e-32, Identity=87%"; Hit description =Transmembrane emp24 domain-containing protein 10
CFLQVTSPYGNTLHHNENATVGQFAFTTAEAGNYLACFWIDSAEKGSGVSVNLDWKIGFATKDWDAIAKKEKLRLDMNCSTKPQFYPIVMNSYS

SEQ ID NO: 109198 - protein, 207 aa, Setaria italica
  Transcript Sequence Number=SeqID_43224
  Gene Ontology: Mol. function=protein binding; Cellular component =integral to membrane; Biological process=transport
  Homolog annotation: Hit_ID=B6SSF8; Match level="QueryCoverage=89%, HitCoverage=89%, E-value=1e-94, Identity=89%"; Hit description =Transmembrane emp24 domain-containing protein 10
  Pfam annotation: Domain name=EMP24_GP25L; Domain location=20-202; Score=206.4; E_value=7.5e-59; Accession=PF01105.16; Description =emp24gp25Lp24 family
MAAALALAVVLAVASLRAEAVWLEVPQSGTKCVSEEIQSNVVVLADYSIMYESHPDSHPTIAVKVTSPYGNTLHHNENATVGQFAFTTAEAGNYLACFWIDSAEKGSGVSVNLDWKIGFATKDWDAIAKKEKIEGVELELQKLEVAVQAIHQNLIYLKTREAEMRIVSEKTNARVAWFSILSLGVCIAVSILQLWHLQGFFRKKKLI

SEQ ID NO: 109199 - protein, 50 aa, Setaria italica
  Transcript Sequence Number=SeqID_43225
SAKYLDHWLFILFCDEMIMHTCLCIRIIQNSSHQLFGFNQHGSMRYGLLD

SEQ ID NO: 109200 - protein, 92 aa, Setaria italica
  Transcript Sequence Number=SeqID_43226
RHTNSVLFHMAVVRSNTVRSMCTALCILLIMSSALSELVEDHTECDPMDSCTDPKCEDECQNKNTDLPIEPECTTPKECCCTFYREEDNALL

SEQ ID NO: 109201 - protein, 90 aa, Setaria italica
  Transcript Sequence Number=SeqID_43227
APKWMMLNRGGSRYITLTTGQSLVSYAHNKNVAHKSISIFIRSTNHKCNMAIHVTTATQELPITCVQFITTFVTVVYIRTTLKREIVKRT

SEQ ID NO: 109202 - protein, 61 aa, Setaria italica
  Transcript Sequence Number=SeqID_43228
MGCFGCFAPEADEGDGDHKPSKPDDSSGADARRKVAPDVANGYAHSFTFKDLLVATGYFNE

SEQ ID NO: 109203 - protein, 149 aa, Setaria italica
  Transcript Sequence Number=SeqID_43229
  Gene Ontology: Mol. function=oxidoreductase activity; Biological process=oxidation reduction
  Homolog annotation: Hit_ID=B3TLL6; Match level="QueryCoverage=99%, HitCoverage=47%, E-value=9e-51, Identity=62%"; Hit description =Aldose reductase
  Pfam annotation: Domain name=Aldo_ket_red; Domain location=1-149; Score=0.1; E_value=6.2e-08; Accession=PF00248.13; Description =Aldoketo reductase family
PSVGLGTYKAGPGVVGDAIAAAVKAGYRHIDCASLYNNEKEIGVALKKVFADGVVKREDLFVTSKIWCSDLAPEDVSLAIDSTLNDLQLDYLDLYLIHWPFQIKKGSEISRENFIQFDMPKTWQAMEKLYDFGKARAVGVSNFTTKKLA

SEQ ID NO: 109204 - protein, 530 aa, Setaria italica
  misc_feature (57)..(57): Xaa can be any naturally occurring amino acid
  misc_feature (375)..(375): Xaa can be any naturally occurring amino acid
  Transcript Sequence Number=SeqID_43230
  Gene Ontology: Mol. function=protein serine/threonine kinase activity; Cellular component=ubiquitin ligase complex; Biological process=protein amino acid phosphorylation
  Homolog annotation: Hit_ID=A1YKF2; Match level="QueryCoverage=98%, HitCoverage=63%, E-value=1e-172, Identity=61%"; Hit description =Serine threonine kinase
  Pfam annotation: Domain name=Pkinase_Tyr; Domain location=441-530; Score=-160.4; E_value=0.0046; Accession=PF07714.9; Description =Protein tyrosine kinase
  Pfam annotation: Domain name=Usp; Domain location=10-165; Score=29.1; E_value=1.8e-05; Accession=PF00582.18; Description=Universal stress protein family
  Pfam module annotation: Pfam domain module=Pkinase_Tyr::Usp; Domain location=441-530::10-165
GKEPPNRNKTTTVAVAISGSRSSRHALKWALDKFVPEGRVLFRILHVRPAITMVPTXPMGNFIPISQVREDVASAYRKEAEWQASNMLLPFKKMCAQKKVEAEAVLLESDDVAAAISEEIGKFNICKLVLGSSSKNIFRRKLKGSKTATKISESIPSFCTAFVISKGKLSFVRSATSDIVETPRSISSSTVSSPSSRSLSSCTPSEWGDTYGTANVSFRQPSLPLQRDQALAIINNLSNRRASSSGSVVSEISNNDDPALTSSHSIISEMQFSSGSSGNSIYKSFHRDNLTDNSDRASVSEISENVNHSNDQDDLRLQIERLRDKLQHFHKLHECAQQESFDTTQKLHKLRTQHIEDEIKLKETELTEDRVRRLXRKKEMEEHKAGREAEFKQCSGEIEEKHSYSGQEANENETGKKIAGRCFDDYNRYTWEEIQASTSSFSSALMIGKGSYGTVYKAKFHHTVAAVKVLNSPEGCGTQQLQQELEVLGKIRHPHLLMMLGACPEHGCLVYEYMENGSLDDMLQRRNNTP

SEQ ID NO: 109205 - protein, 161 aa, Setaria italica
  misc_feature (27)..(27): Xaa can be any naturally occurring amino acid
  misc_feature (49)..(49): Xaa can be any naturally occurring amino acid
  Transcript Sequence Number=SeqID_43231
IAKHLPAHGQRGQNFWNSCIKKKLIAXGLDPKTHNLLPASRSLLHGNGXANPSNNPAQFHSNGATANGGATTPFTISSPTKAAAYDTVTAPPPPEMSAPAMYDVVTNPAGMFTGHDQAAAAAIPAGYPYPDNGGGVLMSFRDQNAGLQTSMDFMNGSSRSS

SEQ ID NO: 109206 - protein, 80 aa, Setaria italica
  Transcript Sequence Number=SeqID_43232
RVYVSTYIKNRSDPFKTCFEHYVKFLKSSCIMQVHWKSTPCSKQSLSAYAGISVHRNERIVPDSYRQYIIQLFATCKRSC

SEQ ID NO: 109207 - protein, 181 aa, Setaria italica
  Transcript Sequence Number=SeqID_43233
  Gene Ontology: Mol. function=nucleoside diphosphate kinase activity; Cellular component=flagellum; Biological process=CTP biosynthetic process
  Homolog annotation: Hit_ID=B4FLD7; Match level="QueryCoverage=100%, HitCoverage=100%, E-value=3e-75, Identity=79%"; Hit description =Nucleoside diphosphate kinase
  Pfam annotation: Domain name=NDK; Domain location=37-173; Score =132.5; E_value=1.3e-36; Accession=PF00334.11; Description=Nucleoside diphosphate kinase
MAGGTSPAARALVNRWLPQLLLIFIFGCCSCCAVETERTLAMIKPDGLSGNYTEKIKVAILDYGFHIVKETEVQFDDERASLFYAEHSGRSFFGSLIKYITSGPVLAMVLERPDAIAQWRALIGPTDARKAKTSHPNSIRAMCGLDSEKNCVHGSDSPESAAREISFFFGDGLETVEHDEL

SEQ ID NO: 109208 - protein, 72 aa, Setaria italica
  Transcript Sequence Number=SeqID_43234
TYIQVKACASSEEWVMRLGRFLRAGREQTDLLDALLQLLRSAARLPLRLLAPGAARKCRRRDLVYTEMQCRG

SEQ ID NO: 109209 - protein, 189 aa, Setaria italica
  misc_feature (22)..(22): Xaa can be any naturally occurring amino acid
  Transcript Sequence Number=SeqID_43235
  Pfam annotation: Domain name=DUF567; Domain location=20-184; Score =17.5; E_value=6.7e-06; Accession=PF04525.4; Description=Protein of unknown function (DUF567)
MEQPAAFAPPPAPAPVPLLGPXVPVDFTVFKKGTEMAMHDATGRLAFRIAGGGGGDGGTALFDGAGGVLVTVRTSGQGEWQAFSGNSMEHRHIIFTAKVMSASSSRKEVHVFIPPISSFEGSKPIYRLLGSTFRRACTIIKGDSIVAQTNLLYKLKKTLYSRRKFRVTIYPGNDNILIMAMIMTFFVEK

SEQ ID NO: 109210 - protein, 47 aa, Setaria italica
  Transcript Sequence Number=SeqID_43236
QYRFSVAAVLIELLMLRCGIAIAAPPYIGFVNNSINTAATLNLYTTM

SEQ ID NO: 109211 - protein, 268 aa, Setaria italica
  Transcript Sequence Number=SeqID_43237
  Gene Ontology: Mol. function=hydrolase activity, acting on ester bonds; Biological process=lipid metabolic process
  Homolog annotation: Hit_ID=B9SYX7; Match level="QueryCoverage=95%, HitCoverage=44%, E-value=3e-76, Identity=54%"; Hit description=Zinc finger protein, putative
  Pfam annotation: Domain name=Lipase_GDSL; Domain location=2-259; Score=87.3; E_value=5.3e-23; Accession=PF00657.14; Description=GDSL -like LipaseAcylhydrolase
LGLPPLVPAYLDPAYGIQDFARGVCFASAGTGLDNKTAGVLSVIPLWKEVEYFKEYQRRLRRHAGRAAARRIVSDALYVVSIGTNDFLENYFLLVTGRFAEFTAAEFEDFLVAEAERFLAEIHRLGARRVTFAGLSPIGCLPLERTLNSLRGGCIEEYNQVARDYNDKLLAMFRRLTASRPSLKVAYINVYQNMLDLITNPSTLGLENVEEGCCATGKVEMSYLCNDKNPLTCEDAGKYFFWDSFHPTEKVNQFFAKKTLDLCYEQLL

SEQ ID NO: 109212 - protein, 62 aa, Setaria italica
  Transcript Sequence Number=SeqID_43238
AVQFCSSCLFEARIGFASSGSFFHGSVSPFLLALGSALCDVIYFVELQFSFHYLLKMVLSLI

SEQ ID NO: 109213 - protein, 102 aa, Setaria italica
  Transcript Sequence Number=SeqID_43239
RADAVPDVRGPLRPPGSDGDGHRTAGGRLRPRVHKIRSLPVPPLLRNRRCFPQIGIEIEQGSTTSHRVQEFLGISNPYPSMIHVFLPRSIPSPPPLLLLMFV

SEQ ID NO: 109214 - protein, 167 aa, Setaria italica
  misc_feature (118)..(118): Xaa can be any naturally occurring amino acid
  Transcript Sequence Number=SeqID_43240
  Gene Ontology: Mol. function=RNA-directed DNA polymerase activity; Cellular component=chromatin; Biological process=RNA-dependent DNA replication
  Homolog annotation: Hit_ID=Q2QSH9; Match level="QueryCoverage=99%, HitCoverage=11%, E-value=1e-42, Identity=52%"; Hit description =Retrotransposon protein, putative, unclassified, expressed
EMYLCCAVHDSPKKWKAWLSLAELWYNSSYHTTIGCSLFKALYGYEANSGVTVPRTDREPSEVVELIQDREAQLTNLKHCLAAAQNRMKMQAGTKRNDRQFQVGEQVLLKLQPCTQHXVVSRPFPKLAFKFFGPFRVLIFSRAAAYKLELLDNSLIHLVFHVSQLKP

SEQ ID NO: 109215 - protein, 81 aa, Setaria italica
  Transcript Sequence Number=SeqID_43241
  Gene Ontology: Cellular component=plasma membrane
  Homolog annotation: Hit_ID=O22632; Match level="QueryCoverage=92%, HitCoverage=92%, E-value=3e-15, Identity=56%"; Hit description =Nitrate-induced NOI protein
  Pfam annotation: Domain name=NOI; Domain location=1-74; Score=120.9; E_value=4.1e-33; Accession=PF05627.3; Description=Nitrate-induced NOI protein
MAAEKGSPLPKFGEWDVNDPASAEGFTVIFNKARDEKKTGGNSQGQDEQVKNEQQSSGQGFNAPKAGNTWWSLANNWMGQP

SEQ ID NO: 109216 - protein, 107 aa, Setaria italica
  Transcript Sequence Number=SeqID_43242
  Gene Ontology: Cellular component=plasma membrane
  Homolog annotation: Hit_ID=O22633; Match level="QueryCoverage=35%, HitCoverage=48%, E-value=1e-13, Identity=94%"; Hit description=NOI protein
  Pfam annotation: Domain name=NOI; Domain location=24-98; Score=103.8; E_value=5.7e-28; Accession=PF05627.3; Description=Nitrate-induced NOI protein
MCFLMCPLAISGTVRGIVGQQSACTGLEKGSPLPKFGEWDVNDPASAEGFTVIFNKARDEKKTGGNSQGQDEQVKNEQQSSGQGFNAPKAGNTVRTYLLYHLTVPFP

SEQ ID NO: 109217 - protein, 63 aa, Setaria italica
  Transcript Sequence Number=SeqID_43243
VSFINNVVLLIFHNWMFCHVQGCFIVLVHLTFYPFRIMYFFSQEKCLFLYLVDSNFGNKALSH

SEQ ID NO: 109218 - protein, 83 aa, Setaria italica
  Transcript Sequence Number=SeqID_43244
  Gene Ontology: Cellular component=plasma membrane
  Homolog annotation: Hit_ID=A1XFD3; Match level="QueryCoverage=100%, HitCoverage=100%, E-value=2e-18, Identity=60%"; Hit description =Nitrate-induced NOI protein-like protein
  Pfam annotation: Domain name=NOI; Domain location=1-76; Score=144.5; E_value=3.3e-40; Accession=PF05627.3; Description=Nitrate-induced NOI protein
MAAEKGSPLPKFGEWDVNDPASAEGFTVIFNKARDEKKTGGNSQGQDEQVKNEQQSSGQGFNAPKAGNTKKWLCCFQPSAAES

SEQ ID NO: 109219 - protein, 198 aa, Setaria italica
  Transcript Sequence Number=SeqID_43245
  Gene Ontology: Mol. function=receptor activity; Cellular component =integral to membrane
  Homolog annotation: Hit_ID=Q6EUE9; Match level="QueryCoverage=74%, HitCoverage=67%, E-value=6e-64, Identity=82%"; Hit description =Antigen receptor-like
  Pfam annotation: Domain name=DUF565; Domain location=136-198; Score =116.0; E_value=1.3e-31; Accession=PF04483.4; Description=Protein of unknown function (DUF565)
  Subcellular localization annotation: CTP_CleavageSite=52; ConfidenceScore=5.17e-01
MLLQRGAPPCAPRAPSSGLCGGGSSPAAQCCIPLSWACFLRPTKENSRGALSYQMKNCRLRPAFALETGGPSNTDGQDFDEDSGFLGRTRLGRLIQAAGRELLEKLNSGSTNSPTKIFLVLLGFYTANALATILGQTGDWDVLVAAVVVAAIEGIGMLMYRKPIARPPGRLQKLISMVNYWKAGVCLGLFVDAFKLGS

SEQ ID NO: 109220 - protein, 148 aa, Setaria italica
  Transcript Sequence Number=SeqID_43246
  Gene Ontology: Mol. function=calcium ion binding; Cellular component =spindle microtubule
  Homolog annotation: Hit_ID=Q84VG0; Match level="QueryCoverage=100%, HitCoverage=100%, E-value=4e-78, Identity=97%"; Hit description =Probable calcium-binding protein CML7
  Pfam annotation: Domain name=efhand; Domain location=120-148; Score =9.1; E_value=2.1; Accession=PF00036.24; Description=EF hand
  Pfam annotation: Domain name=efhand; Domain location=13-41; Score =31.1; E_value=4.5e-06; Accession=PF00036.24; Description=EF hand
  Pfam annotation: Domain name=efhand; Domain location=84-112; Score =24.2; E_value=0.00055; Accession=PF00036.24; Description=EF hand
  Pfam module annotation: Pfam domain module=efhand::efhand::efhand; Domain location=120-148::13-41::84-112
MGGKDLTEDQIASMREAFSLFDTDGDGRIAPSELGVLMRSLGGNPTQAQLRDIAAQEKLTAPFDFPRFLDLMRAHLRPEPFDRPLRDAFRVLDKDASGTVSVADLRHVLTSIGEKLEPHEFDEWIREVDVAPDGTIRYDDFIRRIVAK

SEQ ID NO: 109221 - protein, 108 aa, Setaria italica
  Transcript Sequence Number=SeqID_43247
LGGVHLHRLNEMIERRESGAAAAVASGGWTMPSPRPRVEPGIWNPAPERIIRARTPTEELPPLKIFHAPASAAASRPHNFCVRDARFALLLSAAAVRPATAASATNDD

SEQ ID NO: 109222 - protein, 148 aa, Setaria italica
  Transcript Sequence Number=SeqID_43248
  Gene Ontology: Mol. function=transcription regulator activity; Cellular component=nucleus; Biological process=regulation of transcription
  Homolog annotation: Hit_ID=Q8H8E4; Match level="QueryCoverage=82%, HitCoverage=30%, E-value=1e-30, Identity=65%"; Hit description =Putative bHLH transcription protein
MELDEETFLDELMSLRREASASAPWQGYQPGGGVMMSDLLFYGGEAGADATSSGGMDLSPFQELAPIQPVAPPQRPHEDFNFDCLSEVCNPYRSCVAVPEEAAPGQTLVAPLHDAMAEEETSGDKGLYYGGGGSPTFVFGGGAGESSE

SEQ ID NO: 109223 - protein, 126 aa, Setaria italica
  Transcript Sequence Number=SeqID_43249
TSTQTSPQFTASKKMLDPLQTLNKYIVSRNWLTGECRCMKEAEWWLVRGHDIMWTRTQPSSQGGAAEPSQKIQQLGVLLVLGSENRDAVCRWLGDKAITHEPNYAILFSYAANHDTCRLQSMLVRW

SEQ ID NO: 109224 - protein, 436 aa, Setaria italica
  Transcript Sequence Number=SeqID_43250
  Gene Ontology: Mol. function=RNA methyltransferase activity; Cellular component=chloroplast; Biological process=RNA processing
  Homolog annotation: Hit_ID=Q94FY8; Match level="QueryCoverage=95%, HitCoverage=87%, E-value=0.0, Identity=88%"; Hit description =Probable tocopherol cyclase, chloroplastic
APSFVRSAASAAAAPVYAPTPQDRPLRTPHSGYHFDGTSRPFFEGWYFKVSIPEIRQSFGFMYSVENPLFRDGMSDLDKLVHGPRFTGVGAQILGADDKYIFQFSEKSNNFWGSRHELALGNTFIPNKDSIPPQGEVPPQEFSKRVLEGFQVTPIWHQGFIRDNGRSKYVPNVQTARWEYSTRPVYGWGDVNSKQLSTAGWLAAFPFFEPHWQICMAGGLSTGWIEWDGERFEFENAPSYSEKNWGGAFPRKWYWIQCNVFSGASGEVSLTAAGGLRKIGLGDTYESPSLIGIHCDGNFFEFVPWTGTVSWDIALWGCWKMSGENKTHLVEIEATTTEPGSTLRAPTTEAGLAPACKDTFYGDLRLQLWEKKYDGGKGKLILDATSNMAALEIGGGPWFNGWKGTTVVNEVVNNVVGTPIDVESLFPVPFLKPPGL

SEQ ID NO: 109225 - protein, 107 aa, Setaria italica
  Transcript Sequence Number=SeqID_43251
  Pfam annotation: Domain name=4HBT; Domain location=1-71; Score=42.3; E_value=1.9e-09; Accession=PF03061.14; Description=Thioesterase superfamily
VSALLAEALASMGAHMASGYRRVVGMQLSINHFRAAALGDTVLARALPVHVGRSTQVWEVKLWKMDPSTGEKGPQIAESRVTLLSNLPLPEEHKNAGDALKKYASKL

SEQ ID NO: 109226 - protein, 119 aa, Setaria italica
  misc_feature (1)..(1): Xaa can be any naturally occurring amino acid
  misc_feature (8)..(8): Xaa can be any naturally occurring amino acid
  Transcript Sequence Number=SeqID_43252
  Homolog annotation: Hit_ID=Q0AWL3; Match level="QueryCoverage=77%, HitCoverage=75%, E-value=1e-11, Identity=43%"; Hit description=ComA operon protein (Competence protein)
  Pfam annotation: Domain name=4HBT; Domain location=27-107; Score =44.5; E_value=4.1e-10; Accession=PF03061.14; Description =Thioesterase superfamily
XGFEMEEXSPSRVAGRLLVTPTCCQPFRALHGGVSALLAEALASMGAHMASGYRRVVGMQLSINHFRAAALGDTVLARALPVHVGRSTQVLRVIPPLLINSSPSSPSPILSIEAALNRS

SEQ ID NO: 109227 - protein, 215 aa, Setaria italica
  Transcript Sequence Number=SeqID_43253
  Gene Ontology: Cellular component=integral to membrane; Biological process=intracellular signaling cascade
  Homolog annotation: Hit_ID=B6U914; Match level="QueryCoverage=96%, HitCoverage=45%, E-value=1e-72, Identity=71%"; Hit description =Presenilin
  Pfam annotation: Domain name=Presenilin; Domain location=13-214; Score=-205.6; E_value=0.00044; Accession=PF01080.9; Description =Presenilin
LRVLLELAIERNEEIPALVYEARPVDPRHGRNWRLWREGRQPGADLDASSTTVDVTGEVSGRRLDANSGNSSAPQVHEATISAGNVNNSRPRETLAAALSSDSTVEQAGEVSALREHRVAVAEMRVPLIQPRPERSGEEEEDEDGIGLSSSGAIKLGLGDFIFYSVLVGRAAMYDYMTVYACYLAIIAGLGITLLLLAFFRKALPALTRCSYSSF

SEQ ID NO: 109228 - protein, 403 aa, Setaria italica
  Transcript Sequence Number=SeqID_43254
  Gene Ontology: Mol. function=metal ion binding
  Homolog annotation: Hit_ID=Q2HV40; Match level="QueryCoverage=64%, HitCoverage=73%, E-value=2e-99, Identity=70%"; Hit description=Zinc finger, RING-type
  Pfam annotation: Domain name=zf-C3HC4; Domain location=325-363; Score= 19.0; E_value=0.00068; Accession=PF00097.17; Description=Zinc finger, C3HC4 type (RING finger)
MGNAGSNGGGAAPGHRRRSSSHGHGHHHQAPPPPPPQEAAPNRYVFAAATPYPPQYPNPNPSQHYPQYNYYPPPPPSVPVPLPAPYDHHHRPPTAAAGEFPPPPPAHPHHYPGWAGRYPSYGPHLPMPTPYVEHQKAVTIRNDVNLKKETLRIEPDEECPGRFLVSFTFDATVAGSMTVYFFAKEELNCNLTAVKEDLIKPVTVSFKEGLGQKFRQPSGTGIDFSVFEESDLLKQGEMDVYPLAVKAETALSVDPPLEGEDQKMKTPNSQITQAVFEKKENGEYQVRVVCQILWVNGTRYELQEIYGIGNSMEGDTDANDPGKECVICLSEPRDTTVLPCRHMCMCSECAKVLRYQTTRCPICRQPVERLLEIKVSNRSEDQQQAPQSPPRPPPTPQQEDVHP

SEQ ID NO: 109229 - protein, 55 aa, Setaria italica
  Transcript Sequence Number=SeqID_43255
QWGCVDRLNMLSVHYAHKVFAVLPERCWRVLAKALDGNFKLSLPGSSKLSLLYLI

SEQ ID NO: 109230 - protein, 80 aa, Setaria italica
  Transcript Sequence Number=SeqID_43256
MATAPAHAAAAVAAGEAVMYHGRVETRSTPPRLGFRPGARWAAISLPPGPRHAAPAAAAAKERGRWGEGEGPAVGWSWEP

SEQ ID NO: 109231 - protein, 135 aa, Setaria italica
  Transcript Sequence Number=SeqID_43257
  Gene Ontology: Mol. function=oxidoreductase activity, acting on the CH-OH group of donors, NAD or NADP as acceptor
  Homolog annotation: Hit_ID=Q9LMM9; Match level="QueryCoverage=82%, HitCoverage=10%, E-value=7e-10, Identity=33%"; Hit description =F22L4.6 protein
PPAWEIDCVPAAGAAASASAFEVYVAGCCAGEPAVLTGALRLATPEEAAGGLVRRRPGALAAAGDEGDNDMNTSSMQYPEGWYSEDDDGQLSWFNAGVRVGVGIGLGVCVGVGIGVGLLMRSYQATTRNLKRRFF

SEQ ID NO: 109232 - protein, 70 aa, Setaria italica
  misc_feature (3)..(3): Xaa can be any naturally occurring amino acid
  Transcript Sequence Number=SeqID_43258
TLXAGSLFPLFISNFCLYYMPYMCMLFFVIQLVVWYDPFLYTLYTEKQMIPPYIYVLLAFKHFMDFESSK

SEQ ID NO: 109233 - protein, 110 aa, Setaria italica
  Transcript Sequence Number=SeqID_43259
  Gene Ontology: Cellular component=membrane
  Homolog annotation: Hit_ID=Q5JJV4; Match level="QueryCoverage=95%, HitCoverage=53%, E-value=4e-46, Identity=87%"; Hit description=YGGT family protein-like
  Pfam annotation: Domain name=YGGT; Domain location=17-99; Score=72.2; E_value=1.9e-18; Accession=PF02325.9; Description=YGGT family
SSSAALAVLGELDPATAKTVAGVAGPALSAFGFLFILRIVMSWYPRLPVTEFPYVLAYAPTEPFLAVTRRVIPPLGGVDVTPVVWFGLVSFLNEILVGPQGLLILLSQQV

SEQ ID NO: 109234 - protein, 81 aa, Setaria italica
  misc_feature (72)..(72): Xaa can be any naturally occurring amino acid
  Transcript Sequence Number=SeqID_43260
  Subcellular localization annotation: CTP_CleavageSite=49; ConfidenceScore=5.66e-01
SPRLAPMFDGGHSSSAHMNKPYSGTIMASSAAARAAATMAPQTSMAFLSTASLSSTTSTEEDGTSLYHMEGXNPQLLPFLP

SEQ ID NO: 109235 - protein, 46 aa, Setaria italica
  Transcript Sequence Number=SeqID_43261
  Subcellular localization annotation: CTP_CleavageSite=20; ConfidenceScore=5.02e-01
LSLGLGLPFLAATTGRVAPPASSSSGALPATSIRTKVPIDSGRDQA

SEQ ID NO: 109236 - protein, 88 aa, Setaria italica
  Transcript Sequence Number=SeqID_43262
  Gene Ontology: Mol. function=transcription regulator activity; Cellular component=nucleus
  Homolog annotation: Hit_ID=B6TPC2; Match level="QueryCoverage=89%, HitCoverage=35%, E-value=3e-36, Identity=91%"; Hit description =Repressor of RNA polymerase III transcription MAF1
  Pfam annotation: Domain name=Maf1; Domain location=1-88; Score=-5.2; E_value=8.4e-05; Accession=PF09174.2; Description=Maf1 regulator
HPFVNICSLISAVRAHLFFQEEEMESFKQMIDTYLSDASRQWAATNEGSSLLDSMTKAIDEVIKIRECDIYSYNPDSDGDPVQEKGAI

SEQ ID NO: 109237 - protein, 117 aa, Setaria italica
  Transcript Sequence Number=SeqID_43263
  Gene Ontology: Mol. function=transcription regulator activity; Cellular component=nucleus; Biological process=negative regulation of transcription from RNA polymerase III promoter
  Homolog annotation: Hit_ID=B6TPC2; Match level="QueryCoverage=77%, HitCoverage=40%, E-value=6e-42, Identity=87%"; Hit description =Repressor of RNA polymerase III transcription MAF1
  Pfam annotation: Domain name=Maf1; Domain location=1-71; Score=6.2; E_ value=1.3e-05; Accession=PF09174.2; Description=Maf1 regulator
DASRQWAATNEGSSLLDSMTKAIDEVIKIRECDIYSYNPDSDGDPVQEKGAIWSFYYFFYNRKLKRVVSFRCYCTSKLSGDDFLAGMGHNALYYTHNRFRAECGQSYVHVDQGIFLF

SEQ ID NO: 109238 - protein, 67 aa, Setaria italica
  Transcript Sequence Number=SeqID_43264
SNHPNSMKTSSSTHRYIYIYSSYPSVLIRIAGITREIAIDPCRMLVAGEAPVARRRTGGRNSPCRRR

SEQ ID NO: 109239 - protein, 145 aa, Setaria italica
  Transcript Sequence Number=SeqID_43265
  Gene Ontology: Mol. function=transcription regulator activity; Cellular component=nucleus; Biological process=negative regulation of transcription from RNA polymerase III promoter
  Homolog annotation: Hit_ID=B6TPC2; Match level="QueryCoverage=100%, HitCoverage=64%, E-value=6e-67, Identity=91%"; Hit description =Repressor of RNA polymerase III transcription MAF1
  Pfam annotation: Domain name=Maf1; Domain location=25-143; Score =55.8; E_value=1.7e-13; Accession=PF09174.2; Description=Maf1 regulator
MKFLEYTPFDSINLFLDQLNLGDCAIRGNLEAFSCKHTSTDRRLSISLEHEILDYLGKSSDSDPSSPVEHLSSRSSRKTLIYLVLTLGHMYPDYDFSAVRAHLFFQEEEMESFKQMIDTYLSDASRQWAATNEGQVLLLDSMTKA

SEQ ID NO: 109240 - protein, 173 aa, Setaria italica
  Transcript Sequence Number=SeqID_43266
  Gene Ontology: Mol. function=transcription regulator activity; Cellular component=nucleus; Biological process=negative regulation of transcription from RNA polymerase III promoter
  Homolog annotation: Hit_ID=B6TPC2; Match level="QueryCoverage=90%, HitCoverage=70%, E-value=6e-83, Identity=92%"; Hit description =Repressor of RNA polymerase III transcription MAF1
  Pfam annotation: Domain name=Maf1; Domain location=1-142; Score =188.3; E_value=2.2e-53; Accession=PF09174.2; Description=Maf1 regulator
IKFNTRKSSDSDPSSPVEHLSSRSSRKTLIYLVLTLGHMYPDYDFSAVRAHLFFQEEEMESFKQMIDTYLSDASRQWAATNEGSSLLDSMTKAIDEVIKIRECDIYSYNPDSDGDPVQEKGAIWSFYYFFYNRKLKRVVSFRCYCTSKLSGDDFLTGAASDGEEEDALIDMDI

SEQ ID NO: 109241 - protein, 438 aa, Setaria italica
  misc_feature (252)..(252): Xaa can be any naturally occurring amino acid
  Transcript Sequence Number=SeqID_43267
  Homolog annotation: Hit_ID=B6UAN0; Match level="QueryCoverage=100%, HitCoverage=100%, E-value=0.0, Identity=79%"; Hit description=DNA binding protein
  Pfam annotation: Domain name=ELM2; Domain location=302-350; Score =11.9; E_value=0.014; Accession=PF01448.16; Description=ELM2 domain
  Pfam annotation: Domain name=PHD; Domain location=210-258; Score =26.7; E_value=3.1e-05; Accession=PF00628.21; Description=PHD-finger
  Pfam annotation: Domain name=zf-CW; Domain location=354-412; Score= -0.5; E_value=0.032; Accession=PF07496.7; Description=CW-type Zinc Finger
  Pfam module annotation: Pfam domain module=ELM2::PHD::zf-CW; Domain location=302-350::210-258::354-412
MTPKWSECSSNSYRELSSHENGECKSTLTEKVPLPKSCFDLPTANTMCSLSAQKKDGNVYKRRKMDKDSNSLTTYEEAKETMTQNCATSDDHSSLVLPVVSSEAMPFNSTANTTGPILDCEEATEVSLEPNSATNGRSLVSSMSPSSMVLDKKDAAECSSSNISPTEPITEHMSPRDLCIAILKKDGLITESRARIKDDFTDSDANPMLACNTCGCLEHSLKMLICDSCEAAFHLSCCAPPIKELPTDEWYXAPCLCKKPKSVYGKLSEGKVLPSRNTNQRPHGMSHIDYMLKDAEPYVTGVRIGRDFQAEVPEWSGSTSSSDGYFDEPSEFDPAELTNFNLCKTSNQSQSSIGNWIQCRETLNPGDSDKQVVCGKWRRAPLYVVQTDDWECFCCLLWDPAHADCAVPQELKTSEVQKQLRFVNMVKKQLVDQNQNPA

SEQ ID NO: 109242 - protein, 140 aa, Setaria italica
  Transcript Sequence Number=SeqID_43268
  Gene Ontology: Cellular component=integral to membrane; Biological process=vesicle-mediated transport
  Homolog annotation: Hit_ID=Q339R2; Match level="QueryCoverage=77%, HitCoverage=55%, E-value=9e-49, Identity=89%"; Hit description=Got1 -like family protein, expressed
  Pfam annotation: Domain name=Got1; Domain location=30-130; Score =217.2; E_value=4.4e-62; Accession=PF04178.4; Description=Got1-like family
MVSFEMNDLKKIGLGLTGFGIFFSFLGIIFFFDKGLIAMGNILFLSGLGLTIGLKSTMQFFTKPKNYKGTISFGVGFFLVLIGWPFFGMLLEAYGFIVLFSGFWPTLVVFLQRIPIIGWIFQQPFVTSFLDRYRGKRVPV

SEQ ID NO: 109243 - protein, 148 aa, Setaria italica
  Transcript Sequence Number=SeqID_43269
  Gene Ontology: Cellular component=vacuole
  Homolog annotation: Hit_ID=B6TUH5; Match level="QueryCoverage=79%, HitCoverage=47%, E-value=1e-53, Identity=82%"; Hit description=Gamma- interferon-inducible lysosomal thiol reductase
  Pfam annotation: Domain name=GILT; Domain location=30-139; Score =129.6; E_value=1e-35; Accession=PF03227.8; Description=Gamma interferon inducible lysosomal thiol reductase (GILT)
MAARLGVPALLLLLACSLAAAAGDEGPGKVAVALYYETLCPYSARFVVDHLARVFEDGLLDAVGLTLVPYGNARVHAGGEITCQHGPNECLLNTVEACAIDAWPDLDVHFRFIYCVEELVMKRQYKKWDSCFQKLGLDPKPVRSCSSQ

SEQ ID NO: 109244 - protein, 477 aa, Setaria italica
  misc_feature (323)..(323): Xaa can be any naturally occurring amino acid
  Transcript Sequence Number=SeqID_43270
  Gene Ontology: Mol. function=receptor activity; Cellular component =integral to membrane
  Homolog annotation: Hit_ID=Q2R2X1; Match level="QueryCoverage=100%, HitCoverage=92%, E-value=0.0, Identity=91%"; Hit description=Lung seven transmembrane receptor family protein, expressed
  Pfam annotation: Domain name=Lung_7-TM_R; Domain location=134-422; Score=512.8; E_value=4.6e-151; Accession=PF06814.5; Description=Lung seven transmembrane receptor
REVGNAFLLSGGSEGIVADGADLAAPPSSFIKFVNVTFWRTPEAAESHTKMAHSTGLVQAILFEAADRDNIGGSAYGGQRSICCTPDLAKLEGCKQGEVIRRPSSDDPDWPYVLDTHFSANHLSVKLEDESVRVTKTGMYNLFFISCDPKLRGLTMSGKTIWRNPGGYLPGRMAPLMKFYVLMSLAYLLVMIVWFSQYIRFWRDILPIQNWITLVIALGLFEMTLWYFEYLNFNSSGVRPVGITTWVVTVGAIRKTVSRLLILSISMGYGVVRPTLGGLTSKVLLLGLTYFLASEMLDIAENVGTINDISGKARLFLVLPDAXFLDAFLILWIFTSLSRTLEKLQARRSSVKLDIYRKFTNSLAISVIASVAWIGYEVYFKATDPFSERWQSAWIITAFWDVLAFVLLVVICYLWAPSQSSQRYAYSGEAADDDDEEAQSLTKGDGEVGMVKIDKDRNVGVSNAYSLEDEAEEDKRE

SEQ ID NO: 109245 - protein, 257 aa, Setaria italica
  Transcript Sequence Number=SeqID_43271
  Gene Ontology: Mol. function=oxidoreductase activity; Cellular component=vacuole; Biological process=antigen processing and presentation of exogenous peptide antigen via MHC class II
  Homolog annotation: Hit_ID=B6U3P7; Match level="QueryCoverage=84%, HitCoverage=86%, E-value=1e-101, Identity=83%"; Hit description =Gamma-interferon-inducible lysosomal thiol reductase
  Pfam annotation: Domain name=GILT; Domain location=32-141; Score =132.8; E_value=1.1e-36; Accession=PF03227.8; Description=Gamma interferon inducible lysosomal thiol reductase (GILT)
MIAPHPRRLLLLPAVLVLLAAGALLPEAAAKVSLGLYYESLCPYCSRFIVNRLAGIFEDGLIDAVDLRLVPYGNARVGSNGDISCQHGPNECLLNTVEACAIDAWPDLDVHFRFIYCVEELVMKRQYKKWDSCFQKLGLDPKPVTDCYKSEQGHKLELKYANQTNALVPPHRYVPWVVVDGQPLLEDYENFEVYICKAYKGSNPPKVCEGLVHPAMALETAVARHGVSYNSGGIELATAEEEGRESKIKMRLPDNDN

SEQ ID NO: 109246 - protein, 46 aa, Setaria italica
  Transcript Sequence Number=SeqID_43272
HVVLVPRKQLVWIVKKSFLPLTTPPSSVFSLKPRNYPIFVHMIYHV

SEQ ID NO: 109247 - protein, 140 aa, Setaria italica
  Transcript Sequence Number=SeqID_43273
IKNVPTKKENSGLSDLSIKKRKLKQRQSSQHDLDLGHSNTDINAKQNITETNVVKKKPRPELKLSKTGRTAAHSKGTDAGTDDDRISAHNECVSEQRQENTRLQYPLLSESSTRWNVCHAPTSTAATSSSSKVSNSHKCK

SEQ ID NO: 109248 - protein, 653 aa, Setaria italica
  Transcript Sequence Number=SeqID_43274
  Gene Ontology: Mol. function=catalytic activity; Cellular component =plasma membrane; Biological process=metabolic process
  Homolog annotation: Hit_ID=Q2I824; Match level="QueryCoverage=91%, HitCoverage=90%, E-value=0.0, Identity=79%"; Hit description=ACS -like protein
  Pfam annotation: Domain name=AMP-binding; Domain location=75-544; Score=277.2; E_value=3.7e-80; Accession=PF00501.20; Description=AMP -binding enzyme
PTSLRLRTLLPRFTSGEERRCRTWWRSSRAARPPMAAPPWGPPTGAPSPATDSRPRMLGHREIVDGKAGAYVWKTYKEVFDIANKIGNSIRSCGLAKGSRCGIYGANCPEWIITMEACNAHGIYCVPLYDTLGAGAVEFILCHAEVEIAFAEEKKIELLLKTLPKSNEFLKTIVSFGKVTQEQKEEASKFGLSIYSWDEFLSLEADQEFDLPVKEKTDICTIMYTSGTTGDPKGVLISNASIICLIAGVDRLLNCVNEELAESDVYMSYLPLAHIFDRVVEELFIFHGASIGFWRGDVKLLVEDIGVLKPTILCAVPRVLDRIFSGLQAKISSGGFIKSTLFNLAYKFKQFRMMRGAKHDEAAAICDKVVFSKVKEGLGGNVRVILSGAAPLATHVEEYLRVVTCAHVIQGYGLTETCAGSFVSLPNQMSMVGTVGPPVPNIDVRLESVPEMNYDALARTARGEICIKGETLFSGYYKREDLTKEVLVDGWFHTGDIGEWQPDGSMKIIDRKKNIFKLSQGEYVAVENLENIYGLVSAIDSIWIYGNSFESFLVAVVNPNKEALESWAAANGISGDFESLCQNPKAKEYILGELSRIGKEKKLKGFEFIKDVHLEPVPFDMDRDLITPTYKKKRPQLLKYYQGVIDNMYKSAK

SEQ ID NO: 109249 - protein, 158 aa, Setaria italica
  Transcript Sequence Number=SeqID_43275
  Gene Ontology: Mol. function=aminoacyl-tRNA ligase activity; Cellular component=cytoplasm; Biological process=tRNA aminoacylation for protein translation
  Homolog annotation: Hit_ID=B6TBG7; Match level="QueryCoverage=62%, HitCoverage=19%, E-value=2e-45, Identity=89%"; Hit description=Seryl- tRNA synthetase
  Pfam annotation: Domain name=Seryl_tRNA_N; Domain location=69-158; Score=51.3; E_value=3.8e-12; Accession=PF02403.14; Description=Seryl- tRNA synthetase N-terminal domain
  Subcellular localization annotation: CTP_CleavageSite=34; ConfidenceScore=5.55e-01
LSSSAATTTASFSPLRTLTRSLLRRPHPRLLFCSSAAAATTAVEPDTKVGSGAGAGGGGALRPQWKASIDFKWIRDNRDAVADNIRSRNSAANLDLVLKLYDQYLALQKEVERLRAERNAVANKMKGKLDPSVRQALVEEGKNLKEALIGLEEDLVEL

SEQ ID NO: 109250 - protein, 61 aa, Setaria italica
  Transcript Sequence Number=SeqID_43276
  Subcellular localization annotation: CTP_CleavageSite=52; ConfidenceScore=5.74e-01
SRLATAGGSSGASRSRSRHPPDPPNLFFSSKLAPLKQRHSTSPTPCSLSSPSASTEQAITN

SEQ ID NO: 109251 - protein, 60 aa, Setaria italica
  Transcript Sequence Number=SeqID_43277
  Subcellular localization annotation: CTP_CleavageSite=48; ConfidenceScore=5.25e-01
ASHCSQFFPLVMHPTHGKGWHPTLKPITISLRLHTGLCANPCRTTSPRQRQVESLVRTFD

SEQ ID NO: 109252 - protein, 75 aa, Setaria italica
  Transcript Sequence Number=SeqID_43278
  Gene Ontology: Mol. function=calcium ion binding; Cellular component =flagellin-based flagellum
  Homolog annotation: Hit_ID=Q84MN0; Match level="QueryCoverage=100%, HitCoverage=48%, E-value=6e-31, Identity=88%"; Hit description =Calmodulin-like protein 4
  Pfam annotation: Domain name=efhand; Domain location=11-39; Score =34.5; E_value=4.2e-07; Accession=PF00036.24; Description=EF hand
  Pfam annotation: Domain name=efhand; Domain location=47-75; Score =36.7; E_value=9.4e-08; Accession=PF00036.24; Description=EF hand
  Pfam module annotation: Pfam domain module=efhand::efhand; Domain location=11-39::47-75
MEGLTGEQRIAFQEAFSLFDKNGDGCITMEELAAVTRSLGLDPSDQELNDMMSEVDTDGNGIIDFQEFQSLIARK

SEQ ID NO: 109253 - protein, 62 aa, Setaria italica
  Transcript Sequence Number=SeqID_43279
KCCMQISQRKYSYRTAQRKTKIQLSQSELKEIRSSTRIGNTRRPQQLLNIIQPEMNIAIAEI

SEQ ID NO: 109254 - protein, 130 aa, Setaria italica
  misc_feature (73)..(73): Xaa can be any naturally occurring amino acid
  misc_feature (90)..(90): Xaa can be any naturally occurring amino acid
  Transcript Sequence Number=SeqID_43280
  Gene Ontology: Mol. function=aspartic-type endopeptidase activity; Cellular component=chromatin; Biological process=chromatin assembly or disassembly
  Homolog annotation: Hit_ID=Q7XCD6; Match level="QueryCoverage=89%, HitCoverage=7%, E-value=1e-19, Identity=47%"; Hit description =Retrotransposon protein, putative, unclassified
FNINILQECTVLDLESWLKERNLLTQLIQQQLLRAQQRMKALADSQRSEREFQEGDMVYLKLQPHLQSSVAPXGNNKLSFRFCSLKSAQXVGAVAYKLELPPQAQIHPVIHVAQLKKHVPTMTEVSLCLH

SEQ ID NO: 109255 - protein, 203 aa, Setaria italica
  Transcript Sequence Number=SeqID_43281
  Gene Ontology: Mol. function=nucleic acid binding; Cellular component= intracellular; Biological process=mRNA processing
  Homolog annotation: Hit_ID=Q7XLQ4; Match level="QueryCoverage=100%, HitCoverage=31%, E-value=1e-109, Identity=96%"; Hit description =OSJNBa0044M19.2 protein
  Pfam annotation: Domain name=KH_1; Domain location=104-178; Score =23.5; E_value=0.00085; Accession=PF00013.21; Description=KH domain
AAEMDPEVHALNARLLEISRLLQSGLPLDDRPEGARSPSPEPVYDNLGIRINTREYRARERLNRERQEIISQLIRRNPAFKPPSDYRPPKLQKKLYIPMKEYPGYNFIGLIIGPRGNTQKRMEKETGAKIVIRGKGSVKEGKLLQKRDLKPDPSENEDLHVLVEAETQEALDAAAGMVEKLLTPVDEVLNEHKRQQLRELAAL

SEQ ID NO: 109256 - protein, 503 aa, Setaria italica
  Transcript Sequence Number=SeqID_43282
  Gene Ontology: Mol. function=nucleic acid binding; Cellular component= spliceosome; Biological process=mRNA processing
  Homolog annotation: Hit_ID=B9R9V5; Match level="QueryCoverage=56%, HitCoverage=35%, E-value=1e-115, Identity=73%"; Hit description=Zinc finger protein, putative
  Pfam annotation: Domain name=RRM_1; Domain location=211-281; Score =96.5; E_value=9.1e-26; Accession=PF00076.14; Description=RNA recognition motif. (a.k.a. RRM, RBD, o
  Pfam annotation: Domain name=zf-CCHC; Domain location=114-131; Score =9.1; E_value=0.021; Accession=PF00098.15; Description=Zinc knuckle
  Pfam annotation: Domain name=zf-CCHC; Domain location=88-105; Score =19.5; E_value=0.00035; Accession=PF00098.15; Description=Zinc knuckle
  Pfam module annotation: Pfam domain module=RRM_1::zf-CCHC::zf-CCHC; Domain location=211-281::114-131::88-105
METGAKIVIRGKGSVKEGKLLQKRDLKPDPSENEDLHVLVEAETQEALDAAAGMVEKLLTPVDEVLNEHKRQQLRELAALNGTIRDDEFCRTCGEPGHRQYACPNKMNTFKSDVQCKICGDGGHPTIDCPVKGTSGKKMDDEYQNFLAELGGGSAPESMTKSGGPMLALTGSGGSGGASAGSGSNPPWSAGGGAAAIGANGIKKDYDETNLYIGYLPPTMDDAGLISLFSQFGDIVMAKVIKDRNTGHSKGYGFVKYSDVSQANAAIAAMNGHHFEGRVIAVRVAGKPPQPAPAVSAPPSYPPTDPTSGGYSSQSYMGAPPPPPPGSYTPVPWGHPPPYASYPPPPPGSSVYNPAPPAPGQTAPPPYGVQYPPPPPPPAAPIPPPGTAASSDGAQNYPPGVTPPSSGAPTHPAPAPVYASSGAPNAPPMYPPPPYSYSTYYPTYQPPPPPPPASVDPSQSIATAPWATHNAVPPPPPPLSSTTDQPASYGADAEYDKFMSEMK

SEQ ID NO: 109257 - protein, 93 aa, Setaria italica
  Transcript Sequence Number=SeqID_43283
DMIQCTFLCTSVYNKEFLNRLYACFMLFPSVSMCSGLLTRPHLFHVVSTFLTGLIFLGAYTNLIYFLLEVWDSHLNLAVCCCDLCRGCMLKKA

SEQ ID NO: 109258 - protein, 69 aa, Setaria italica
  Transcript Sequence Number=SeqID_43284
MEGAAAQMAVPVLGIIAAAAVTFYTVSFMQLRDKSFEELDEKYSEFDDESGGRQRRARRRAERERKRRN

SEQ ID NO: 109259 - protein, 159 aa, Setaria italica
  Transcript Sequence Number=SeqID_43285
  Gene Ontology: Mol. function=binding; Biological process=methylation
  Homolog annotation: Hit_ID=B9RTQ1; Match level="QueryCoverage=97%, HitCoverage=53%, E-value=4e-36, Identity=39%"; Hit description =Pentatricopeptide repeat-containing protein, putative
  Pfam annotation: Domain name=PPR; Domain location=99-133; Score=21.1; E_value=0.0046; Accession=PF01535.12; Description=PPR repeat
VISSDSYCQTRNYKAALLLFAEMKRSGVVPDQLILATVLSACRHLRHLRIGKTIHSYMLVSDILINAHLSSALINLYASCAKMDIAEKLYNGMPRKDLVSSTAMVFGYAKNRKVEIARSIFDGMPEKDVVSWSAMISGYAESNQPNEALSLFSDMQEHG

SEQ ID NO: 109260 - protein, 118 aa, Setaria italica
  misc_feature (68)..(68): Xaa can be any naturally occurring amino acid
  Transcript Sequence Number=SeqID_43286
DEDRYLCNLVPENEHVGVDEEVMYLEKTPCEGANMAVIVHKNQDKEKDVSEAESADEDEDELEIESGXELEDDQELVGHEAEHIPNMEYDKEDPSMIVGSTYPSMAEFKIALSQHAIK

SEQ ID NO: 109261 - protein, 192 aa, Setaria italica
  Transcript Sequence Number=SeqID_43287
  Gene Ontology: Cellular component=plasma membrane
  Homolog annotation: Hit_ID=Q851R0; Match level="QueryCoverage=100%, HitCoverage=30%, E-value=3e-90, Identity=85%"; Hit description =Nodulin family protein, putative, expressed
  Subcellular localization annotation: CTP_CleavageSite=33; ConfidenceScore=5.08e-01
ICGVGGTLTAIDNMGQIGQSLGYPAKSINTFVSLISIWNYAGRVTSGFASEIFLTRYRFPRPLMLTLVLLLSCVGHLLIAFGVPQSLYAASVVIGFCFGAQWPLLFAIISEVFGLKYYSTLYNFGSVASPIGAYVLNVRVAGGLYDAEAARQHGGSLAGGDKTCIGVQCFRKAFLIITAATVAGALVSLVLV

SEQ ID NO: 109262 - protein, 95 aa, Setaria italica
  misc_feature (83)..(83): Xaa can be any naturally occurring amino acid
  Transcript Sequence Number=SeqID_43288
  Gene Ontology: Mol. function=transferase activity, transferring glycosyl groups
  Homolog annotation: Hit_ID=B6U4S0; Match level="QueryCoverage=93%, HitCoverage=12%, E-value=2e-10, Identity=51%"; Hit description =Transferase, transferring glycosyl groups
PIAFLFNRFPAVYVTDERPQQIDLPSHGGFESVGSVVKRDSAGVIGVNVEAQDSSEKISRSSEDSHNGIDTDSSSISTEPKAXPPPKIEQPVTYP

SEQ ID NO: 109263 - protein, 127 aa, Setaria italica
  Transcript Sequence Number=SeqID_43289
  Gene Ontology: Biological process=response to stress
  Homolog annotation: Hit_ID=Q10FT7; Match level="QueryCoverage=74%, HitCoverage=32%, E-value=2e-39, Identity=77%"; Hit description =Hsp20/alpha crystallin family protein, expressed
  Pfam annotation: Domain name=HSP20; Domain location=19-109; Score =20.1; E_value=4.7e-05; Accession=PF00011.13; Description=Hsp20alpha crystallin family
MDATRASNRAYEEYDPSVEWSRGADVDSVRITLPGFKREDIRVLVDNHGHLRTRGERQIAGTRWSRFQKDFQLPDNCNVDGIRAKFESETLTITLPKKTASPPAAAPVAAPSQRIPPPALPELPGRP

SEQ ID NO: 109264 - protein, 73 aa, Setaria italica
  Transcript Sequence Number=SeqID_43290
RTSQYKLFLCKPQHLNMKLFTFNNRKVIFDCKETINLACFASVHLFGRPSGKLFNTVQTDYSSVQVKYVLFKS

SEQ ID NO: 109265 - protein, 89 aa, Setaria italica
  Transcript Sequence Number=SeqID_43291
MQRSNSFGTSWADQWDYGGDASPRAPRDSGHAGKAGGGGGVGEKTKAAAATGLRKVKEGTAHGFQWIKDKCQKKSTGGKKQQGSEVAGY

SEQ ID NO: 109266 - protein, 603 aa, Setaria italica
  Transcript Sequence Number=SeqID_43292
  Gene Ontology: Cellular component=integral to membrane
  Homolog annotation: Hit_ID=A3KBV8; Match level="QueryCoverage=90%, HitCoverage=92%, E-value=0.0, Identity=66%"; Hit description=IGN1
  Pfam annotation: Domain name=Ank; Domain location=140-174; Score =10.7; E_value=1; Accession=PF00023.22; Description=Ankyrin repeat
  Pfam annotation: Domain name=Ank; Domain location=175-207; Score =24.2; E_value=0.00055; Accession=PF00023.22; Description=Ankyrin repeat
  Pfam annotation: Domain name=Ank; Domain location=209-241; Score =14.3; E_value=0.32; Accession=PF00023.22; Description=Ankyrin repeat
  Pfam annotation: Domain name=Ank; Domain location=243-275; Score =31.2; E_value=4.2e-06; Accession=PF00023.22; Description=Ankyrin repeat
  Pfam annotation: Domain name=Ank; Domain location=277-307; Score =22.9; E_value=0.0014; Accession=PF00023.22; Description=Ankyrin repeat
  Pfam annotation: Domain name=Ank; Domain location=311-344; Score =16.3; E_value=0.13; Accession=PF00023.22; Description=Ankyrin repeat
  Pfam annotation: Domain name=Ank; Domain location=87-116; Score=15.5; E_value=0.21; Accession=PF00023.22; Description=Ankyrin repeat
  Pfam module annotation: Pfam domain module=Ank::Ank::Ank::Ank::Ank::An k::Ank; Domain location=140-174::175-207::209-241::243-275::277 -307::311-344::87-116
  Subcellular localization annotation: CTP_CleavageSite=64; ConfidenceScore=5.88e-01
SPARPVLVMSRSSNRLDQSSPASSPATARGPVLVMSGSSNRLDSSQPSPSPSPSPTAAAAVLVLSNSGKRMDQAGRKKYVKQVTGRHNDTELHLAAQRGDLEAVRQIIAEIDAQMTGTGEEFDSEVAEIRAAIVNETNEVEETALLIAAEKGFLDIVVELLKHSDKESLTRKNKSGFDALHVAAKEGHRDIVKVLLDHDPSLGKTFGQSNVTPLITAAIRGHTEVVNLLLDRVSGLVELSKANGKNALHFAARQGHVEIVKALLDADTQLARRTDKKGQTALHMAVKGTSAEVVQALVNADPAIVMLPDRNGNLALHVATRKKRSEIVNVLLLLPDMNVNALTRDRKTAFDIAEGLPLSEESQEIKECLARAGAVRANDLNQPRDELRKTVTEIKKDVHTQLEQARKTNKNVYGIAKELRKLHREGINNATNSVTVVAVLFATVAFAAIFTVPGGNDDHGVAVAVHAAAFKVFFIFNAIALFTSLAVVVVQITVVRGETKAERRVVEVINKLMWLASVCTTVAFISSSYIVVGRHFQWAALLVTLIGGVIMAGVLGTMTYYVVKSKRTRKIRKKVKSTRRSGSNSWQHNSEFSDSEIDRIYAI

SEQ ID NO: 109267 - protein, 56 aa, Setaria italica
  Transcript Sequence Number=SeqID_43293
TARLTVLETQLREVQINREVAFPLSEAGLRWCCCWKSSVVLCGQLVLCALNSILVG

SEQ ID NO: 109268 - protein, 168 aa, Setaria italica
  misc_feature (25)..(25): Xaa can be any naturally occurring amino acid
  Transcript Sequence Number=SeqID_43294
  Gene Ontology: Mol. function=binding
  Homolog annotation: Hit_ID=B9T1U9; Match level="QueryCoverage=63%, HitCoverage=26%, E-value=2e-26, Identity=55%"; Hit description =Tetratricopeptide repeat protein, putative
FGADREVQKIVSLLDKLENAMKNGXGQLRSKRLASLVSSLNGVTLKSSHKKATISKLSEGLNKAVAVLGKVILLIRHDNIAPLYYLTCDLDQSYFILSVYGLRNDAIKEGDRVILYEPYYRILDASWKDKCYQFRSIRVDFPEQILINENAPAPHHVAHASIHAHNKP

SEQ ID NO: 109269 - protein, 359 aa, Setaria italica
  misc_feature (81)..(81): Xaa can be any naturally occurring amino acid
  Transcript Sequence Number=SeqID_43295
  Gene Ontology: Mol. function=binding; Cellular component=cytoplasm; Biological process=response to DNA damage stimulus
  Homolog annotation: Hit_ID=B9T1U9; Match level="QueryCoverage=84%, HitCoverage=78%, E-value=1e-120, Identity=68%"; Hit description =Tetratricopeptide repeat protein, putative
EKAAALRARADAALALLDALPPEQKKSPQQRGVFEYLRGKILDVFPDYHKEAEDHLSKAVKLNPSLVDAWLCLGSCIWKKXGDLSAAKNCFMSALRKGSDKKILCQLSMLERSMAQGSEDPAVLVEESIQHAKEAVMLDIKDGNSWYNMGNAYLTSFFVGGAWDHTKLHHSVKAYQNAEKDKTMSLNPDLCYNCATADKYLENYERALRGFEAAALKDPGLGADREVQKIVSLLDKLENAMKGQLRSKRLASLVSSLNGVTLKSSHKKATISKLSEGLNKAVAVLGKVILLIRHDNIAPLYYLTCDLDQSYFILSVYGLRNDAVRPLECSRSKECALCSLIILIVIFCLIFVSSWLCNV

SEQ ID NO: 109270 - protein, 262 aa, Setaria italica
  Transcript Sequence Number=SeqID_43296
  Homolog annotation: Hit_ID=Q8GRM2; Match level="QueryCoverage=99%, HitCoverage=18%, E-value=1e-82, Identity=60%"; Hit description=COP1 -interacting protein 7 (CIP7)-like
KLKEDWKLQREEKEAMLKAMHESLERSKAEMIAKFSRSADVPDSTYVSHYSQKIPPLQSARKNKDQGVDSFLVEEELNSDYLSGDGSSRSADSRKHFSNKVASTQNQKTSVAPIHKRSSRTVSSSYANRRNPPENPLAQSVPNFSDLRKENTRPSPGLRRATTRVQQKSFARSKSIIEESKSILKEDQSRRSQSMRKSQIPDELKDSPSVNEDVYNWAPSRISNNESEGAFAYSTRRTGPPKAFLRKGNGTHPVVGIAGFQD

SEQ ID NO: 109271 - protein, 153 aa, Setaria italica
  Transcript Sequence Number=SeqID_43297
  Homolog annotation: Hit_ID=Q8GRM2; Match level="QueryCoverage=95%, HitCoverage=10%, E-value=7e-70, Identity=86%"; Hit description=COP1 -interacting protein 7 (CIP7)-like
MLMFADAEKWGSAQMPFAGVNASQQPRKDVSKGLKKLWKFGRKNRGGDGLVNDWVSASTASECDDDMEDGRDLVVGSSDDFRKSRMGYLASYDGFVENEVFAEQEQSLRSSIPNPPANFRLREDQLSGSSLKAPRSFFSLSTFRSKGGDARLR

SEQ ID NO: 109272 - protein, 484 aa, Setaria italica
  misc_feature (40)..(40): Xaa can be any naturally occurring amino acid
  misc_feature (297)..(297): Xaa can be any naturally occurring amino acid
  Transcript Sequence Number=SeqID_43298
  Homolog annotation: Hit_ID=Q8GRM2; Match level="QueryCoverage=97%, HitCoverage=35%, E-value=1e-142, Identity=58%"; Hit description=COP1- interacting protein 7 (CIP7)-like
TQDPQNFRRQITPAPHNESTYSAEDDMVINSSIESESSFXEEPGFIQGHTRMSNKADSNVSTRSRLKTSAKPVEETLMKDKDILTSPSSEEHFRMIDKEIEGVAHEVPASSEQIPQNDIRGPRLRTKDIRTEAEVIGRKDQPSRTFEKISGGVKSKASSNSRANVRGSSGRDEVTSTETEVHDVRVQRNRPARKAEDVGRKVTAGSDSDCSGRQGTNLSRQSSITDQELNMQARIRPGKGNQDRHGELQMKANELEKLYAAHKLTSSRRVKPTDVQVDSTPMVSEVKPIAALPDTIXTKQVVKESITTNDCDANELLKMVNNPGYNISTPQKLGILSLEESRGKFYEQYMQKRDAKLKEDWKLQREEKEAMLKAMHESLERSKAEMIAKFSRSADVPDSTYVSHYSQKIPPLQSARKNKDQGVDSFLVEEELNSDYLSGDGSSRSADSRKHFSNKVASTQNQKTSVAPIHKRSSRTVSSSYANR

SEQ ID NO: 109273 - protein, 297 aa, Setaria italica
  Transcript Sequence Number=SeqID_43299
  Homolog annotation: Hit_ID=Q8GRM2; Match level="QueryCoverage=97%, HitCoverage=20%, E-value=1e-106, Identity=67%"; Hit description=COP1- interacting protein 7 (CIP7)-like
MRKSQIPDELKDSPSVNEDVYNWAPSRISNNESEGAFAYSTRRTGPPKAFLRKGNGTHPVVGIAGFQAAAAMMANALQHNESSGDFEDQQEDSPDDAKEEEEYESIEENLRESDFPADSDSENPRVSHEFGNSDDPGSENGDVHFPSEVTGLGGTKFTAFTGNVHNPTGDLPAPWSSRLPQLFPYANDNSDGDAFADSPSGSPSPWNSHSLDEITDADVSRMRKKWGSAQMPFAGVNASQQPRKDVSKGLKKLWKFGRKNRGGDGLVNDWVSASTASECDDDMEDGRDLVSKEYLLE

SEQ ID NO: 109274 - protein, 170 aa, Setaria italica
  Transcript Sequence Number=SeqID_43300
  Gene Ontology: Mol. function=sequence-specific DNA binding; Cellular component=intracellular; Biological process=regulation of transcription, DNA-dependent
  Homolog annotation: Hit_ID=Q9SLG0; Match level="QueryCoverage=58%, HitCoverage=70%, E-value=7e-25, Identity=50%"; Hit description =Nuclear transcription factor Y subunit B-1
  Pfam annotation: Domain name=CBFD_NFYB_HMF; Domain location=17-82; Score=74.8; E_value=3.2e-19; Accession=PF00808.15; Description =Histone-like transcription factor (CBFNF-Y) and archaeal histone
  Pfam annotation: Domain name=Histone; Domain location=14-85; Score =14.4; E_value=0.0033; Accession=PF00125.16; Description=Core histone H2AH2BH3H4
  Pfam module annotation: Pfam domain module=CBFD_NFYB_HMF::Histone; Domain location=17-82::14-85
SLSNSTKIGATEAPEERKIPRATVARIMRKATPPNSKIGADAKEAVDQCLVEFAAFITQVAAEECRRDKRTTVTGDDLILAFKNLGFDDYVGTLTLYLRRYREIEGNMPRARHSTMRSQGAPPAPAALTVEAAAAPSSGLTLQLGPPSVPDVTELGLHADVYAVWRGGWQ

SEQ ID NO: 109275 - protein, 61 aa, Setaria italica
  Transcript Sequence Number=SeqID_43301
DPWDLSLILYWINLPRMLKHIGIWLIFFVAGMLNCLPIRTNHNRFIKTRFHLSYWKLDLIS

SEQ ID NO: 109276 - protein, 502 aa, Setaria italica
  Transcript Sequence Number=SeqID_43302
  Homolog annotation: Hit_ID=A6MD06; Match level="QueryCoverage=95%, HitCoverage=85%, E-value=1e-141, Identity=57%"; Hit description=UBX domain-containing protein
  Pfam annotation: Domain name=UBX; Domain location=417-499; Score =78.4; E_value=2.6e-20; Accession=PF00789.12; Description=UBX domain
RNAAPLRWEIISIRLAIVQRRARRAWLPENFRDHCALMDPDFQQQFFDRVGSTDSASRGPMVSHPREVREIPIEVKDGDPQTGPSGQAPVIEDVTGNESSHGPEVHETIIIDDEDDILPSAPSAPHANIPSNTSSTPSAPPLVHVNDYDDDIEEEMIRAAIEASKKDAEGLANIEEQGRDQHPEGVNLGEHSSDGADMGTTGGTLERQGLASGKAGTSRQPIDEESFQEDTEDVEEQPLVRRRSRRVPSENTESAQMVQPGPPSPALNNRQSNGDDFPSEWGGISSEEHDEAVMLEAAMFGGVPEGPTYHFSMPSHRSSTYYPPLVHSPSPALTEQRLLREQQDDEYLASLQADQEKELKALQEAELRRLEETAAREAALEKQKQEDEERRKKQLEEEELESNLASKQASLPSEPPLDIEGAVTVVVRMPDGSRQGRRFLKTDKLQFLFDFLDIGRTCKPGTYRLVRTYPRRTFTTSEGDVSFSDLGLTSKQEALFLEHITE

SEQ ID NO: 109277 - protein, 129 aa, Setaria italica
  misc_feature (124)..(124): Xaa can be any naturally occurring amino acid
  Transcript Sequence Number=SeqID_43303
  Gene Ontology: Mol. function=protein binding
  Homolog annotation: Hit_ID=A9UKL6; Match level="QueryCoverage=97%, HitCoverage=12%, E-value=4e-21, Identity=42%"; Hit description=NBS -LRR resistance-like protein (Fragment)
QPDERSFEDLRYVHLHNCPRLLHVLPLSMSVNLGRLHTLEIVCCDSLTEVFPVPAKREVVNFWRLRRLHLHELPALLCLSGRRMLTPELETVRVRGCWSLRRMPAVGDGTGVGSKRKPTVDCEXEWWDR

SEQ ID NO: 109278 - protein, 76 aa, Setaria italica
  Transcript Sequence Number=SeqID_43304
  Subcellular localization annotation: CTP_CleavageSite=35; ConfidenceScore=5.50e-01
QRPAQQDPREAAMAAAGPRKKSALRSRGQRRSHARSSRPGQYRTRLVSAVELKLFGDRPACSLHGPPMANQLALVR

SEQ ID NO: 109279 - protein, 66 aa, Setaria italica
  Transcript Sequence Number=SeqID_43305
  Subcellular localization annotation: CTP_CleavageSite=56; ConfidenceScore=5.05e-01
RLLKKKRFPCIIFNMHGKFLMFYRTNFTVLSFLPCKSLALENLFRLIAETLAVFFSCAKLQSISNT

SEQ ID NO: 109280 - protein, 368 aa, Setaria italica
  Transcript Sequence Number=SeqID_43306
  Gene Ontology: Cellular component=ribonucleoprotein complex; Biological process=apoptosis
  Homolog annotation: Hit_ID=Q9FZ46; Match level="QueryCoverage=93%, HitCoverage=68%, E-value=3e-72, Identity=45%"; Hit description =F6I1.13 protein
  Pfam annotation: Domain name=DAP3; Domain location=132-367; Score =211.4; E_value=2.3e-60; Accession=PF10236.1; Description =Mitochondrial ribosomal death-associa
PPGSRSYAKAKGGGKPASSTSNRGKVRAKDPRGVASADDADGDESTAGGGGDDIDTEFELPTDPLPPTYDPALDVGPGGRPLFAFTDTFGSFAHRNANVYVDFTLDEWNAMLPEGLPAGMMKEFQETRRCAVMVRKSFLDLRDNFRRIVDPAITTNLKDIKKQIVLDGPRSCGKSIALAMLVHWARTQGWLVFYVPQGKDWTHGGFFYRNTYSDFFDTPIQAAKILQDFTKYNETRLQQLPCQIFEPIPLGEGAGVGMMKGADTVEMPEGSTLYDLIQTGITHSHASVGVVVRLRKELSLVKDVPVLFAIDQYNSWFTFSDFQEPVTVRSCRSIHAKELTTVNAYRSMLHNDMMVGAFSHSTAVWQNY

SEQ ID NO: 109281 - protein, 167 aa, Setaria italica
  Transcript Sequence Number=SeqID_43307
  Homolog annotation: Hit_ID=Q9FZ46; Match level="QueryCoverage=96%, HitCoverage=35%, E-value=4e-69, Identity=73%"; Hit description =F6I1.13 protein
  Pfam annotation: Domain name=DAP3; Domain location=1-163; Score=-8.5; E_value=1.4e-06; Accession=PF10236.1; Description=Mitochondrial ribosomal death-associa
MVIRYTFNLSLVAYSHSHASVGVVVRLRKELSLVKDVPVLFAIDQYNSWFTFSDFQEPVTVRSCRSIHAKELTTVNAYRSMLHNDMMVGAFSHSTAVGKLRQELPDVPPDARLMFPRYTLEEAETVCHYYMRQKIIRRESFSEEKWKKIYYLSNGNGSEMRWLAAFV

SEQ ID NO: 109282 - protein, 306 aa, Setaria italica
  misc_feature (7)..(7): Xaa can be any naturally occurring amino acid
  misc_feature (58)..(58): Xaa can be any naturally occurring amino acid
  misc_feature (177)..(177): Xaa can be any naturally occurring amino acid
  Transcript Sequence Number=SeqID_43308
  Gene Ontology: Mol. function=transporter activity; Cellular component= integral to membrane; Biological process=transport
  Homolog annotation: Hit_ID=B6U6X3; Match level="QueryCoverage=83%, HitCoverage=48%, E-value=3e-77, Identity=58%"; Hit description =Carbohydrate transporter/ sugar porter/ transporter
AVIKIPXFHIIVAQGITGSFPWCALSFAPMWLELMGFTHTGTGILMITFAAASSLGGXLGGKMGDYLARRSPNSGRIILSQINSASAVPLAALLLLGLPDDPSTGFLHGFVIFIVGLSISWNAPATNNPIFAEIVPERSMTSIYALDRSFESVFAAFAPLVVGYLAEHAYGYSPVTXGVGMSSIARDRANAAALAKALYAAIAGPMLLYCFIYSLLYQTYPRDRERARMEDTLISSELQRIELERSQGSREYFLGEDVAVIDAECGKELLDADDNEETTCFMKLDKGGLPNDCEPTEGDNQPNELV

SEQ ID NO: 109283 - protein, 73 aa, Setaria italica
  Transcript Sequence Number=SeqID_43309
  Subcellular localization annotation: CTP_CleavageSite=5; ConfidenceScore=5.02e-01
KRNCAASLIFSCLRQFFRSLHICGTCNLPTKSKKETFVARNLERISSQPIFPVAFNMCSFACKSIHNNFLSFM

SEQ ID NO: 109284 - protein, 122 aa, Setaria italica
  Transcript Sequence Number=SeqID_43310
  Gene Ontology: Mol. function=transporter activity; Cellular component= integral to membrane; Biological process=transport
  Homolog annotation: Hit_ID=B9T2N3; Match level="QueryCoverage=100%, HitCoverage=25%, E-value=4e-48, Identity=78%"; Hit description =Regulatory protein uhpC, putative
WRLPGVAPFAFCLFFSKLVAYTFLYWLPFYIRNNAVAGQLLSHKASGILSIVFDIGGVLGGISAGFLSDAIGARAVTSVLFLFLSIPALIVYRTYGSISMHHNIGLMFLSGYFVNGPYSLIT

SEQ ID NO: 109285 - protein, 185 aa, Setaria italica
  Transcript Sequence Number=SeqID_43311
  Gene Ontology: Mol. function=transporter activity; Cellular component= integral to membrane; Biological process=transport
  Homolog annotation: Hit_ID=B9T2N3; Match level="QueryCoverage=92%, HitCoverage=36%, E-value=5e-67, Identity=77%"; Hit description =Regulatory protein uhpC, putative
YQPLLLPFYIRNNAVAGQLLSHKASGILSIVFDIGGVLGGISAGFLSDAIGARAVTSVLFLFLSIPALIVYRTYGSISMHHNIGLMFLSGYFVNGPYSLITTAVATDLGTQDAIKGNSRALATVSAIIDGTGSVGAALGPLLTGYISTRGWNSVFFMLIVSISLAILFLIRLARDEIVAKLGTRS

SEQ ID NO: 109286 - protein, 72 aa, Setaria italica
  Transcript Sequence Number=SeqID_43312
  Gene Ontology: Mol. function=transporter activity; Cellular component= integral to membrane; Biological process=transport
  Homolog annotation: Hit_ID=B9T2N3; Match level="QueryCoverage=93%, HitCoverage=14%, E-value=4e-18, Identity=64%"; Hit description =Regulatory protein uhpC, putative
VGLLGQDKKEAQGNEDDELELEMGSQLPRAIGFLEAWRLPGVAPFAFCLFFSKLVAYTFLYWLPFYIRNNGM

SEQ ID NO: 109287 - protein, 44 aa, Setaria italica
  Transcript Sequence Number=SeqID_43313
PFFSVSTEFWVISSSLFDHHLYFYYICVSVSNKVIKVQMVIKQR

SEQ ID NO: 109288 - protein, 911 aa, Setaria italica
  misc_feature (164)..(164): Xaa can be any naturally occurring amino acid
  Transcript Sequence Number=SeqID_43314
  Gene Ontology: Mol. function=zinc ion binding; Cellular component =nucleus; Biological process=regulation of transcription
  Homolog annotation: Hit_ID=Q53K34; Match level="QueryCoverage=96%, HitCoverage=96%, E-value=0.0, Identity=59%"; Hit description=Myb -like DNA-binding domain, putative
  Pfam annotation: Domain name=Myb_DNA-binding; Domain location=356 -401; Score=52.0; E_value=2.3e-12; Accession=PF00249.23; Description =Myb-like DNA-binding domain
  Pfam annotation: Domain name=SWIRM; Domain location=132-220; Score =71.0; E_value=4.3e-18; Accession=PF04433.9; Description=SWIRM domain
  Pfam annotation: Domain name=TT_ORF2; Domain location=34-108; Score= -25.4; E_value=0.038; Accession=PF02957.7; Description=TT viral ORF2
  Pfam annotation: Domain name=ZZ; Domain location=296-340; Score=25.6; E_value=0.00015; Accession=PF00569.9; Description=Zinc finger, ZZ type
  Pfam module annotation: Pfam domain module=Myb_DNA-binding::SWIRM::TT_ ORF2::ZZ; Domain location=356-401::132-220::34-108::296-340
  Subcellular localization annotation: CTP_CleavageSite=40; ConfidenceScore=5.28e-01
MEPKPSSAAHGDAPAAEAPRRRGGGGKRKSSGSSFTPSKRQAKERNAAFHVPPHLLHSGPLTRAARQSPHKLSGTPPETGPASSAAAAGDGVSGGQGEVDAIRPEREETPAAEQPLVDEVFEAVRSRGAGVHVVPTFAGWFSWKEIHLVEKQTLPSFLMANLRXRTPEVYLAIRNSIMVKFHANPQLQLESKDLAELSTGEADARQEVLEFLDHWGLINFHPFPPAGQEESKPEESQDNSHDEDKASLIEQLFKFEPVQSYIMPLPKKEDVGAPPPLPSLFPDPVLLEDVVAAAEPSVEYHCNSCSVDCSRKRYHCRTQADFDLCCDCYNEGKFDPGMAKTDFILMDSSEVSGASGTSWTDEETLLLLEGLEIFGGKWAEIAEHVATKTKAQCMLHFLQMQIEDRFHDGEDINQNTPGSTEQATTEKGIAETSEKMEVEDKEEGRDTVDEKVSEKTDGNCEETKPEGASAVENKDTQNSGGKDSAASPNTEEPKQSSDEHPIVKENSGDVDTSGEKLSNVALDILKSAFEAAGHSPEYQGSFAAAGNPVMALAAFLAGLVEDDNATTSCRSSLKAISEVSPALQLASRHCFILEDPPNDLKDICVSVSNKSNKSTDGDQTKDEEMTQNSVDTEKKENNEKEDNSLSMEKHNNSSISHNDHQESDDKSISRDDCPVVEPKTSNAKESGDSTAIVDKSATDNTKGSNICASDPKQVKDKPSVEVEARDDSSSKGKDELNKTEDAVASPANVQEQKQSETLENGKMGEPNSIESVVANEEKGSGVTANQNDSITRLRRAAATAISAAAVKAKFLGDQEEYHIRRLTAMMIEKLFQKIEVKMSLFAEIEQVVLRTREYTEKTRKKLLLERNAIIAARMGALPSRPNQPGVAGSRLPPGYGNPAVRPPNAMPRPSS

SEQ ID NO: 109289 - protein, 125 aa, Setaria italica
  misc_feature (10)..(10): Xaa can be any naturally occurring amino acid
  Transcript Sequence Number=SeqID_43315
  Gene Ontology: Mol. function=transcription factor activity; Cellular component=nucleus; Biological process=regulation of transcription, DNA-dependent
  Homolog annotation: Hit_ID=B6SQD8; Match level="QueryCoverage=84%, HitCoverage=39%, E-value=5e-17, Identity=47%"; Hit description=AP2 domain containing protein
  Pfam annotation: Domain name=AP2; Domain location=60-111; Score=81.4; E_value=3.2e-21; Accession=PF00847.12; Description=AP2 domain
VVTVAGGEAXGVCSIDGCLGCDFFAAPELAQGASRGTAGQMAAEAGGERQMRPRRRRKKNMYRGVRQRPWGKWAAEIRDPRRAARVWLGTFDTAEEAARAYDCAALEFRGPRARLNFPGHGDAAT

SEQ ID NO: 109290 - protein, 58 aa, Setaria italica
  Transcript Sequence Number=SeqID_43316
YEERYVLTRASRNRELNKHARLGCQVVLAAVGGRLDEPRVCERAEEGLPGEADDLAAR

SEQ ID NO: 109291 - protein, 160 aa, Setaria italica
  Transcript Sequence Number=SeqID_43317
  Gene Ontology: Mol. function=iron-sulfur cluster binding; Cellular component=mitochondrion
  Homolog annotation: Hit_ID=B6TVC7; Match level="QueryCoverage=73%, HitCoverage=70%, E-value=4e-57, Identity=94%"; Hit description =Ferredoxin
  Subcellular localization annotation: CTP_CleavageSite=37; ConfidenceScore=5.26e-01
IAARALRRLPLHLSPSLSRSFCAVSPAAASATPAPAAASAKVADRIVRVLAIDPDGARREVVGLSGQTLLRALANSGLIEPASHRLEDIDACSAECEVHIAQEWLEKLPPPSYEERYVLTRASRNRELNKHARLGCQVVLAPELQGMVVAVPEPKPWDIP

SEQ ID NO: 109292 - protein, 109 aa, Setaria italica
  Transcript Sequence Number=SeqID_43318
MSRKRRAPPPPPPPQESSSEESGSVEEEEEEPPSHPARRMPPPAAAADGADSSEGSGSDSDSDTDAQAFQMRQLHRFPTKLPPHPVPQPASHAAAAADDDDEGESSESE

SEQ ID NO: 109293 - protein, 58 aa, Setaria italica
  Transcript Sequence Number=SeqID_43319
PPDSNFPFSPELHNCLSLSPSVIKQVQAAAVMLISLNFSIIPYAIESFYSKIELLFFF

SEQ ID NO: 109294 - protein, 62 aa, Setaria italica
  Transcript Sequence Number=SeqID_43320
ASVMHGSLWSVLPNWTGVSRCRGTQREIEQLLLRGVNEQSRKLHLHLHLFSLVLPFTPNSYL

SEQ ID NO: 109295 - protein, 77 aa, Setaria italica
  Transcript Sequence Number=SeqID_43321
  Subcellular localization annotation: CTP_CleavageSite=41; ConfidenceScore=5.65e-01
MTALTTTSATLSASLPSVPRPPPRPPVAHLRLRPRRRALLRCEAVSELAPAASAAYGVLLLGGGVFAYARSGSKGSI

SEQ ID NO: 109296 - protein, 71 aa, Setaria italica
  Transcript Sequence Number=SeqID_43322
WLMKNIPCGLKVPVQIPKCSICVMHTIFKTQHLRREKTLIMAIDVRHSNKLCSLMLFQRGPSLYPCVFPMI

SEQ ID NO: 109297 - protein, 326 aa, Setaria italica
  misc_feature (44)..(44): Xaa can be any naturally occurring amino acid
  misc_feature (138)..(138): Xaa can be any naturally occurring amino acid
  Transcript Sequence Number=SeqID_43323
  Gene Ontology: Mol. function=transferase activity
  Homolog annotation: Hit_ID=B9RLG0; Match level="QueryCoverage=98%, HitCoverage=63%, E-value=2e-69, Identity=31%"; Hit description =Pentatricopeptide repeat-containing protein, putative
  Pfam annotation: Domain name=PPR; Domain location=125-160; Score=2.4; E_value=4.7; Accession=PF01535.12; Description=PPR repeat
  Pfam annotation: Domain name=PPR; Domain location=161-195; Score =24.7; E_value=0.00038; Accession=PF01535.12; Description=PPR repeat
  Pfam annotation: Domain name=PPR; Domain location=20-54; Score=37.1; E_value=7.1e-08; Accession=PF01535.12; Description=PPR repeat
  Pfam annotation: Domain name=PPR; Domain location=232-266; Score =37.3; E_value=6.1e-08; Accession=PF01535.12; Description=PPR repeat
  Pfam annotation: Domain name=PPR; Domain location=267-301; Score =26.9; E_value=8e-05; Accession=PF01535.12; Description=PPR repeat
  Pfam annotation: Domain name=PPR; Domain location=55-89; Score=37.2; E_value=6.4e-08; Accession=PF01535.12; Description=PPR repeat
  Pfam annotation: Domain name=PPR; Domain location=90-124; Score=34.7; E_value=3.7e-07; Accession=PF01535.12; Description=PPR repeat
  Pfam module annotation: Pfam domain module=PPR::PPR::PPR::PPR::PPR::PP R::PPR; Domain location=125-160::161-195::20-54::232-266::267-301::55- 89::90-124
QDAKSIFCLMLKYGLNPNRYTYSTIIHGLCKTGSVREAFDIFSXVTEEGMELDIVTYNSLINGFRLHGHTREIPKMIEMMRNQGVEPDLVTYTILIAGHCEGGDVEEGMKIRKDIIDQGLELNIVTYSVLINALFKKXGLVYEVENLLSEICSIGLDMDVVAYSILIHGYSKLGEIGRALEVCKVMCSSQRVMPTSLNHVSILLGLCKKGFLDVARLYLENVATKYQPTDVVLYNVVIDGYAKVGDIGNAVQLYDQIIKAGLCPTIITCNSLLYGYCKIGDLHTAESYFRAIQISDLQPTAVTYTTLMDALSEARRAHAMLKCFLN

SEQ ID NO: 109298 - protein, 110 aa, Setaria italica
  Transcript Sequence Number=SeqID_43324
MATKSKLGELMWEHRLQAAAAVAFVAAAAVSISAVGPRLGAVVSFFWPLLVSTGFLLVAITVLLRISPPPAGADESGKELIDFVAGCRPEHLVPEAAAAASVEAPPEPEI

SEQ ID NO: 109299 - protein, 124 aa, Setaria italica
  Transcript Sequence Number=SeqID_43325
TLDPNAVHTVAVRLTQAVASVSRIDLPPRAGLHRLTEASRAVHLTNSVQDTLSLVLVDELVLSIWNLEESSPDGKQWSCCKAIHLMPMLPPINFSCRKVELSIQGLCEKSGSLFLHLVGEGLFM

SEQ ID NO: 109300 - protein, 92 aa, Setaria italica
  Transcript Sequence Number=SeqID_43326
LTPARLSAAGTKAESTNWPSEKGKYTHLAGRFFRAGGDGTVKVFIHNRSTDRIYTCTVYLTCFYPVADGIFFFPCEFWKDSIYTASVLRLPP

SEQ ID NO: 109301 - protein, 99 aa, Setaria italica
  misc_feature (50)..(50): Xaa can be any naturally occurring amino acid
  Transcript Sequence Number=SeqID_43327
  Subcellular localization annotation: CTP_CleavageSite=34; ConfidenceScore=5.65e-01
PPRCCSGGGSPPSPHPRPPPPSSPLAAPPPSLPRASSELPIPRRRERERXGEGSVGRGFSDLVAASPLGSLARARTMAAVTPPPAPAPAAPAPAASAAA

SEQ ID NO: 109302 - protein, 130 aa, Setaria italica
  Transcript Sequence Number=SeqID_43328
SPRFDERLPPLRVRPGRVAVDVLKCEVWMRSCARRMLDDQLLGFALVPLAAVAAAAGARLNDRDFELSSTDLFHSPAGTIRLSLALRSGVPGDACPPPDRGAEPSIASEVVILHAPAAAAVDYSRIEFDR

SEQ ID NO: 109303 - protein, 63 aa, Setaria italica
  Transcript Sequence Number=SeqID_43329
  Subcellular localization annotation: CTP_CleavageSite=60; ConfidenceScore=5.25e-01
FRVRMTMTNFQCIISSVKIVKNHGTTSALSSGINMTLMPFRISILPNLFCLFDWSPMSVRCRY

SEQ ID NO: 109304 - protein, 50 aa, Setaria italica
  Transcript Sequence Number=SeqID_43330
LSSAFLSLFPAFKALIFLNGTTCVPFFLLSFLPHGIMQTWTQLAYYHPAR

SEQ ID NO: 109305 - protein, 111 aa, Setaria italica
  Transcript Sequence Number=SeqID_43331
  Homolog annotation: Hit_ID=B6SLL1; Match level="QueryCoverage=100%, HitCoverage=48%, E-value=2e-29, Identity=70%"; Hit description=DNA binding protein
GKLKQAHDAAILHKCHLENEVMRLKERLEITEEELARLRSAAGSHAVSGDGGDAMGRVVCSGSPSSSFSTGTCQQPGVRDHLGDDDLLYVPDYACYPDNSVVEWFSLYGLM

SEQ ID NO: 109306 - protein, 60 aa, Setaria italica
  Transcript Sequence Number=SeqID_43332
YEVETKKITFSKRLYIRTAATQIQETFLFPTKSQKIYANKLADACMLRTSSESLHEHQNT

SEQ ID NO: 109307 - protein, 141 aa, Setaria italica
  Transcript Sequence Number=SeqID_43333
  Gene Ontology: Mol. function=transporter activity; Cellular component= membrane; Biological process=oligopeptide transport
  Homolog annotation: Hit_ID=B6SXJ7; Match level="QueryCoverage=91%, HitCoverage=27%, E-value=2e-44, Identity=66%"; Hit description=POT family protein
PAPPPAKQQEPPLAGVSDYRGRPVCRGNSGGWRSALFVAAVEIAGSFAYFGISANLITYLTGPLGQSNASAAASVNAWSGTASLMPLLGAFLADAYLGRYKSIIIACSLYVLGYGMLTLSATLPALRPAHFFYVSLYLIAV

SEQ ID NO: 109308 - protein, 242 aa, Setaria italica
  Transcript Sequence Number=SeqID_43334
  Gene Ontology: Mol. function=transporter activity; Cellular component= membrane; Biological process=oligopeptide transport
  Homolog annotation: Hit_ID=B6SXJ7; Match level="QueryCoverage=98%, HitCoverage=47%, E-value=2e-78, Identity=61%"; Hit description=POT family protein
  Pfam annotation: Domain name=PTR2; Domain location=4-242; Score=0.8; E_value=1.3e-06; Accession=PF00854.13; Description=POT family
MNDVLGYGMLTLSATLPALRPAHFFYVSLYLIAVAQGADKPCGLAFAADQFDAAHPEERASRGSLFNWWFFCMAVGISVAVSAVGYIQESVGWGVGFGVPCAIVLCAFTVFLLGTPTYRLYNCKHQSSSESPLLRLARGLRALLFRRGRGRGNHAEAEDARCVLRLLPIWATSLAYGVVYAQIMTLFNKQGRTLDRRIGPFDLPPAALQALGPLSILLFVPVYDRALVPALRWATGNPPGLT

SEQ ID NO: 109309 - protein, 122 aa, Setaria italica
  Transcript Sequence Number=SeqID_43335
LDLLHASSMFSSNRAVLSVAISIALSMGPPVMADLQDNCRTICRPKCDDFAIEVCTSLTNIVPILNNVDFFFRTCKVRISAPCTSLCINICSLDTLTPAPRPAPHHHRASHTDACELLLKYY

SEQ ID NO: 109310 - protein, 64 aa, Setaria italica
  Transcript Sequence Number=SeqID_43336
IHCMRAEGCFHCITISYLYCLICFSSTKLDTTYHNGHITLLEVVIRRLNFISRFKWYDFRFLGS

SEQ ID NO: 109311 - protein, 51 aa, Setaria italica
  Transcript Sequence Number=SeqID_43337
HFELCFIMMCISELDEDSRISLDYFFIIAELGNLDIGLELIFEYFHNESGG

SEQ ID NO: 109312 - protein, 123 aa, Setaria italica
  misc_feature (50)..(50): Xaa can be any naturally occurring amino acid
  misc_feature (86)..(86): Xaa can be any naturally occurring amino acid
  Transcript Sequence Number=SeqID_43338
  Gene Ontology: Mol. function=electron carrier activity; Cellular component=chromatin; Biological process=chromatin assembly or disassembly
  Homolog annotation: Hit_ID=Q7XWT6; Match level="QueryCoverage=99%, HitCoverage=11%, E-value=2e-48, Identity=68%"; Hit description =OSJNBa0028M15.5 protein
  Pfam annotation: Domain name=Transposase_21; Domain location=1-123; Score=88.7; E_value=2e-23; Accession=PF02992.6; Description =Transposase family tnp2
SFDKNWLEFAKDARNIRLGLATDGFNPFGNMTNSYSMWPVFVVPYNMPPXVCMEESNFMMALLIPGLSFPSKDFDVFLQPLVDELXDLWKGVDAYDACSQQSFKLHDMVIWCIHDYPTLSTLA

SEQ ID NO: 109313 - protein, 264 aa, Setaria italica
  misc_feature (17)..(17): Xaa can be any naturally occurring amino acid
  misc_feature (245)..(245): Xaa can be any naturally occurring amino acid
  Transcript Sequence Number=SeqID_43339
  Gene Ontology: Mol. function=nucleic acid binding; Cellular component= nucleus; Biological process=DNA replication
  Homolog annotation: Hit_ID=B6SL03; Match level="QueryCoverage=100%, HitCoverage=41%, E-value=1e-100, Identity=71%"; Hit description =Replication protein A 70 kDa DNA-binding subunit
  Pfam annotation: Domain name=Rep-A_N; Domain location=6-108; Score =133.5; E_value=6.6e-37; Accession=PF04057.4; Description=Replication factor-A protein 1, N-terminal domain
MDAAKSVTPGAVSHILXEKPSPADAATVPELVVQVVDLKSIGNRFGFMASDGKDKIKAMLPTQFAAEVRSGNLQNLGLIRILDYTCNAVGGNNDNKALIITKCEVVSQALDAEIKSEAKKEEEPAIVIKPKDEEMVLSKPVNAPPVVLKPKLEVKSASQIVNEQRGNAAPAARLSMTRRVHPLISLNPYQGNWVIKVRVTSKGNLRTYKNARGEGCVFNVELTDEDGTQIQATMFNEAAKKFYPXMFELGKVYYVSKGSLRIAN

SEQ ID NO: 109314 - protein, 66 aa, Setaria italica
  Transcript Sequence Number=SeqID_43340
LVSGELGARVLDGGAVQFITGSIDRTSILVLLSDLRRLTQLPRLSKSKVKCKCIQTFSSIYSATPF

SEQ ID NO: 109315 - protein, 217 aa, Setaria italica
  Transcript Sequence Number=SeqID_43341
  Gene Ontology: Mol. function=nutrient reservoir activity; Cellular component=protein body; Biological process=protein oligomerization
  Homolog annotation: Hit_ID=O49258; Match level="QueryCoverage=68%, HitCoverage=28%, E-value=4e-36, Identity=50%"; Hit description=12s globulin
  Pfam annotation: Domain name=Cupin_1; Domain location=62-204; Score =111.4; E_value=3e-30; Accession=PF00190.14; Description=Cupin
GTIVRVPNGLRLRLAAQLNLNTTTATQLQDEEHETGQAQPGRQSKTLLPDNRYLNCLMKVIMNLEDPHSRRITRLTGDSFPILNSLGLSVERGTLKPNEIVSPYYTINAQTVVYVTGGSARLQVVDNRGVAVLNDALRQGQLLVIPQYYVVLIEAGQDAGFEYVAFKTNANPLISRIAGPGSVLRGLPVGVIAASYNFSTADAIKIKNSRGNDERAV

SEQ ID NO: 109316 - protein, 114 aa, Setaria italica
  Transcript Sequence Number=SeqID_43342
  Pfam annotation: Domain name=DUF1218; Domain location=1-60; Score =30.9; E_value=5.3e-06; Accession=PF06749.4; Description=Protein of unknown function (DUF1218)
VALLVLSWLSFAVAVVLLATAASMNHGQRYGRGWMDGDCYVARNGVFGGAAALVAVTALITLGLTFATEPTAAAAAMAATPTPCAAASDTCASTTHLEAAASDAEQPGGGRSKQ

SEQ ID NO: 109317 - protein, 129 aa, Setaria italica
  misc_feature (81)..(81): Xaa can be any naturally occurring amino acid
  misc_feature (94)..(94): Xaa can be any naturally occurring amino acid
  Transcript Sequence Number=SeqID_43343
  Homolog annotation: Hit_ID=B6TC94; Match level="QueryCoverage=69%, HitCoverage=34%, E-value=1e-24, Identity=65%"; Hit description=4/1 protein
HEPSDVLNVTIVPFQIFGKFLRIQFTIGEPWLLHCNYVRTSLGYKEALMEIQALRVNYSTKNKKREALESHISYLNRDNEXLRRLYTETLFKVXTNQVKFHAEAQSLKDELEPSNWRRQIVSMPQTGRG

SEQ ID NO: 109318 - protein, 111 aa, Setaria italica
  Transcript Sequence Number=SeqID_43344
  Gene Ontology: Mol. function=ATP-dependent helicase activity; Cellular component=nucleus
  Homolog annotation: Hit_ID=B6SWB9; Match level="QueryCoverage=82%, HitCoverage=14%, E-value=3e-47, Identity=94%"; Hit description=ATP -dependent RNA helicase DDX41
  Pfam annotation: Domain name=Helicase_C; Domain location=56-111; Score=43.7; E_value=7.3e-10; Accession=PF00271.23; Description =Helicase conserved C-terminal domain
SFVSVVWYSFFHQWYVDVQLNEDARIIYLLECLQKTPPPVLIFCENKVDVDYIHEYLLLKGVEAVAIHGGKDQEERQNAIDSFKSGKKDVLVATDVASKGLDFPDIQHVIN

SEQ ID NO: 109319 - protein, 79 aa, Setaria italica
  Transcript Sequence Number=SeqID_43345
RGENPRLSTAGLKLQDSICHNSSVMLYCCSDLERSQALPGQQELADTLQLLDWHLVHAKFCIGDRICADLIAMASSNSV

SEQ ID NO: 109320 - protein, 91 aa, Setaria italica
  Transcript Sequence Number=SeqID_43346
KQSGLERNTEMMEKEISTLGPGKSHNQDSRNFLELIIISFVLFQFCLPFLSYYIILISGYLYFLCLCDGSCIDMKKSSIHWQILHAQNANA

SEQ ID NO: 109321 - protein, 72 aa, Setaria italica
  misc_feature (54)..(54): Xaa can be any naturally occurring amino acid
  Transcript Sequence Number=SeqID_43347
  Gene Ontology: Mol. function=hydrolase activity
  Homolog annotation: Hit_ID=B4G027; Match level="QueryCoverage=100%, HitCoverage=16%, E-value=2e-20, Identity=75%"; Hit description=Acid phosphatase
  Subcellular localization annotation: CTP_CleavageSite=33; ConfidenceScore=5.10e-01
AKTFEILGTLVDCVSLASSGRPFPWSVPALVISASNAGPNCGYVMFHSSAIAFXAAREALVCGVPSTALSFN

SEQ ID NO: 109322 - protein, 120 aa, Setaria italica
  Transcript Sequence Number=SeqID_43348
LQENWVTFLRCNCYYILDLLLLPVCCYNGLKQKPESGCLGLASLPQYYMTIFRGHASMYNKSCSIKLNPSYHINFTRKITRITMYPFITKVSNAQESRNSRTWTNQMLCSLSTKFLSQTK

SEQ ID NO: 109323 - protein, 116 aa, Setaria italica
  misc_feature (49)..(49): Xaa can be any naturally occurring amino acid
  misc_feature (77)..(77): Xaa can be any naturally occurring amino acid
  misc_feature (98)..(98): Xaa can be any naturally occurring amino acid
  Transcript Sequence Number=SeqID_43349
  Gene Ontology: Mol. function=hydrolase activity
  Homolog annotation: Hit_ID=B4G027; Match level="QueryCoverage=75%, HitCoverage=22%, E-value=5e-21, Identity=65%"; Hit description=Acid phosphatase
VSESLQSFLSASCLSVTLDCNIASICFWDKPAFGHSITICETVRASLRXAKTFEILGTLVDCVSLASSGRPFPWSSXASNAGPNCGYVMFHSSAIAFXAAREALVCGVPSTALSFN

SEQ ID NO: 109324 - protein, 483 aa, Setaria italica
  Transcript Sequence Number=SeqID_43350
  Gene Ontology: Mol. function=ATP-dependent helicase activity; Cellular component=nucleus
  Homolog annotation: Hit_ID=B6SWB9; Match level="QueryCoverage=100%, HitCoverage=78%, E-value=0.0, Identity=93%"; Hit description=ATP -dependent RNA helicase DDX41
  Pfam annotation: Domain name=DEAD; Domain location=62-242; Score =203.1; E_value=7.3e-58; Accession=PF00270.21; Description=DEADDEAH box helicase
  Pfam annotation: Domain name=Helicase_C; Domain location=308-384; Score=131.8; E_value=2.2e-36; Accession=PF00271.23; Description =Helicase conserved C-terminal domain
  Pfam annotation: Domain name=ResIII; Domain location=58-237; Score= -33.7; E_value=0.035; Accession=PF04851.7; Description=Type III restriction enzyme, res subunit
  Pfam annotation: Domain name=zf-CCHC; Domain location=440-457; Score =17.0; E_value=0.00093; Accession=PF00098.15; Description=Zinc knuckle
  Pfam module annotation: Pfam domain module=DEAD::Helicase _C::ResIII::zf-CCHC; Domain location=62-242::308-384::58-237::440-457
TGWKPPLRLRRMPLAKANELRRKWHIIVDGNDVPPPARDFRDLRLPEPILRKLRERGIVQPTPIQVQGLPVVLSGRDMIGIAFTGSGKTLVFVLPLIMVALQEEILMPIVPGEGPFGMIICPSRELAKQTYDVIEEFLLPLKDAGYPEIRPLLCIGGVDMRTQLDVLKKGVHIVVATPGRLKDLLAKKKMNLDNCRYLTLDEADRLVDLGFEEDIKEVFDHFKDQRQTLLFSATMPQKIQNFAKNALVQPVTVNVGRAGAANLDVIQEVEYVKEDARIIYLLECLQKTPPPVLIFCENKVDVDYIHEYLLLKGVEAVAIHGGKDQEERQNAIDSFKSGKKDVLVATDVASKGLDFPDIQHVINYDMPAEIENYVHRIGRTGRCGKTGIATTFINKNQTETTLLDLKHLLKEAKQRIPPVLAELDDPLEDEEIIAKESGVKGCAYCGGLGHRVGDCPKLEHQKSMAIAGSRKDYFGGGGYRGEI

SEQ ID NO: 109325 - protein, 65 aa, Setaria italica
  Transcript Sequence Number=SeqID_43351
APPMLNLWIVRWLSIYELLFATRTKCFKFFMAETLNHIQAKNKHTLSAQASIDYITLYQMVPFSV

SEQ ID NO: 109326 - protein, 349 aa, Setaria italica
  misc_feature (52)..(52): Xaa can be any naturally occurring amino acid
  Transcript Sequence Number=SeqID_43352
  Homolog annotation: Hit_ID=B6SV28; Match level="QueryCoverage=39%, HitCoverage=25%, E-value=4e-25, Identity=51%"; Hit description =Proline-rich protein
  Pfam annotation: Domain name=DUF1421; Domain location=5-331; Score =234.1; E_value=3.5e-67; Accession=PF07223.3; Description=Protein of unknown function (DUF1421)
  Pfam annotation: Domain name=UBA_3; Domain location=290-336; Score= -5.5; E_value=0.083; Accession=PF09288.2; Description=Fungal ubiquitin-associated domain
  Pfam module annotation: Pfam domain module=DUF1421::UBA_3; Domain location=5-331::290-336
  Subcellular localization annotation: CTP_CleavageSite=19; ConfidenceScore=5.43e-01
LPSCSSSSSTSDLDLSEPSASSPSPPSVLAFLELVLSFFLFVACLPCLPASXPPPPPPIQNQPPPHFPGHVPPPQVTSVSLALPAPAASSIAQEAYYAPSSQPTEATHQQFQAPPGPQPQAAQPPPPQHYQTPPQFTQYSQPPHPATVNPSAAPPPPVPQQPEEPAPYGPPAQSYPPNVRPPPPYMPPPSGPAAPFYGPNPGMYEAPPAVRPNSGPPPPYNAGYKPPGAGGFSDSYGYTGSPSHHGNAGMKQPSPFAPPGGSGGYGRLPTAQVLPQAAPVSSAPGGSSGTRVPIDDVIDKVATMGFSKEQVRATVRKLTENGQNVDLNMVLDKLMNDADTQPQRSWYGR

SEQ ID NO: 109327 - protein, 317 aa, Setaria italica
  Transcript Sequence Number=SeqID_43353
  Homolog annotation: Hit_ID=B6SV28; Match level="QueryCoverage=74%, HitCoverage=42%, E-value=3e-66, Identity=59%"; Hit description =Proline-rich protein
  Pfam annotation: Domain name=DUF605; Domain location=111-313; Score= -132.7; E_value=0.046; Accession=PF04652.8; Description=Protein of unknown function, DUF605
MNASQFMDKQIQGLAASGAAASSPPASGGLVDLMSPDPQEEAESHAHRPHHGEVLPSYDFQPIRPASSASASAIPVGSGPAVGAWGSLDSKAASPNPLKTSGVLEPHHMLKKVSHEEERSNFSAVTIVDIDRTMKKYADNLLHALEGVSSRLSQLEDRTYHLENSVGELKLTIGNNNGSTDGKLRQFENTLREVQAGVQILRDKQEIVETQIQLAKLQVPKAEDVQSENADAGQADSRQQPTPPQQTIQLQNQAPPLSQPPAPLPALPAPTAPPPPPIQNQPPPHFPGHVPPPQVTSVSLALPAPAASSIAQEAYYA

SEQ ID NO: 109328 - protein, 224 aa, Setaria italica
  Transcript Sequence Number=SeqID_43354
  Gene Ontology: Mol. function=peptidase activity; Cellular component =cytoplasm; Biological process=proteolysis
  Homolog annotation: Hit_ID=B9T3Z6; Match level="QueryCoverage=95%, HitCoverage=19%, E-value=6e-70, Identity=61%"; Hit description =Protein binding protein, putative
LLDDSVGREIDLQIERGGVPLTVKLQVEDLHSITPNHFLEVSGAVIHPLSYQQARNFRFKCGLVYVAEAGYTLSRASVPRHAIIKKLAGEDIVHLDDLIAVLSKLSRGSRVPLEYVKYTDRHRNKSVLVTIDQHEWYAPPQLYTRNDATGLWTAKPAIPSESPFLASAHHASHVDTNSNSVSSLSESSPMDLKCQYDSENLADGCIKVQTDDEIVVDGSHSSED

SEQ ID NO: 109329 - protein, 135 aa, Setaria italica
  Transcript Sequence Number=SeqID_43355
  Gene Ontology: Mol. function=DNA binding; Biological process =regulation of transcription, DNA-dependent
  Homolog annotation: Hit_ID=Q9XGD1; Match level="QueryCoverage=30%, HitCoverage=33%, E-value=1e-15, Identity=92%"; Hit description=HMG1 protein
  Pfam annotation: Domain name=HMG_box; Domain location=24-90; Score =52.6; E_value=1.5e-12; Accession=PF00505.11; Description=HMG (high mobility group) box
  Subcellular localization annotation: CTP_CleavageSite=4; ConfidenceScore=5.07e-01
MKSKAGADASFKASGAKRKKAGGPKRGLTPFFAFLAEFRPQYLEKHPENKGVKDVTKAAGEKWRSMSDEEKKKYGGGKKQEDKASKPTNKKKESTSSKKAKTDGGEGEEAEGSDKSKSEVEDDDEQDGNEEEDEE

SEQ ID NO: 109330 - protein, 1006 aa, Setaria italica
  misc_feature (335)..(335): Xaa can be any naturally occurring amino acid
  misc_feature (354)..(354): Xaa can be any naturally occurring amino acid
  Transcript Sequence Number=SeqID_43356
  Gene Ontology: Mol. function=peptidase activity; Cellular component =cytoplasm; Biological process=proteolysis
  Homolog annotation: Hit_ID=B9T3Z6; Match level="QueryCoverage=99%, HitCoverage=90%, E-value=0.0, Identity=70%"; Hit description=Protein binding protein, putative
  Pfam annotation: Domain name=PDZ; Domain location=187-254; Score =13.6; E_value=0.03; Accession=PF00595.16; Description=PDZ domain (Also known as DHR or GLGF)
MFVNREEIPVYPLYRDPVHDFGFFRYDPGAIKFLKYDEIPLAPEAASVGLEIRVVGNDSGEKVSILAGTLARLDREAPYYKKDGYNDFNTFYMQAASGTKGGSSGSPVVDCQGRAVALNAGSKSSSASAFFLPLERVVRALNLIRDSWDAFGTKPESIYIPRGTLQVTFQHKGFEETRRLGLRNETEQMVRLVSPAGETGMLVVDSVVPEGPAHKHLEPGDVLVCINEEVVTQFLRLETLLDDSVGREIDLQIERGGVPLTVKLQVEDLHSITPNHFLEVSGAVIHPLSYQQARNFRFKCGLVYVAEAGYTLSRASVPRHAIIKKLAGEDIVHLXDLNAAVSFLKFVLRGILRXFKYTDRHRNKSVLVTIDQHEWYAPPQLYTRNDATGLWTAKPAIPSESPFLASAHHASHVDTNSNSVSSLSESSPMDLKCQYDSENLADGCIKVQTDDEIVVDGSHSSEDSVIEKKRRRVDEEIAAEGTLPSYGDLEDVKSGVLRHPSNAEGSDLARTISSNASLAEQVIEPALVMFEVHVPPVCMLDGVHSQHFFGTGVIIYHSDNLGLVAVDRNTVAVSISDIMLSFAAYPIEIPAEVVFLHPVHNFALVAYDPSALGVGASVVRAAKLLPEPALRRGDSVYLVGLSRSLQATSRKSIITNPCTAVNIGSADCPRYRAINMEVIELDTDFGSAFSGILTDEQGRVQALWASFSTQLKYGCSSSEDHQFVRGIPIYAISQVLEKIISRTQGPFRLINGIKRPMPFVRLLEVELYPTLLSKARSYGLSDNWVQDLAKKDPVRRQVLRVKGCLAGSKAENLLEQGDMILAINKEPITCFLDIEKACQELDQSIGSDGVLNMTIFRQGKEIELIVGTDVRDGNGTTRMVNWCGCIIQDPHSAVRALGFLPEEGHGVYVARWCHGSPVHRYGLYALQWIIEINGQPTPDLETFIQVVKGLEDGEFVRVRTVHLNGKPRVLTLKQDLHYWPTWELSFEPETATWRRRTIKALQSTAA

SEQ ID NO: 109331 - protein, 54 aa, Setaria italica
  Transcript Sequence Number=SeqID_43357
LMHSSAVQDRENQQISNLDLEVNCNKSFSGPFYQKNWHFIKRITPAHILHSLVT

SEQ ID NO: 109332 - protein, 84 aa, Setaria italica
  Transcript Sequence Number=SeqID_43358
  Gene Ontology: Mol. function=heat shock protein binding; Biological process=metabolic process
  Homolog annotation: Hit_ID=B6SSP4; Match level="QueryCoverage=98%, HitCoverage=24%, E-value=2e-27, Identity=74%"; Hit description =Peptidoglycan binding domain containing protein
RLFSGKTGEDGTTKDGTNGAAVPAVTGIAEVRQTVVAENGVSGVGVSEHRVFLLGENRWEDPSRLTSNKKPVSTGTAASTKTCI

SEQ ID NO: 109333 - protein, 131 aa, Setaria italica
  Transcript Sequence Number=SeqID_43359
  Gene Ontology: Mol. function=heat shock protein binding; Biological process=metabolic process
  Homolog annotation: Hit_ID=B6SSP4; Match level="QueryCoverage=97%, HitCoverage=37%, E-value=2e-65, Identity=91%"; Hit description =Peptidoglycan binding domain containing protein
  Pfam annotation: Domain name=DnaJ_CXXCXGXG; Domain location=65-131; Score=-28.7; E_value=0.0076; Accession=PF00684.11; Description=DnaJ central domain (4 repeats)
MFLQDGTNGAAVPAVTGIAEVRQTVVAENGVSGVGVSEHRVFLLGENRWEDPSRLTSNKKPVSTGTAASTKTCISCRGEGRLMCLECDGTGEPNIEPQFLEWVGEDTKCPYCEGLGSILCDVCDGKKVVAS

SEQ ID NO: 109334 - protein, 275 aa, Setaria italica
  Transcript Sequence Number=SeqID_43360
  Gene Ontology: Mol. function=protein binding; Cellular component =nucleus; Biological process=ubiquitin-dependent protein catabolic process
  Homolog annotation: Hit_ID=Q8H7P5; Match level="QueryCoverage=90%, HitCoverage=41%, E-value=4e-90, Identity=72%"; Hit description =Leucine Rich Repeat family protein, expressed
HGWDASAFRPWAAAIAAGAFPALASLYLKRIPVTDADLDLLSRSLPASFRDLSLHLCDGFSSRGLASIASHCRALRVLDVVECDMAEEQEVVDWVAAFRPEPTNLESLSFECYEQPVSFAALEALVARSPRLTRLGVNQHISLGQLRRLMAHAPRLSHLGTGSFRPADGGEEGVGFGEVLAAFDSAGRARTLVSLSGFRELAQEYLPTITVVCSNLKSLDLSYTPVTPNQILMFIGQCYNLETLWVLDSVRDEGLGNVAISCKKLKCLRVLPLNA

SEQ ID NO: 109335 - protein, 264 aa, Setaria italica
  Transcript Sequence Number=SeqID_43361
  Gene Ontology: Mol. function=protein binding; Cellular component =nucleus; Biological process=ubiquitin-dependent protein catabolic process
  Homolog annotation: Hit_ID=Q8H7P5; Match level="QueryCoverage=100%, HitCoverage=43%, E-value=1e-132, Identity=85%"; Hit description =Leucine Rich Repeat family protein, expressed
FIGQCYNLETLWVLDSVRDEGLGNVAISCKKLKCLRVLPLNAHEDADELVSEVGLTAISQGCPELRSILYFCQTMTNAAVIAMSRNCPELKVFRLCIMGRHQPDHATGEPMDEGFGAIVQNCSKLTRLSTSGHLTDRAFEYIGRYGKSLRTLSVAFAGNSDVALQYILQGCSKLEKLEIRDCPFGDAGLLSGMHHFYNMRFVWMSGCNLTLQGCKEVARGLPRMVVELINGQPENERTEKVDILYMYRSLDGPREDVPSFVKIL

SEQ ID NO: 109336 - protein, 120 aa, Setaria italica
  Transcript Sequence Number=SeqID_43362
  Homolog annotation: Hit_ID=B9SMD1; Match level="QueryCoverage=92%, HitCoverage=12%, E-value=4e-16, Identity=40%"; Hit description =Pentatricopeptide repeat-containing protein, putative
CEAGEMDHAHNLLKLLISKGYTFDPAAFMPVIDALSNKGKKQDADMLSEKMMEMADFNDGLGTYSGKITPGSRRHEHAKNGQSDWRALLHRDDSARTIMKITRRVRTGWGQRGNVYEHKQ

SEQ ID NO: 109337 - protein, 112 aa, Setaria italica
  Transcript Sequence Number=SeqID_43363
  Gene Ontology: Cellular component=integral to membrane; Biological process=transport
  Homolog annotation: Hit_ID=Q6ZGM7; Match level="QueryCoverage=95%, HitCoverage=16%, E-value=4e-37, Identity=70%"; Hit description =Probable metal-nicotianamine transporter YSL7
SPAGLIGFYLSRAWIRVLDSFKVPHLPFTRQENTVIQTCVVACSAITFSGGFGTYILAMGKIAAGGDTKNIVEPNIGRSITFLFLVSFSGLFILMPLRKVMIIKLRLTNLLL

SEQ ID NO: 109338 - protein, 204 aa, Setaria italica
  Transcript Sequence Number=SeqID_43364
  Homolog annotation: Hit_ID=Q9M9G8; Match level="QueryCoverage=75%, HitCoverage=78%, E-value=1e-42, Identity=52%"; Hit description =F14O23.16 protein
MDSEADRAAAPAPAAAAEASDDAIQEESAATAPARDGKAGSGAAAASAPEVEVQLFRRGRPVSVFRSPLGGWSQDQLEVGDILEQHGLKSVFAFDPATRKRGVAIRFNPRNGRSLLTYAPDSTIFLDGEPKDSLLKPITKMVIGVAAMTVVAAVLFKEAKMPEWLASRLGTVNFPPWVLACMVIVFVRLRKRTKNVMKKFGWAS

SEQ ID NO: 109339 - protein, 84 aa, Setaria italica
  Transcript Sequence Number=SeqID_43365
WYMLTRLNRSSGIREQIGFNIYRHTTHLQRYGHALYSPPHCQISTAFLDASTPREAHGRPAGHLFLRLSYTLVQYMLTTPSKRQ

SEQ ID NO: 109340 - protein, 115 aa, Setaria italica
  Transcript Sequence Number=SeqID_43366
GLLLPSADSTRACCLFCGTGNDACVIRHKLTATHGARCFGSYNGHCPNRDARFLYLPDALGTGLNHGQRDMVILAATLSCSPDDQNCIGAGIVMQWQFIAGQRQVAFYRDDNREE

SEQ ID NO: 109341 - protein, 168 aa, Setaria italica
  Transcript Sequence Number=SeqID_43367
  Gene Ontology: Mol. function=protein serine/threonine kinase activity; Biological process=protein amino acid phosphorylation
  Homolog annotation: Hit_ID=B9A1H1; Match level="QueryCoverage=96%, HitCoverage=15%, E-value=2e-62, Identity=67%"; Hit description =Putative LRR-kinase protein
HNHCHPPIVHCDVKPSNILLTEDMSARVGDFGISRILLESANKAGQNSNSTIGIRGSIGYVAPEYGEGSPISTVGDVYSLGISLLEMFTGRSPTDDMFRESVDLHKFSEAALPDRVLEIADPTIWLHNDAKVNITRSRVQECLVSAIRIGVSCSKQQPRERMPIRRCS

SEQ ID NO: 109342 - protein, 103 aa, Setaria italica
  Transcript Sequence Number=SeqID_43368
MATKTPAAAAALLLWLVVVASSPRAALGNCRDECEAACIGWPIVCKLSCASACMGQAGIATMSTTASAAAAPPKHPAASAPAPSPSGGGVLVLRKGFKAKGTK

SEQ ID NO: 109343 - protein, 150 aa, Setaria italica
  Transcript Sequence Number=SeqID_43369
  Gene Ontology: Mol. function=rRNA pseudouridylation guide activity; Cellular component=ribonucleoprotein complex; Biological process =ribosome biogenesis
  Homolog annotation: Hit_ID=B6THL0; Match level="QueryCoverage=100%, HitCoverage=94%, E-value=1e-64, Identity=81%"; Hit description=H/ACA ribonucleoprotein complex subunit 2
  Pfam annotation: Domain name=Ribosomal_L7Ae; Domain location=30-124; Score=92.3; E_value=1.7e-24; Accession=PF01248.18; Description =Ribosomal protein L7AeL30eS12eGadd45 family
MGSDTEAEKKRAPVALAPIAKPLAGKKLCKRTLKLVRRASEAKCLKRGVKEVVKSIRRGNKGLCVIAGNISPIDVITHVPILCEEASIPYVYVPSKEDLATAGTTKRPTCCVLVMTKPAKGELEGEVKEKLKTDYDQVTSEVAEVTSAMF

SEQ ID NO: 109344 - protein, 51 aa, Setaria italica
  Transcript Sequence Number=SeqID_43370
FITEHQSSKHLHGYTYTVMLSGTWNTVALHDTSREELYLSLVLSVQECVLA

SEQ ID NO: 109345 - protein, 107 aa, Setaria italica
  misc_feature (21)..(21): Xaa can be any naturally occurring amino acid
  Transcript Sequence Number=SeqID_43371
  Gene Ontology: Mol. function=unfolded protein binding; Cellular component=cytoplasm; Biological process=cellular protein metabolic process
  Homolog annotation: Hit_ID=Q6YUK5; Match level="QueryCoverage=83%, HitCoverage=17%, E-value=4e-42, Identity=88%"; Hit description=T -complex protein 1, delta subunit
AERSLHDALCVIRCLVNKRFXIAGGGAPEIEMSMQLAAWAKELQGMESYCIKEYAEALEVIPYTLAENAGLNPISIVTELRTMENAGLNPISIVTELRNRHARVLLT

SEQ ID NO: 109346 - protein, 535 aa, Setaria italica
  misc_feature (96)..(96): Xaa can be any naturally occurring amino acid
  Transcript Sequence Number=SeqID_43372
  Gene Ontology: Mol. function=unfolded protein binding; Cellular component=cytoplasm; Biological process=cellular protein metabolic process
  Homolog annotation: Hit_ID=Q6YUK5; Match level="QueryCoverage=97%, HitCoverage=97%, E-value=0.0, Identity=86%"; Hit description=T -complex protein 1, delta subunit
  Pfam annotation: Domain name=Cpn60_TCP1; Domain location=38-535; Score=667.8; E_value=9.8e-198; Accession=PF00118.16; Description=TCP- 1cpn60 chaperonin family
MAAAAAAAPAPSRKTETYTDTKRRDDVRGANIAAARAVADAVRTSLGPRGMDKMISSGDQEVIITNDGATIVSRMSLVQPAARMLAELSRSQDAAXAGDGTTTVVVLAGSLLRRAQSLLSAGAHPTAAADALHRLATRAIEILHSMAIPIELSDRESLVKSASTALNSKVVSQYSTLLSPLAVDAALSVVDPAHPDLLDLRDIRIVKKLGGTVDDTELVRGLIFDKKASHAAGGPTRVENARIAVIQFQISPPKTDIEQSVIVSDYAQMDRILREERNYILGMVKKIKAAGCNVLLIQKSILRDAVTELSLHYLAKAKIMVVKDVERDEIEFITKTLNCLPIANIEHFRADKLGSADLVEEVSVGEGKVVKITGIRDMGRTATVLVRGSNQLVIDEAERSLHDALCVIRCLVNKRFLIAGGGAPEIEMSMQLAAWAKELQGMESYCIKEYAEALEVIPYTLAENAGLNPISIVTELRNRHARGEKNTGINVRKGQITNILEENVVQPLLVSTSAITLACECVRMILKIDDIVTVR

SEQ ID NO: 109347 - protein, 201 aa, Setaria italica
  Transcript Sequence Number=SeqID_43373
  Gene Ontology: Cellular component=integral to membrane
  Homolog annotation: Hit_ID=B9H8I0; Match level="QueryCoverage=100%, HitCoverage=52%, E-value=2e-78, Identity=69%"; Hit description =Proline transporter (Fragment)
RLLAKSIFGPWGYWYVSSFQQVASVGNNIAIQIAAGSSLKAVYKHYYAADDRAMTLQQFILLFGAFELLLSQLPDIHSLRWVNAICTASTVGFAATTIGVTVHDGYRIDRKEVSYSLQGTTATKIFRAFNALGTIAFSFGDAMLPEIQSTVREPVRANMYRGVSAAYTIIVVSYWTLAFSGYWAFGLKSSPTSCPSLTAPR

SEQ ID NO: 109348 - protein, 272 aa, Setaria italica
  Transcript Sequence Number=SeqID_43374
  Gene Ontology: Mol. function=cinnamoyl-CoA reductase activity; Biological process=cellular metabolic process
  Homolog annotation: Hit_ID=O82726; Match level="QueryCoverage=100%, HitCoverage=78%, E-value=1e-120, Identity=77%"; Hit description =Cinnamoyl-CoA reductase
  Pfam annotation: Domain name=3Beta_HSD; Domain location=2-239; Score=- 111.4; E_value=0.003; Accession=PF01073.11; Description=3-beta hydroxysteroid dehydrogenaseisomerase family
  Pfam annotation: Domain name=Epimerase; Domain location=5-205; Score =34.5; E_value=1.1e-09; Accession=PF01370.13; Description=NAD dependent epimerasedehydratase family
  Pfam annotation: Domain name=NAD_binding_4; Domain location=3-189; Score=-84.5; E_value=0.0016; Accession=PF07993.4; Description=Male sterility protein
  Pfam module annotation: Pfam domain module=3Beta_HSD::Epimerase::NAD _binding_4; Domain location=2-239::5-205::3-189
PKNDHLRALEGATDRLVLLRADLLDPDSLLAAFSGCEGVFHAASPVTDDPEKMIEPAILGTRYVITAAADTGVKRVVFTSSIGTVYMNPYRDPNKLVDDTCWSDLEYCKKTKNWYCYAKTVAEQGAWEVARMRGLDLIVVNPVLVLGPLLQPTVNASTDHVMKYLTGSAKTYVNAAQAYVHVMDVAEAHVRVYEAPGAHGRYICAESTLHRGELCRILAKLFPEYPIPTKCKDEVNPPVIGYKFTNQRLKDLGMEFVPVLQCLYETVKSLQE

SEQ ID NO: 109349 - protein, 182 aa, Setaria italica
  Transcript Sequence Number=SeqID_43375
  Gene Ontology: Mol. function=nucleoside-triphosphatase activity; Cellular component=membrane; Biological process=transport
  Homolog annotation: Hit_ID=Q8GU82; Match level="QueryCoverage=95%, HitCoverage=12%, E-value=2e-79, Identity=82%"; Hit description=PDR -like ABC transporter
LKFVLYLRGATDFFETMGFKCPSRKNVADFLQEVTSKMDQKQYWAGDQNKYHYHSIEKFAKAFRMSYLPRLEEEKLCSSNSTGKNKEVKMSASRQISRWNIFKACFSREVLLLKRNSPVHIFKTIQITVMALVISTLFLRTKMSHKSVLDANEYMGALFMAVVIVNFNGMTEIAMTISDFPL

SEQ ID NO: 109350 - protein, 125 aa, Setaria italica
  Transcript Sequence Number=SeqID_43376
VSLRRGSSRAFHKSSHLIDRTVRPSVSDRSSDGAGIGLRQAGRGCLPPHHPGLRRRRLISGGGEHVLRQNKVRAVGVHSKACPGEGGRGVVCCCCPIWYGDSCCPLRFCTALAPSPLTSRRFGPE

SEQ ID NO: 109351 - protein, 114 aa, Setaria italica
  misc_feature (96)..(96): Xaa can be any naturally occurring amino acid
  Transcript Sequence Number=SeqID_43377
  Gene Ontology: Mol. function=histidine-tRNA ligase activity; Cellular component=cytoplasm; Biological process=tRNA aminoacylation for protein translation
  Homolog annotation: Hit_ID=P93422; Match level="QueryCoverage=91%, HitCoverage=12%, E-value=1e-38, Identity=80%"; Hit description =Histidyl-tRNA synthetase
PLARVADAVAALSCEAARGDAASFDVPASGDGLSAKDEADVAADIKMLVFGSKLVGSAGGAPAPAAATFAKVPTVNGIFREAVRALHARVRIELNXPVKLGKRDGGDETGCKGK

SEQ ID NO: 109352 - protein, 118 aa, Setaria italica
  Transcript Sequence Number=SeqID_43378
FDMTKTTIKKVMKRTSSKSATNKTDKWIRGCTKATQHQDCQKDTNRHKADNSWYQIKYQSIVPTMSQALLSCSSAMCSFVVARDTCSLLIKPSLSTIQHHCTSWQNGMAMTTKIEPLH

SEQ ID NO: 109353 - protein, 171 aa, Setaria italica
  misc_feature (35)..(35): Xaa can be any naturally occurring amino acid
  misc_feature (139)..(139): Xaa can be any naturally occurring amino acid
  misc_feature (161)..(161): Xaa can be any naturally occurring amino acid
  Transcript Sequence Number=SeqID_43379
  Gene Ontology: Mol. function=DNA binding; Cellular component=nucleus; Biological process=regulation of transcription, DNA-dependent
  Homolog annotation: Hit_ID=Q9AV47; Match level="QueryCoverage=92%, HitCoverage=21%, E-value=3e-67, Identity=76%"; Hit description=Auxin response factor 22
SALSFLPILIVANLLQVTWDEPDLLRNLRTKTKIXKCVNPWLVELVSSIPPIHLGPFSPPRKKLRMPQHPDFPFDGQLLNPVFHGNPLGPSNSPICCFPDNAPAGIQGARHAQFGLPLTDHQLNKLHLGLFQGSGFNRXDAITPQSRISKGFVITSAPVKXSVSCLLTLAH

SEQ ID NO: 109354 - protein, 625 aa, Setaria italica
  Transcript Sequence Number=SeqID_43380
  Gene Ontology: Mol. function=protein dimerization activity; Cellular component=nucleus; Biological process=regulation of transcription, DNA-dependent
  Homolog annotation: Hit_ID=Q9AV47; Match level="QueryCoverage=99%, HitCoverage=90%, E-value=0.0, Identity=78%"; Hit description=Auxin response factor 22
  Pfam annotation: Domain name=Auxin_resp; Domain location=216-299; Score=176.6; E_value=7.1e-50; Accession=PF06507.5; Description=Auxin response factor
  Pfam annotation: Domain name=B3; Domain location=59-164; Score=115.8; E_value=1.4e-31; Accession=PF02362.13; Description=B3 DNA binding domain
  Pfam module annotation: Pfam domain module=Auxin_resp::B3; Domain location=216-299::59-164
TTNYVLCCVAGVRFLADPETDEVFAKIRLVPVAPSGEADLRDPDELGGDPADAREKLSSFAKTLTQSDANNGGGFSVPRYCAETIFPKLDYRADPPVQTVLAKDVHGEVWKFRHIYRGTPRRHLLTTGWSTFVNQKKLVAGDSIVFLRTEHGELCVGIRRAKRVSCGGMECMSGWNAPGYGAFSAFLKDEESKMMKGPGGYMRGMGKVKIADVVEAASLASRGQPFEVVYYPRASTPEFVVKAASVQNAMRNHWCPGMRFKMAFETEDSSRISWFMGTIASVQVADPIRWSNSPWRLLQVTWDEPDLLQNVKCVNPWLVELVSSIPPIHLGPFSPPRKKLRMPQHPDFPFDGQLLNPVFHGNPLGPSNSPICCFPDNAPAGIQGARHAQFGLPLTDHQLNKLHLGLFQGSGFNRLDAITPQSRISKGFVITSAPVKESVSCLLTIGTPQGTEKSDDRKKPHIMLFGKPILTEQQMNSGGSRETFSPEVTGNGSSDGNAQKTGNVSDGSGSSICIGFSSQGREASELGLEAGHCKVFMESEDVGRTIDLSVFGSYEELYGQLADMFGIEKAEIMSHLHYRDAAGAVKHTGEEPFSDFMKVARRLTITERGEGRLQKPLIEYMVERA

SEQ ID NO: 109355 - protein, 71 aa, Setaria italica
  misc_feature (42)..(42): Xaa can be any naturally occurring amino acid
  Transcript Sequence Number=SeqID_43381
  Homolog annotation: Hit_ID=C0RWW9; Match level="QueryCoverage=97%, HitCoverage=8%, E-value=4e-16, Identity=81%"; Hit description =Ameiotic 1
  Subcellular localization annotation: CTP_CleavageSite=35; ConfidenceScore=5.32e-01
GTAAAAGFSPQKLLHFSGLTRLHVDTSSPSSGACGASLLEGXKRALFNADAGGISVSVVGTELALATPSYR

SEQ ID NO: 109356 - protein, 111 aa, Setaria italica
  Transcript Sequence Number=SeqID_43382
  Subcellular localization annotation: CTP_CleavageSite=39; ConfidenceScore=5.08e-01
VDLWIWSWFFQSWSSAKQALNLPDSGATTPNHRHAVHPNGNKGSVNRTWHETRSKLTDPSIIIGADVAANLTAGRRRVLFLVAPALHLRPPVAAQAGPERQEPRRVARTRT

SEQ ID NO: 109357 - protein, 92 aa, Setaria italica
  Transcript Sequence Number=SeqID_43383
HLIPAELVVMVEGVVVAKDLSQPAVKHSGLPSHPERQSTFQSHGTSTLPTNHQKSSTSAAIESLLTSAPPSPPPPPPPPPPLAHTHHQRPVL

SEQ ID NO: 109358 - protein, 287 aa, Setaria italica
  misc_feature (24)..(24): Xaa can be any naturally occurring amino acid
  Transcript Sequence Number=SeqID_43384
  Homolog annotation: Hit_ID=Q6ZCX3; Match level="QueryCoverage=96%, HitCoverage=20%, E-value=4e-42, Identity=43%"; Hit description =Formin-like protein 6
EDLGPISPTNKHSDNLQQEPSNDXLPTVYVTRKENVGGQRLTLLEPSTNSEVKTGISVVQENLGSLVHKVDSNTEQSTASEKAVSSTVKSIEPVLKDENAKLDEQHASDQRSSPTTTMSRRFPISSSCSALSGNSSPRLLSGCPRFHSAPSALGITALLEDHARCSDDCRSTVTSTTVSNVSTGVVKITSKLPSGQHPATGTPVITKGMPPPPPPPSRPALLVSDAIMMSEAKDLSQPAVKHSGLPSHPERQSTFQSHGTSTLPTNHQKSSTSAAIESLLTSAPPSP

SEQ ID NO: 109359 - protein, 56 aa, Setaria italica
  Transcript Sequence Number=SeqID_43385
GRHLMPAQLTTINTLAKVHGFLLHSKEKLTITTIQCSKAVYLWIHRSILRTTKHII

SEQ ID NO: 109360 - protein, 125 aa, Setaria italica
  misc_feature (18)..(18): Xaa can be any naturally occurring amino acid
  misc_feature (72)..(72): Xaa can be any naturally occurring amino acid
  misc_feature (109)..(109): Xaa can be any naturally occurring amino acid
  misc_feature (115)..(115): Xaa can be any naturally occurring amino acid
  Transcript Sequence Number=SeqID_43386
  Gene Ontology: Mol. function=potassium ion transmembrane transporter activity; Cellular component=integral to membrane; Biological process=potassium ion transport
  Homolog annotation: Hit_ID=B6U7Z6; Match level="QueryCoverage=92%, HitCoverage=14%, E-value=4e-55, Identity=87%"; Hit description =Potassium transporter 2
MRVIVTYLSTSPLYVYKXTFSGKLRQYQDEETVFGVLSLIFWTFTLIPLLKYVTIVLSADDNGEGGPFAKQXIQCKYAKLSLLPNQQAADEELSSYYRNGFAPRNGSAXWLRRFXEKHKKVKNCA

SEQ ID NO: 109361 - protein, 117 aa, Setaria italica
  Transcript Sequence Number=SeqID_43387
  Gene Ontology: Mol. function=protein binding; Cellular component =chromatin remodeling complex; Biological process=regulation of transcription, DNA-dependent
  Homolog annotation: Hit_ID=A2ZP58; Match level="QueryCoverage=71%, HitCoverage=14%, E-value=3e-43, Identity=91%"; Hit description=Actin- related protein 5
AISCEHGTCHVVPFLKGQPVLGPCSRTNVGGFHITDFLRQLLSLKYPYHTANFTWEKAEELKKEHCYVAFDYMSELQIFKNNKEEAEEKTRYWQLPWVPPPKEEPPSEEELCKSKTL

SEQ ID NO: 109362 - protein, 406 aa, Setaria italica
  Transcript Sequence Number=SeqID_43388
  Gene Ontology: Mol. function=protein binding; Cellular component =chromatin remodeling complex; Biological process=regulation of transcription, DNA-dependent
  Homolog annotation: Hit_ID=A9TSQ1; Match level="QueryCoverage=95%, HitCoverage=53%, E-value=1e-106, Identity=48%"; Hit description =Actin-related protein Arp5
  Pfam annotation: Domain name=Actin; Domain location=16-357; Score= -81.3; E_value=3e-10; Accession=PF00022.11; Description=Actin
MSSVTRPRREADFARFPSSNPIVIDNGASTFRIGWAGETEPRATFRNVVQRPRHRSTGETVSIVGDTDPALMKFFDCTRSAVRSPFDDDVVYQFEYMEYILDYGFDRLGANSEVGHPILMTECECNPSFSRARMAELLFETYGVPSIAFGIDNAFSYKYNQKLGNCNEDGLAISCEHGTCHVVPFLKGQPVLGACSRTNVGGFHITDFLRQLLSLKYPYHTANFTWEKAEELKKEHCYVAFDYMSELQIFKNNKEEAEEKTRYWQLPWVPPPKEEPPSEEELARKAALKEKAGQRLREYAANKRYQKIVELEKTLSDLEELMEQLDEAEESDATAILSKSKYLSQQDVKSAILKTTQALRKAKGESNGNEEKADAPAADKYPLVSVPDEELTPEQLKEKKKQILLK

SEQ ID NO: 109363 - protein, 168 aa, Setaria italica
  misc_feature (91)..(91): Xaa can be any naturally occurring amino acid
  Transcript Sequence Number=SeqID_43389
  Gene Ontology: Mol. function=intramolecular transferase activity, phosphotransferases; Cellular component=chloroplast; Biological process=carbohydrate metabolic process
  Homolog annotation: Hit_ID=Q69TT1; Match level="QueryCoverage=96%, HitCoverage=32%, E-value=9e-83, Identity=93%"; Hit description =Putative phosphomannomutase
  Pfam annotation: Domain name=PGM_PMM_II; Domain location=18-131; Score=73.1; E_value=1e-18; Accession=PF02879.8; Description =Phosphoglucomutasephosphomannomutase, alphabetaalpha domain II
GSGGGGMPPVVMRVDLMSAYAQHLRDIIKQRVAHPTHYDTPLKGFKVVVNAGNGCGGFFTWDVLEKLGADTTGSLHLEPDGTFPNHMPNPXEDATAMSLTRDAVLAHGADLGVVFDTDVDRSGVVDDTGAAINGDRLIALMSAIVLDEHPSTTVVTDARASDGLTRFI

SEQ ID NO: 109364 - protein, 52 aa, Setaria italica
  Transcript Sequence Number=SeqID_43390
TWYRCFSVSSEPEFPDKFYLQPELNLPQLKSTLSMSNIKLAKYAKWFNDSAE

SEQ ID NO: 109365 - protein, 148 aa, Setaria italica
  misc_feature (95)..(95): Xaa can be any naturally occurring amino acid
  misc_feature (103)..(103): Xaa can be any naturally occurring amino acid
  misc_feature (119)..(119): Xaa can be any naturally occurring amino acid
  Transcript Sequence Number=SeqID_43391
  Gene Ontology: Mol. function=carbon-nitrogen ligase activity, with glutamine as amido-N-donor
  Homolog annotation: Hit_ID=Q2QX53; Match level="QueryCoverage=99%, HitCoverage=23%, E-value=6e-69, Identity=89%"; Hit description =Amidase family protein, expressed
CATSLAKYLDKLKRSEIGWDARVALSVYGSFSSRAYLNSQRLRNRQMYFHKEIFKTADVIVSPMTGVTAYTLQDDAFNTGELDYINGAALVRYSXIAGNFLGXLPAITVMVGHDKGGLXPIGLQFIGRPWSEATLLHIAFAMQASLKI

SEQ ID NO: 109366 - protein, 342 aa, Setaria italica
  Transcript Sequence Number=SeqID_43392
  Gene Ontology: Mol. function=carbon-nitrogen ligase activity, with glutamine as amido-N-donor; Biological process=translation
  Homolog annotation: Hit_ID=Q2QX53; Match level="QueryCoverage=100%, HitCoverage=56%, E-value=1e-174, Identity=85%"; Hit description =Amidase family protein, expressed
  Pfam annotation: Domain name=Amidase; Domain location=2-315; Score =49.2; E_value=9.2e-14; Accession=PF01425.13; Description=Amidase
  Subcellular localization annotation: CTP_CleavageSite=84; ConfidenceScore=5.50e-01
GINPQHGSARNPYNSNKIAGGSSSGSAAVVSAGLCPVALGVDGGGSVRMPAALCGIVGFKPTAGRLSNAGVLPLNWTVGMPGILAGTVEDALIAYSAIVDQSQPSYLRPELNLPQLKSTLSMSNIKLAKYAKWFNDSAEDIRSCCDKALKTLQAHYGWQTVDVTIPEIEEMRLAHYVTIGSECTTSLAKYLDKLKRSEIGWDARVALSVYGSFSSRAYLNSQRLRNRQMYFHKEIFKTADVIVSPMTGVTAYTLQDDAFNTGELDYINGAALVRYSIAGNFLGLPAITVMVGHDKGGLPIGLQFIGRPWSEATLLHIAFAMQEACAKGHKKPAVFYDLLKKE

SEQ ID NO: 109367 - protein, 76 aa, Setaria italica
  Transcript Sequence Number=SeqID_43393
RQVTLRRLTLTGQAPSKGQTAHLPWWITDSTIPGKPILEKSQFQIHTGHVSNQLELPHALDNAQEENYFQHLRLAY

SEQ ID NO: 109368 - protein, 100 aa, Setaria italica
  Transcript Sequence Number=SeqID_43394
PSIRPMRGCVSVLVRSEIEDSEGAQLRLRPSALFTQTSEVQLSSVLSASEVFGCWKRQQVGCKYGRAEQRAQHGTRTLSLLCTWMLPSRSRCCSCRNKFG

SEQ ID NO: 109369 - protein, 200 aa, Setaria italica
  Transcript Sequence Number=SeqID_43395
  Homolog annotation: Hit_ID=B6TJK8; Match level="QueryCoverage=100%, HitCoverage=61%, E-value=1e-71, Identity=75%"; Hit description=PAC
ARILVSSFIRAGEDVEEEIEKAAERGDLTELVLMVIWNRLDVARRDDERDAIRSLDLLYRRVEAEILKSEATPAMRLLNELLNLHDGGDDDKWLKKCRKRMLEVFPREDPFTVVFPASFNMEKHEGRIELPPQDDDLLLRVDFVREVDELLKEVQAEQEKNKLQTGYDPESVANMLKQQEKMQTIRQVESLQDLASSLKW

SEQ ID NO: 109370 - protein, 89 aa, Setaria italica
  misc_feature (35)..(35): Xaa can be any naturally occurring amino acid
  Transcript Sequence Number=SeqID_43396
MAGGGSRRGGAAEEPRIGSGNVFAALETLKKKKKXRRRRARGPSPPRPGGEEEEPPRPELFWAPAPLTAKSWADVEDDDDDDYFATTAP

SEQ ID NO: 109371 - protein, 349 aa, Setaria italica
  Transcript Sequence Number=SeqID_43397
  Gene Ontology: Mol. function=hydrolase activity, acting on glycosyl bonds; Cellular component=vacuole; Biological process=cell wall organization and biogenesis
  Homolog annotation: Hit_ID=B6SZN5; Match level="QueryCoverage=99%, HitCoverage=70%, E-value=0.0, Identity=89%"; Hit description =Polygalacturonase
  Pfam annotation: Domain name=Glyco_hydro_28; Domain location=25-334; Score=12.7; E_value=9.8e-10; Accession=PF00295.9; Description =Glycosyl hydrolases family 28
RFTLFLHRGAVILGSQDPEEWPLIAPLPSYGRGRERLGPRHISLIHGEGLNDVVVTGNNGTIDGQGGMWWELWWNRTLNHTRGHLVELVNSSNILISNITLRNSPFWTVHPVYCSNVVMKDLTILAPLNAPNTDGIDPDSSSEVCIEDCYIESGDDLVAIKSGWDQYGISVGKPSTNIVIQRVSGTTPTCSGVGFGSEMSGGISNVLVRDLHVWSSAQAVRLKTDIGRGGYITNITIVNVTMEKVKVPIRFSRGADDHSDDNYDRTALPRISNVLISDIVGVDLQRAPMLEAVAGAVYEGICFRNVSLRGIRRQDRWHCESVYGEAHGVFPAPCEEFRSNGSSSWCGFS

SEQ ID NO: 109372 - protein, 92 aa, Setaria italica
  Transcript Sequence Number=SeqID_43398
MTKKIIYCNKVWPMYVIHEEDRWPLHGSLNLQLEHFNLRSGNWDCIPYIQASMLVHNKHASQKGCWLTVQTGPYQVKSPHSPLPEEEEKEIG

SEQ ID NO: 109373 - protein, 165 aa, Setaria italica
  Transcript Sequence Number=SeqID_43399
MAEQETVARSMNTTGEGVVWCVSNADQYKQLCKKCTLLWINIFLHPNKTVRIVEFCVIVAAVVLLILLLVGPWRRRSRNPIVLYAVSGAYLLSLPLLSYTLGLMQGVVKNELYLVWATFLILLISGANSVSVQNLDENKQWLKLILDNVMYLIYGGSTVAIFFVK

SEQ ID NO: 109374 - protein, 64 aa, Setaria italica
  Transcript Sequence Number=SeqID_43400
  Gene Ontology: Mol. function=nucleotide binding; Cellular component =nucleus; Biological process=small GTPase mediated signal transduction
  Homolog annotation: Hit_ID=P41916; Match level="QueryCoverage=90%, HitCoverage=26%, E-value=2e-27, Identity=98%"; Hit description=GTP -binding nuclear protein Ran-1
MFSLVAGKTTFVKRHLTGEFEKKYEPTIGVEVHPLDFTTNCGKIRFYCWDTAGQEKFGGLRDGY

SEQ ID NO: 109375 - protein, 56 aa, Setaria italica
  Transcript Sequence Number=SeqID_43401
KGFAVLPCSEARIAASGAVPRARLKMALPNQGTVDYPSFKLVIVGDGGTGEFLSVS

SEQ ID NO: 109376 - protein, 156 aa, Setaria italica
  misc_feature (39)..(39): Xaa can be any naturally occurring amino acid
  misc_feature (52)..(52): Xaa can be any naturally occurring amino acid
  misc_feature (83)..(83): Xaa can be any naturally occurring amino acid
  Transcript Sequence Number=SeqID_43402
  Gene Ontology: Mol. function=nucleotide binding; Cellular component =nucleus; Biological process=small GTPase mediated signal transduction
  Homolog annotation: Hit_ID=P41916; Match level="QueryCoverage=82%, HitCoverage=57%, E-value=8e-56, Identity=84%"; Hit description=GTP -binding nuclear protein Ran-1
  Pfam annotation: Domain name=Ras; Domain location=2-108; Score=22.3; E_value=5.1e-11; Accession=PF00071.14; Description=Ras family
WDKEESFGGLRDGYYIHGQCAIIMFDVTSRLTYKNVPTXHRDLCRVCENIPXVLCGNKVDVKNRQVKAKQVTFHRKERNLDKXLIEISAKSNYNFEKPFLYLARKLAGDPNLHFVEAVALKPPEVTIDMAMQQQHEAELAAAAAQPLPDDDDDLIE

SEQ ID NO: 109377 - protein, 203 aa, Setaria italica
  misc_feature (20)..(20): Xaa can be any naturally occurring amino acid
  misc_feature (188)..(188): Xaa can be any naturally occurring amino acid
  Transcript Sequence Number=SeqID_43403
  Gene Ontology: Mol. function=actin binding; Cellular component =nucleus; Biological process=cytoskeleton organization and biogenesis
  Homolog annotation: Hit_ID=A0MLT6; Match level="QueryCoverage=66%, HitCoverage=31%, E-value=2e-36, Identity=55%"; Hit description=Myb -like transcription factor
  Pfam annotation: Domain name=Myb_DNA-binding; Domain location=33-79; Score=54.1; E_value=5.3e-13; Accession=PF00249.23; Description=Myb -like DNA-binding domain
  Pfam annotation: Domain name=Myb_DNA-binding; Domain location=87-132; Score=51.6; E_value=3.1e-12; Accession=PF00249.23; Description=Myb -like DNA-binding domain
  Pfam module annotation: Pfam domain module=Myb_DNA-binding::Myb_DNA -binding; Domain location=33-79::87-132
WHRTANVVHAAWNGGQQQQXRAGGAVMRPPTLRGPWTEEEDETLKEMVKVYGERKWAAVSQHLPGRIGKQCRERWTNHLRPDIDKAKTIWTENDDIELIKAHKIHGNRWSMIARQLPGRSENAVKNHWNATKRSLKAKRRLKKKKNAEAPPGQQWSILEQYIRSLPPAAVAEDGAGAAPQQAPSDDSXPPSSYNTGGGYYGGE

SEQ ID NO: 109378 - protein, 168 aa, Setaria italica
  misc_feature (107)..(107): Xaa can be any naturally occurring amino acid
  misc_feature (151)..(151): Xaa can be any naturally occurring amino acid
  misc_feature (157)..(157): Xaa can be any naturally occurring amino acid
  Transcript Sequence Number=SeqID_43404
  Gene Ontology: Mol. function=transaminase activity
  Homolog annotation: Hit_ID=Q5QM29; Match level="QueryCoverage=98%, HitCoverage=17%, E-value=3e-42, Identity=47%"; Hit description =Aminotransferase-like
HRIPFKQSTMDLDHWLGTFRSWPNETPGWREWYQRIAEPKRVSWDELKIGQCSNLSLSQMERNEPLVIAASYFWSDALNAFLFGHGPMTPTLADVVLLTGLDISSQXTPFRLLAATSHRLDTRGIGGGKGFIRCNKRAGSVENREHTAFLXMWLEKXFFCGRAAGHQP

SEQ ID NO: 109379 - protein, 59 aa, Setaria italica
  misc_feature (59)..(59): Xaa can be any naturally occurring amino acid
  Transcript Sequence Number=SeqID_43405
DIKCIRIKIGYQHLVFSSTIAQQNHQTHENGTTPMSKSFKITNVFTKINLSAIQHNRMX

SEQ ID NO: 109380 - protein, 49 aa, Setaria italica
  Transcript Sequence Number=SeqID_43406
  Gene Ontology: Mol. function=transcription factor activity; Cellular component=nucleus; Biological process=regulation of transcription, DNA-dependent
  Homolog annotation: Hit_ID=B4FT20; Match level="QueryCoverage=100%, HitCoverage=11%, E-value=1e-14, Identity=95%"; Hit description=AP2 domain transcription factor
  Subcellular localization annotation: CTP_CleavageSite=26; ConfidenceScore=5.19e-01
WSPADPSADPLFWSNFVLPSSQPVTMATITTATFAKNEVSSSDPFQSQE

SEQ ID NO: 109381 - protein, 120 aa, Setaria italica
  Transcript Sequence Number=SeqID_43407
LCSRDQAGADGYAGWAQQRVIDLDKLLPVSDCNISVSPYVYAARPPYVVAVADSVGVIFIGKDDGLFTVHLNSGRAERIVVESNSNFKVVPYVSSCTPALDMASTGDEGPKVDDSSASQT

SEQ ID NO: 109382 - protein, 117 aa, Setaria italica
  Transcript Sequence Number=SeqID_43408
  Gene Ontology: Mol. function=electron carrier activity; Cellular component=extracellular region; Biological process=response to oxidative stress
  Homolog annotation: Hit_ID=B6U0T8; Match level="QueryCoverage=96%, HitCoverage=33%, E-value=2e-53, Identity=88%"; Hit description =Peroxidase 73
GGGGASVDPSYDPAYARQLMEACPPDVGATIAVDMDPVTPTAFDNAYYGNLAGGMGLFTSDQALYSDGASRPAVGDFAKNQTRFFEAFKDAMVKLGRVGVKTGRHGEIRRDCTAFNK

SEQ ID NO: 109383 - protein, 216 aa, Setaria italica
  Transcript Sequence Number=SeqID_43409
  Gene Ontology: Mol. function=ARF GTPase activator activity; Biological process=regulation of ARF GTPase activity
  Homolog annotation: Hit_ID=B6U114; Match level="QueryCoverage=92%, HitCoverage=28%, E-value=3e-86, Identity=79%"; Hit description=GTP -ase activating protein for Arf containing protein
  Pfam annotation: Domain name=ArfGap; Domain location=8-98; Score =17.9; E_value=8.7e-07; Accession=PF01412.10; Description=Putative GTPase activating protein for Arf
  Subcellular localization annotation: CTP_CleavageSite=38; ConfidenceScore=5.13e-01
FFSFFWFLRFFLFLLPNCSGAHREFTHRVKSVSMAKFTAQEVTALQEGGNERAREVFFKEWDPQRNGYPDSSNADKLRNFIKHAYVERRFTGERSADRPPRGKDDKDEYSENRRSDGNWGGSRSPPNGSYSDRRSYSGRSDDRNSRYSYGDRSPGYDQNDYRKSPRYFEVVDDRSGKTTPVQRFEDRRFSEPRKPDSGSPDFQKEADGSGPVVRPV

SEQ ID NO: 109384 - protein, 75 aa, Setaria italica
  Transcript Sequence Number=SeqID_43410
  Gene Ontology: Mol. function=ARF GTPase activator activity; Cellular component=cytoplasmic vesicle; Biological process=regulation of ARF GTPase activity
  Homolog annotation: Hit_ID=B6U114; Match level="QueryCoverage=82%, HitCoverage=8%, E-value=6e-33, Identity=95%"; Hit description=GTP -ase activating protein for Arf containing protein
  Pfam annotation: Domain name=ArfGap; Domain location=15-75; Score= -25.5; E_value=0.0045; Accession=PF01412.10; Description=Putative GTPase activating protein for Arf
DGNSEITRKSRRWHERIIRGLLKLPANKRCINCNNLGPQYVCTNFWTFICTNCSGAHREFTHRVKSVSMAKFTAQ

SEQ ID NO: 109385 - protein, 132 aa, Setaria italica
  misc_feature (27)..(27): Xaa can be any naturally occurring amino acid
  Transcript Sequence Number=SeqID_43411
  Gene Ontology: Mol. function=ARF GTPase activator activity; Biological process=regulation of ARF GTPase activity
  Homolog annotation: Hit_ID=B6U114; Match level="QueryCoverage=87%, HitCoverage=14%, E-value=2e-23, Identity=53%"; Hit description=GTP -ase activating protein for Arf containing protein
GQQEEIVELKILGWTSLLMPGWQRAPXFGMGYSMQYPAGVFQGMQAYPQAAFPQPTYQQPVYPQHAYPQPQPQPQPQPQPQPQPVKASNPFDLGNDPVPIQAPMPLSGPLGASAGTTPQTLLGTSSFGVPPQ

SEQ ID NO: 109386 - protein, 572 aa, Setaria italica
  Transcript Sequence Number=SeqID_43412
  Gene Ontology: Mol. function=ARF GTPase activator activity; Biological process=regulation of ARF GTPase activity
  Homolog annotation: Hit_ID=B6U114; Match level="QueryCoverage=100%, HitCoverage=78%, E-value=0.0, Identity=67%"; Hit description=GTP-ase activating protein for Arf containing protein
NSNWGGSRSPPNGSYSDRRSYSGRSDDRNSRYSYGDRSPGYDQNDYRKSPRYFEVVDDRSGKTTPVQRFEDRRFSEPRKPDSGSPDFQKEADGSGPVVRPVRDILGDNAPQLRVGEPSKPATEPPKPIVARPIDPPKPIVARPIDPPKPNGTRAIDPPPLAKTMSSASSIASSEGTSEPVKVANAVSLIDFSADPEPTAPAPPPQPASTTQQHPVNAPAPQPVLDKGNSAPSVSGGDWASFDAFGQQQTPQTTSSANPLESALAQLSFSEAPSATNVSAFPASNDPTLKVNDGGHPSIVDQSHNLFDAPFGISGNQASTVMSNQGSSVQQSPLAAPTAGLPSQVTANPQGTSGIQGAASSNDSKSSGRKELPADIFTALYPTSTPMMPGWQRAPQFGMGYSMQYPAGVFQGMQAYPQAAFPQPTYQQPVYPQHAYPQPQPQPQPQPQPQPQPVKASNPFDLGNDPVPIQAPMPLSGPLGASAGTTPQTLLGTSSFGVPPQQTHQLYQSAAPPSHFMMQQVPNSMPQQPPNSMHAAQQGLGSFNMGFDQQAPPRYPQPSTPPYGSVGGSNPFG

SEQ ID NO: 109387 - protein, 61 aa, Setaria italica
  Transcript Sequence Number=SeqID_43413
PFFFPYHELQLWTVMNILWSPSIIICLSLSSKVIVPTSSRICCITKAYIFKLGLLLIILRL

SEQ ID NO: 109388 - protein, 128 aa, Setaria italica
  misc_feature (115)..(115): Xaa can be any naturally occurring amino acid
  Transcript Sequence Number=SeqID_43414
  Gene Ontology: Mol. function=transferase activity, transferring glycosyl groups; Cellular component=chloroplast; Biological process =starch biosynthetic process
  Homolog annotation: Hit_ID=Q5NKR6; Match level="QueryCoverage=97%, HitCoverage=20%, E-value=2e-67, Identity=97%"; Hit description =Granule-bound starch synthase
AVTSRFEPCGLIQLQGMRYGTPCVCASTGGLVDTVIEGKTGFHMGRLSVDCKVVEPADVQKVASTLKRAIKVVGTPAYEEMVRNCMIQDLSWKGPAKNWENVLLSLGVAGSQPGXEGEEIAPLAKMIQ

SEQ ID NO: 109389 - protein, 83 aa, Setaria italica
  Transcript Sequence Number=SeqID_43415
  Gene Ontology: Mol. function=transferase activity, transferring glycosyl groups; Cellular component=chloroplast; Biological process =biosynthetic process
  Homolog annotation: Hit_ID=Q5NKR6; Match level="QueryCoverage=95%, HitCoverage=12%, E-value=7e-39, Identity=96%"; Hit description =Granule-bound starch synthase
SSIVLYCSAEEKYPDKVRAVVKFNAALAHHIMAGADLLAVTSRFEPCGLIQLQGMRYGTPCVCASTGGLVDTVIEGKTGFHMG

SEQ ID NO: 109390 - protein, 101 aa, Setaria italica
  Transcript Sequence Number=SeqID_43416
  Homolog annotation: Hit_ID=Q94LQ9; Match level="QueryCoverage=59%, HitCoverage=2%, E-value=5e-10, Identity=55%"; Hit description =Putative transcription regulatory protein
DRTVLAKFREYDKNSTTILFLPPMASGDLLVGELATTTKDIGAAIQPSPTVAINRLGSAFPELLNTGDALERYQHVWQKVIVVFILVGNCIESNWYHGGTS

SEQ ID NO: 109391 - protein, 132 aa, Setaria italica
  Transcript Sequence Number=SeqID_43417
  Homolog annotation: Hit_ID=Q7XC99; Match level="QueryCoverage=100%, HitCoverage=6%, E-value=4e-43, Identity=61%"; Hit description =Transcriptional regulator, putative, expressed
LKMNLKFDIEVLFKNLSVDMKDVKPSSLLKDRIRQVVGNPDFSNKDVSTSQTSAAAEVSSGIVPSMNHVELQPDINSTSRATSLPNMLNQVTSHSLTQVAPPQTPSPSPFSLSQLMAAIPRADIYFRINEKL

SEQ ID NO: 109392 - protein, 84 aa, Setaria italica
  Transcript Sequence Number=SeqID_43418
  Gene Ontology: Mol. function=transferase activity, transferring glycosyl groups; Cellular component=chloroplast; Biological process =biosynthetic process
  Homolog annotation: Hit_ID=Q5NKR6; Match level="QueryCoverage=90%, HitCoverage=12%, E-value=2e-24, Identity=80%"; Hit description =Granule-bound starch synthase
AKALNKEALQAVAGLPVDRKIPLVAFVGSHDVGALLLLQPADIPQLMEEDVQIVLLGTGKKKFERMLMSAEEKYPEGRSGHPPP

SEQ ID NO: 109393 - protein, 180 aa, Setaria italica
  misc_feature (123)..(123): Xaa can be any naturally occurring amino acid
  Transcript Sequence Number=SeqID_43419
  Gene Ontology: Biological process=dendrite morphogenesis
  Homolog annotation: Hit_ID=Q108Z7; Match level="QueryCoverage=83%, HitCoverage=5%, E-value=8e-49, Identity=67%"; Hit description =Transcriptional regulator, putative, expressed
  Pfam annotation: Domain name=Not1; Domain location=1-180; Score= -116.4; E_value=3e-07; Accession=PF04054.7; Description=CCR4-Not complex component, Not1
LLLYKGTLRVLLVLLHDFPEFLCDYHFSFCDVIPPSCIQMRNVIHIAWKSTKNNIAHLNAAWGNHMRNVILSAFPRNMRLPDPSTPNLKIDLLAEISIAPRIMTDVDAALKAKQMKAQVDEYXKRRPEGSLFLTDLKQKLLLPQNEANVVATFCIHSHYKVSEHLSSCFNLEYIHLRTLV

SEQ ID NO: 109394 - protein, 173 aa, Setaria italica
  misc_feature (59)..(59): Xaa can be any naturally occurring amino acid
  Transcript Sequence Number=SeqID_43420
  Homolog annotation: Hit_ID=Q7XC99; Match level="QueryCoverage=100%, HitCoverage=7%, E-value=2e-82, Identity=85%"; Hit description =Transcriptional regulator, putative, expressed
VMKRASIEPNFHDLYLKFFDKVNSKSLNKEILKATYENCKVLLRSDLIKSSSEERSLLXKNLGSWLGKFTIGRNQALRAKEIDPKSLIVEAYEKGLMIAVIPFTSKILEPCQSSIAYRPPNPWTMGILSLLAEIYNLPNLKMNLKFDIEVLFKNLTVDIKDVKPTSLLKDRVR

SEQ ID NO: 109395 - protein, 162 aa, Setaria italica
  misc_feature (88)..(88): Xaa can be any naturally occurring amino acid
  Transcript Sequence Number=SeqID_43421
  Gene Ontology: Mol. function=transferase activity, transferring glycosyl groups; Cellular component=chloroplast; Biological process =starch biosynthetic process
  Homolog annotation: Hit_ID=Q8LNZ0; Match level="QueryCoverage=95%, HitCoverage=29%, E-value=1e-80, Identity=98%"; Hit description =Granule bound starch synthase (Fragment)
KGPGIQYEADRVLTVSPYYAEELISGIARGCELDNIMRLTGITGIVNGMDVSEWDPSKDKYIATKYDVSTAIAAKALNKEALQAAAGXSPVDRKIPLVAFVGRLEEQKGPDVMAAAIPQLMEEDVQIVLLGTGKKKFERMLMSAEEKYPDKVRAVVKFNAAL

SEQ ID NO: 109396 - protein, 136 aa, Setaria italica
  misc_feature (120)..(120): Xaa can be any naturally occurring amino acid
  Transcript Sequence Number=SeqID_43422
  Gene Ontology: Mol. function=starch synthase activity; Cellular component=chloroplast; Biological process=glucan biosynthetic process
  Homolog annotation: Hit_ID=Q5NKR6; Match level="QueryCoverage=100%, HitCoverage=23%, E-value=3e-72, Identity=93%"; Hit description =Granule-bound starch synthase
AHHIMAGADLLEPCGLIQLQGMRYGTPCVCASTGGLVDTVIEGKTGFHMGRLSVDCKVVEPADVQKVASTLKRAIKVVGTPAYEEMVRNCMIQDLSWKGPAKNWENVLLSLGVAGSQPGXEGEEIAPLAKENVAAP

SEQ ID NO: 109397 - protein, 197 aa, Setaria italica
  misc_feature (114)..(114): Xaa can be any naturally occurring amino acid
  misc_feature (121)..(121): Xaa can be any naturally occurring amino acid
  Transcript Sequence Number=SeqID_43423
  Homolog annotation: Hit_ID=Q94LQ9; Match level="QueryCoverage=96%, HitCoverage=7%, E-value=4e-72, Identity=71%"; Hit description =Putative transcription regulatory protein
  Pfam annotation: Domain name=Not1; Domain location=1-196; Score=44.3; E_value=5.8e-15; Accession=PF04054.7; Description=CCR4-Not complex component, Not1
NHLRLKRPEGSLFLTDLKQKLLLPQNEANVAGTRYNVPLVNSLVLYVGMQAVQQLQQNKANASASAQINQSPQMDIFQIETATEMFRNLVMTMDTEGRYLILNAIANQLRYPNXHTHYFSXIILYLFAEATQEIVQEQITRVLLERLIVNRPHPWGLLITFIELIKNPRYSFWTRSFTHCAPEIEKLLEPMCQNSSL

SEQ ID NO: 109398 - protein, 432 aa, Setaria italica
  misc_feature (143)..(143): Xaa can be any naturally occurring amino acid
  misc_feature (147)..(147): Xaa can be any naturally occurring amino acid
  misc_feature (231)..(231): Xaa can be any naturally occurring amino acid
  misc_feature (242)..(242): Xaa can be any naturally occurring amino acid
  misc_feature (272)..(272): Xaa can be any naturally occurring amino acid
  misc_feature (305)..(305): Xaa can be any naturally occurring amino acid
  Transcript Sequence Number=SeqID_43424
  Gene Ontology: Mol. function=transferase activity, transferring glycosyl groups; Cellular component=chloroplast; Biological process =starch biosynthetic process
  Homolog annotation: Hit_ID=Q8LNZ0; Match level="QueryCoverage=94%, HitCoverage=79%, E-value=0.0, Identity=95%"; Hit description=Granule bound starch synthase (Fragment)
  Pfam annotation: Domain name=Glyco_transf_5; Domain location=1-254; Score=411.7; E_value=1.2e-120; Accession=PF08323.3; Description =Starch synthase catalytic domain
MAPWSKTGGLGDVLGGLPPAMAANGHRVMVISPRYDQYKDAWDTSVVSEIKVGDRYERVRFFHCYKRGVDRVFIDHPSFLERVWGKTGEKIYGPDAGVDYKDNQLRFSLLCQAALEAPRILSLNNNPYFSGPYGEDVVFVCNXWHTXPLSSYLKSNYQSNGIYRNAKTAFCIHNISYQGRFAFSDYPELNLPERFRSSFDFIDGYEKPVEGRKINWMKAGIIEADRVLTVXPYYAEELISGXARGCELDNIMRLTGITGIVNGMDVSEWDPXKDKYIATKYDVSTAIAAKALNKEALQAAAGLPXVDRKIPLVAFVGRLEEQKGPDVMAAAIPQLMEEDVQIVLLGTGKKKFERMLMSAEEKYPDKVRAVVKFNAALAHHIMAGADLLAVTSRFEPCGLIQLQGMRYGTVLSLLLLRANPPTELFLALPMAS

SEQ ID NO: 109399 - protein, 250 aa, Setaria italica
  misc_feature (41)..(41): Xaa can be any naturally occurring amino acid
  misc_feature (56)..(56): Xaa can be any naturally occurring amino acid
  misc_feature (229)..(229): Xaa can be any naturally occurring amino acid
  misc_feature (244)..(244): Xaa can be any naturally occurring amino acid
  Transcript Sequence Number=SeqID_43425
  Gene Ontology: Mol. function=starch synthase activity; Cellular component=chloroplast; Biological process=glucan biosynthetic process
  Homolog annotation: Hit_ID=Q8LNZ0; Match level="QueryCoverage=100%, HitCoverage=47%, E-value=1e-122, Identity=90%"; Hit description =Granule bound starch synthase (Fragment)
  Pfam annotation: Domain name=Glyco_transf_5; Domain location=1-171; Score=84.5; E_value=3.9e-22; Accession=PF08323.3; Description=Starch synthase catalytic domain
GEKIYGPDAGVDYKDNQLRFSLLCQAALEAPRILSLNNNPXLTTRNRNGEGTYVVXTSNDWHTGPLSSYLKSNYQSNGIYRNAKTAFCIHNISYQGRFAFSDYPELNLPERFRSSFDFIDGYEKPVEGRKINWMKAGIIEADRVLTVSPYYAEELISGIARGCELDNIMRLTGITGIVNGMDVSEWDPSKDKYIATKYDVSTAIAAKALNKEALQAAAGLPGWTRKIPXLVAFVGRLEEQKGPXVMAAAI

SEQ ID NO: 109400 - protein, 123 aa, Setaria italica
  Transcript Sequence Number=SeqID_43426
  Gene Ontology: Mol. function=peptidase activity; Biological process =lipid transport
  Homolog annotation: Hit_ID=B6T836; Match level="QueryCoverage=83%, HitCoverage=83%, E-value=4e-39, Identity=82%"; Hit description =Cortical cell-delineating protein
  Pfam annotation: Domain name=Tryp_alpha_amyl; Domain location=42-121; Score=76.5; E_value=9.4e-20; Accession=PF00234.14; Description =Protease inhibitorseed storageLTP f
MAAKLALFLALSLLFAAAAHGCAPYCPGPVVPTPSHGQGGRCPIDALKLRVCANVLGLVKVGLPQYDQCCPLLQGLVDLDAAVCLCTAIKADVLGIHLNVPVSLNLILNKCGKICPADFTCPP

SEQ ID NO: 109401 - protein, 135 aa, Setaria italica
  Transcript Sequence Number=SeqID_43427
QAGRKSKRQLMSQLSMNPGVRRHTISHFILCIDKQRIKCEMVCLRTPGFMLSWDMSCLLLFLPACYLHVTKLLIWDLSLVSGCEEYERFGCNFAVFSRFGCIDELCVFGNNSFMFCPASVFLAAVYCNSTKKKQK

SEQ ID NO: 109402 - protein, 553 aa, Setaria italica
  misc_feature (110)..(110): Xaa can be any naturally occurring amino acid
  misc_feature (167)..(167): Xaa can be any naturally occurring amino acid
  misc_feature (203)..(203): Xaa can be any naturally occurring amino acid
  misc_feature (348)..(348): Xaa can be any naturally occurring amino acid
  Transcript Sequence Number=SeqID_43428
  Gene Ontology: Mol. function=transferase activity, transferring glycosyl groups; Cellular component=chloroplast; Biological process =starch biosynthetic process
  Homolog annotation: Hit_ID=Q5NKR6; Match level="QueryCoverage=95%, HitCoverage=86%, E-value=0.0, Identity=91%"; Hit description=Granule- bound starch synthase
  Pfam annotation: Domain name=Glyco_transf_5; Domain location=25-289; Score=404.2; E_value=2.1e-118; Accession=PF08323.3; Description =Starch synthase catalytic domain
  Pfam annotation: Domain name=Glycos_transf_1; Domain location=339 -510; Score=44.3; E_value=4.7e-10; Accession=PF00534.12; Description =Glycosyl transferases group 1
  Pfam module annotation: Pfam domain module=Glyco_transf_5::Glycos _transf_1; Domain location=25-289::339-510
  Subcellular localization annotation: CTP_CleavageSite=51; ConfidenceScore=5.04e-01
SSVVLGFPFPSFVLVVLPVVRSIVTFVFVGAEMAPWSKTGGLGDVLGGLPPAMAANGHRVMVISPRYDQYKDAWDTSVVSEIKVGDRYERVRFFHCYKRGVDRVFIDHPXFLERVWGKTGEKIYGPDAGVDYKDNQLRFSLLCQAALEAPRILSLNNNPYFSGPYGXDVVFVCNDWHTGPLSSYLKSNYQSNGIYRNAKTAFXQYQQTILLTKGRFAFSDYPELNLPERFRSSFDFIDGYEKPVEGRKINWMKAGIIEADRVLTVSPYYAEELISGIARGCELDNIMRLTGITGIVNGMDVSEWDPSKDKYIATKYDVSTAIAAKALNKEALQAAAGLPGWTRKIPLXVAFVGRLEEQKGPDVMAAAIPQLMEEDVQIVLLGTGKKKFERMLMSAEEKYPDKVRAVVKFNAALAHHIMAGADLLAVTSRFEPCGLIQLQGMRYGTPCVCASTGGLVDTVIEGKTGFHMGRLSVDVVEPADVQKVASTLKRAIKVVGTPAYEEMVRNCMIQDLSWKGPAKNWENVLLSLGVAGSQPGIEGEEIAPLAKENVAAP

SEQ ID NO: 109403 - protein, 741 aa, Setaria italica
  Transcript Sequence Number=SeqID_43429
  Gene Ontology: Biological process=dendrite morphogenesis
  Homolog annotation: Hit_ID=Q94LQ9; Match level="QueryCoverage=99%, HitCoverage=31%, E-value=0.0, Identity=73%"; Hit description =Putative transcription regulatory protein
  Pfam annotation: Domain name=Not1; Domain location=425-741; Score =450.9; E_value=1.9e-132; Accession=PF04054.7; Description=CCR4-Not complex component, Not1
SASTFSPLASNDPPVGGTTVTTNEISAMVPPTSAADHLGSILPEPLNTGDALEKYQQVAQKLEALITNNGKDVEIESVIAAVPDILLRCVSRDEAALAVAQKVFRSLYDNASNSAYVTWLLATLVAIRDVCKLVVKELTSWVIYSDEEKKFNIEIIFGLIRSELLNLGEYNVHLAKLIDGGRNKIATEFAMSLVQTLITQDSVSISELYNVVDALSKLARRPGSPESLQQLIETARNNVNTTAGFVVGKDEKVRLSKDKKVLTTRANKEESTANETTMVDPNQVAILFSEWCQMCDHLSASDVAYSRFVTQLQQDGLLNGDDISERFFRILTELAVTHSLVSEQIVAPGGSSQQSPQLPQISYFSIDSYAKLVVMMLKYSPLEISSNKGNILSKILSVTVRTIQKEAEEKKASFNPRPYFRLFINWLYDLTTSDAHHEFQVLSAFANAFHLLQPLRVPAWSFAWLELVSHRSFMPKLLTCNLQKGWPLFQRLLVDLFKFMEPYLRNAEIPDPVNILYKGTMRVLLVLLHDFPEFLCDYHFSFCDVIPASCIQMRNVILSAFPRNMRLPDPSTPNLKIDLLAEISIAPRIMSDVDSALKSKQLKTEVDEYLKRSEGSSFLSDLNKKLLMPQNEAAVAGMHYNVPLINSLVLYVGIQAVQQLQLNKAIASASVQQINHTPLMDIFQIETATEMFKNLVTSLDTEGRYLLLNAIANQLRYPNNHTHYFSFIILYLFAEATQEIV

SEQ ID NO: 109404 - protein, 123 aa, Setaria italica
  misc_feature (29)..(29): Xaa can be any naturally occurring amino acid
  Transcript Sequence Number=SeqID_43430
  Gene Ontology: Mol. function=peptidase activity; Biological process =lipid transport
  Homolog annotation: Hit_ID=B6T836; Match level="QueryCoverage=84%, HitCoverage=84%, E-value=4e-40, Identity=82%"; Hit description =Cortical cell-delineating protein
  Pfam annotation: Domain name=Tryp_alpha_amyl; Domain location=42-121; Score=76.5; E_value=9.4e-20; Accession=PF00234.14; Description =Protease inhibitorseed storageLTP f
MAAKLALFLALSLLFAAAAHGCAPYCPGXVVPTPSHGHGGRCPIDALKLRVCANVLGLVKVGLPQYDQCCPLLQGLVDLDAAVCLCTAIKADVLGIHLNVPVSLNLILNKCGKICPADFTCPQ

SEQ ID NO: 109405 - protein, 1289 aa, Setaria italica
  Transcript Sequence Number=SeqID_43431
  Gene Ontology: Mol. function=nucleic acid binding; Cellular component= chromatin; Biological process=chromatin assembly or disassembly
  Homolog annotation: Hit_ID=B9N3S4; Match level="QueryCoverage=83%, HitCoverage=47%, E-value=0.0, Identity=50%"; Hit description =Chromatin remodeling complex subunit
  Pfam annotation: Domain name=DUF1087; Domain location=318-381; Score =29.1; E_value=1.5e-05; Accession=PF06465.5; Description=Domain of Unknown Function (DUF1087)
  Pfam annotation: Domain name=Helicase_C; Domain location=82-158; Score=81.4; E_value=3.3e-21; Accession=PF00271.23; Description =Helicase conserved C-terminal domain
  Pfam annotation: Domain name=Myb_DNA-binding; Domain location=752 -803; Score=20.1; E_value=0.0091; Accession=PF00249.23; Description =Myb-like DNA-binding domain
  Pfam module annotation: Pfam domain module=DUF1087::Helicase_C::Myb _DNA-binding; Domain location=318-381::82-158::752-803
HQSLLNIVMQLRKVCNHPYLIPGTEPESGTPEFLHEMRIKASAKLTLLHSMLKILHKDGHRVLIFSQMTKLLDILEDYLTLEFGPKTFERVDGSVSVAERQAAIARFNQDKTRFVFLLSTRSCGLGINLATADTVVIYDSDFNPHADIQAMNRAHRIGQSNRLLVYRLVVRASVEERILQLAKKKLMLDQLFVNKSESQKEVEDIIRWGTEELFRNSENADGKDSNEASGAVADVEFKHKRRTGGLGDVYEDKCIDGSAKLVWDENAIMKLLDRSNLPSTVAESTDGDLDSDMLGTVKSIDWNDELNDEPGTNEDIPNIDNDGCEQASESKQGAGTRAEENEWDKLLRVRWEQYQIEEEASLGRGKRLRKAVSYRETFAALPNEALSEDSDEGDEPKREYTAAGLALKEKYGRLRARQKERIAQRHIIKNYADDKFEEFMTPYDSIANDHAENPLVIVEDPNSSQLSGAKRFSESTAEMRQSSKKSKRYAEVPQYLYARIPGNAASSKHHSKGTDVFNPGTPNHLLPVLGLCAPNADQVNSYKNSLSGPSIKEHKKASGDVANKQLSTAADHSSEHRNEPQSASDKAIFPGASEEALRRLNNIIPDSYFPFSHIPPISGKGVDPVENSGPSIASFQGKLGLPNFGLDDNIPLKHMKSIPDMLPNLSLGAQKDYIRNSVPELPDSSLLPNFMADIAGTSKQKSFMSGLVPGLGLSPVQPIHSAMPDNHKKVLDNIMMRAQYASNKFLKKRSKLDYWSEDELDALWIGVRRHGRGNWDAMLRDPKFKFLNHRTSEELASRWILEEQKIIEEPMSTATRRPSSTPFPGISDAMMSRALNESNFSKLRMEQPKLQSHLTDIQLGSSDIMSRLPHVEAANYMNSGEGGPSQIPWQDFKHRSGYGGDFPGSTFDKLEKPDIGLIPPFMPNPFISDSIGSLPINRKTNSAVLPNEIRPSSCENILLHGVSDGQINLLHEMQRRVRLGKQPMEMNLNHTDHSNPQLDNTGGLGGLKSNKLPHWLEEAVRAPSSKTPERELPATVSAIAQSACLLLGEQEPAIPPFLIPGTPLSRPKDPRINLKKRKLRKVQQSTSHVEHSKTGSGQGDHDAITTPPSIEASPAPPSVDGNDGAPSLNLNSLSSSSACSQGKDEAPPTFEESHPTVEGSEAIEATCTSKSEAPDKSSESHGSSIKDAPETEARLPESDNSAPVAPELPVVGDVPGTSSSRAADMPVPSDDNDLKQKNPLGNARITVNLEEPMEKLAPLEETKDSDASHPVSAQTVDEDGVDEITSDEH

SEQ ID NO: 109406 - protein, 129 aa, Setaria italica
  misc_feature (89)..(89): Xaa can be any naturally occurring amino acid
  Transcript Sequence Number=SeqID_43432
  Gene Ontology: Mol. function=peptidase activity; Biological process =lipid transport
  Homolog annotation: Hit_ID=Q01595; Match level="QueryCoverage=68%, HitCoverage=68%, E-value=4e-35, Identity=84%"; Hit description =Cortical cell-delineating protein
  Pfam annotation: Domain name=Tryp_alpha_amyl; Domain location=48-127; Score=74.9; E_value=2.9e-19; Accession=PF00234.14; Description =Protease inhibitorseed storageLTP f
MAPKPALFLALGLLFAVAAHGCTPYCPGPVVPTPPVVPTPSHGHGGRCPIDALKLRVCANVLGLVKVGLPQYDQCCPLLQGLVDLDAAXCLCTAIKADVLGIHLNVPVSLNLILNKCGKICPADFTCPQ

SEQ ID NO: 109407 - protein, 1960 aa, Setaria italica
  misc_feature (1720)..(1720): Xaa can be any naturally occurring amino acid
  Transcript Sequence Number=SeqID_43433
  Homolog annotation: Hit_ID=Q7XC99; Match level="QueryCoverage=99%, HitCoverage=79%, E-value=0.0, Identity=75%"; Hit description =Transcriptional regulator, putative, expressed
  Pfam annotation: Domain name=Not1; Domain location=1560-1960; Score =745.6; E_value=3.6e-221; Accession=PF04054.7; Description=CCR4-Not complex component, Not1
FPSMLKNTMHSRLMNYMWHINPYLTLRGFVDAHSDINCLLRTVEICEDIKILSTVLDSTPFAFSIRLATAAFRKDHSNLEKWLTEKLSTQRATFLEECVKFLKEIVSTNYGAVEGSIHHPQATISNICQDSCPVFIKVLRSHSGQLLSNQLVDELKRVEAVYESRNGGDVGRDMPPPDGGSEDIEAQANIYFQQMFAGQISIDAMIQMLSRFKESKDKREQSIFNCMISNLFEEYKFFPKYPDAQLKLAAVLFGSVIKHQLVAHLALGIALRGVLDALRKSIDSKMFMFGTTALEQFMDRVIEWPQYCNHILQISHLRGTHAELVSAIEQALAKISLSQNEPNLGAMLPVDQRGSGSQSIENIESSEASWQFINSTPTQLDRTISSFALQQRNQGFLGERSKGSTNTSQAKTMMPIGQPPLASTSSDLGVNPKATVSLSSQASHHSSTASGLSQPSGFLRSRSSAPSGILRQPSYTTGFGAALNIETLVAAAERRDTPIEAPPSEVQDKIFFMINNISTSNMEAKAKEFNEVLQEQYYPWFAQYMVMKRASIEPNFHDLYLKFFDKVNSKSLNKEIMKATYENCKVLLQSDLIKSSSEERSLLKNLGSWLGKFTIGRNQTLRAKEIDPKILIVEAYERGLMIAVIPFTSKILEPCHSSIAYRPPNPWTMGILSLLVEIYNLPNLKMNLKFDIEVLFKNLSVDMKDVKPSSLLKDRIRQVVGNPDFSNKDVSTSQTSAAAEVSSGIVPSMNHVELQPDINSTSRATSLPNMLNQYAAPIRLPPNSMVEDDKVALIMPEQVTSHSLTQVAPPQTPSPSPFSLSQLMAAIPRADIYFRINEKLNSLGPQLQYSKIMDVALDKAIKEIIGPVIQRSVTIASRTTKELILKDYAMESDDGTISRSAHLMVGTLAGSLAHVTSKEPLRVALLSHLRSLVQNLISNSETTEQIIQILVNDNLDLGCALTETVATRKAVEMIDGDIKQPFSQLRRQKELQGSAYYDVSPYTQGLSRVPDVLRPKPSGNLSAVQRRVYEDFITVWHSQSSQNAAATTPATTVAVAPTDSSIASAHGPILAPSASSSFSTLQFAPFTSANQSTELIPDKTDPGATQLSGVSAQVGTADSSGQVSGIANVASVFPPMASGDLLVGELATTTKDIGAAIQPSPTVAINRLGSAFPELLNTGDALERYQHVWQKLEALIANNGKDGEIQSIIAEVPDILFRCVSRDEAALAVAQKVFRSLYENASKNTFVTWLLATLVAVRDVCKLVVKELTSWVIYSDEEKKFNMDIIVGLIRSDLLNLGEYNVHLAKLIDGGRNKTATEFAISLIQTLVTQDSSSVSELFNVVDVLSKLATRPGSPDSLQHLIEIARSTFNNTANYAAAKDEKVIQSRDKKVLSVRPLMNNEEDNADGIAFANAADFQDKVAVLFSEWCQICDHPAMGDSVYNNYIVQLQQNGLLKGDDVTDRFFISLTELAIAHSLVSDQTIAPSGLSQQSSQQQQISYFSIDSYSKLVTSVVKQSVDLGPNKGSLLHKILAVTARIIQKDAEEKKVSFNPRPYFRLFINWLSELTTSDLHHDSANFQILTAFANAFHILQPLRVPAWSFAWLELVSHRCFMPKLLMCNLQKGWPFFQRLLVDLFKFMEPYLRNAELGQPILLLYKGTLRVLLVLLHDFPEFLCDYHFSFCDVIPPSCIQMRNVILSAFPRNMRLPDPSTPNLKLFLVIXIDLLAEISIAPRIMTDVDAALKAKQMKAQVDEYLKRPEGSLFLTDLKQKLLLPQNEANVAGTRYNVPLVNSLVLYVGMQAVQQLQQNKANASASAQINQSPQMDIFQIETATEMFRNLVMTMDTEGRYLILNAIANQLRYPNSHTHYFSFIILYLFAEATQEIVQEQITRVLLERLIVNRPHPWGLLITFIELIKNPRYSFWTRSFTHCAPEIEKLFESVARSCGGKGADDGIGLGDGGH

SEQ ID NO: 109408 - protein, 398 aa, Setaria italica
  misc_feature (44)..(44): Xaa can be any naturally occurring amino acid
  misc_feature (59)..(59): Xaa can be any naturally occurring amino acid
  misc_feature (175)..(175): Xaa can be any naturally occurring amino acid
  misc_feature (364)..(364): Xaa can be any naturally occurring amino acid
  Transcript Sequence Number=SeqID_43434
  Gene Ontology: Mol. function=starch synthase activity; Cellular component=chloroplast; Biological process=glucan biosynthetic process
  Homolog annotation: Hit_ID=Q8LNZ0; Match level="QueryCoverage=96%, HitCoverage=74%, E-value=0.0, Identity=98%"; Hit description=Granule bound starch synthase (Fragment)
  Pfam annotation: Domain name=Glyco_transf_5; Domain location=1-127; Score=21.1; E_value=1.5e-12; Accession=PF08323.3; Description=Starch synthase catalytic domain
  Pfam annotation: Domain name=Glycos_transf_1; Domain location=170 -349; Score=49.3; E_value=1.5e-11; Accession=PF00534.12; Description =Glycosyl transferases group 1
  Pfam module annotation: Pfam domain module=Glyco_transf_5::Glycos _transf_1; Domain location=1-127::170-349
GSGPYGEDVVFVCNDWHTGPLSSYLKSNYQSNGIYRNAKTAFCXIHNISYQGRFAFSDXPELNLPERFRSSFDFIDGYEKPVEGRKINWMKAGIIEADRVLTVSPYYAEELISGIARGCELDNIMRLTGITGIVNGMDVSEWDPSKDKYIATKYDVSTAIAAKALNKEALQAAAXGLPVDRKIPLVAFVGRLEEQKGPDVMAAAIPQLMEEDVQIVLLGTGKKKFERMLMSAEEKYPDKVRAVVKFNAALAHHIMAGADLLAVTSRFEPCGLIQLQGMRYGTPCVCASTGGLVDTVIEGKTGFHMGRLSVDCKVVEPADVQKVASTLKRAIKVVGTPAYEEMVRNCMIQDLSWKGPAKNWENVXLLSLGVAGSQPGIEGEEIAPLATTIHYHKQLYTM

SEQ ID NO: 109409 - protein, 40 aa, Setaria italica
  Transcript Sequence Number=SeqID_43435
QVLLPLFVFLKPSYYCSKNILSNEDAHVTRLLRNHMAEFF

SEQ ID NO: 109410 - protein, 112 aa, Setaria italica
  Transcript Sequence Number=SeqID_43436
  Homolog annotation: Hit_ID=Q8LPV2; Match level="QueryCoverage=91%, HitCoverage=91%, E-value=6e-32, Identity=66%"; Hit description=One helix protein
  Subcellular localization annotation: CTP_CleavageSite=42; ConfidenceScore=5.51e-01
MAARCALSSPSCLVRQPLCGNKLGKKLTPCLPSPRAVRVRVSAAKLPPGVEVPRVQPKLSEPFLGFTQTAEIWNSRACMIGLIGTFIVELVLNKGILQIIGVEVGKGLDLPL

SEQ ID NO: 109411 - protein, 81 aa, Setaria italica
  Transcript Sequence Number=SeqID_43437
  Subcellular localization annotation: CTP_CleavageSite=25; ConfidenceScore=5.10e-01
GPNLSAVCTPYQPADLDWRRICGVEARRRQVPTRPLRQPPISFLTSSPFQSRSPGHESHLRRCSSMAAASYPSPSAWIYSD

SEQ ID NO: 109412 - protein, 106 aa, Setaria italica
  Transcript Sequence Number=SeqID_43438
KICFSCGYEDDHKLKKVLLAKESSLFEFRAVGGQVELSVKGGNLLIGTILGSLEIEDQYYYPGSPVPRFLARSFINSMQTQEVPSPSRKNSAGPKGQLPNLSKVKN

SEQ ID NO: 109413 - protein, 134 aa, Setaria italica
  Transcript Sequence Number=SeqID_43439
  Gene Ontology: Mol. function=helicase activity; Cellular component =chloroplast; Biological process=metabolic process
  Homolog annotation: Hit_ID=B9SZC0; Match level="QueryCoverage=88%, HitCoverage=49%, E-value=2e-37, Identity=44%"; Hit description =Pentatricopeptide repeat-containing protein, putative
  Pfam annotation: Domain name=PPR; Domain location=41-75; Score=39.0; E_value=1.9e-08; Accession=PF01535.12; Description=PPR repeat
  Pfam annotation: Domain name=PPR; Domain location=6-40; Score=29.0; E_ value=2e-05; Accession=PF01535.12; Description=PPR repeat
  Pfam annotation: Domain name=PPR; Domain location=76-110; Score=30.6; E_value=6.2e-06; Accession=PF01535.12; Description=PPR repeat
  Pfam module annotation: Pfam domain module=PPR::PPR::PPR; Domain location=41-75::6-40::76-110
VQADTVVYNHLLNVLVEGSKMKLLESVYNEMASRGIRPDVVTFNTLIKGLCRAHQVRTAVLMLEEMSSHSVAPDETTFTTLMQGFVEEGSIEAALRVKAKMLETGCSPTRVTVNVLINGYCKLVLYVAKSIFHS

SEQ ID NO: 109414 - protein, 189 aa, Setaria italica
  Transcript Sequence Number=SeqID_43440
  Gene Ontology: Mol. function=threonine-type endopeptidase activity; Cellular component=proteasome core complex; Biological process =ubiquitin-dependent protein catabolic process
  Homolog annotation: Hit_ID=Q9LSU0; Match level="QueryCoverage=87%, HitCoverage=66%, E-value=4e-88, Identity=95%"; Hit description =Proteasome subunit alpha type-3
  Pfam annotation: Domain name=Proteasome; Domain location=31-188; Score=119.2; E_value=1.3e-32; Accession=PF00227.18; Description =Proteasome A-type and B-type
  Pfam annotation: Domain name=Proteasome_A_N; Domain location=8-30; Score=42.0; E_value=2.4e-09; Accession=PF10584.1; Description =Proteasome subunit A N-terminal signa
  Pfam module annotation: Pfam domain module=Proteasome::Proteasome_A _N; Domain location=31-188::8-30
MSSIGTGYDLSVTTFSPDGRVFQVEYATKAVDNSGTVVGIKCKDGIVLGVEKLVTSKMMLEGSNQRIHSVHRHSGLSVAGLAADGRQMFKAKSEAASYEKVYGEPISVKELADRVASYVHLCTLYWWLRPFGCGVILGGYDRDGPQLYMIEPSGVSYKYFGAALGRVRTRTRQKTRRIRRKLERLYKKT

SEQ ID NO: 109415 - protein, 249 aa, Setaria italica
  Transcript Sequence Number=SeqID_43441
  Gene Ontology: Mol. function=threonine-type endopeptidase activity; Cellular component=proteasome core complex; Biological process =ubiquitin-dependent protein catabolic process
  Homolog annotation: Hit_ID=Q9LSU0; Match level="QueryCoverage=91%, HitCoverage=91%, E-value=1e-129, Identity=98%"; Hit description =Proteasome subunit alpha type-3
  Pfam annotation: Domain name=Proteasome; Domain location=31-216; Score=238.9; E_value=1.3e-68; Accession=PF00227.18; Description =Proteasome A-type and B-type
  Pfam annotation: Domain name=Proteasome_A_N; Domain location=8-30; Score=42.0; E_value=2.4e-09; Accession=PF10584.1; Description =Proteasome subunit A N-terminal signa
  Pfam module annotation: Pfam domain module=Proteasome::Proteasome_A _N; Domain location=31-216::8-30
MSSIGTGYDLSVTTFSPDGRVFQVEYATKAVDNSGTVVGIKCKDGIVLGVEKLVTSKMMLEGSNQRIHSVHRHSGLSVAGLAADGRQIVSRAKSEAASYEKVYGEPISVKELADRVASYVHLCTLYWWLRPFGCGVILGGYDRDGPQLYMIEPSGVSYKYFGAALGKGRQAAKTEIEKLKLSELTCREGIVEVAKIIYGVHDEAKDKAFELELSWVCDESNRQHQKVPNDLLEQAKAAAQAALEEMDAD

SEQ ID NO: 109416 - protein, 76 aa, Setaria italica
  Transcript Sequence Number=SeqID_43442
LTPAHLLAPGPVFTMQMLLLLFQELLFPARRCQLVPPGSVESCCPVKPTLTNGGHGQANFSPFFSYVLFQAPVGLF

SEQ ID NO: 109417 - protein, 102 aa, Setaria italica
  Transcript Sequence Number=SeqID_43443
REDENDKNKQAALHMDWPEHPKLLSGMSADFTGPTAIPVTKVGPWAGLRGYHNNFTSPSAIPVTKIGPVTKIGPWDGLGGNHNNVAGPKTATPDLVQQKVVA

SEQ ID NO: 109418 - protein, 161 aa, Setaria italica
  Transcript Sequence Number=SeqID_43444
  Subcellular localization annotation: CTP_CleavageSite=47; ConfidenceScore=5.50e-01
CHLPSESQANGMGTKGGKRCATKTHRTRRSPLKLMVTPFTAHPGSPPSNAVQGEETSRGMAIEVETPLGIRFDGTINKETANGIEVPDGEHLGNHDGGQQPLVARSKKCMGDVEREAPKPLAVMMAARGDLQSDAFIKVVHMVPMGSGLSSSPPRRTMVPE

SEQ ID NO: 109419 - protein, 195 aa, Setaria italica
  misc_feature (48)..(48): Xaa can be any naturally occurring amino acid
  misc_feature (155)..(155): Xaa can be any naturally occurring amino acid
  Transcript Sequence Number=SeqID_43445
  Gene Ontology: Mol. function=RNA-directed DNA polymerase activity; Biological process=RNA-dependent DNA replication
  Homolog annotation: Hit_ID=Q53L52; Match level="QueryCoverage=97%, HitCoverage=14%, E-value=5e-63, Identity=62%"; Hit description =Transposon protein, putative, CACTA, En/Spm sub-class
FLTIMVHLLVHLVDEVKLGGPVHYRWMYPMERFFVRLKEFVRNQAHTXVSIAEGYLREECLTFCSRFLDGITRFTKPPRNPDPSDNTKELYMFKSAGEPIGKIVDVDQIDNVLLIQAHRYVLRHCDELEELRREFLDEEKTRQGLQEDLTPQNIXQLINRHFSDWLQQKVLLDGGGNFCKKIRALARKPDKYGKR

SEQ ID NO: 109420 - protein, 139 aa, Setaria italica
  Transcript Sequence Number=SeqID_43446
  Gene Ontology: Mol. function=protein serine/threonine phosphatase activity; Cellular component=protein serine/threonine phosphatase complex; Biological process=protein amino acid dephosphorylation
  Homolog annotation: Hit_ID=B6UAA5; Match level="QueryCoverage=95%, HitCoverage=22%, E-value=1e-66, Identity=90%"; Hit description =Protein Kinase-associated protein phosphatase
ETTQGQVHHPDVGSRHWGEPAVLAHGDIITLGTSSKLSVQISLLNQRVPAGVGMASDPMVARRSGKKLPMEDISFCQCPLQGAEQFGLFGIFDGHGGDGAAKAVSKILPESLSNILSHPDTKERVLSCSDASDVLRYAF

SEQ ID NO: 109421 - protein, 535 aa, Setaria italica
  misc_feature (61)..(61): Xaa can be any naturally occurring amino acid
  Transcript Sequence Number=SeqID_43447
  Gene Ontology: Mol. function=protein serine/threonine phosphatase activity; Cellular component=protein serine/threonine phosphatase complex; Biological process=protein amino acid dephosphorylation
  Homolog annotation: Hit_ID=B6UAA5; Match level="QueryCoverage=100%, HitCoverage=91%, E-value=0.0, Identity=87%"; Hit description=Protein Kinase-associated protein phosphatase
  Pfam annotation: Domain name=FHA; Domain location=158-234; Score =68.6; E_value=2.4e-17; Accession=PF00498.18; Description=FHA domain
  Pfam annotation: Domain name=PP2C; Domain location=258-517; Score =169.6; E_value=9.2e-48; Accession=PF00481.13; Description=Protein phosphatase 2C
  Pfam module annotation: Pfam domain module=FHA::PP2C; Domain location= 158-234::258-517
TPVAVQDEDIDRPLLSENWEGHSSQSNSFLGSSVGEPLKIQTNRSNTSPSSHAIADTGRIXYPSECCATQGETHVINVENDTSEEFQLGSTLKRTPPANWPTPDQKHRKRVSGEDNHIGSISMKDNTYHSSLDLEVIAGPSHGISCSRQSSRPSMLPITLGRVPPSDIVLKDSEVSGKHARINWNAKTFKWELVDMGSLNGTFLNSQAVHHPDVGSRHWGEPAVLAHGDIITLGTSSKLSVQISLLNQRVPAGVGMASDPMVARRSGKKLPMEDISFCQCPLQGAEQFGLFGIFDGHGGDGAAKAVSKILPESLSNILSHPDTKERVLSCSDASDVLRYAFTLTEAAIDHQYEGCTATALLIWFDQNKDCFAQCANLGDSACVMSVNGMTIDMTEDHRVASTTERARIARTGQPLKDGEVRLSGLNLARMFGDKFLKEQDSRFSSEPYVSQAVRITKACTAFAVIASDGLWDVISTKKAVQLVAEGKERNTDDGTSVDKVANRILSEARNLRTKDNTSVVFVDFDILRTDPCISK

SEQ ID NO: 109422 - protein, 87 aa, Setaria italica
  misc_feature (33)..(33): Xaa can be any naturally occurring amino acid
  Transcript Sequence Number=SeqID_43448
  Gene Ontology: Mol. function=sequence-specific DNA binding; Cellular component=nucleus; Biological process=regulation of transcription, DNA-dependent
  Homolog annotation: Hit_ID=B6STM4; Match level="QueryCoverage=98%, HitCoverage=32%, E-value=9e-39, Identity=89%"; Hit description =WRKY62-superfamily of TFs having WRKY and zinc finger domains
  Pfam annotation: Domain name=WRKY; Domain location=12-73; Score =124.0; E_value=5e-34; Accession=PF03106.7; Description=WRKY DNA -binding domain
RAEPSDADANHLKDGYQWRKYGQKVTRDNPYPXRAYFRCAYAPSCPVKKKVQRSAEDKSMLVATYEGEHNHEQRAQSEYVTDASTTQ

SEQ ID NO: 109423 - protein, 211 aa, Setaria italica
  Transcript Sequence Number=SeqID_43449
  Gene Ontology: Mol. function=phosphotransferase activity, alcohol group as acceptor; Biological process=phosphoinositide-mediated signaling
  Homolog annotation: Hit_ID=B9V0L0; Match level="QueryCoverage=86%, HitCoverage=14%, E-value=5e-78, Identity=78%"; Hit description =Phosphatidylinositol kinase
MVRLLGLRSLSFGPEESPREIPSTADAAPPVGSSGWLVRFFDSAFFCEWIAVSYLYKHDHAGVRDYLCNRMYTLPLPGLEAYLFQVCYMLVHKPSPSLDRFVIDTCAKSLRIALKVHWLLAAELELEDADDLDGIDKVQEQCQAAATVQGEWPPLVRPAPPSPVASPRGNPMLSRIRSSKQRLLSLASSPSLGLSPPAGGGANVAAAEDAC

SEQ ID NO: 109424 - protein, 111 aa, Setaria italica
  misc_feature (35)..(35): Xaa can be any naturally occurring amino acid
  Transcript Sequence Number=SeqID_43450
  Gene Ontology: Mol. function=metallopeptidase activity; Cellular component=plasma membrane; Biological process=proteolysis
  Homolog annotation: Hit_ID=Q6K4E7; Match level="QueryCoverage=94%, HitCoverage=11%, E-value=1e-36, Identity=68%"; Hit description =Putative puromycin-sensitive aminopeptidase
RGSGHVLQPVEVTNVPEDEILIICFSEALPVGEGXTLNIAFKGTLNDKMHGFYRSVYELNGEKKNMAVTQFEPADARRCFPCWDEPAFKAVFKITLEVPSETVALSNMPVI

SEQ ID NO: 109425 - protein, 87 aa, Setaria italica
  Transcript Sequence Number=SeqID_43451
GHETYSRMNNQSVAPWNRFNEEIKIRRLRLNILLGTCFLPVTSSIAVSYYYDAGVGQTTNTPSKLDYQWHFIPNITCHRISSNIYLS

SEQ ID NO: 109426 - protein, 153 aa, Setaria italica
  Transcript Sequence Number=SeqID_43452
  Gene Ontology: Mol. function=chitinase activity; Cellular component =cellular_component; Biological process=defense response to bacterium
  Homolog annotation: Hit_ID=Q6DQK2; Match level="QueryCoverage=76%, HitCoverage=81%, E-value=1e-53, Identity=85%"; Hit description =Pathogenesis-related protein 4
  Pfam annotation: Domain name=Barwin; Domain location=30-148; Score =257.7; E_value=2.8e-74; Accession=PF00967.9; Description=Barwin family
  Pfam annotation: Domain name=DPBB_1; Domain location=70-143; Score= -0.5; E_value=0.0073; Accession=PF03330.10; Description=Rare lipoprotein A (RlpA)-like double
  Pfam module annotation: Pfam domain module=Barwin::DPBB_1; Domain location=30-148::70-143
MAAGGKVTGGRLALVAALLCAAAAMAAAQQASGVRATYNYYRPQNINWDLNAASAYCATWDAGKSYAWRSKYGWTAFCGPAGPTGQASCGQCLLVTNSATGASTTVRIVDQCSNGGLDLDYDTAFSKIDNGQGVNDGHLTVSYQFVDCGEPRE

SEQ ID NO: 109427 - protein, 40 aa, Setaria italica
  Transcript Sequence Number=SeqID_43453
YLVLASFVLYANGIFFHVIMANIFIAWLEQNCFAFLERNS

SEQ ID NO: 109428 - protein, 140 aa, Setaria italica
  misc_feature (21)..(21): Xaa can be any naturally occurring amino acid
  Transcript Sequence Number=SeqID_43454
  Gene Ontology: Mol. function=hydrolase activity, hydrolyzing O -glycosyl compounds; Cellular component=extracellular region; Biological process=cell wall organization and biogenesis
  Homolog annotation: Hit_ID=B6TRZ3; Match level="QueryCoverage=99%, HitCoverage=27%, E-value=1e-69, Identity=90%"; Hit description =Endoglucanase 1
  Pfam annotation: Domain name=Glyco_hydro_9; Domain location=1-140; Score=-134.5; E_value=1.3e-08; Accession=PF00759.11; Description =Glycosyl hydrolase family 9
DYGDALHKCILFFEGQRSGRXLPPDQRVRWRRDSGLHDGAAAGVDLTGGYYDAGDNVKFGFPMAFTATLMSWGLIDFGRSFGAHEADAREAVRWATDYLMKATSTPGTVYVQVGDASRDHACWERPEDMDTPRTVYRVDA

SEQ ID NO: 109429 - protein, 52 aa, Setaria italica
  Transcript Sequence Number=SeqID_43455
LFENISFHLIHLQEKVKYYDIATEKRAEFEKAMIEYNKKKESGEIFEDSDSG

SEQ ID NO: 109430 - protein, 219 aa, Setaria italica
  Transcript Sequence Number=SeqID_43456
  Gene Ontology: Mol. function=aspartic-type endopeptidase activity; Cellular component=anchored to membrane; Biological process =proteolysis
  Homolog annotation: Hit_ID=B6SVD7; Match level="QueryCoverage=99%, HitCoverage=40%, E-value=2e-74, Identity=67%"; Hit description =Aspartic-type endopeptidase/ pepsin A
  Pfam annotation: Domain name=Asp; Domain location=1-219; Score= -187.8; E_value=0.019; Accession=PF00026.15; Description=Eukaryotic aspartyl protease
PAATEALQAPIVFGCGQVQTGAFLDGAGFDGLLGLGMDRVSVPSVLAARGLVASNSFSMCFSDDGVGRINFGDAGSPGQSETRFIARSTNPTYNVSFTSANVGSESVAVEFAAVMDSGTSFTYLNDPEYTAFATSFTSQVRERRTNFSSGSSGRLPFDYCYKLSPNQTEVVPPIVSLTTAGGAQFPVTNPIIFLRDDRITIGYCLAIVKNDITINIIGQ

SEQ ID NO: 109431 - protein, 142 aa, Setaria italica
  Transcript Sequence Number=SeqID_43457
  Subcellular localization annotation: CTP_CleavageSite=43; ConfidenceScore=5.51e-01
AHHPPSCWIADSLPLPPPRDAKLPPSRRLVTNSPPPPLVGGFMADARRRGPPQGRFVTAPPPPPLDGDFTLGATALLGARWAWMLTTLRRAGRWVAPASGGSRALFLAPAGRSWRTWSASASIASLTTTSPRGARVRPGASG

SEQ ID NO: 109432 - protein, 124 aa, Setaria italica
  Transcript Sequence Number=SeqID_43458
  Gene Ontology: Mol. function=oxidoreductase activity, acting on the CH-NH2 group of donors, NAD or NADP as acceptor; Cellular component =chloroplast; Biological process=glutamate biosynthetic process
  Homolog annotation: Hit_ID=A7VKB1; Match level="QueryCoverage=100%, HitCoverage=5%, E-value=7e-46, Identity=68%"; Hit description=NADH -glutamate synthase 2
LLDSNLEDGNYISARGRKVVVIGGGDTGTDCIGTSIRHGCSNIVNLELLPEPPRERAPDNPWPQYPRIFRIDYGHQEAASKFGKDPRNYQILTKRFIGDENGKVKALEVVRVEWGKVDGRFQFK

SEQ ID NO: 109433 - protein, 119 aa, Setaria italica
  Transcript Sequence Number=SeqID_43459
  Gene Ontology: Mol. function=transferase activity
  Homolog annotation: Hit_ID=Q2R047; Match level="QueryCoverage=99%, HitCoverage=45%, E-value=3e-47, Identity=46%"; Hit description=Salt -inducible protein, putative
  Pfam annotation: Domain name=PPR; Domain location=13-47; Score=42.6; E_value=1.6e-09; Accession=PF01535.12; Description=PPR repeat
  Pfam annotation: Domain name=PPR; Domain location=48-82; Score=42.8; E_value=1.3e-09; Accession=PF01535.12; Description=PPR repeat
  Pfam annotation: Domain name=PPR; Domain location=83-117; Score=39.0; E_value=1.9e-08; Accession=PF01535.12; Description=PPR repeat
  Pfam module annotation: Pfam domain module=PPR::PPR::PPR; Domain location=13-47::48-82::83-117
QKFRDLGLHFDGVLYNIGMDAYCKLGNMNEAVQLLNEMMAKGLTPDKIHYTCLIHGYCLKGETDNAWQAFEQMLKANIKPDVVTYNILASGYSRNSLVMKVFDLLEHMMDQGLEPNSLT

SEQ ID NO: 109434 - protein, 90 aa, Setaria italica
  Transcript Sequence Number=SeqID_43460
VDMPNCIGQFYVFGVINADLCSCMSSWFHVLLESSKFSTVKCYCNYAGPYLSFRNFFKSVHVFFDRTSSLIYPCMLHYVVHTIKFGMSVP

SEQ ID NO: 109435 - protein, 149 aa, Setaria italica
  Transcript Sequence Number=SeqID_43461
EHHEQVKEEQHKQAEANQIIREVYKKEGTSEVATQLEISESNTGPPQRSAVEESSAPMDLFKCALCEFVKNFIKPLWDNGVLSREVHKIVVKKAVEKVAGAWASNAPSTELAISRILSDEAKNIEKLVQGYLNMYVGREVLKKIMPDIS

SEQ ID NO: 109436 - protein, 195 aa, Setaria italica
  Transcript Sequence Number=SeqID_43462
  Homolog annotation: Hit_ID=Q10A51; Match level="QueryCoverage=94%, HitCoverage=74%, E-value=2e-28, Identity=39%"; Hit description=F-box domain containing protein, expressed
VVSTRGHCAFACVYSSLTRAWGELFSIPTPSLECELTEEPGTLVGDAMHWLLGESSILEFRLDDQRLALVERPLETFSVYKRNIRVLRSEGGVLGLAAVKNFSLHLWAREADHCGTAKWVLRRAIELCTLLELPLMQPRVGSIPVWISGLGEDGNVVFLRTTVGMYVLWTKTMQFKMVTNNVLMKTVYPYAKFTF

SEQ ID NO: 109437 - protein, 192 aa, Setaria italica
  Transcript Sequence Number=SeqID_43463
  Gene Ontology: Cellular component=integral to membrane
  Homolog annotation: Hit_ID=B6TJN8; Match level="QueryCoverage=100%, HitCoverage=100%, E-value=2e-46, Identity=51%"; Hit description =Threonine endopeptidase
  Subcellular localization annotation: CTP_CleavageSite=40; ConfidenceScore=5.49e-01
MEVCVSTTASARATAAPFRCGACPVTAVPLRRRLPARGWRCATAAVPDPVPSEEPASASSTVVVTDKPDSPADDKVEEVSAASSGPAEAPVAAEVVSSEPSPSPDDGGLDEILSKLNIEVTPTLILTGSGAFVILWVLSSIVSAIDSVPLLPKILELVGTGYSIWFIARYLLFKESRDNFFGKFEDLKQRII

SEQ ID NO: 109438 - protein, 66 aa, Setaria italica
  Transcript Sequence Number=SeqID_43464
DLFRPPVLFFSRIRRRTAYHCIKIEGKKGQNSHTNLLTPHTFSYLRTYAPVKASTCPYISYVFSFN

SEQ ID NO: 109439 - protein, 167 aa, Setaria italica
  Transcript Sequence Number=SeqID_43465
  Gene Ontology: Mol. function=nucleoside-triphosphatase activity; Cellular component=chloroplast envelope; Biological process=transport
  Homolog annotation: Hit_ID=B6U9M1; Match level="QueryCoverage=100%, HitCoverage=59%, E-value=2e-77, Identity=85%"; Hit description =Cobalt import ATP-binding protein cbiO 2
  Pfam annotation: Domain name=ABC_tran; Domain location=1-139; Score =39.1; E_value=4.4e-09; Accession=PF00005.19; Description=ABC transporter
INGPCSYVFQNPDHQVVMPTVESDVAFGLGKLNLPLDEVRSRVSKSLDAVGMLSYSQRPIQTLSGGQKQRVAIAGALAEASKVLLLDELTTFLDEHDQMGVIKAVRNSLVADGEVAALWVTHRLEELKYADGAIYMEDGQIIIQGDVPTISRFIKKKQARYFGHFEL

SEQ ID NO: 109440 - protein, 79 aa, Setaria italica
  Transcript Sequence Number=SeqID_43466
VALFLLFVASCYIIVRRLRSGRSNGDPVLPPSPPGLPIIGNMHQLGRGHHHRKLQALAQQHGEIFLLWLGSVPALVVSS

SEQ ID NO: 109441 - protein, 103 aa, Setaria italica
  Transcript Sequence Number=SeqID_43467
KVTNFSCSFKCNIGKNVSQSFLRVKENSIAISRFEQVEMSTANYFLHGTHTAAKAAPITKSKTDHQLPIQITRRNAGVPRRSRREPRHELFRNPGSRQEHWLW

SEQ ID NO: 109442 - protein, 270 aa, Setaria italica
  misc_feature (215)..(215): Xaa can be any naturally occurring amino acid
  Transcript Sequence Number=SeqID_43468
  Gene Ontology: Mol. function=aspartic-type endopeptidase activity; Cellular component=chromatin; Biological process=chromatin assembly or disassembly
  Homolog annotation: Hit_ID=Q7XPJ7; Match level="QueryCoverage=98%, HitCoverage=20%, E-value=3e-89, Identity=57%"; Hit description =OSJNBa0087O24.13 protein
  Pfam annotation: Domain name=RnaseH; Domain location=81-193; Score= -15.9; E_value=0.0061; Accession=PF00075.16; Description=RNase H
VALVWPTPKTTTELRAFLGLTGYYRRFIQGYGIICRPLFDALKKNAFEWTSKQDQAFAQLKNIMSNPPVLALPDFSQPFILEADASGTGIGAVLMQNGRPLSFLSKTLGPKAAALSIYEKEAMAILEALKKWKHYLASTSVIIRNDQQSLKYIHEQRLLAGIQHKLLVKLLGNNYKIEYKKVKENRAADALSRVDFNPSTNAISMVIPAWVEQVXCYKDDPICQDLITKLSLDSEAVPHYSLTSGVLRYKGKAVIGQHDSLRTQLLENFL

SEQ ID NO: 109443 - protein, 171 aa, Setaria italica
  misc_feature (88)..(88): Xaa can be any naturally occurring amino acid
  misc_feature (138)..(138): Xaa can be any naturally occurring amino acid
  misc_feature (148)..(148): Xaa can be any naturally occurring amino acid
  Transcript Sequence Number=SeqID_43469
  Gene Ontology: Mol. function=transferase activity, transferring glycosyl groups; Cellular component=cell wall
  Homolog annotation: Hit_ID=O64492; Match level="QueryCoverage=93%, HitCoverage=16%, E-value=7e-46, Identity=54%"; Hit description =F20D22.8 protein
  Pfam annotation: Domain name=C2; Domain location=50-121; Score=6.3; E_ value=0.039; Accession=PF00168.22; Description=C2 domain
VMHADPYPVPAMFSGPGDFSLKETRPRLGGGAVADKASATYDLVEQVEYLYVRVVRARGVPMVGEAVAEVKLGNYRGVTPAVPSHSWXDQVFAFSKETIQSSFVEVYVRARGIDDHVGRVWFDLAEVPHRAPPDSTLXPQWYNMEDRXGQRGGAEVMVAVWFGTRLTRPCG

SEQ ID NO: 109444 - protein, 342 aa, Setaria italica
  Transcript Sequence Number=SeqID_43470
  Gene Ontology: Mol. function=zinc ion binding
  Pfam annotation: Domain name=zf-C3HC4; Domain location=281-335; Score= 8.5; E_value=0.011; Accession=PF00097.17; Description=Zinc finger, C3HC4 type (RING finger)
LTQPVALSEERKCASLTTAKRSRVTSSRAVKDLTNHSASKANINVPSGNKYRDEENISQGELDGAVMPSPPKKLQTCKDPSDSPSIRKSIIRILGAKRAAFLPTGKSEVETGKNFASVPAKVVSASTNVISESVDASVPLLAQQQQPGTAKISNAVTQAIANETSQLNQLAAAIITLPKQNLQTDYEKKPASLPIVPHQVSQLGGATAPLVAPKLEIGKGQNTSNLLSNPAYARALLIKQQEQLLQQYKSGTPQPQQHHIKGPALFETDEPPPVEPLGTRCQLCKLDVAFRPQGDAGHDANAPPVVAVLACHHAFHSSCIESIYGLAEPAECLACLEHGAVH

SEQ ID NO: 109445 - protein, 212 aa, Setaria italica
  misc_feature (90)..(90): Xaa can be any naturally occurring amino acid
  misc_feature (124)..(124): Xaa can be any naturally occurring amino acid
  Transcript Sequence Number=SeqID_43471
MGASGGRSKELRWMDSDSDDDLSDEELPEASPTPFRDALLRPSPSASPTLVDDDGLQPQVRLATSRLQIRNAAEGCSRPRRDPPPAGRRXPREAPTAPARARPPLPPARRPPTSSPALSRTPCXMPSVSPATTVDAASTPTSPRGASSPTTPPFAMIASPSSGSPQRRPSIARNAHVTRDAPSPPATATPPRQSPRHIAGRSPSPSSTPRAP

SEQ ID NO: 109446 - protein, 59 aa, Setaria italica
  Transcript Sequence Number=SeqID_43472
VDYFVRTFICVRKVCSFPSSNCQSSLARKKNRWIERRDINQPGFSPPLYYLLARPHTTG

SEQ ID NO: 109447 - protein, 341 aa, Setaria italica
  Transcript Sequence Number=SeqID_43473
  Gene Ontology: Cellular component=nucleus
  Homolog annotation: Hit_ID=B9T4Q5; Match level="QueryCoverage=97%, HitCoverage=41%, E-value=6e-88, Identity=51%"; Hit description=Wd40 protein, putative
  Pfam annotation: Domain name=WD40; Domain location=63-100; Score =15.1; E_value=0.29; Accession=PF00400.24; Description=WD domain, G -beta repeat
  Pfam annotation: Domain name=WD40; Domain location=9-47; Score=9.1; E_ value=3.4; Accession=PF00400.24; Description=WD domain, G-beta repeat
  Pfam module annotation: Pfam domain module=WD40::WD40; Domain location=63-100::9-47
GLVREINFCSTVIYEPHSDAEVSAVAFRPGRNMAVSSSFGGNFKVWVQSLSSQSSNEKNCAGWRCQSVGSYKKKPMTSAAFSADGSVLAVAAESVITLWDPDNNALVGVIAETLSPVTNLSFVGTSVFLMSVCQSSRPQVTVWNVSNLCMQWSYSIYAEAACCSPDGNEFAVLALLSCPDGGASTEQDGAILLFNAENPNPVASWSVKKARGGSISFVKGDISLDANANNSRDRDTVSLVYVNGSHEYAIFDPRKSEELVISRNADKKIQADEPALIGYASIYGELRKLESKKEVSDVPFIPSDRPWETIFSGSSHVLPPLTKLCSAFLSSLLEKRSVANE

SEQ ID NO: 109448 - protein, 61 aa, Setaria italica
  misc_feature (46)..(46): Xaa can be any naturally occurring amino acid
  misc_feature (48)..(48): Xaa can be any naturally occurring amino acid
  Transcript Sequence Number=SeqID_43474
CNKLNIYATLHSLVYNKLLNPLTTMVAVVIWNHNSNNRTECPNHKXMXKHEILRKVTKFRY

SEQ ID NO: 109449 - protein, 136 aa, Setaria italica
  Transcript Sequence Number=SeqID_43475
  Gene Ontology: Mol. function=glycerol-3-phosphate dehydrogenase activity; Cellular component=glycerol-3-phosphate dehydrogenase complex; Biological process=glycerol-3-phosphate metabolic process
  Homolog annotation: Hit_ID=Q9SS48; Match level="QueryCoverage=92%, HitCoverage=20%, E-value=8e-64, Identity=86%"; Hit description =Glycerol-3-phosphate dehydrogenase SDP6, mitochondrial
STKLIHGGVRYLEKAVFNLDYGQLKLVFHALKERKQVIDNAPHLCHALPCMTPCFNWFEVVYYWFGLKFYDLVAGRRLLHLSRYYSVDESVELFPTLAKSGHDRSLRGTVVYYDGQMNDSRLNVGLACTAAVVGAA

SEQ ID NO: 109450 - protein, 112 aa, Setaria italica
  Transcript Sequence Number=SeqID_43476
SLKHAEHGFVRVQTYQFFLEPDSNLTSHQVPRSSDFLNQVRNIFDQMKNASMENTRINSLACSQQPIITSLRSANDILVHNTVNPLQSEKLEDNIEKAESIRSSICSPSNFT

SEQ ID NO: 109451 - protein, 307 aa, Setaria italica
  misc_feature (283)..(283): Xaa can be any naturally occurring amino acid
  Transcript Sequence Number=SeqID_43477
  Gene Ontology: Mol. function=transcription regulator activity; Cellular component=nucleus; Biological process=regulation of transcription
  Homolog annotation: Hit_ID=B9RYR7; Match level="QueryCoverage=63%, HitCoverage=25%, E-value=3e-15, Identity=28%"; Hit description=Bhlh transcription factor, putative
MEAALGALCRAGGWSYAAVWRFHPHDPRLLTLGERYSEDEAKTVVEKMLGQVHIIGEGIIGEALISGECQWIYDATCNALNQTSHADNRELFEGYTWWQYQFLNGIKTIAVLPLQLQGLVQFGSFRKVPRSSDFLNQVRNIFDQMKNASMENTRINSLACSQQPIITSLRSANDILVHNTVNPLQSEKLEDNIEKAESIRSSICSPSNSQRPLNDLTSYVTGNTNIDTHILAMPVNSKSIYELKGFDKVTDFFHQNVDARTEVQVNSSKVPDSFIASIMSAYXSSNNLHRMTNESSDQNMPYPHTIT

SEQ ID NO: 109452 - protein, 128 aa, Setaria italica
  misc_feature (99)..(99): Xaa can be any naturally occurring amino acid
  Transcript Sequence Number=SeqID_43478
  Gene Ontology: Mol. function=glycerol-3-phosphate dehydrogenase activity; Cellular component=glycerol-3-phosphate dehydrogenase complex; Biological process=glycerol-3-phosphate metabolic process
  Homolog annotation: Hit_ID=B9SUD3; Match level="QueryCoverage=65%, HitCoverage=12%, E-value=1e-32, Identity=77%"; Hit description =Glycerol-3-phosphate dehydrogenase, putative
LELQFWHQHFDEKVSDLIKSFELIYRLGVNRHRQYVSINIGVTSNTLSGKEFETFAKVVINAAGPFCDSVRKMANSNIVPMICPSSGVHIVLPDYYSPXGMGLIVPKTKDGRVVFMLPLVWEGTCLSG

SEQ ID NO: 109453 - protein, 221 aa, Setaria italica
  misc_feature (66)..(66): Xaa can be any naturally occurring amino acid
  misc_feature (201)..(201): Xaa can be any naturally occurring amino acid
  Transcript Sequence Number=SeqID_43479
  Gene Ontology: Mol. function=glycerol-3-phosphate dehydrogenase activity; Cellular component=glycerol-3-phosphate dehydrogenase complex; Biological process=glycerol-3-phosphate metabolic process
  Homolog annotation: Hit_ID=Q9SS48; Match level="QueryCoverage=85%, HitCoverage=37%, E-value=2e-75, Identity=64%"; Hit description =Glycerol-3-phosphate dehydrogenase SDP6, mitochondrial
  Pfam annotation: Domain name=DAO; Domain location=11-219; Score= -52.0; E_value=0.029; Accession=PF01266.16; Description=FAD dependent oxidoreductase
MAQMGSIINNLLAFLKCVKNKFELPIIKIVQHCLLHGGVRYLEKAVFNLDYGQLKLVLHALKERKXDESVELFPTLAKSGHDRSLRGTVVYYDGQMNDSRLNVGLACTAAVVGAAVLNYAEVVSLIKDESGERIIGARIRDTLSGKEFETFAKVVINAAGPFCDSVRKMANSNIVPMICPSSGVHIVLPDYYSPEGMGLIXVPKTKDGRVVFMLPWLGRTV

SEQ ID NO: 109454 - protein, 340 aa, Setaria italica
  Transcript Sequence Number=SeqID_43480
  Gene Ontology: Mol. function=glycerol-3-phosphate dehydrogenase activity; Cellular component=glycerol-3-phosphate dehydrogenase complex; Biological process=glycerol-3-phosphate metabolic process
  Homolog annotation: Hit_ID=B9SUD3; Match level="QueryCoverage=99%, HitCoverage=53%, E-value=1e-176, Identity=85%"; Hit description =Glycerol-3-phosphate dehydrogenase, putative
NAAGPFCDSVRKMANSNIVPMICPSSGVHIVLPDYYSPEGMGLIVPKTKDGRVVFMLPWLGRTVAGTTDSSTAITMLPEPHEDEIQFILDAISDYLNVQVRRSDVLSAWSGIRPLAMDPSAKNTESISRDHVVFEDYPGLITITGGKWTTYRSMAEDAVNAAVRSGNLKPANGCVTDNLHIVGGYGWDPASFTVLAQNYKRMKKTYGGKVIPGAMDSAVSKHLSHAYGTLAEQVATIAQNEGLGKRLAHGYPFLEAEVAYCARHEYCESAVDFVARRCRLAFLDTDAAGRALPRIIEILASEHKWDKARKKVELQKGREFLETFKSSKNAQFSDGKHNGR

SEQ ID NO: 109455 - protein, 126 aa, Setaria italica
  Transcript Sequence Number=SeqID_43481
  Gene Ontology: Mol. function=nucleotide binding; Cellular component =intracellular; Biological process=small GTPase mediated signal transduction
  Homolog annotation: Hit_ID=UPI0001621F86; Match level="QueryCoverage =100%, HitCoverage=68%, E-value=3e-46, Identity=69%"; Hit description= Arl2-family small GTPase
  Pfam annotation: Domain name=Arf; Domain location=1-118; Score=151.2; E_value=3.2e-42; Accession=PF00025.13; Description=ADP-ribosylation factor family
YSLNIWDVGGQKTIRSYWRNYFEQTDGLVWVVDSSDVRRLDDCRAELHNLLKEERLAGASLLVFANKQDIQGALKPAEIAKVLNLEVMDGSRHWKIVGCSAYTGEGLLDGFDWLVQDIASRIYVLD

SEQ ID NO: 109456 - protein, 54 aa, Setaria italica
  Transcript Sequence Number=SeqID_43482
KIISKNNLVHIEKFTCYDSCFHDESANVILTLSIFDFIFLFIVKVKNVSLRTKH

SEQ ID NO: 109457 - protein, 335 aa, Setaria italica
  misc_feature (27)..(27): Xaa can be any naturally occurring amino acid
  misc_feature (132)..(132): Xaa can be any naturally occurring amino acid
  Transcript Sequence Number=SeqID_43483
  Gene Ontology: Mol. function=protein binding; Cellular component =nucleus; Biological process=mitotic cell cycle
  Homolog annotation: Hit_ID=Q2HT10; Match level="QueryCoverage=83%, HitCoverage=42%, E-value=4e-63, Identity=48%"; Hit description=Barren
  Pfam annotation: Domain name=Barren; Domain location=1-329; Score= -260.8; E_value=0.0027; Accession=PF05786.6; Description=Barren protein
IPESGMWDFGGCDDHEDAYDENYNPVXSNSTNYQEEFDEYTVEIPQGTVADEKLDKIADLLLLGMGTSKTNAWAGPEHWKYRKAKDLEAAPTSSVESEIPNKMKKKRAKDEPDVDFTKALDNEPLNIFAPPXNPKSLLLPANRAICSNRLPEDCHYRPESLVKLFLLPDVLCLAKRRRKSHDTPVENNDNFMPSEPWDDDNFCTDHIDEGHACSDVEEPVNLINKPRQVNKIDIQYDKVSKQVDVHALKEVLWNHIHASAETDNRENEEAESPLSLSQVLHDLPSSNPDAAATDISPHLYFICLLHLANEHGLTLHDRPTLDEIDICMPTSPHVK

SEQ ID NO: 109458 - protein, 71 aa, Setaria italica
  Transcript Sequence Number=SeqID_43484
  Gene Ontology: Mol. function=DNA binding; Cellular component=nucleus
  Homolog annotation: Hit_ID=Q7XLC7; Match level="QueryCoverage=85%, HitCoverage=13%, E-value=1e-17, Identity=70%"; Hit description =OSJNBa0070C17.22 protein
LIDSFYLQFYIDPVNGYEFRSLKDVYRYLESGDISQCVTLPNKRKIEDLHTAGDQSDHTGKPSDHTQPDTD

SEQ ID NO: 109459 - protein, 104 aa, Setaria italica
  misc_feature (19)..(19): Xaa can be any naturally occurring amino acid
  Transcript Sequence Number=SeqID_43485
  Gene Ontology: Mol. function=DNA binding; Cellular component=nucleus
  Homolog annotation: Hit_ID=Q7XLC7; Match level="QueryCoverage=99%, HitCoverage=23%, E-value=8e-38, Identity=71%"; Hit description =OSJNBa0070C17.22 protein
  Pfam annotation: Domain name=MBD; Domain location=23-95; Score=3.6; E_ value=0.018; Accession=PF01429.11; Description=Methyl-CpG binding domain
SCEGSHSITQSEIVLAKPXAMADGKYEPAGEGLPDGWLEECRPRKNRNGSRIKGDMFYIDPVNGYEFRSLKDVYRYLESGDISQCVTLPNKRKIEDLHTAGDQF

SEQ ID NO: 109460 - protein, 48 aa, Setaria italica
  Transcript Sequence Number=SeqID_43486
CDQYLCTLMKCAASCVALKKTNGTRAHSHGALKHYLEVTAWLKMNESN

SEQ ID NO: 109461 - protein, 380 aa, Setaria italica
  Transcript Sequence Number=SeqID_43487
  Gene Ontology: Mol. function=DNA binding; Cellular component=nucleus
  Homolog annotation: Hit_ID=Q7XLC7; Match level="QueryCoverage=97%, HitCoverage=81%, E-value=1e-88, Identity=48%"; Hit description =OSJNBa0070C17.22 protein
NKNKQNLTFKELRPRKNRNGSRIKGDMFYIDPVNGYEFRSLKDVYRYLESGDISQCVTLPNKRKIEDLHTAGDQSDHTGKPSDHTQPDTDVESNEYHIPRGTNTLRNVQREAVRVEASESESIQSGLIEHTPGKAESVTRTGANAEQRPKEKKRKTKPVKGIATPLRSSPRLAALKISQEANNSAPRDELISTNSDITNQSQPKQAQKPRRKSNSSVLPERKDESSSEKFEDKYPSVPNQVQGASVPNSSGDAACQNAPAGAPVLPQQIGQGGTSDNNMPGSALSSLFRHVWSDPCLVFAFRTLMGDIPVLNDTLAYRSSAYDGNRSYFLPPQNLNKGAAPNWSSSAYDGNRNHTQVDHVSLSVPRPSDKFYGSGWFPPQ

SEQ ID NO: 109462 - protein, 65 aa, Setaria italica
  Transcript Sequence Number=SeqID_43488
KQHEYDQESCMRNMYGKFYHCLISDNGLPGFHASMCFVKIIRNGQNGESKSTVNMHLHLLSFLRN

SEQ ID NO: 109463 - protein, 127 aa, Setaria italica
  Transcript Sequence Number=SeqID_43489
SHNNKIEIIIYPIWNCVAWEALHEYEIFTSMKRRFTGQKSDAFRHCFTSMKRRFTGQKSDALDTVHWEARGAEIDCSLSTQVHPAQADGHGMQRSSAPLDGVEVGDGDDGADDGDEHDPAGDDAEEE

SEQ ID NO: 109464 - protein, 126 aa, Setaria italica
  Transcript Sequence Number=SeqID_43490
SHNNKIEIIIYPIWNCVAWEALHEYEIFTSMKRRFTGQKSDALDTVHWEARGAEIDCSLSTQVHPAQADGHGMQRSSAPLDGVEVGDGDDGADDGDEHDPAGDDAEEEVLERGRDPGLRGLRDLRQ

SEQ ID NO: 109465 - protein, 201 aa, Setaria italica
  misc_feature (6)..(6): Xaa can be any naturally occurring amino acid
  misc_feature (165)..(165): Xaa can be any naturally occurring amino acid
  Transcript Sequence Number=SeqID_43491
  Gene Ontology: Mol. function=translation elongation factor activity; Cellular component=cytoplasm; Biological process=translational elongation
  Homolog annotation: Hit_ID=P13905; Match level="QueryCoverage=100%, HitCoverage=44%, E-value=1e-102, Identity=89%"; Hit description =Elongation factor 1-alpha
  Pfam annotation: Domain name=GTP_EFTU_D2; Domain location=4-71; Score= 86.8; E_value=7.8e-23; Accession=PF03144.17; Description=Elongation factor Tu domain 2
  Pfam annotation: Domain name=GTP_EFTU_D3; Domain location=78-186; Score=201.1; E_value=3.1e-57; Accession=PF03143.9; Description =Elongation factor Tu C-terminal domain
  Pfam module annotation: Pfam domain module=GTP_EFTU_D2::GTP_EFTU_D3; Domain location=4-71::78-186
GGIGTXPVGRVETGVLKPGMVVTFAPTGLTTEVKSVEMHHESMQEALPGDNVGFNVKNVAVKDLKRGYVASNSKDDPAREAAGFTAQVIIMNHPGQIAGGYAPVLDCHTSHVAVRFSELLTKIDRRSGKELESGPKFLKNGDAGLVKMVPTKPMVVETFSEYPPXGRFAVRDMRQTVAVGVIKSVEKKDPTGAKVTKAAAK

SEQ ID NO: 109466 - protein, 550 aa, Setaria italica
  Transcript Sequence Number=SeqID_43492
  Gene Ontology: Cellular component=nucleus; Biological process =regulation of transcription, DNA-dependent
  Homolog annotation: Hit_ID=A5HJS4; Match level="QueryCoverage=98%, HitCoverage=97%, E-value=0.0, Identity=68%"; Hit description =Scarecrow
  Pfam annotation: Domain name=GRAS; Domain location=180-550; Score =586.4; E_value=3e-173; Accession=PF03514.6; Description=GRAS family transcription factor
SCAESPYIHKFGPPGSVFPAQFASGTELLHHGPQPYNAEGYRQSGFNGTAAHAFQSSFYNTDSHVESHFNEATCSPANSNISQQNSQSLSDNQTADLEVEFDEDEMRLKLQELEHALLDDGDEIFSDLSGIIDDEWNDNMKNNDWTNTMKNIMSPDSPKESSPESSLCCPDSNNGEARHPKQLLFDCAEAISEYSVEEAQSIITELRQKVAIQGDPSQRIAAYLVEGLAATIQSSGKGIYRALRCKEAPTLYQLSAMQILFEICPCFRLGFMSANYAILEACKGEEVVHIIDFDINQGSQYINLIQFLRNNSNKPRLLRITGVDDPESVHRAVGGLKVVGQRLEKLAEDCEVPFEFRAVASNIEDVTPGMLDCRPGEALIVNFAFLLHHLPDESVSIVNERDQLLRMVKGLRPKLVTVVEQDANTNTTPFLARFREVYDYYSALFDSLDATLPRESPDRMNVERQCLAREIVNILACEGPDRVERYEVAGKWRARMAMAGFVPSPFNSNVIDGIKSLLKSYCDKYRFEKVHDGLHFGWGDKTLVVSSAWQ

SEQ ID NO: 109467 - protein, 112 aa, Setaria italica
  Transcript Sequence Number=SeqID_43493
FAALAGATHELSQKLDELWQWLQAAALPFVLGVAVVLLLVALVRFCGSTLHAVAMGVCKVLVYAICFLGLGLYCIAMAVGRAVACVGRAVACLLPACAQCLRFCAVATIEGP

SEQ ID NO: 109468 - protein, 149 aa, Setaria italica
  misc_feature (7)..(7): Xaa can be any naturally occurring amino acid
  Transcript Sequence Number=SeqID_43494
  Subcellular localization annotation: CTP_CleavageSite=13; ConfidenceScore=5.07e-01
DACSAAXSCRALRGAASAAISAITTIDLSAFAPSNAILSRILAGNGAVRSLTVNCSLLDDSAASVIAKGSLRELSLLKCSFTMSFFMAIGERCGNLRSLKLEMAVAPEVLYPRYSGFGTCLARIYAGCGCLETLWVKFPLLDPRTADYE

SEQ ID NO: 109469 - protein, 89 aa, Setaria italica
  Transcript Sequence Number=SeqID_43495
LRAYRTFDLLYPFIKIQKKPFCQTLCRTALAPPEKLLHQRSHSWSRFSHSHSLAKRALKECSMHGWNIPHIHRLSYSYISSLKHIENSY

SEQ ID NO: 109470 - protein, 64 aa, Setaria italica
  Transcript Sequence Number=SeqID_43496
  Subcellular localization annotation: CTP_CleavageSite=28; ConfidenceScore=5.49e-01
LLSSICCAATAPLPNPAARRPRCPLRKRVSYRQQVQMPRIRRLARRPLWVLLPRRACSLPLDRN

SEQ ID NO: 109471 - protein, 83 aa, Setaria italica
  misc_feature (41)..(41): Xaa can be any naturally occurring amino acid
  misc_feature (81)..(81): Xaa can be any naturally occurring amino acid
  Transcript Sequence Number=SeqID_43497
  Homolog annotation: Hit_ID=Q9FMC0; Match level="QueryCoverage=96%, HitCoverage=17%, E-value=6e-22, Identity=63%"; Hit description=Amino acid transporter-like protein
LAVIYLAAIFIPSIWDAFQFTGATAAVLIGFIFPAMIILRXPYGVSTKRDKVLAVTMIVLAVVSNSVALYSDTLNIFYRKXEA

SEQ ID NO: 109472 - protein, 151 aa, Setaria italica
  Transcript Sequence Number=SeqID_43498
  Homolog annotation: Hit_ID=B9T738; Match level="QueryCoverage=96%, HitCoverage=31%, E-value=4e-52, Identity=68%"; Hit description=Amino acid transporter, putative
ILSGKSLGIATVPLKSLMMAIPKLFPELDGLNSIWNLFTAVPVLVTAYICHYNVHSIDNELEDRTQIKPIVRTSLVLCSSVYIATSFFAYLLFGEGTLDDVLANFDANLGIPFSSVFDDIVRVSYAAHVMLAFPFVFFALGLTDGLLFPSR

SEQ ID NO: 109473 - protein, 82 aa, Setaria italica
  Transcript Sequence Number=SeqID_43499
ATCNVCIRYVLVLAEKRVWFGKSFLHNNVHIHCKWLNSTLSRFVYRRPSNFKHPILSSDRILNCGQRDRIRSCIQVHHHLPS

SEQ ID NO: 109474 - protein, 77 aa, Setaria italica
  Transcript Sequence Number=SeqID_43500
  Homolog annotation: Hit_ID=B9T738; Match level="QueryCoverage=71%, HitCoverage=11%, E-value=4e-12, Identity=61%"; Hit description=Amino acid transporter, putative
EASIDMLVRCSHQGKITSDGWLMGEVFGQWGRIALQASIIINNVGVLIVYMIIIGTLKPSIRPSTSNITFEHFETYR

SEQ ID NO: 109475 - protein, 323 aa, Setaria italica
  misc_feature (140)..(140): Xaa can be any naturally occurring amino acid
  Transcript Sequence Number=SeqID_43501
  Homolog annotation: Hit_ID=B9N1V7; Match level="QueryCoverage=93%, HitCoverage=65%, E-value=1e-89, Identity=54%"; Hit description=Amino acid transporter
  Pfam annotation: Domain name=Aa_trans; Domain location=40-323; Score=- 71.9; E_value=0.0029; Accession=PF01490.10; Description=Transmembrane amino acid transporter protein
  Pfam annotation: Domain name=Trp_Tyr_perm; Domain location=40-323; Score=-259.8; E_value=0.011; Accession=PF03222.5; Description =Tryptophantyrosine permease family
  Pfam module annotation: Pfam domain module=Aa_trans::Trp_Tyr_perm; Domain location=40-323::40-323
MGIGNGSSSDVPIVSHKATQDETTLLLPIKADEDAVHEFNGASFSGAVFNLSTTIVGAGIMALPASIKMLGLIPGILMIILVALLTEASIDMLVRCSHQGKITSYGWLMGDTFGQWGRIALQVSVVINNIGVLIVYMIIXGDVLSGTSATGVHHSGIFEGWFGPHVWNSRPVVLLATTLLVLAPLVSFKRLDSLRYTSALSVALAVVFVVITAGVAIVRLIQGTVEIPKLFPEIDGISSVWKLFTAVPVLVTAYICHYNVHSIDNELEDKTQIKPIVQTSLGLCSSVYIATSFFAYLLFGEHVSKGSLTKEEICKEACCNVYT

SEQ ID NO: 109476 - protein, 276 aa, Setaria italica
  Transcript Sequence Number=SeqID_43502
  Homolog annotation: Hit_ID=C3SA82; Match level="QueryCoverage=98%, HitCoverage=59%, E-value=1e-102, Identity=66%"; Hit description =System N amino acid transporter
APLVSFKRLDSLRYTSALSVALAVVFVVITAGVAIVRLIQGTVEIPKLFPEIDGISSVWKLFTAVPVLVTAYICHYNVHSIDNELEDKTQIKPIVQTSLGLCSSVYIATSFFAYLLFGEATLADVLANFDSDLRIPFSSVFNDVVRVSYVVHIMLVFPIVFFALRLNLDGLLFPTARHISRDNRRFTIITISLLAVIYLAAIFIPSIWDAFQFTGATAAVLIGFIFPAMIILRDPYGVSTKRDKVLAVTMIVLAVVSNSVALYSDTLNIFYRKQEA

SEQ ID NO: 109477 - protein, 461 aa, Setaria italica
  misc_feature (247)..(247): Xaa can be any naturally occurring amino acid
  misc_feature (403)..(403): Xaa can be any naturally occurring amino acid
  Transcript Sequence Number=SeqID_43503
  Homolog annotation: Hit_ID=B9N1V7; Match level="QueryCoverage=99%, HitCoverage=98%, E-value=1e-155, Identity=60%"; Hit description =Amino acid transporter
  Pfam annotation: Domain name=ATP-synt_C; Domain location=198-261; Score=-8.0; E_value=0.079; Accession=PF00137.13; Description=ATP synthase subunit C
  Pfam annotation: Domain name=Aa_trans; Domain location=41-455; Score =110.6; E_value=5.4e-30; Accession=PF01490.10; Description =Transmembrane amino acid transporter protein
  Pfam annotation: Domain name=Trp_Tyr_perm; Domain location=41-446; Score=-208.6; E_value=6.1e-05; Accession=PF03222.5; Description =Tryptophantyrosine permease family
  Pfam module annotation: Pfam domain module=ATP-synt_C::Aa_trans::Trp _Tyr_perm; Domain location=198-261::41-455::41-446
MAIGDGSSNGNQQSAHKEIRDETTPLLPVKVEEDDGFHEFNGASFSGAVFNLSTTIVGAGIMALPASIKMLGIIPGILMIIIVALLTEASIDMLVRCSHQGKITSYGWLMGEVFGQWGRIALQASIIINNVGVLIVYMIIIGDVLSGTTSAGVHHRGILEGWFGAHMWNSRPIVLLATALLVFAPLVSFKRLDSLRYTSALSVALAVVFVVITAGIAIIKLFNGTVAMPKLFPELDGLNSIWNLFTXAVPVLVTAYICHYNVHSIDNELEDRTQIKPIVRTSLVLCSSVYIATSFFAYLLFGEGTLDDVLANFDANLGIPFSSVFDDIVRVSYAAHVMLVFPIVFFALRLNLDGLLFPTSRHISHDNKRFAIITITLLTVIYLAAILIPSIWDAFQFTGATAXAVLIGFIFPAMVILRDSYGIATKRDKILAVTMIVLAVLSNSVALYSDAMNIFRKKEVA

SEQ ID NO: 109478 - protein, 280 aa, Setaria italica
  misc_feature (239)..(239): Xaa can be any naturally occurring amino acid
  Transcript Sequence Number=SeqID_43504
  Gene Ontology: Mol. function=catalytic activity; Cellular component =intracellular
  Homolog annotation: Hit_ID=Q10MW4; Match level="QueryCoverage=100%, HitCoverage=48%, E-value=1e-108, Identity=70%"; Hit description =Basic helix-loop-helix, putative, expressed
  Pfam annotation: Domain name=Macro; Domain location=182-278; Score= -9.0; E_value=0.004; Accession=PF01661.13; Description=Macro domain
SLPSGVFRSEKQRTVQVGIMKFLKKGDTSSVEKSSGSKLTLSESKPEQQNPLPKHEKVEADITCPMEVEKGSNDKKESGEHAKESDSDDVGSRTLAFPSISTADFQFDLDRASDIIVDTAADFLQKFDSIRLVLVDLSEVSRILSLVKEKASKKSIDCSRFFTFVGDITQLRTRGLQCSVIANAANWRLKPGGGGVNAAIFSAAGESLQHATRKCADALRPGTSVVVPLPSISPLHQRXGVTHVIHVLGPNMNPMRPDYMKNDYTKGSKILHEAYNSLFE

SEQ ID NO: 109479 - protein, 417 aa, Setaria italica
  Transcript Sequence Number=SeqID_43505
  Gene Ontology: Mol. function=translation elongation factor activity; Cellular component=mitochondrion; Biological process=translational elongation
  Homolog annotation: Hit_ID=Q851Y8; Match level="QueryCoverage=96%, HitCoverage=88%, E-value=0.0, Identity=90%"; Hit description =Elongation factor Tu
  Pfam annotation: Domain name=GTP_EFTU; Domain location=29-223; Score =349.1; E_value=8.4e-102; Accession=PF00009.19; Description =Elongation factor Tu GTP binding domain
  Pfam annotation: Domain name=GTP_EFTU_D2; Domain location=246-317; Score=84.2; E_value=4.7e-22; Accession=PF03144.17; Description =Elongation factor Tu domain 2
  Pfam annotation: Domain name=GTP_EFTU_D3; Domain location=322-416; Score=189.3; E_value=1.1e-53; Accession=PF03143.9; Description =Elongation factor Tu C-terminal domain
  Pfam annotation: Domain name=MMR_HSR1; Domain location=32-158; Score=- 11.2; E_value=0.011; Accession=PF01926.15; Description=GTPase of unknown function
  Pfam module annotation: Pfam domain module=GTP_EFTU::GTP_EFTU_D2::GTP_ EFTU_D3::MMR_HSR1; Domain location=29-223::246-317::322-416::32-158
  Subcellular localization annotation: CTP_CleavageSite=55; ConfidenceScore=5.12e-01
APAAAAPAQPPPMAGTLWARAMATFTRTKPHVNVGTIGHVDHGKTTLTAAITKVLAEAGKAKAIAFDEIDKAPEEKARGITISTAHVEYETAKRHYAHVDCPGHADYVKNMITGAAQMDGGILVVSAPDGPMPQTKEHILLARQVGVPSLVCFLNKVDAVDDPELLELVEMELRELLTFYKFPGDDIPIIRGSALSALQGTNDEIGKNAILKLMDAVDEYIPDPVRQLDKPFLMPIEDVFSIQGRGTVVTGRVEQGTIKTGEDVEILGLTQSGPLKTTVTGVEMFKKILDHGEAGDNVGLLLRGLKRGDVERGQVVCKPGTLKTCTKFEAEIYALTKDEGGRHTAFMSNYSPQFYFRTADVTGKIELLGETKMVLPGDNVTANFELISPVPLEPGQRFALREGGRTVGAGVVSKVIS

SEQ ID NO: 109480 - protein, 83 aa, Setaria italica
  Transcript Sequence Number=SeqID_43506
ELQVTTQNISTVTAGQPAILHALIVHKAYTSALQTLPHPYCTLCVQILKIGWQFSVNMENRSTTATTCFYQWILAYYIVTLRT

SEQ ID NO: 109481 - protein, 93 aa, Setaria italica
  Transcript Sequence Number=SeqID_43507
  Homolog annotation: Hit_ID=B6T6L3; Match level="QueryCoverage=96%, HitCoverage=69%, E-value=1e-25, Identity=68%"; Hit description =Nitrilase-associated protein
KTTPDTNSSSVKDDNKMIGAGADKEPPQLPPPNREVSNPILSSNRSPCNIYHTSQLSYNNSGFLITDRPSTRVRCAPGGPSSLGFLFGEEHEK

SEQ ID NO: 109482 - protein, 228 aa, Setaria italica
  Transcript Sequence Number=SeqID_43508
  Gene Ontology: Mol. function=phosphoinositide binding; Biological process=cell communication
  Homolog annotation: Hit_ID=Q9XI44; Match level="QueryCoverage=59%, HitCoverage=13%, E-value=3e-36, Identity=54%"; Hit description =F9L1.19 protein
  Pfam annotation: Domain name=PX; Domain location=92-202; Score=98.0; E_value=3.3e-26; Accession=PF00787.16; Description=PX domain
NVKNFFRKKRSRSYAQKPPIWQEERSSFTVGDDLDILNASANDSKTDELVEDTEVESMARMFSSANASIYSLASTDSSYSSNYGGANVLQDSYLKLRCEVVGASIVKSGSGMFAVYSISVTDANGNSWSIKRRFRHFEELHRRLKEYAQYNLHLPPKHFLSSGLEVPVVRERCKLLDIYLKNLLQIPIVSSCIEVWDFLSVDSQTYIFMDSLSVIQTLSVGLDERSNG

SEQ ID NO: 109483 - protein, 263 aa, Setaria italica
  misc_feature (229)..(229): Xaa can be any naturally occurring amino acid
  Transcript Sequence Number=SeqID_43509
  Gene Ontology: Mol. function=phosphoinositide binding; Biological process=cell communication
  Homolog annotation: Hit_ID=Q9XI44; Match level="QueryCoverage=92%, HitCoverage=22%, E-value=1e-43, Identity=41%"; Hit description =F9L1.19 protein
  Pfam annotation: Domain name=Nexin_C; Domain location=193-261; Score=- 10.9; E_value=0.012; Accession=PF08628.4; Description=Sorting nexin C terminal
LYLLIIQNLLQIPIVSSCIEVWDFLSVDSQTYIFMDSLSVIQTLSVGLDERSNGKSRKVLNSSGALNGSFISGGQSFHGHTDNTVHKDLDFAVSDGLRYRKGNVEKNLGNSVCDTTTNLYLDNSGSDPEQNDYSFSIDSVNPKKMRSSETNETPQLLGSDGFSVSPNDWMAPNLSVPLFHLVDVVFQLQDGGWIRRQAFWVAKQLLQLGMGDTFDDWLVDKIQLLRKGXIIAFAVKRVEQILWPDGIFMTKHPNRKTSPPPSG

SEQ ID NO: 109484 - protein, 92 aa, Setaria italica
  Transcript Sequence Number=SeqID_43510
YVNPQCGDFMKATFQSWPAPAVCMNEYQYQLVLCAMASVCTTCDQCFIDSSIFDLGFYFWSGCWCYTAATPVYIIIEMEWFFLVYTYTQVQL

SEQ ID NO: 109485 - protein, 362 aa, Setaria italica
  Transcript Sequence Number=SeqID_43511
EELLDKLSVSLTGEELEIIGKLYQQAMKLEVEFFSAQLVDQPVIAPLSRYCGPKYKLLVFSDFDLTCTVVDSSAILAEIAILSFQKSSQSGIDNTLDRTKSADLRNSWNMLSKQYMEEYEECMERLLPPEESQSLDYDQLYKGLEVLAEFEKLANSRVVDSGVLRGMNLEDIRKAGERLILQDGCKNFFQKIGRTRESLNLDIHILSYCWCAELIRSAFSSVGCLDGLNIHSNEFAFEGSVSTGQIDRKIQSPLDKVEKFKSIKSGTDSTAPLLSVYIGDSVGDLLCLLEADIGIVVGSSTSLRRVGKQFGVSFVPLFPGLVEKQRQLTEQEASMFKARSGVLYTVCSWSEIHAFILGSDFS

SEQ ID NO: 109486 - protein, 261 aa, Setaria italica
  misc_feature (189)..(189): Xaa can be any naturally occurring amino acid
  Transcript Sequence Number=SeqID_43512
  Gene Ontology: Mol. function=two-component sensor activity; Cellular component=membrane; Biological process=signal transduction
  Homolog annotation: Hit_ID=Q5JLC8; Match level="QueryCoverage=100%, HitCoverage=14%, E-value=1e-130, Identity=91%"; Hit description =Putative THO complex 2
TAKLDTRRLLKRLAKENLKPLGRMVAKLAHANPMTVLRTIVQQVEAYRDMITPVVDAFKYLTQLEYDILQYIVIERLAQGGRAKLKDNGLNLSDWLQCLASFWGHLCKKHNAVELRSLLQYLVNQLKKGVGIELVVLEELIQQMANVQYTENMTEEQVDAMAGSETLRQQASLFGATRNYKVLSKSTNXLRDSLLPKEEPKLAVPLLLLIAQHRSKIIINADATYIKMVSEQFDRCHGILLQYVEFLSSAVTPIAYAQLIP

SEQ ID NO: 109487 - protein, 592 aa, Setaria italica
  Transcript Sequence Number=SeqID_43513
  Gene Ontology: Mol. function=two-component sensor activity; Cellular component=membrane; Biological process=signal transduction
  Homolog annotation: Hit_ID=Q5JLC8; Match level="QueryCoverage=100%, HitCoverage=33%, E-value=0.0, Identity=81%"; Hit description =Putative THO complex 2
  Pfam annotation: Domain name=LSPR; Domain location=553-561; Score =8.5; E_value=0.75; Accession=PF06049.4; Description=Coagulation Factor V LSPD Repeat
  Pfam annotation: Domain name=LSPR; Domain location=583-591; Score =2.7; E_value=61; Accession=PF06049.4; Description=Coagulation Factor V LSPD Repeat
  Pfam module annotation: Pfam domain module=LSPR::LSPR; Domain location=553-561::583-591
KINLAATGKDLMDDEKQEITIDLYTALEMENDTVGERAPEMEKNQKLGLLLGFLSVHDWYHAQVLFERLAHLNPVEHIEICDGLFRMIEKAMSSAYDVVCQLYYYLPPKNGADQTDTSALSLSSFDLPKEFFQMLTACGPYLHRDTQLLQKVCRVLKAYYHSSKESTRATSVVSPEFRIEEALGSCLLPSLQLIPANPAVDMEIWGVLSLLPYETRYRLYGEWEKETEQNPIVLAARQTAKLDTRRLLKRLAKENLKPLGRMVAKLAHANPMTVLRTIVQQVEAYRDMITPVVDAFKYLTQLEYDILQYIVIERLAQGGRAKLKDNGLNLSDWLQCLASFWGHLCKKHNAVELRSLLQYLVNQLKKGVGIELVVLEELIQQMANVQYTENMTEEQVDAMAGSETLRQQASLFGATRNYKVLSKSTNRLRDSLLPKEEPKLAVPLLLLIAQHRSKIIINADATYIKMVSEQFDRCHGILLQYVEFLSSAVTPIAYAQLIPPLQDLVHKYHIEPEVAFLIYRPVMRLFKSTSGGDTCWPLDDNEEGESVSSDDLILHPDLSQEPIMWSDLINTVRSILPAKAWNSLSPDLYATF

SEQ ID NO: 109488 - protein, 109 aa, Setaria italica
  Transcript Sequence Number=SeqID_43514
  Gene Ontology: Mol. function=oxidoreductase activity; Cellular component=extracellular region; Biological process=oxidation reduction
  Homolog annotation: Hit_ID=B6U2Y1; Match level="QueryCoverage=100%, HitCoverage=19%, E-value=5e-51, Identity=87%"; Hit description=L -ascorbate oxidase
  Pfam annotation: Domain name=Cu-oxidase; Domain location=2-77; Score =16.7; E_value=3.1e-05; Accession=PF00394.14; Description=Multicopper oxidase
IKASFNVRIQKHILKLVEMEGSHTVQNTYDSLDLHIGQCLSFLVTADQAPGDYLLVASTRFIKEVSTITAVIRYKGSNTPPPSQLPEAPSGWAWSINQWRSFRWNLTAS

SEQ ID NO: 109489 - protein, 496 aa, Setaria italica
  misc_feature (16)..(16): Xaa can be any naturally occurring amino acid
  misc_feature (126)..(126): Xaa can be any naturally occurring amino acid
  Transcript Sequence Number=SeqID_43515
  Gene Ontology: Mol. function=protein serine/threonine kinase activity; Cellular component=plasma membrane; Biological process =protein amino acid phosphorylation
  Homolog annotation: Hit_ID=B6TR03; Match level="QueryCoverage=89%, HitCoverage=91%, E-value=0.0, Identity=75%"; Hit description=Protein kinase APK1A
  Pfam annotation: Domain name=Pkinase; Domain location=145-425; Score =186.6; E_value=6.8e-53; Accession=PF00069.17; Description=Protein kinase domain
  Pfam annotation: Domain name=Pkinase_Tyr; Domain location=145-425; Score=121.8; E_value=2.2e-33; Accession=PF07714.9; Description =Protein tyrosine kinase
  Pfam module annotation: Pfam domain module=Pkinase::Pkinase_Tyr; Domain location=145-425::145-425
AGGWGEFDGWESSGEXEERERWGWCRRSRRGSSRRRASPKGAADDDTTVATGCCIRLWPVGSCPPPPPTRSKVDTSTSSASTHGAEKSTENGSKNQPAALVVSGSTTTSNAESSSSASKVGEEIKXASQLRKFAFNDLKCATRNFRPESLLGEGGFGCVFKGWIEENGTAPVKPGTGLTVAVKTLNHDGLQGHKEWVAEVDFLGNLHHPNLVRLIGYCVEDDQRLLVYEFMPRGSLDNHLFRRSLPLPWAVRMKVALGAAKGLAFLHEEAERPVIYRDFKTSNILLDAEYNAKLSDFGLAKDGPVGDKTHVSTRVMGTYGYAAPEYVMTGHLTSKSDVYSFGVVLLEMMSGRRSMDKNRPNGEHNLVEWARPLLGERQRFYKLIDPRLEGNFSVKGAQKAAQLARACLSRDPKARPLMSQVVEALKPLLNLKDMASSSYFYQTMQAERMAHSSSMNGRTLKSQGPFAARNGQQPVRSLSDGPRASPFRYSPKPNMK

SEQ ID NO: 109490 - protein, 76 aa, Setaria italica
  Transcript Sequence Number=SeqID_43516
  Gene Ontology: Mol. function=magnesium ion binding; Cellular component=chloroplast; Biological process=photosynthesis, light harvesting
  Homolog annotation: Hit_ID=Q41746; Match level="QueryCoverage=100%, HitCoverage=26%, E-value=2e-24, Identity=76%"; Hit description =Chlorophyll a/b-binding apoprotein CP26
MQTGALLLDGNTLSYFGNSIPINLVVAVIAEVVLVGGAEYYRIINGLDLEDKLHPGGPFDPLGLASDPDQAAILKV

SEQ ID NO: 109491 - protein, 89 aa, Setaria italica
  Transcript Sequence Number=SeqID_43517
  Homolog annotation: Hit_ID=Q0WLJ9; Match level="QueryCoverage=53%, HitCoverage=11%, E-value=1e-09, Identity=66%"; Hit description =Clathrin binding protein-like (Fragment)
SGIWADSLSRGLIDLNITASKEVDLSDVGVVGQLSNGSEGKGLAVPWFTGSGTTVSTGSGLQSRSVFPSSAGSTGGSGNFQQQQFGTFT

SEQ ID NO: 109492 - protein, 59 aa, Setaria italica
  Transcript Sequence Number=SeqID_43518
WARLFGSIINESFMKTPAKYFKKMNTCSIFRFFKMKISNFHLCTPFKVCACLALDFKAA

SEQ ID NO: 109493 - protein, 166 aa, Setaria italica
  misc_feature (52)..(52): Xaa can be any naturally occurring amino acid
  misc_feature (62)..(62): Xaa can be any naturally occurring amino acid
  Transcript Sequence Number=SeqID_43519
  Gene Ontology: Cellular component=chloroplast
  Homolog annotation: Hit_ID=B9RAW3; Match level="QueryCoverage=99%, HitCoverage=50%, E-value=7e-28, Identity=41%"; Hit description=S -adenosylmethionine-dependent methyltransferase, putative
FYPDLSVHGWELDSAVLAVARDFFGLAELEKDHAARLFVHVGDALEAEAPPXGFGGALVDLXANGSVLPELQEVDTWQRLSGMVAPEGRMMVNCGGGCVEAEEEGRDGEAVKDATLRAMATAFGKEMVSVLDVDDSWVAMTGPPVTAPEKAAAWKARLPSELRLFC

SEQ ID NO: 109494 - protein, 227 aa, Setaria italica
  misc_feature (168)..(168): Xaa can be any naturally occurring amino acid
  Transcript Sequence Number=SeqID_43520
  Gene Ontology: Mol. function=DNA binding; Biological process=DNA repair
  Homolog annotation: Hit_ID=Q9SX69; Match level="QueryCoverage=83%, HitCoverage=21%, E-value=9e-36, Identity=40%"; Hit description =F11A17.9 protein
  Pfam annotation: Domain name=HIRAN; Domain location=28-127; Score =74.5; E_value=3.8e-19; Accession=PF08797.3; Description=HIRAN domain
EHCSSSMLPTVATSCSDDACADLDSSTTITVDTVIVGRRFHENIELREDAGITFLRDPQNAKDSDAIKVLYAASECEMLGYLPRELAKVLAPLMDMHYVECEGCVVGLPEQQLGNVPIQITIQKCKIDNQINDDPEYWQSLWEKFISTVKSENFQRPSSARYQRNFNXMIADVMANHAHVFSDIERSFLASFKSLSDDGQRLFVRIYTRKGPWFRKSTISYREISDL

SEQ ID NO: 109495 - protein, 56 aa, Setaria italica
  Transcript Sequence Number=SeqID_43521
  Homolog annotation: Hit_ID=B6U6W8; Match level="QueryCoverage=94%, HitCoverage=18%, E-value=2e-09, Identity=56%"; Hit description =Transposon protein CACTA, En/Spm sub-class
MEKSSKIVAKWDSFAVKAFNDICVEEVLIFNWPQQCLNVVGYANLVRKFYERTKMP

SEQ ID NO: 109496 - protein, 68 aa, Setaria italica
  misc_feature (34)..(34): Xaa can be any naturally occurring amino acid
  Transcript Sequence Number=SeqID_43522
  Homolog annotation: Hit_ID=B6U6W8; Match level="QueryCoverage=88%, HitCoverage=21%, E-value=6e-12, Identity=58%"; Hit description =Transposon protein CACTA, En/Spm sub-class
QVVDHVRDEIGSMLDQVIKDEAEEGSDEHFYATXTSLKKENRDVFITLKTSNGRLNWLRRAWEIRKKH

SEQ ID NO: 109497 - protein, 102 aa, Setaria italica
  misc_feature (56)..(56): Xaa can be any naturally occurring amino acid
  Transcript Sequence Number=SeqID_43523
  Gene Ontology: Mol. function=transposase activity; Biological process= transposition, DNA-mediated
  Homolog annotation: Hit_ID=B6U6W8; Match level="QueryCoverage=99%, HitCoverage=35%, E-value=3e-26, Identity=57%"; Hit description =Transposon protein CACTA, En/Spm sub-class
MEKSLKIMAKWDSFATKAFNDICVEVLAFNRPQQCLNVVGYANLVRKFYERTKMPXKKTQMKNKWDILKNMYTQWKTLNLRATELGRDPVTSCIVADNEWWE

SEQ ID NO: 109498 - protein, 287 aa, Setaria italica
  misc_feature (110)..(110): Xaa can be any naturally occurring amino acid
  misc_feature (167)..(167): Xaa can be any naturally occurring amino acid
  misc_feature (260)..(260): Xaa can be any naturally occurring amino acid
  misc_feature (270)..(270): Xaa can be any naturally occurring amino acid
  Transcript Sequence Number=SeqID_43524
  Gene Ontology: Mol. function=transposase activity; Biological process= transposition, DNA-mediated
  Homolog annotation: Hit_ID=B6U6W8; Match level="QueryCoverage=98%, HitCoverage=97%, E-value=7e-63, Identity=45%"; Hit description =Transposon protein CACTA, En/Spm sub-class
MEKSSKLVANWDSFAAKAFNDICVEEVLAFNRPQQYLNAVGYANLVRKFYERTKRPYNETQMKNRWDILKKMYTQWKTLNLRATELGRDPVTSCIVADNEWWEEQNAAMXGCIWFRTAPLEYEDQMRIMFKSVIVTNETSYVPSGDGNVDVDEHDVADAGGNIDKEXTKTPTSSKRRAAKRPAPSSPKGKKKKTFRDQCMKHLVDAYELKVQSSKHSATSQVVDHVRDEIGSMLDQVIKDGAEEGSDEHFYATQLLKKGXHDVFITLKTXNGRLNWMRRAWEIRKKH

SEQ ID NO: 109499 - protein, 67 aa, Setaria italica
  Transcript Sequence Number=SeqID_43525
TEVLYTPKIYGMICDIPAPTILLCPSQTLLIHSQLTTNPKPKCSKAPPITFNPIPFSTNGWTDTDKP

SEQ ID NO: 109500 - protein, 103 aa, Setaria italica
  Transcript Sequence Number=SeqID_43526
HDIIPYKKAGNHFKSSFIRKHTKHRRQLCCYLNQEEVLTQKLSPYIFVKNVHVEHVYQGAKEPSTEQSPPNTSTKNSRHISIGSTRGLLFFTSVIAIANALSL

SEQ ID NO: 109501 - protein, 65 aa, Setaria italica
  Transcript Sequence Number=SeqID_43527
IDLCLCDHMLQEKQELAVLYRNGHFLLIHVHEDTLHTLQTDLDLRTIHPNAQWQILDDVHGDNFL

SEQ ID NO: 109502 - protein, 113 aa, Setaria italica
  Transcript Sequence Number=SeqID_43528
  Gene Ontology: Mol. function=zinc ion binding
CGKIDPRDCKQMAGTSGRYVNNPAMDSSKRYYKSKFQYGSKKPPYFKEEICDSGPNLKEMESSSKHHDPHVTGLHRPVQESSPCESIEDSPRVLNPVVKKRMASPKKNFIVAD

SEQ ID NO: 109503 - protein, 427 aa, Setaria italica
  misc_feature (13)..(13): Xaa can be any naturally occurring amino acid
  Transcript Sequence Number=SeqID_43529
  Gene Ontology: Cellular component=mitochondrion
  Homolog annotation: Hit_ID=B6SWY6; Match level="QueryCoverage=99%, HitCoverage=88%, E-value=0.0, Identity=54%"; Hit description =Pentatricopeptide repeat protein PPR1106-17
  Pfam annotation: Domain name=PPR; Domain location=166-200; Score =44.5; E_value=4.1e-10; Accession=PF01535.12; Description=PPR repeat
  Pfam annotation: Domain name=PPR; Domain location=267-301; Score =34.3; E_value=4.9e-07; Accession=PF01535.12; Description=PPR repeat
  Pfam annotation: Domain name=PPR; Domain location=368-402; Score =35.3; E_value=2.4e-07; Accession=PF01535.12; Description=PPR repeat
  Pfam annotation: Domain name=PPR; Domain location=65-99; Score=43.7; E_value=7.3e-10; Accession=PF01535.12; Description=PPR repeat
  Pfam module annotation: Pfam domain module=PPR::PPR::PPR::PPR; Domain location=166-200::267-301::368-402::65-99
LLFCLLKSCGEQXDAKLGRQVHCCIVKGGWSNVIVDSAVAHFYAQCGDVTATSTVFDRMASRDVVSWTTMITAYVQHGHGDKALQMFPTMVAEGFRPNEFTVCSVLKACAEEKALRFGKQLHGAVVKKLYKYDIHVGSALVTMYARCGEVFGAQAVFDKMPRRNTITWTSMISGYAQSGYGEEAVLLFRKMKMRRVFVNNLTIVGLLSACGSMQSKYLGKELHAQIMKNCMGDNLQIGSTLVWFYSKCGEHSYAARILEAMPDRDAVAWTAMISGYNNLGHNVEALKSLDEMLWDGVTPNTYTYSSALKACARLEALRDGKRIHGVVNKTQAFSNVFVGCSLIDMYMRCGKVDEARRVFDAMPEHNLVTWKVMITGFTQNGLCKEALKYMYLMQQEGYDVDDFVLSTVLTSCGDLQLKSDCISFLAQ

SEQ ID NO: 109504 - protein, 185 aa, Setaria italica
  Transcript Sequence Number=SeqID_43530
  Homolog annotation: Hit_ID=Q7XGA9; Match level="QueryCoverage=98%, HitCoverage=24%, E-value=6e-87, Identity=83%"; Hit description=(RAP Annotation release2) Protein prenyltransferase domain containing protein
  Pfam annotation: Domain name=PPR; Domain location=10-44; Score=33.7; E_value=7.3e-07; Accession=PF01535.12; Description=PPR repeat
  Pfam annotation: Domain name=PPR; Domain location=45-79; Score=33.3; E_value=9.4e-07; Accession=PF01535.12; Description=PPR repeat
  Pfam annotation: Domain name=PPR; Domain location=80-114; Score=20.1; E_value=0.0089; Accession=PF01535.12; Description=PPR repeat
  Pfam module annotation: Pfam domain module=PPR::PPR::PPR; Domain location=10-44::45-79::80-114
EQKELHVGRLAYSSLMGACCNAKDWKKALQLYEEIKSIKLTPTVSMMNALITSLCDGDQVLKAVDVLNEMKGIGICPNEITYSVLFVACERNGEAQLGLDLFEQLKIDGIGINPTIIGSLTGLCLQMFDSDLSLGNIIVNFSLGKPQIDNKWTSSAIMVYREAVSTGLVPSSDVLSQVLGCLRLP

SEQ ID NO: 109505 - protein, 268 aa, Setaria italica
  Transcript Sequence Number=SeqID_43531
  Homolog annotation: Hit_ID=Q7XGA9; Match level="QueryCoverage=98%, HitCoverage=35%, E-value=1e-133, Identity=84%"; Hit description=(RAP Annotation release2) Protein prenyltransferase domain containing protein
HNFSSGLCLQMFDSDLSLGNIIVNFSLGKPQIDNKWTSSAIMVYREAVSTGLVPSSDVLSQVLGCLRLPHDNSLKSSFIENMGISCDIPHNPNINSLFEGFGEYDIRAFSMLEEAASLGAVSSISMKDTRIVIDARKLKIYSAEVSLLTTLRSLKHRLAAGARLPNVTILLPTEKKQVDIDEREKTLKLSGRIGQAIGSLLRRLGISYQGEESHGRMRINGLTLRRWFNPKLNSKSSSAAPADLLPLSSRLAKGIADQQRDIRSLSLE

SEQ ID NO: 109506 - protein, 211 aa, Setaria italica
  Transcript Sequence Number=SeqID_43532
  Gene Ontology: Mol. function=serine-type endopeptidase activity; Cellular component=extracellular region; Biological process=negative regulation of catalytic activity
  Homolog annotation: Hit_ID=B9RYG6; Match level="QueryCoverage=100%, HitCoverage=26%, E-value=7e-64, Identity=57%"; Hit description=Xylem serine proteinase 1, putative
  Subcellular localization annotation: CTP_CleavageSite=15; ConfidenceScore=5.31e-01
LVTASDGAAIAKYMTAAYGGRRGARAPTASLRFGGTALGVKPAPAVSYFSARGPGQISPTILKPDVVGPGVDILAAWVPNKEIMEKVFTKYALVSGTSMSSPHVAGVAALLRAAHPDWSPAAIRSAMMTTAYVKDNAGNVIVSMPSGSPGTPLDFGGGHVSPNDAMDPGLVYDAAADDYVSFLCGLRYSSRQISTITGRRNPACAGASLDL

SEQ ID NO: 109507 - protein, 66 aa, Setaria italica
  misc_feature (42)..(42): Xaa can be any naturally occurring amino acid
  Transcript Sequence Number=SeqID_43533
  Gene Ontology: Mol. function=sequence-specific DNA binding; Cellular component=nucleus
  Homolog annotation: Hit_ID=Q8S151; Match level="QueryCoverage=77%, HitCoverage=26%, E-value=4e-19, Identity=90%"; Hit description=MADS -box transcription factor 32
RSNTVPSLELLEHNLEAAMHKVRSEKDRKIGGEITYLENIIXGRQEERYGLCDKEFLRTEYTLPNL

SEQ ID NO: 109508 - protein, 196 aa, Setaria italica
  misc_feature (80)..(80): Xaa can be any naturally occurring amino acid
  Transcript Sequence Number=SeqID_43534
  Gene Ontology: Mol. function=sequence-specific DNA binding; Cellular component=nucleus; Biological process=regulation of transcription, DNA-dependent
  Homolog annotation: Hit_ID=B6UCT1; Match level="QueryCoverage=100%, HitCoverage=100%, E-value=2e-89, Identity=84%"; Hit description=MADS- box transcription factor 32
  Pfam annotation: Domain name=K-box; Domain location=72-171; Score= -6.6; E_value=0.0018; Accession=PF01486.9; Description=K-box region
  Pfam annotation: Domain name=SRF-TF; Domain location=9-59; Score =87.9; E_value=3.6e-23; Accession=PF00319.10; Description=SRF-type transcription factor (DNA-binding and dimerisation domain)
  Pfam module annotation: Pfam domain module=K-box::SRF-TF; Domain location=72-171::9-59
MGRGRSEIKRIENPTQRQSTFYKRRDGLFKKARELSVLCDVDLLLLLFSTSGKLYHYLSPTVPSVKDLVERYEAATHTKXWTDIRQERRAELEKVEQMCELMEKELRFMTVDDGEKYTVPSLELLEHNLEAAMHKVRSEKDRKIGGEITYLENIIRGRQEERYGLCDKLAHSQALNNEEGGSTSLSNGLELKLGFN

SEQ ID NO: 109509 - protein, 272 aa, Setaria italica
  misc_feature (75)..(75): Xaa can be any naturally occurring amino acid
  Transcript Sequence Number=SeqID_43535
  Gene Ontology: Mol. function=oxidoreductase activity, acting on the CH-CH group of donors; Cellular component=glyoxysome; Biological process=metabolic process
  Homolog annotation: Hit_ID=B6TNB5; Match level="QueryCoverage=99%, HitCoverage=62%, E-value=1e-145, Identity=88%"; Hit description =Glutaryl-CoA dehydrogenase
  Pfam annotation: Domain name=Acyl-CoA_dh_1; Domain location=111-257; Score=86.5; E_value=9.6e-23; Accession=PF00441.16; Description=Acyl -CoA dehydrogenase, C-terminal dom
  Pfam annotation: Domain name=Acyl-CoA_dh_2; Domain location=123-246; Score=-16.0; E_value=0.0034; Accession=PF08028.3; Description=Acyl -CoA dehydrogenase, C-terminal doma
  Pfam annotation: Domain name=Acyl-CoA_dh_M; Domain location=5-57; Score=85.6; E_value=1.7e-22; Accession=PF02770.11; Description=Acyl -CoA dehydrogenase, middle domain
  Pfam module annotation: Pfam domain module=Acyl-CoA_dh_1::Acyl-CoA_dh_ 2::Acyl-CoA_dh_M; Domain location=111-257::123-246::5-57
KTVGCWALTEPDYGSDASSLRTAATKVPGGWHLDGQKRWIGNSTFADVLIILARNADTNQLNGFIVKKGAPGLKXTKIENKIGLRMVQNGDIILNKVFVPEEDRLTGINSFQDINKVLAMSRIMVAWQPIGISMGVFDICHRYLKERKQFGAPLAAFQLNQEKLVRMLGNIQAMVLVGWRLCKLYESGKMTSGHSSLGKAWTSRKAREVVSLGRELLGGNGILADFLVAKAFCDLEPIFSYEGTYDINSLVTGREITGVASFKPAMLAKSRL

SEQ ID NO: 109510 - protein, 80 aa, Setaria italica
  Transcript Sequence Number=SeqID_43536
QVVHLFLFLFLLRSTPLLTDSHSHDSTPRFTDEEGGRVFNLLGSWGSCPSLLYGELCLRRWMVCAKKVTAHETLDFLRNS

SEQ ID NO: 109511 - protein, 62 aa, Setaria italica
  misc_feature (60)..(60): Xaa can be any naturally occurring amino acid
  Transcript Sequence Number=SeqID_43537
SLAPRMGGIRGHELWSTFKNLGLVLLCNLVIIKAAIISCSTCDDGIGPYRLVDCCQPSGXTA

SEQ ID NO: 109512 - protein, 74 aa, Setaria italica
  Transcript Sequence Number=SeqID_43538
  Gene Ontology: Mol. function=hydrolase activity, hydrolyzing O -glycosyl compounds; Cellular component=cell wall; Biological process= carbohydrate metabolic process
  Homolog annotation: Hit_ID=B6TDC2; Match level="QueryCoverage=98%, HitCoverage=25%, E-value=1e-30, Identity=84%"; Hit description =Xyloglucan endotransglucosylase/hydrolase protein 23
  Pfam annotation: Domain name=XET_C; Domain location=13-70; Score =100.1; E_value=7.4e-27; Accession=PF06955.4; Description=Xyloglucan endo-transglycosylase (XET)
DACVAVAGGKTRCGATVGTEGSAGAAAGDWYNQELDLTLQQRMRWVQRKYMIYNYCTDPKRYAQGLPAECSMQQ

SEQ ID NO: 109513 - protein, 420 aa, Setaria italica
  Transcript Sequence Number=SeqID_43539
  Gene Ontology: Mol. function=pyridoxal phosphate binding; Biological process=amino acid metabolic process
  Homolog annotation: Hit_ID=B6UAU8; Match level="QueryCoverage=100%, HitCoverage=88%, E-value=0.0, Identity=83%"; Hit description=O -succinylhomoserine sulfhydrylase
  Pfam annotation: Domain name=Aminotran_1_2; Domain location=18-320; Score=-96.5; E_value=0.021; Accession=PF00155.13; Description =Aminotransferase class I and II
  Pfam annotation: Domain name=Aminotran_5; Domain location=43-339; Score=-188.4; E_value=0.027; Accession=PF00266.11; Description =Aminotransferase class-V
  Pfam annotation: Domain name=Beta_elim_lyase; Domain location=47-290; Score=-122.0; E_value=0.032; Accession=PF01212.13; Description=Beta -eliminating lyase
  Pfam annotation: Domain name=Cys_Met_Meta_PP; Domain location=1-381; Score=254.0; E_value=3.6e-73; Accession=PF01053.12; Description =CysMet metabolism PLP-dependent enzyme
  Pfam module annotation: Pfam domain module=Aminotran_1_2::Aminotran _5::Beta_elim_lyase::Cys_Met_Meta_PP; Domain location=18-320::43 -339::47-290::1-381
EFGEHGGVNMSIEASATFTVMEPDTMRRLFAGELGPDRGDMYIYSRHFNPTVLALGRQMAALEATEAAYCTASGMSAISSVLMQLVGVGGHVVASRCLYGGTHALLSTFLPRTSGVRATFVDADDEAAVRAAVVPGETRVVYVETMSNPTLAVADIPMLARVAHEAGAKLVVDNTFTPVVVTPARLGADVVVHSVSKFISGGADIIAGAICGPASLVNAMMDLQEGALMLLGPTMNAKVAFELSERLPHLPLRMQEHSRRALAFASRMQRLGLRVLYPGLPDHPHHARLSAMANPGYGSGGMLCVDMGTEDRANRLMHHLQNTTQFGLMAVSLGYYETLMSCSGSSTSSEMPPEDRAKAGISPGLVRMSVGYNGTLEQRWAQFERALALMQPVPAPLHHKPGAAADRDVLDAGTTIHRKH

SEQ ID NO: 109514 - protein, 161 aa, Setaria italica
  misc_feature (17)..(17): Xaa can be any naturally occurring amino acid
  misc_feature (24)..(24): Xaa can be any naturally occurring amino acid
  misc_feature (132)..(132): Xaa can be any naturally occurring amino acid
  Transcript Sequence Number=SeqID_43540
PSQHIYSSLAPLSPAQXPPLPTLXRRDPAFDAEQIWSQIELLSRPLLPHLRRQLRRLEQQPQPQPQAALPVETPADAEEEQSEEDGQGSELDEFKEELEETDEEEELSDDEEEEEEEELDGRGGKGLEDRFXKIGEMAEFLDKGDGRGVVVGGANRGEKKK

SEQ ID NO: 109515 - protein, 130 aa, Setaria italica
  misc_feature (64)..(64): Xaa can be any naturally occurring amino acid
  Transcript Sequence Number=SeqID_43541
  Homolog annotation: Hit_ID=B6SI40; Match level="QueryCoverage=84%, HitCoverage=27%, E-value=4e-30, Identity=62%"; Hit description=mTERF family protein
KSTLGCSESEVAIAVSKMPCILGYSEENLIRKIQFLIKEVGMEPQHIVERPALLGLSLEKRLVXPRHCVMKMLQAKGLTSNLSFSSLAKLIGKHFRLKFIDCHEDSVPGFAGYYAAACAGDVLHEVQLSS

SEQ ID NO: 109516 - protein, 99 aa, Setaria italica
  Transcript Sequence Number=SeqID_43542
  Gene Ontology: Mol. function=protein serine/threonine kinase activity; Biological process=protein amino acid phosphorylation
  Homolog annotation: Hit_ID=Q7G7X2; Match level="QueryCoverage=33%, HitCoverage=10%, E-value=1e-12, Identity=96%"; Hit description =Casein kinase I
INRVEYMHSKGFIHRDIKPDNFLMGLGRKANQVLPYNPSHPHPHPSAHTMLVLSSCFQRELNAVMSFLRLSPRFLFISELTMRCILLILQVYIIDYWAC

SEQ ID NO: 109517 - protein, 119 aa, Setaria italica
  Transcript Sequence Number=SeqID_43543
  Gene Ontology: Mol. function=protein disulfide oxidoreductase activity; Biological process=cell redox homeostasis
  Homolog annotation: Hit_ID=Q10L92; Match level="QueryCoverage=100%, HitCoverage=58%, E-value=2e-48, Identity=80%"; Hit description =Glutaredoxin family protein, expressed
VAVDERDVSMDAAFRRDLQALLAVRGRAFSLPQLLIGGRLVGGADEVRQLHETGQLRRLLEGAAGQDPAYVCDACGGVRFVPCIGCGGSRKVFVEEEDRVVRCGECNENGLVRCANCCS

SEQ ID NO: 109518 - protein, 67 aa, Setaria italica
  Transcript Sequence Number=SeqID_43544
SCRDAESVNDGFKFVLQKLIEITKFWVWMQHRVCCRQSNLRPELCSSFFFFPFLFMCLSRKMDVTLY

SEQ ID NO: 109519 - protein, 98 aa, Setaria italica
  Transcript Sequence Number=SeqID_43545
  Gene Ontology: Mol. function=nucleotidyltransferase activity; Cellular component=alpha DNA polymerase:primase complex; Biological process=DNA replication, synthesis of RNA primer
  Homolog annotation: Hit_ID=B6T4S3; Match level="QueryCoverage=79%, HitCoverage=17%, E-value=2e-32, Identity=85%"; Hit description=DNA primase
MSNDPKIHLCSPVRLSNEQRAAVADYFRVYKGGENALKKVSLAGPVLHPFLAQSYTDVLESFFEDKLLLSQQLFAPEERYQKILDLIPDESKKRHHKK

SEQ ID NO: 109520 - protein, 245 aa, Setaria italica
  misc_feature (19)..(19): Xaa can be any naturally occurring amino acid
  Transcript Sequence Number=SeqID_43546
  Gene Ontology: Mol. function=DNA-directed RNA polymerase activity; Cellular component=alpha DNA polymerase:primase complex; Biological process=DNA replication, synthesis of RNA primer
  Homolog annotation: Hit_ID=B6T4S3; Match level="QueryCoverage=96%, HitCoverage=52%, E-value=1e-120, Identity=86%"; Hit description=DNA primase
  Pfam annotation: Domain name=DNA_primase_S; Domain location=1-186; Score=154.3; E_value=3.6e-43; Accession=PF01896.11; Description=DNA primase small subunit
WVYSGRRGVHCWVCDSRAXKLINEQRAAVADYFRVYKGGENALKKVSLAGPVLHPFLAQSYTDVLESFFEDKLLLSQQLFASEDRCQKILDLIPDENVASELHDKWQRNRSTSISKEDVNAARWKQLKTTLQSGKHKGLRRCVEEIVFLYTYPRLDMEVSKHMNHLLKAPFCIHPKTGRVCVPIDPNNCEDFDPTAVPTLSQLLGELNAASFQTDSENNWERTSLEKSIRFFRTSFSCLTVLYKN

SEQ ID NO: 109521 - protein, 86 aa, Setaria italica
  Transcript Sequence Number=SeqID_43547
RGGKRKGRRTRPSGENKARCWWVERGCGAVRALAARCSFLELCQGCGTEEGEKRRGNGGKEGATPAKKPPLALWFWASLRIWALLS

SEQ ID NO: 109522 - protein, 297 aa, Setaria italica
  Transcript Sequence Number=SeqID_43548
  Gene Ontology: Mol. function=DNA-directed RNA polymerase activity; Cellular component=alpha DNA polymerase:primase complex; Biological process=DNA replication, synthesis of RNA primer
  Homolog annotation: Hit_ID=B6T4S3; Match level="QueryCoverage=96%, HitCoverage=62%, E-value=1e-153, Identity=89%"; Hit description=DNA primase
  Pfam annotation: Domain name=DNA_primase_S; Domain location=140-290; Score=145.5; E_value=1.6e-40; Accession=PF01896.11; Description=DNA primase small subunit
MGRDDEQVDPMEIDCQQKLQVEASTAVPEGFNADYLRVYYGKLFPYGDFFKWLCYGNDGKHPGCDQSYVGRREFSFTLENDIYLRFQSFDSASELESSIKEKCPFKIDIGPVYSVDPAKRHAYAQSGNNVFVPVERELIFDIDISDYDDVRYCCSGADVCLDCWPLMTIAIKILDTSLRDDFGFNHILWVYSGRRGVHCWVCDSRARKLSNEQRAAVADYFRVYKGGENALKKVSLAGPVLHPFLAQSYTDVLESFFEDKLLLSQQLFASEDRCQKILDLIPDESIPLYCKICLFFS

SEQ ID NO: 109523 - protein, 173 aa, Setaria italica
  Transcript Sequence Number=SeqID_43549
  Gene Ontology: Mol. function=DNA-directed RNA polymerase activity; Cellular component=alpha DNA polymerase:primase complex; Biological process=DNA replication, synthesis of RNA primer
  Homolog annotation: Hit_ID=B6T4S3; Match level="QueryCoverage=76%, HitCoverage=29%, E-value=5e-64, Identity=88%"; Hit description=DNA primase
  Pfam annotation: Domain name=DNA_primase_S; Domain location=1-94; Score=16.1; E_value=0.00011; Accession=PF01896.11; Description=DNA primase small subunit
MIVVSFLFHQIVYIPISQLQLHLLIHAIMFNNITNCYMLHSGKHKGLRRCVEEIVFLYTYPRLDMEVSKHMNHLLKAPFCIHPKTGRVCVPIDPNNCEDFDPTAVPTLSQLLGELNAASFQTDSENNWERTSLEKSIRFFRTSFLQPLLKACKEELESTYNAKLQQSKNSLNW

SEQ ID NO: 109524 - protein, 49 aa, Setaria italica
  Transcript Sequence Number=SeqID_43550
WIMNQLMIHKENKTKKRTDTHDTLKEELMITLSNHCISHCWIYIHVSAQ

SEQ ID NO: 109525 - protein, 92 aa, Setaria italica
  Transcript Sequence Number=SeqID_43551
VRLGNRPMSLLVKRLIFCSVVEAMREAGRQQTGGLRANEEFQTGWIILVLGLKYTYSGLTMSKRTHASCKLLEFAKKILGVSLCCVRHCIYY

SEQ ID NO: 109526 - protein, 87 aa, Setaria italica
  Transcript Sequence Number=SeqID_43552
  Homolog annotation: Hit_ID=B6TC80; Match level="QueryCoverage=40%, HitCoverage=6%, E-value=1e-09, Identity=82%"; Hit description=Serine carboxypeptidase 1
MLHVIKELMASLSTYLNLRSILFFGTINLKYVSGFKILAIYGLKSLPVKPVNQVSHILFVDSPVGAGFSFSREPKGYDVGDIFYSIL

SEQ ID NO: 109527 - protein, 121 aa, Setaria italica
  misc_feature (73)..(73): Xaa can be any naturally occurring amino acid
  Transcript Sequence Number=SeqID_43553
  Gene Ontology: Mol. function=serine-type carboxypeptidase activity; Cellular component=extracellular region; Biological process =proteolysis
  Homolog annotation: Hit_ID=B6TDE4; Match level="QueryCoverage=83%, HitCoverage=21%, E-value=6e-41, Identity=75%"; Hit description =Serine carboxypeptidase 1
TIHLLVLHFIALLTVTTYPTFWANDRRTRDALGIKEGTVDEWVRCRDVGELPYAIDIKSAIKYHRNVTSTRLXVPCGDHDPVVPHLGTQAWVRSLNFSVVDDWRAWHLDGQAAGFTISYSN

SEQ ID NO: 109528 - protein, 101 aa, Setaria italica
  misc_feature (60)..(60): Xaa can be any naturally occurring amino acid
  Transcript Sequence Number=SeqID_43554
  Gene Ontology: Mol. function=serine-type carboxypeptidase activity; Cellular component=extracellular region; Biological process =proteolysis
  Homolog annotation: Hit_ID=B6TC80; Match level="QueryCoverage=75%, HitCoverage=15%, E-value=2e-27, Identity=76%"; Hit description =Serine carboxypeptidase 1
VQSIQTQINCIPLNVCYVLFICSIDIQWFNDHPEFLANPFYIGGDSYAGKLVPFLAQIIXEGIKAGRTLPNLKGYLVGNPGTGEIIDFSSRVPYAHGVDLI

SEQ ID NO: 109529 - protein, 36 aa, Setaria italica
  Transcript Sequence Number=SeqID_43555
  Homolog annotation: Hit_ID=B6TC80; Match level="QueryCoverage=80%, HitCoverage=5%, E-value=2e-09, Identity=86%"; Hit description=Serine carboxypeptidase 1
MEMCGLGLQGGGHTAPEYEPEKCFAMFSRWILNRPL

SEQ ID NO: 109530 - protein, 119 aa, Setaria italica
  Transcript Sequence Number=SeqID_43556
  Gene Ontology: Mol. function=serine-type carboxypeptidase activity; Cellular component=extracellular region; Biological process =proteolysis
  Homolog annotation: Hit_ID=B6TC80; Match level="QueryCoverage=73%, HitCoverage=17%, E-value=6e-36, Identity=79%"; Hit description =Serine carboxypeptidase 1
NYLKYNVFISFQILSALATKLARSPCFACHSICMQVSHILFVDSPVGAGFSFSREPKGYDSGDISSSLQLHEFLLKWFNDHPEYLANPFYVGGDSYAGKIVPFLAQIISEGIEAGMKTV

SEQ ID NO: 109531 - protein, 92 aa, Setaria italica
  Transcript Sequence Number=SeqID_43557
  Gene Ontology: Mol. function=serine-type carboxypeptidase activity; Cellular component=extracellular region; Biological process =proteolysis
  Homolog annotation: Hit_ID=B6TC80; Match level="QueryCoverage=71%, HitCoverage=13%, E-value=1e-24, Identity=82%"; Hit description =Serine carboxypeptidase 1
NDAELFYYFVGSESGGAAAPFLLWLTGGDRCSVFSGLAYEIGPIRFVLEPYNGTLPRLRYNQNSWTKVLCSLLSTTLCLLLSIISSTRTRTG

SEQ ID NO: 109532 - protein, 487 aa, Setaria italica
  misc_feature (43)..(43): Xaa can be any naturally occurring amino acid
  misc_feature (425)..(425): Xaa can be any naturally occurring amino acid
  Transcript Sequence Number=SeqID_43558
  Gene Ontology: Mol. function=serine-type carboxypeptidase activity; Cellular component=extracellular region; Biological process =proteolysis
  Homolog annotation: Hit_ID=B6TC80; Match level="QueryCoverage=92%, HitCoverage=90%, E-value=0.0, Identity=75%"; Hit description=Serine carboxypeptidase 1
  Pfam annotation: Domain name=Peptidase_S10; Domain location=46-484; Score=525.4; E_value=7.3e-155; Accession=PF00450.14; Description =Serine carboxypeptidase
MAVPRKMAWPPRLPCSRCFLLLCFLLIIAFAASGSGAGRVVTXSLPGFDGRLPFHLETGYVEVGEANDNGANLFYYFVQAESEPAAAPFVLWLTGGRRCSVLSGLAYEIGPVRFVLEPYDGTLPRLHYNTNSWTKVSHILFVDSPVGAGFSFSREPKGYDSGDISSSLQLHEFLLKWFNDHPEYLANPFYVGGDSYAGKIVPFLAQIISEGIEAGMKTVPNLKGYLVGNPVTGDSVDSSSKVPFAHGFGLVSDQLYETILEHCQGEEHTDPANVLCTQAMDTVHNLISEVGKGHVLLDRCVSASPVTNVNISSDDRKILREEIGVGQLNHPPARPPFHCFTYRYYLSYFWANDRRTRDALGIKEGTVDEWVRCRDVGELPYAIDIKSAIKYHRNVTSRGYRALVYSGDHDPVVPHLGTQAWVRSXLNFSVVDDWRAWHLDGQAAGFTISYSNSMTFATIKGGGHTAPEYEPEKCFAMFSRWILNRPL

SEQ ID NO: 109533 - protein, 126 aa, Setaria italica
  Transcript Sequence Number=SeqID_43559
  Subcellular localization annotation: CTP_CleavageSite=47; ConfidenceScore=5.42e-01
ISMATALTAKEMALASAHRQTNRTAGGFSFLSMDAGVGGESFTSRTTAMANRGGCFLSSMDGTGSGDDGSFSMDTSNGAAGLLTLSAMGDSDPKRRRPGRRRLAPLPGSGSTGGVQARGSKSSLVS

SEQ ID NO: 109534 - protein, 101 aa, Setaria italica
  Transcript Sequence Number=SeqID_43560
IATPRGPRGFGFVTFASEQAMRDAIEGMNGKGGHGDRGGEGARTGGAVRAAGPGRGGGEGRGEGGRVGGEGGGGRRRRRQGRVKGMPPCPVPLLNSMLLVL

SEQ ID NO: 109535 - protein, 323 aa, Setaria italica
  Transcript Sequence Number=SeqID_43561
  Gene Ontology: Mol. function=catalytic activity; Cellular component =chloroplast; Biological process=metabolic process
  Homolog annotation: Hit_ID=B1PAT2; Match level="QueryCoverage=63%, HitCoverage=38%, E-value=8e-69, Identity=63%"; Hit description=Male sterility-related protein
  Pfam annotation: Domain name=NAD_binding_4; Domain location=130-319; Score=123.3; E_value=7.8e-34; Accession=PF07993.4; Description=Male sterility protein
  Subcellular localization annotation: CTP_CleavageSite=21; ConfidenceScore=5.28e-01
AGRSSALSTGLAPSLHLHPFVGARPWGSSCVNLSRAVVLHGLAAGGARRRGHRYGGGGALLLPPSLLSKRAAVACCSSPGTAGSRPSSSSFPVRGLGGDSSEAGSTATSPAGHAGGIGIAEFLGAKNFLITGGTGFLAKVLIEKILRTNPDVGKIYVLIKAKDSEAALRRLQNEVVDTELFKCLQEIHGNDYSSFIARKLVPVVGDVREANIGIAPELADEIADQVDIIVNSAANTTFDERYDVAMDINTVGPFRIMSFAQRFRRLKLFLQVSTAYVNGQRQGLVLEKPFRMGDTIAKELGSSEHSSTVLDIEAEIKLAFDYS

SEQ ID NO: 109536 - protein, 308 aa, Setaria italica
  misc_feature (72)..(72): Xaa can be any naturally occurring amino acid
  Transcript Sequence Number=SeqID_43562
  Gene Ontology: Mol. function=catalytic activity; Cellular component =chloroplast; Biological process=metabolic process
  Homolog annotation: Hit_ID=B1PAT2; Match level="QueryCoverage=84%, HitCoverage=48%, E-value=8e-95, Identity=65%"; Hit description=Male sterility-related protein
  Pfam annotation: Domain name=NAD_binding_4; Domain location=9-285; Score=230.5; E_value=4.3e-66; Accession=PF07993.4; Description=Male sterility protein
STSRKSSLFVGSICLNCRLVGTTVVLFLNCPCLGRFHGNDYSSFIARKLVPVVGDVREANIGIAPELADEIXPNQVDIIVNSAANTTFDERYDVAMDINTVGPFRIMSFAQRFRRLKLFLQVSTAYVNGQRQGLVLEKPFRMGDTIAKELGSSEHSSTVLDIEAEIKLAFDYSRRRSVDSASFTQEMKDLGLERANLHGWQDTYVFTKAMGEMVINSMRGEVPVVTIRPSVIESTWRDPFPGWMEGNRMMDPVVLYYGKGQLSGFLADPEGVLDVVPADMVVNATLASMAKHGGTSSSSPSGGRYGVP

SEQ ID NO: 109537 - protein, 81 aa, Setaria italica
  Transcript Sequence Number=SeqID_43563
  Homolog annotation: Hit_ID=B6SRE8; Match level="QueryCoverage=100%, HitCoverage=38%, E-value=8e-22, Identity=61%"; Hit description=VAMP protein SEC22
MSKDCGNHGDDEFKQTCRRLLIILLGFALLAGVIALIVFLVLHPTHPRFILQDATLRQLDLSNGSAPLLSTAAQVTIASRN

SEQ ID NO: 109538 - protein, 152 aa, Setaria italica
  misc_feature (28)..(28): Xaa can be any naturally occurring amino acid
  misc_feature (131)..(131): Xaa can be any naturally occurring amino acid
  Transcript Sequence Number=SeqID_43564
  Homolog annotation: Hit_ID=Q53NC9; Match level="QueryCoverage=98%, HitCoverage=69%, E-value=6e-43, Identity=64%"; Hit description =Harpin-induced protein 1 containing protein, expressed
  Pfam annotation: Domain name=Hin1; Domain location=41-152; Score =70.0; E_value=9.1e-18; Accession=PF07320.5; Description=Harpin -induced protein 1 (Hin1)
MVRGKDCGNHGDDDLRRSCRRLLAILLXLAFLVAIIALIVYLVLRPTHPRFFLQDASLRQLDLSNGSSNVLSTTLQVTVASRNPNDRVGVYYDRLDVYASYKYQQITLASRLPTVYQGHGDVDVLVRPVVXGSGFPNVPFAPFLADAMRKDV

SEQ ID NO: 109539 - protein, 150 aa, Setaria italica
  Transcript Sequence Number=SeqID_43565
  Homolog annotation: Hit_ID=Q53NC9; Match level="QueryCoverage=95%, HitCoverage=68%, E-value=1e-61, Identity=77%"; Hit description =Harpin-induced protein 1 containing protein, expressed
  Pfam annotation: Domain name=Hin1; Domain location=5-120; Score =107.1; E_value=5.9e-29; Accession=PF07320.5; Description=Harpin -induced protein 1 (Hin1)
RGRGRPRGRLSTAAQVTIASRNPNARVGVHYDRLDVYASYKYQQVTLASRLPTVYQGHGDVDVWSPVLAGPNVPFAPFLADAMRKDVANGYLIMEVRIDGRVRWKVGSWTSGHYHIFVTCPAYFISSGTYSVVGAHGLRFQTPTYCRVEV

SEQ ID NO: 109540 - protein, 209 aa, Setaria italica
  Transcript Sequence Number=SeqID_43566
  Homolog annotation: Hit_ID=Q53NC9; Match level="QueryCoverage=100%, HitCoverage=100%, E-value=5e-82, Identity=72%"; Hit description =Harpin-induced protein 1 containing protein, expressed
  Pfam annotation: Domain name=Hin1; Domain location=39-179; Score =179.6; E_value=8.8e-51; Accession=PF07320.5; Description=Harpin -induced protein 1 (Hin1)
MSKDCGNHGDDDLRRSCRRLLAILLFLAFLVAIIALIVYLVLRPTHPRFFLQDASLRQLDLSNGSSNVLSTTLQVTVASRNPNDRVGVYYDRLDVYASYKYQQITVAASLPPVYQGHGDVDVWSPVLAGPSVPFAPYLADALSQDCQAGYLILQVKIDGRVRWKVGSWISGHYHLFVTCPAFLVTNGGNGAPGASGFKFQTTTTCHVEV

SEQ ID NO: 109541 - protein, 77 aa, Setaria italica
  Transcript Sequence Number=SeqID_43567
HFVLLPLLVALLNYYVLNKKPIRLLAGTIEWLSEKKNYLMDSELYSLSIFTFYKFYLWTPTRPYDSNHIFSLNMGNI

SEQ ID NO: 109542 - protein, 273 aa, Setaria italica
  Transcript Sequence Number=SeqID_43568
  Gene Ontology: Mol. function=protein tyrosine/serine/threonine phosphatase activity; Cellular component=intracellular; Biological process=protein amino acid dephosphorylation
  Homolog annotation: Hit_ID=B9RA78; Match level="QueryCoverage=93%, HitCoverage=26%, E-value=1e-112, Identity=73%"; Hit description =Phosphoprotein phosphatase, putative
  Pfam annotation: Domain name=DSPc; Domain location=92-234; Score =87.3; E_value=5.5e-23; Accession=PF00782.12; Description=Dual specificity phosphatase, catalytic domain
IRQYYVGLRLTVKLRDFNKYAKVDSELSKEIEQWNDMLRTEVVKLCQDNSFNTGFFEGTDNSTAVDAYELRTRLEHILERISLISDAASTERPSQVTDSLYIGGALAARSTHTLKHLGITHILCLCANEIGQSESQKPGLFDYRNFSIKDDDNADIGDVFQDASDFIDYVDHLSGKVLVHCFEGKSRSATVVLAYLMLRKNSTLLEAWNMLKKVHRRAHPNDGFAKVLLDLDKKLHGKVSMEWQHKRPAMKVCPICGKNAGLSSSSLKLHLQK

SEQ ID NO: 109543 - protein, 147 aa, Setaria italica
  Transcript Sequence Number=SeqID_43569
  Homolog annotation: Hit_ID=Q9LQV3; Match level="QueryCoverage=93%, HitCoverage=21%, E-value=4e-41, Identity=56%"; Hit description =F10B6.18
LYLRYKPPKEELRYFLDFQHHRLWAPVNSDLPLGPCSNRQGASPALHFRLVGSKLYVSSSEVIVPRLPVTGMRLHLEGKKNNRLGIHLQHLSNTPTFIKERSAKQPIWRGSEMISDERYYEPVQWRMFAHVCTVPVKYDPRWAAQPA

SEQ ID NO: 109544 - protein, 84 aa, Setaria italica
  Transcript Sequence Number=SeqID_43570
  Gene Ontology: Mol. function=phospholipase D activity; Cellular component=membrane; Biological process=phosphatidylcholine metabolic process
MASSAGGESPAKPKTVLLHGDLDLWIKEARLLPNMDLFSEQVRRCFAACRPPTSCGPKHPPAAAVPRGGSGGRHHHHRKIITSD

SEQ ID NO: 109545 - protein, 108 aa, Setaria italica
  Transcript Sequence Number=SeqID_43571
  Gene Ontology: Mol. function=nucleotide binding; Biological process =defense response
  Homolog annotation: Hit_ID=Q84KC6; Match level="QueryCoverage=79%, HitCoverage=6%, E-value=9e-13, Identity=41%"; Hit description=NBS -LRR disease resistance protein homologue
MSGGPDMIASAVIQHVGSMLGDKAWERIELLWNFENDAKEMKDKMFNLQVALNNAEKRSQESEDALARLWLKKYKSVAYDMEDTLDELGANAMIWRNSTCTAKFSSQQ

SEQ ID NO: 109546 - protein, 220 aa, Setaria italica
  misc_feature (186)..(186): Xaa can be any naturally occurring amino acid
  Transcript Sequence Number=SeqID_43572
  Gene Ontology: Mol. function=serine-type carboxypeptidase activity; Cellular component=extracellular region; Biological process =proteolysis
  Homolog annotation: Hit_ID=Q6K671; Match level="QueryCoverage=100%, HitCoverage=59%, E-value=1e-111, Identity=85%"; Hit description =Putative carboxypeptidase D
  Pfam annotation: Domain name=Peptidase_S10; Domain location=2-214; Score=-31.4; E_value=5.3e-13; Accession=PF00450.14; Description =Serine carboxypeptidase
TYKAILKSCNFSSTNISRFCNRAMNYAMNQEFGDIDQYSIYTPSCAAARANATVLRFKNTLIRRRSFGYDPCTETYAEKYYNRLDVQKAMHANTTRIPYRWTACSDVLIKTWQDSEFSMLPTYKMLMKTGVRIWVFSGDTDSVVPVTATRFAISHLGLKIKIRWYPWYSAGQVGGWSEVYEGLTFXASVRGAGHEVPLFQPRRAFRMFQSFLAGEPLPKS

SEQ ID NO: 109547 - protein, 215 aa, Setaria italica
  Transcript Sequence Number=SeqID_43573
  Gene Ontology: Mol. function=protein serine/threonine kinase activity; Biological process=protein amino acid phosphorylation
  Homolog annotation: Hit_ID=Q84QD9; Match level="QueryCoverage=66%, HitCoverage=32%, E-value=4e-61, Identity=71%"; Hit description =Avr9/Cf-9 induced kinase 1
  Pfam annotation: Domain name=Pkinase_Tyr; Domain location=84-215; Score=-83.4; E_value=3.5e-08; Accession=PF07714.9; Description =Protein tyrosine kinase
  Subcellular localization annotation: CTP_CleavageSite=38; ConfidenceScore=5.71e-01
MGKPKSSSTSWSSLFGLGCFSSSHAARSGDSGSGGSRNAAKVASSSRPPEPLPSPEDLDLSLSLAGSDVLAFTVEELRTATRDFSMTNFVGEGGFGPVYKGRVDERVRPGLRPQAVAVKLLDLEGSQGHKEWLAEVIFLGQMRHPHLVKLIGYCYQDQHRLLVYEFMARGSLEKHLFKKYSASLPWSARLKISIGAAKGLAFLHEAAKPVIYRDF

SEQ ID NO: 109548 - protein, 144 aa, Setaria italica
  Transcript Sequence Number=SeqID_43574
  Gene Ontology: Mol. function=protein serine/threonine kinase activity; Biological process=protein amino acid phosphorylation
  Homolog annotation: Hit_ID=Q84QD9; Match level="QueryCoverage=84%, HitCoverage=27%, E-value=5e-55, Identity=80%"; Hit description =Avr9/Cf-9 induced kinase 1
  Pfam annotation: Domain name=Pkinase; Domain location=2-144; Score= -93.4; E_value=0.0063; Accession=PF00069.17; Description=Protein kinase domain
  Pfam annotation: Domain name=Pkinase_Tyr; Domain location=12-141; Score=-101.5; E_value=5.6e-07; Accession=PF07714.9; Description =Protein tyrosine kinase
  Pfam module annotation: Pfam domain module=Pkinase::Pkinase_Tyr; Domain location=2-144::12-141
MYTLTCDLYPFVTNCLFVSAGQAEVIFLGQMRHPHLVKLIGYCYQDQHRLLVYEFMARGSLEKHLFKKYSASLPWSARLKISIGAAKGLAFLHEAAKPVIYRDFKTSNILLDSDYTAKLSDFGLAKDGPGEDETHVSTRVMGTQ

SEQ ID NO: 109549 - protein, 53 aa, Setaria italica
  Transcript Sequence Number=SeqID_43575
VNIADPTYHTMFRLSIPFRHFQLLLVQCNKRFCSELDLIGYLHITHLHPVIRV

SEQ ID NO: 109550 - protein, 175 aa, Setaria italica
  Transcript Sequence Number=SeqID_43576
  Gene Ontology: Mol. function=hydrolase activity, hydrolyzing O -glycosyl compounds; Cellular component=extracellular region; Biological process=carbohydrate metabolic process
  Homolog annotation: Hit_ID=Q0JKM9-2; Match level="QueryCoverage=82%, HitCoverage=36%, E-value=2e-65, Identity=82%"; Hit description =Isoform 2 of Mannan endo-1,4-beta-mannosidase 1
MRLHGALALLLLLCIHVGHQGADARGDGFVRVQGTRFVLNGSPFFANGFNAYWLMSLGADPAQRGKVTSALSQAAGAGLTVARTWAFSDGGSNALQYSPGRYNENTFQGLDFVLSEARKHGIKMILSLVNSYDSFGGRKQYVQWAREQGQSIGSDDEFFTNPVVKGFYKNHIKDR

SEQ ID NO: 109551 - protein, 49 aa, Setaria italica
  Transcript Sequence Number=SeqID_43577
RWSARRRTTRVSWRPTCRTFFSRCSNLQDYLPFWFGHKRSFTQVNFLDR

SEQ ID NO: 109552 - protein, 68 aa, Setaria italica
  Transcript Sequence Number=SeqID_43578
  Gene Ontology: Mol. function=methyltransferase activity; Cellular component=cytoplasm; Biological process=protein amino acid methylation
  Homolog annotation: Hit_ID=Q7X9J8; Match level="QueryCoverage=97%, HitCoverage=39%, E-value=4e-24, Identity=77%"; Hit description=Early nodule-specific-like protein ENOD8 gene (Fragment)
SQAVYSLHKTSTRERIKKAALRDFNAASAEVLCELRYDLPQSYKFHKKREVDIAVDLWRFVPNARRSS

SEQ ID NO: 109553 - protein, 190 aa, Setaria italica
  misc_feature (136)..(136): Xaa can be any naturally occurring amino acid
  Transcript Sequence Number=SeqID_43579
  Gene Ontology: Mol. function=ubiquitin-protein ligase activity; Cellular component=nucleus; Biological process=ubiquitin-dependent protein catabolic process
  Homolog annotation: Hit_ID=Q94DR6; Match level="QueryCoverage=44%, HitCoverage=30%, E-value=1e-13, Identity=44%"; Hit description =P0460E08.34 protein
  Pfam annotation: Domain name=Sina; Domain location=1-167; Score= -60.6; E_value=0.011; Accession=PF03145.8; Description=Seven in absentia protein family
VESICVPCPNAAHGCGARPAYYDQHVHCQTCPHAPRRCPGKDCSFLGSTEALLDHFTGAHGWPSTTEIRAFETCSIPLYDGFNFILVEDDEDDDDHFTTTSSSSRYLLLLNVMRQPLGHSITVHFIGQELRSEGLXSSRLSYSRVQYHPDRHKFLGSHSLQSEINVECMDLADRLPDPADCFQFIVPDSV

SEQ ID NO: 109554 - protein, 138 aa, Setaria italica
  misc_feature (13)..(13): Xaa can be any naturally occurring amino acid
  Transcript Sequence Number=SeqID_43580
EVGDQDTSEIEGXRGTTRDYNNRSTHSLDTEETEDTTAEDTRCTDKASSRLLEGSTGRHQHQTICECELSNKTIQSEAMNVGNLTGRPLKNQVIATQLDYEGEQHVRLASDADGNKSAETSNYKLATENNSQLQAVRR

SEQ ID NO: 109555 - protein, 487 aa, Setaria italica
  misc_feature (15)..(15): Xaa can be any naturally occurring amino acid
  misc_feature (134)..(134): Xaa can be any naturally occurring amino acid
  misc_feature (152)..(152): Xaa can be any naturally occurring amino acid
  Transcript Sequence Number=SeqID_43581
  Gene Ontology: Mol. function=single-stranded DNA binding; Cellular component=nucleus; Biological process=response to DNA damage stimulus
  Homolog annotation: Hit_ID=Q64MA3; Match level="QueryCoverage=100%, HitCoverage=77%, E-value=0.0, Identity=68%"; Hit description=Flap endonuclease GEN-like 1
  Pfam annotation: Domain name=XPG_I; Domain location=1-82; Score=57.8; E_value=4.1e-14; Accession=PF00867.10; Description=XPG I-region
AKGEAEALCAQLNNXGHVDACITADSDAFLFGAKTVIKVLKSNCKEPFECYNIADIEAGLGLKRKQMVAMALLIGSDHDLHGVPGFGLETALRFVQLFDEDEILDKLHEIGRGVYPFLEGLGNQHIDDLPSSSXSIVKLPHCSHCGHPGSKXNHSKVGCNYCLVDALENCMEKPAGFKCECPGCEKARDLKEQRKHENWQIKVCKRIAAETNFPNEEIIKLYLSDNNLDKEKGVPLLSWNKPDVEALVDFLTYNQNWEPSYIRQRMLPMLSTIYLREVASSPSTPLLLYDQYEFDSIQRIKIRYGHPYYLVKWKRGTWGMKSNICSKKPVTEGETSSEVVVLDEDDEEDTVDCESSELLDEPDVPQVLTDDGCCFLLTEEDIQLVSSAFPKETARFQEEQRLKEAKSRSRKSESSTSSTLETPKGPRPSGVQLSITEFYRSKKGQTIESGKKPAGEGQAAKGGSRKASDRDLNKSLPKSVRRRLLFD

SEQ ID NO: 109556 - protein, 70 aa, Setaria italica
  Transcript Sequence Number=SeqID_43582
MSDWGPVVVAVVLFVLLSPGLLLQLPAKGGRFVEFGNFQTSGASIFVHAIIFFALAAVFLIAIGVHITTD

SEQ ID NO: 109557 - protein, 66 aa, Setaria italica
  Transcript Sequence Number=SeqID_43583
FDKPNPLNSVQRMNFYDNQEKYFLPMTVIEQKFTILSSAPSIFILFSPVDIVVRFLNWQVHYGVLV

SEQ ID NO: 109558 - protein, 190 aa, Setaria italica
  misc_feature (15)..(15): Xaa can be any naturally occurring amino acid
  misc_feature (156)..(156): Xaa can be any naturally occurring amino acid
  Transcript Sequence Number=SeqID_43584
  Gene Ontology: Mol. function=peptidase activity
  Homolog annotation: Hit_ID=B6TU32; Match level="QueryCoverage=100%, HitCoverage=62%, E-value=3e-80, Identity=76%"; Hit description=OTU -like cysteine protease family protein
  Pfam annotation: Domain name=OTU; Domain location=56-182; Score =117.7; E_value=3.9e-32; Accession=PF02338.11; Description=OTU-like cysteine protease
RKIGGIASGQGFGSXGMASAEGPVDNEVDSTQPAESSANLSHGKKVYTDYSVTGIPGDGRCLFRSVAHGACIRSGKPIPSEDLQRKLADELRTMVADEFIKRRAETEWFVEGDFDTYVSQIRKPHVWGGEPELFMASHVLQMPITVYMHDKEAGGXIAIAEYGQEYGTEAPIQVLYHGCGHYEALQIPGK

SEQ ID NO: 109559 - protein, 103 aa, Setaria italica
  Transcript Sequence Number=SeqID_43585
  Gene Ontology: Mol. function=carbohydrate binding; Biological process= carbohydrate metabolic process
  Homolog annotation: Hit_ID=Q7XV01; Match level="QueryCoverage=64%, HitCoverage=16%, E-value=3e-20, Identity=72%"; Hit description =OSJNBa0036B21.18 protein
MARGALPLLRLPVLLALCLAVAACFCGGGNAAAAERKTVGVHELKRGDDFSIKVTNWGATLMSVILPDSKGNLDDVVLGYDTVAEYVNGTAYFGGLIGSVGPN

SEQ ID NO: 109560 - protein, 40 aa, Setaria italica
  Transcript Sequence Number=SeqID_43586
IVYLFVKFSRVSFSILWPIFHNQRLNSIQIRHYRAKGPLA

SEQ ID NO: 109561 - protein, 203 aa, Setaria italica
  Transcript Sequence Number=SeqID_43587
VTKPTTQWRARQPDHFFDPSSAIVVGEVVYFKVDIVFDVLICGDVYPGIPLDCILSFDLEREEWRGILNGPISEIFETDKYAGDLDGYRGLWTQVTLADLRGSLGLVHYRKHRHMMDLWVRKDIDGGLWVKEYIIRIEPIFPTTESCVKSLFMLDDGRLVIHFPNPGLLFIYDPRTNTSAQVEMRHLDAVAMYTGNLLSFTSW

SEQ ID NO: 109562 - protein, 55 aa, Setaria italica
  Transcript Sequence Number=SeqID_43588
LVSYLTILAYSCMNPLLLIYHFELAWFIFVLLYIIHCLRSDKDSNAYNHFFQVLM

SEQ ID NO: 109563 - protein, 279 aa, Setaria italica
  Transcript Sequence Number=SeqID_43589
MSIAAGNGRLRSSGTCCHIPGERGRFSGQVATEDGKLFAQSLLQNLWVLEQNNECLGTFSEQNIRFRDKMSVLYNVERRKLDLLQLKANYKCAKKIIHDAFSKAGPIPDDIEHLLDLMENEFDKRSLFRVHASLWSLSDRGGMYMRMHEHLKVLSVPQVYQIMCVMGRMKYKIDWRTLVRTNDLLAGIYNSKKPQYAKKNIQGQKAMEYSEGKLFTDYLRNRVAHRMDAYKLGVSYTAQGSELAALVRWPMALVTLQYELHKCKTSGDLNDGNSIEIRN

SEQ ID NO: 109564 - protein, 177 aa, Setaria italica
  Transcript Sequence Number=SeqID_43590
  Gene Ontology: Mol. function=protein serine/threonine kinase activity; Biological process=protein amino acid phosphorylation
  Homolog annotation: Hit_ID=Q653D1; Match level="QueryCoverage=100%, HitCoverage=22%, E-value=2e-91, Identity=90%"; Hit description =Putative wall-associated kinase 4
  Pfam annotation: Domain name=Pkinase; Domain location=1-177; Score =4.0; E_value=1e-08; Accession=PF00069.17; Description=Protein kinase domain
  Pfam annotation: Domain name=Pkinase_Tyr; Domain location=4-177; Score=-24.3; E_value=4.1e-12; Accession=PF07714.9; Description =Protein tyrosine kinase
  Pfam module annotation: Pfam domain module=Pkinase::Pkinase_Tyr; Domain location=1-177::4-177
LSDLHVVAIKKSKVAIQREIDEFINEVAILSQINHRNVVRLFGCCLETEVPLLVYEFISNGTLYDHLHVQGPTSLPWQNRLRIATETARALAYLHMAVSVPIVHRDVKSHNILLDDSLTAKVSDFGASRCIPPDQTGVATAIQGTLGYLDPMYYYTGRLTEKSDVYSFGVVLIELLT

SEQ ID NO: 109565 - protein, 217 aa, Setaria italica
  misc_feature (11)..(11): Xaa can be any naturally occurring amino acid
  misc_feature (64)..(64): Xaa can be any naturally occurring amino acid
  misc_feature (202)..(202): Xaa can be any naturally occurring amino acid
  Transcript Sequence Number=SeqID_43591
  Gene Ontology: Mol. function=binding
  Homolog annotation: Hit_ID=B9T205; Match level="QueryCoverage=98%, HitCoverage=79%, E-value=6e-59, Identity=37%"; Hit description =Pentatricopeptide repeat-containing protein, putative
  Pfam annotation: Domain name=PPR; Domain location=122-156; Score =38.3; E_value=3.1e-08; Accession=PF01535.12; Description=PPR repeat
  Pfam annotation: Domain name=PPR; Domain location=21-55; Score=46.3; E_value=1.2e-10; Accession=PF01535.12; Description=PPR repeat
  Pfam module annotation: Pfam domain module=PPR::PPR; Domain location =122-156::21-55
KCDHLTAARSXFDALAHDDAVSYNAMIEGYARQGDLKEALHIFRRMRYCSLRPNLLTFVSLLGXSSFQSAIELSKQIHGLIIRSGTSVDLYVGSALIDAYSKCSLVDDAKAVFLMMQNRDMAIWNAMIFGHAQNEQGEEAVKLFSQLRASGVTPNEFTFVALVTVASNLASMFHGQQFHAQIIKAGADINPHVSNALIDMYXKCGFSKNKLKVKTKK

SEQ ID NO: 109566 - protein, 71 aa, Setaria italica
  Transcript Sequence Number=SeqID_43592
KIDVLELHGPKSTICIFLPKLSKPHFNGTLFLLVTATRCRYKVAAIICRYSKESKVNKWVRVINLSDTSSC

SEQ ID NO: 109567 - protein, 57 aa, Setaria italica
  Transcript Sequence Number=SeqID_43593
GKKIIKTNSRIENLNIPIYPYIHTERKVINFTIKNLPRKKLSYSIDFMVNSVTQLKK

SEQ ID NO: 109568 - protein, 137 aa, Setaria italica
  misc_feature (117)..(117): Xaa can be any naturally occurring amino acid
  Transcript Sequence Number=SeqID_43594
  Gene Ontology: Mol. function=nucleotide binding; Cellular component =endoplasmic reticulum lumen; Biological process=response to stress
  Homolog annotation: Hit_ID=B6SXY0; Match level="QueryCoverage=95%, HitCoverage=22%, E-value=1e-63, Identity=87%"; Hit description=Heat shock 70 kDa protein 1
WVVLGYFCDVAVAATAGGVSQIRALSGCTVGGEDILQNTMRHVLPNFDSLYAGQTMDRIKSMGLVRIATQDAIHKLANQESVEINVDLGNGQQVSKVLDHSEFEQVNRAIFEKCEKXINQCLVDAKLVPEDINDVIL

SEQ ID NO: 109569 - protein, 43 aa, Setaria italica
  Transcript Sequence Number=SeqID_43595
QLIASVSSTISYKKGPSQHIAFVGIDSQPAPPNVETILFIVEQ

SEQ ID NO: 109570 - protein, 124 aa, Setaria italica
  Transcript Sequence Number=SeqID_43596
  Subcellular localization annotation: CTP_CleavageSite=31; ConfidenceScore=5.28e-01
GRVQRLSWLTSSWSYVALPRRYKRQLVHQVSSSHASQSDRGTHPTDLFTLSLSHPFVSTHSRTHRATEGQAGMASETRAMVHPGGCTAARLMELSCRRPPWCRSRLLVGGRRRTTLQPPHARPS

SEQ ID NO: 109571 - protein, 115 aa, Setaria italica
  misc_feature (38)..(38): Xaa can be any naturally occurring amino acid
  Transcript Sequence Number=SeqID_43597
  Gene Ontology: Mol. function=ATPase activity, coupled to transmembrane movement of substances; Cellular component=integral to membrane; Biological process=transport
  Homolog annotation: Hit_ID=Q6UNK5; Match level="QueryCoverage=82%, HitCoverage=54%, E-value=1e-40, Identity=82%"; Hit description=PGP1
  Pfam annotation: Domain name=ABC_tran; Domain location=1-115; Score =28.1; E_value=3e-08; Accession=PF00005.19; Description=ABC transporter
GREEGATEAEVVEAAAQANAHKFISALPEGYRTQVGEXRGVQLSGGQRQRIAIARALLKKAPIMLLDEATSALDAESERCVQEALDRAGAGRTTIVVAHRLATVRGAHSIAVIDD

SEQ ID NO: 109572 - protein, 137 aa, Setaria italica
  Transcript Sequence Number=SeqID_43598
  Gene Ontology: Mol. function=binding
  Homolog annotation: Hit_ID=Q2QNV7; Match level="QueryCoverage=78%, HitCoverage=11%, E-value=7e-09, Identity=38%"; Hit description =Retrotransposon protein, putative, unclassified, expressed
RAARILEHLAGDIYLDQFPGGMRCIASLLDHEASPSRPQLRREEVPVLQGMRILRNLAANSGNLGAIRSAPGLLAKITAPLDPDLLQLHHTYRFKVALESLILVRRLMDMDAPRESKDDDECLEYLKKAVTNAMPKV

SEQ ID NO: 109573 - protein, 81 aa, Setaria italica
  Transcript Sequence Number=SeqID_43599
SNNYITEEMFFHHYISNMVFVVYAILFTFLRCENPAICYTCITEMTRIKHTCISSIFHLDIEALRLNWLYKELAGVIIDQN

SEQ ID NO: 109574 - protein, 203 aa, Setaria italica
  misc_feature (38)..(38): Xaa can be any naturally occurring amino acid
  misc_feature (121)..(121): Xaa can be any naturally occurring amino acid
  misc_feature (167)..(167): Xaa can be any naturally occurring amino acid
  Transcript Sequence Number=SeqID_43600
  Gene Ontology: Mol. function=oxidoreductase activity; Cellular component=extracellular region; Biological process=oxidation reduction
  Homolog annotation: Hit_ID=B9SR02; Match level="QueryCoverage=99%, HitCoverage=37%, E-value=7e-65, Identity=61%"; Hit description =Multicopper oxidase, putative
  Pfam annotation: Domain name=Cu-oxidase; Domain location=11-149; Score=177.5; E_value=3.9e-50; Accession=PF00394.14; Description =Multicopper oxidase
FDPRPFPSPDDEYTVLIGDWYTASHKALQDLLDSGRNXSPDGILINGKRSPDGANFTVEQGKTYRLRISNVGLQNTLNFLIQGHNMTLVEVEGTHTVQNSYTSVDVHAGQSLSVLFTADRXPRDYQHSIYSRFINTTLRSTAVIRYAGSSGPAFEALPDAPSDVDFXLNQARSIRTNMTASGPRPNPQGSYHYGSINVTRTIR

SEQ ID NO: 109575 - protein, 53 aa, Setaria italica
  Transcript Sequence Number=SeqID_43601
RRKIIGNQAASGTSLRSIILPEMISGAQLSHVWSQKRTYPFVHYISQDQTNYF

SEQ ID NO: 109576 - protein, 160 aa, Setaria italica
  misc_feature (153)..(153): Xaa can be any naturally occurring amino acid
  Transcript Sequence Number=SeqID_43602
  Gene Ontology: Mol. function=protein kinase activity; Cellular component=integral to membrane; Biological process=protein amino acid phosphorylation
  Homolog annotation: Hit_ID=B9R782; Match level="QueryCoverage=83%, HitCoverage=20%, E-value=4e-35, Identity=53%"; Hit description=ATP binding protein, putative
  Pfam annotation: Domain name=LRR_1; Domain location=20-42; Score =14.3; E_value=0.53; Accession=PF00560.25; Description=Leucine Rich Repeat
  Pfam annotation: Domain name=LRR_1; Domain location=44-66; Score =16.3; E_value=0.13; Accession=PF00560.25; Description=Leucine Rich Repeat
  Pfam annotation: Domain name=LRR_1; Domain location=69-90; Score=7.2; E_value=12; Accession=PF00560.25; Description=Leucine Rich Repeat
  Pfam annotation: Domain name=LRR_1; Domain location=91-112; Score =12.8; E_value=1.1; Accession=PF00560.25; Description=Leucine Rich Repeat
  Pfam module annotation: Pfam domain module=LRR_1::LRR_1::LRR_1::LRR _1; Domain location=20-42::44-66::69-90::91-112
  Subcellular localization annotation: CTP_CleavageSite=51; ConfidenceScore=5.29e-01
RSLKSNALHGPVPDLSPLANLKALYLAGNRFSGPFPASLATLRRLRSIDLSGNRLSGELPPGIEAAFPHLTFLRLDANHFNGSLPAWNQSSLKVLNVSYNNFSGPVPVTPVLTQVGAAAFAGNPELCGEVVRRECRGSHLLFFHGGGNNGTAXPPVQSAA

SEQ ID NO: 109577 - protein, 124 aa, Setaria italica
  misc_feature (6)..(6): Xaa can be any naturally occurring amino acid
  Transcript Sequence Number=SeqID_43603
WRRWEXVIASAAGAVAAVGAVFAWNAWRRGAEAERFFRRFPDTAFDGHGDMPVGELVKITGQVTCGRHPLAAYFHDGAARCVFTSVQLFERRGWARCCCRRRWQQRHSEARVANFYISDRNSGK

SEQ ID NO: 109578 - protein, 81 aa, Setaria italica
  Transcript Sequence Number=SeqID_43604
  Subcellular localization annotation: CTP_CleavageSite=38; ConfidenceScore=5.09e-01
EDEAIAELPAPTKPKSPPKSSSSLPPCLKKDRSSRDLKLKTLKSPSSWSKSYKESRVLDHSLIRRTFTFMFNNIYAMHFKS

SEQ ID NO: 109579 - protein, 119 aa, Setaria italica
  misc_feature (85)..(85): Xaa can be any naturally occurring amino acid
  misc_feature (105)..(105): Xaa can be any naturally occurring amino acid
  Transcript Sequence Number=SeqID_43605
  Gene Ontology: Mol. function=nucleotide binding; Biological process =defense response
  Homolog annotation: Hit_ID=O48978; Match level="QueryCoverage=95%, HitCoverage=64%, E-value=6e-44, Identity=76%"; Hit description=NBS -LRR type resistance protein (Fragment)
FILFEKLRELLQDKRYLIVIDDIWSASTWDTIKYAFPENNLSSRTIATTRIVDVAKSCCPHGNDRIYEMEALSDLHSKRLFFKRXFGSEDSCPDVLKQVSDKILXKKCGGLPLAIISIS

SEQ ID NO: 109580 - protein, 135 aa, Setaria italica
  Transcript Sequence Number=SeqID_43606
  Gene Ontology: Mol. function=translation initiation factor activity; Cellular component=eukaryotic translation initiation factor 3 complex; Biological process=translational initiation
  Homolog annotation: Hit_ID=Q6YNS0; Match level="QueryCoverage=60%, HitCoverage=9%, E-value=7e-13, Identity=47%"; Hit description =Putative translation-initiation factor 3 subunit
IVSKMMIQEELHARWDQPTRSIVFQNAEQNRLHRLLSQMADNLSVIVERNEMAYGGKSLVEEAPRRRAENQDPSKLGRLQENYGGGRPGYTGGVAGFKQAGPMYPKDRNNKALHGNYGRVHKQAYPSSTRMVNSC

SEQ ID NO: 109581 - protein, 91 aa, Setaria italica
  Transcript Sequence Number=SeqID_43607
  Subcellular localization annotation: CTP_CleavageSite=37; ConfidenceScore=5.17e-01
PNHHETRGFDPNFLAPPNQPGATSSQGQQSHRQHPAPAMAKRAGGFHLPNAEQENSLLLRALISVVSGDNAVPALLPEEAEAPVVEAPAPC

SEQ ID NO: 109582 - protein, 94 aa, Setaria italica
  Transcript Sequence Number=SeqID_43608
  Homolog annotation: Hit_ID=B6TW98; Match level="QueryCoverage=88%, HitCoverage=25%, E-value=5e-36, Identity=87%"; Hit description=RWP -RK domain containing protein
  Pfam annotation: Domain name=RWP-RK; Domain location=24-75; Score =88.0; E_value=3.3e-23; Accession=PF02042.7; Description=RWP-RK domain
NGDTQSDKELAPSVQKQPRANRKHIDSITLVEIAQYFHLPIREASKTLKIGVSILKRKCRKYGIPRWPHRKIKSLDSLIQDLESNIEDDPEEDG

SEQ ID NO: 109583 - protein, 101 aa, Setaria italica
  Transcript Sequence Number=SeqID_43609
  Subcellular localization annotation: CTP_CleavageSite=65; ConfidenceScore=5.48e-01
RCQDGRRRPRPRRRVLAARGPLCSASASTRWRRRSRPYSPSANGAASSAAASATAGSPSLRLAGRAALRGAGRPRQLEQTFVISIFRRDDESATKRTWAKP

SEQ ID NO: 109584 - protein, 210 aa, Setaria italica
  Transcript Sequence Number=SeqID_43610
  Gene Ontology: Mol. function=protein binding; Cellular component =integral to membrane; Biological process=transport
  Homolog annotation: Hit_ID=B6SSF8; Match level="QueryCoverage=90%, HitCoverage=91%, E-value=4e-91, Identity=83%"; Hit description =Transmembrane emp24 domain-containing protein 10
  Pfam annotation: Domain name=EMP24_GP25L; Domain location=23-205; Score=207.0; E_value=4.9e-59; Accession=PF01105.16; Description =emp24gp25Lp24 family
MAASTFPALLLAAMLLLMPGAEAVWLELPPSGTKCVSEEIQPNVVVLADYAIMYESHPTSHPTVAVKVTSPYGNTVHHNENATTGQFAFTTSEAGNYLACFWIDSAEKGSGTSLNLDWKIGIAAKDWDTIAKKEKIEGVELELRKLEAAVESIHHNLLYLKAREAEMRTVSEKTNSRVAWFSILSLGVCIVVSVLQLWHLQGFFRKKKLI

SEQ ID NO: 109585 - protein, 124 aa, Setaria italica
  Transcript Sequence Number=SeqID_43611
LKHQIKSAFCPKKSGMHSIHTGPQISCDEGIRDRHTHILLIREWMKHAGAAIAHLANSFRILVPTCKCFARQTIRRFKVTIAGLANDIHCKTKAERTLRKSKKGRVMGSRRRHTAAITTSTPTK

SEQ ID NO: 109586 - protein, 391 aa, Setaria italica
  Transcript Sequence Number=SeqID_43612
  Gene Ontology: Mol. function=glycerophosphodiester phosphodiesterase activity; Cellular component=vacuole; Biological process=glycerol metabolic process
  Homolog annotation: Hit_ID=A0ZHW5; Match level="QueryCoverage=89%, HitCoverage=26%, E-value=5e-53, Identity=36%"; Hit description =Phytase
  Pfam annotation: Domain name=GDPD; Domain location=49-357; Score =246.5; E_value=6.6e-71; Accession=PF03009.9; Description =Glycerophosphoryl diester phosphodiesterase family
MASSWYTSIIVLVLLFGGSKANPAATSHGQLDVNHRKPLQTFRPHNIAHRGSNGELPEETAAAYLRAIEEGADFIETDILASKDGHLICFHDVTLDATTDVANRREFANRKRTYEVEGAKMTGWFVVDFTLKELKSLRVKQRYSFRDQRYNGKYQIITFEEYILIALYADRIVGIYPEIKNPVFINQHVKWSNGKNFEDKFVEILLKYGYKGEYMSEDWFKQPLFIQSFAPTSLIYISNMTNSPKVFLIDDTTVRTQDTNQSYYEITSNAYFAFIRNYVIGIGPWKDTIVPPKNNYLGQPTDLVARAHALNLQVHPYTFRNENSYLHFNFNQDPYVEYEYWLNEIGVDGLFTDFTGSLHKYQEWTTPYPKKEKNAEALLHEIANMLKADGY

SEQ ID NO: 109587 - protein, 173 aa, Setaria italica
  Transcript Sequence Number=SeqID_43613
RCSSWWFSNGNAHERDSATASTSSRAARKWWSDPEPSKQEYGYSSLEDEEEDDYEDEDEPGFPGLGGAGELFDEPWFSKVFKTYGFLLPVMLVSMLAATGPKAFLMAMAIPLGQSAISFLLDAIWGRRRSNRDDRRRPFQEEDEEEDDYPEDTTGFASGGRGNRYSSSSSYYE

SEQ ID NO: 109588 - protein, 91 aa, Setaria italica
  Transcript Sequence Number=SeqID_43614
  Subcellular localization annotation: CTP_CleavageSite=48; ConfidenceScore=5.44e-01
PRTQLRCICIPSPSSPSPPSRLIFLPHGAQAINSRQPLQSSISLPLVSLSEAYNFSDFSSVCIRFHGELFRFRLNLEKYLGLSSLISLPFP

SEQ ID NO: 109589 - protein, 59 aa, Setaria italica
  Transcript Sequence Number=SeqID_43615
  Gene Ontology: Mol. function=3-beta-hydroxy-delta5-steroid dehydrogenase activity; Biological process=steroid biosynthetic process
  Homolog annotation: Hit_ID=B6TE61; Match level="QueryCoverage=96%, HitCoverage=41%, E-value=5e-18, Identity=77%"; Hit description =Dihydroflavonol-4-reductase
SPHSLHRDLKLDYPRKFVQVEDEKGASSKRLQALGWKFRTAEQTLRDTIDSYKAAGILK

SEQ ID NO: 109590 - protein, 87 aa, Setaria italica
  Transcript Sequence Number=SeqID_43616
  Subcellular localization annotation: CTP_CleavageSite=34; ConfidenceScore=5.22e-01
EARRKPPSRGTRHGCSRCVTTRRQAWTLTLSPCVSLHRANAPVSNQSPPPSDHMLLLVGAAAGNDTSATAQPRRLRLRTEKEQEEER

SEQ ID NO: 109591 - protein, 156 aa, Setaria italica
  Transcript Sequence Number=SeqID_43617
  Gene Ontology: Cellular component=extracellular region; Biological process=cell wall organization and biogenesis
  Homolog annotation: Hit_ID=B6T4P8; Match level="QueryCoverage=100%, HitCoverage=51%, E-value=1e-74, Identity=86%"; Hit description=Beta -expansin 4
  Pfam annotation: Domain name=Pollen_allerg_1; Domain location=31-112; Score=120.8; E_value=4.5e-33; Accession=PF01357.13; Description =Pollen allergen
AKPGMADQLRAAGILQIQYTRVQCEWPGVDVTFSVDTGSNPNYLAVLIEYEDTESDLSGVDIMQSSTGQWVPMQHSWGAVWRLNSGSALQGPFHIRLTFSSGRVLIASNAIPAGWNAGVSYRSGGVAVTRARPRSAGCRGYKAAGAFGDLVYHLLL

SEQ ID NO: 109592 - protein, 81 aa, Setaria italica
  Transcript Sequence Number=SeqID_43618
  Homolog annotation: Hit_ID=B6SJD1; Match level="QueryCoverage=95%, HitCoverage=74%, E-value=4e-17, Identity=48%"; Hit description =Paired amphipathic helix repeat family protein
  Pfam annotation: Domain name=PAH; Domain location=20-66; Score=49.0; E_value=1.8e-11; Accession=PF02671.13; Description=Paired amphipathic helix repeat
TLQRRTRFVTALKRELAGQPGRYEEVFAVMRQFRAGSIETEEVVDRMKVLLSGHPELIHAFNQFLPWGYIRTHGSAGGSSN

SEQ ID NO: 109593 - protein, 396 aa, Setaria italica
  Transcript Sequence Number=SeqID_43619
  Homolog annotation: Hit_ID=B9SVY8; Match level="QueryCoverage=73%, HitCoverage=93%, E-value=1e-97, Identity=57%"; Hit description =Catalytic, putative
  Pfam annotation: Domain name=Abhydrolase_1; Domain location=152-389; Score=-9.6; E_value=0.035; Accession=PF00561.12; Description =alphabeta hydrolase fold
  Pfam annotation: Domain name=DUF2305; Domain location=120-370; Score =250.9; E_value=3.1e-72; Accession=PF10230.1; Description =Uncharacterised conserved protein (DUF2
  Pfam module annotation: Pfam domain module=Abhydrolase_1::DUF2305; Domain location=152-389::120-370
RRCPPDPIGKAADTPSPVTLAEPPSRRRSLLHSPVLSAPAHLQLLFLPDSIAIGWASSGAPLACAAVRLFRSVCGARSSPGTVSMEKARLTPFPREQAATRICMVSSFATELLEIRSKEPSLHVLVIPGNPGIAAFYKDFVEALYENLDGQASITAVGHISHSQKDSEHGRLFSLHEQIDHKVDFIEQELQHSEQSIVLVGHSIGAYIGLEVFKRFQNKIKMFVGLYPFLKLNKNSVTQSAIGYIARSSFLSKGVSLFASFIGSLQPSITRGIVRRFLGHSWSVTAVDVACCHLLKYHTMRNVLFMAMTEFQKLTEEPDWTFFRAKQDKIAFLFGVDDHWGPLSHLEEISKRAPGVTLSVETEGHTHGYCCREIGSFWVADYIANLIKKQSLIRNN

SEQ ID NO: 109594 - protein, 73 aa, Setaria italica
  Transcript Sequence Number=SeqID_43620
  Gene Ontology: Mol. function=transferase activity, transferring groups other than amino-acyl groups
  Homolog annotation: Hit_ID=B9SZD6; Match level="QueryCoverage=98%, HitCoverage=15%, E-value=9e-28, Identity=77%"; Hit description =Anthocyanin 5-aromatic acyltransferase, putative
MGSSPRFPMYDGNDFGWGRALAVRSGRANKFDGKMSAFPGQAGDGSVDVEVCLAPDTMACLLRDEAFLQYVTE

SEQ ID NO: 109595 - protein, 95 aa, Setaria italica
  misc_feature (78)..(78): Xaa can be any naturally occurring amino acid
  Transcript Sequence Number=SeqID_43621
  Subcellular localization annotation: CTP_CleavageSite=84; ConfidenceScore=5.84e-01
MPWWRLPRPSARPRPSRRTEWPARTCRRRRRSPSSRSRRFGRPAHRRLETSGSRSRTCPCFRATTSRRGSSSGLPAWXWPRWCRRSSRRSHARSV

SEQ ID NO: 109596 - protein, 215 aa, Setaria italica
  Transcript Sequence Number=SeqID_43622
  Gene Ontology: Mol. function=transferase activity, transferring groups other than amino-acyl groups
  Homolog annotation: Hit_ID=B6U4R0; Match level="QueryCoverage=98%, HitCoverage=43%, E-value=2e-83, Identity=71%"; Hit description=AER
STKRALFPMDRTVSYGGHGRPLTSFQLTVLGDGAVFVGFVANHAVVDGTSFWHFFNTWAGLCRGAPVREPDFRRNFFGDSTAVLRFPGGVGPAVTFDAEAPLRERILHFSAAAIRELKATANRWKRTGQDSEVNGKVTHDSKVQCGCREISSFQSLCAHVWRAVTRARRLLAADKTTTFRMAVNCRHRLRPAISPLYFGNAIQSVATKATVAELA

SEQ ID NO: 109597 - protein, 491 aa, Setaria italica
  Transcript Sequence Number=SeqID_43623
  Gene Ontology: Mol. function=transferase activity, transferring groups other than amino-acyl groups
  Homolog annotation: Hit_ID=B6U4R0; Match level="QueryCoverage=100%, HitCoverage=100%, E-value=0.0, Identity=83%"; Hit description=AER
  Pfam annotation: Domain name=Transferase; Domain location=35-481; Score=320.0; E_value=4.9e-93; Accession=PF02458.7; Description =Transferase family
MAQMISTMPMVDAAPAVSAIMSKLPQAACLDAPASGITVVSRQHVRPDAASAIGDLTLSVSDLPMLSCHYIQKGLFFPAPDLPMASLVSLLVSSLSRALAAVPALAGRLVTLPDDRIVIRCNDAGVDFLHAVAPGLSLDDFLVPDADVPTKLTKDLFPMDRTVSYEGHRRPLTSFQVTVLGDGAVFIGIVANHAVVDGTSFWHFFNTWAAICRGEAPRLLDFRRNFFGESTAVLRFPGGVGPAVTFDVDAPLRERVFHFSADAIREMKAIANRRPSGGHDAEVYGKMAHDPKNPEARREISSFQSLCAQIWLAVTRARKRLAPDATTTFRMAVNCRHRLRPAISPTYFGNAIQSAVTTATVSELASNDLGWAAAKLHATVAAHEDGAIRLAAAEWEAAPRCFPLGNPDGAALTMGSSPRFPMYDGNDFGWGRALAVRSGRANKFDGKMSAFPGRAGDGSVDIEVCLPPETMAALLRDAEFMQYVSCPSHLL

SEQ ID NO: 109598 - protein, 81 aa, Setaria italica
  Transcript Sequence Number=SeqID_43624
  Homolog annotation: Hit_ID=B9R872; Match level="QueryCoverage=77%, HitCoverage=28%, E-value=4e-26, Identity=87%"; Hit description =Carboxy-lyase, putative
  Pfam annotation: Domain name=Lysine_decarbox; Domain location=4-81; Score=28.0; E_value=3.7e-07; Accession=PF03641.6; Description=Lysine decarboxylase family
PIDLDLLCSCLTANDPTGGYGTLEELLEVITWAQLGIHSKPVGLLNVDGYYDSLLSFVDRAVEEGFVTPAARHIVVAAHTP

SEQ ID NO: 109599 - protein, 231 aa, Setaria italica
  misc_feature (146)..(146): Xaa can be any naturally occurring amino acid
  Transcript Sequence Number=SeqID_43625
  Homolog annotation: Hit_ID=B9R872; Match level="QueryCoverage=87%, HitCoverage=89%, E-value=4e-75, Identity=67%"; Hit description =Carboxy-lyase, putative
  Pfam annotation: Domain name=Lysine_decarbox; Domain location=61-195; Score=222.0; E_value=1.6e-63; Accession=PF03641.6; Description=Lysine decarboxylase family
MEVVPAAKKSKASSRFRRVCVFCGSSPGKKAAYQLAAVQLGRQLVERGIDLVYGGGSVGLMGLVSRAVHNAGGHVLGIAPKAVLPRELIGDTPGELKDVPGMHQRKAEMARNADAFIALPGGYGTLEELLEVITWAQLGIHSKPVXGLLNVDGYYDSLLSFVDRAVEEGFVTPAARHIVVAAHTPHDLLAMLEDYVPVHDADEPKLSWEMAEHIIKSSSSDDHHTSLLFSR

SEQ ID NO: 109600 - protein, 102 aa, Setaria italica
  Transcript Sequence Number=SeqID_43626
  Gene Ontology: Mol. function=drug transporter activity; Cellular component=membrane; Biological process=multidrug transport
  Homolog annotation: Hit_ID=Q9C9N0; Match level="QueryCoverage=100%, HitCoverage=22%, E-value=3e-27, Identity=53%"; Hit description=MATE efflux family protein, putative
STLITYKNAMVPFVCVSVAADSLQGVLSGIARGCGWQHLGAYVNLGSFYLVGIPTALLLGFVLKMEGKGLWMGISCGSIVQFLLLAVITFFSNWQNMSDKAR

SEQ ID NO: 109601 - protein, 426 aa, Setaria italica
  Transcript Sequence Number=SeqID_43627
  Gene Ontology: Mol. function=metal ion binding
  Homolog annotation: Hit_ID=B6SVJ2; Match level="QueryCoverage=100%, HitCoverage=100%, E-value=0.0, Identity=84%"; Hit description =Mandelonitrile lyase
  Pfam annotation: Domain name=zf-C3HC4; Domain location=282-340; Score= 9.6; E_value=0.0082; Accession=PF00097.17; Description=Zinc finger, C3HC4 type (RING finger)
MGSLCCVAARPHGTSTASREWSSIGRSDPPWRTNAGFSPPLSRGWEYRINSEGLSYGSHGDSGVAANYGSSLSSNSKEASRSWERNELPQEHRYSTSEGAISYFNSPDVSFQNHHAMLPMLRDSSVDEYMRVSVAEPIGALLLSEGISGQQNSGGSTSSRSDGSEYDIVPKSYSSTPRNFPSRRSFLSKPIHPLSFPEHALEAQGTQSPIASASSNNPLRSEFKGKGELRSPGPMDYASGSHGESGNWSAASSMDLTDLSEQPEAERAGAQRSNNVMQKTRCDLCERFLTKRSPWGSRRIVRTGDLPVAGVLPCSHVYHAECLERTTPKGQKHDPPCPVCDKLAGKDTEHWSICRLKNGFPRLRSLGEGPSRVWSCAHAGDCVAGAVQIPRSNSIALLTRSGHKRHASSKGDPGKDWAETSKSACM

SEQ ID NO: 109602 - protein, 99 aa, Setaria italica
  Transcript Sequence Number=SeqID_43628
VSIHLKCCERRETRGDSSEVQSSHQLTKERKDQEAPRRLGSIDVNYVLYLMTMEQGTFAVTNVLLCTGKLEDNLVHQVSTWTTREDPGFGVFCNNKLAT

SEQ ID NO: 109603 - protein, 72 aa, Setaria italica
  Transcript Sequence Number=SeqID_43629
NPHEMVKNPATPPLFRYEWMKPKLEEMARARGRKHLIYRRKVSSGWSLHPVLKPLRPISIGWRLHPVLMGDL

SEQ ID NO: 109604 - protein, 68 aa, Setaria italica
  Transcript Sequence Number=SeqID_43630
  Gene Ontology: Mol. function=serine-type endopeptidase activity; Cellular component=cell wall
  Homolog annotation: Hit_ID=B9RXF5; Match level="QueryCoverage=92%, HitCoverage=7%, E-value=5e-11, Identity=47%"; Hit description =Subtilase, putative
PTTSQPAGVEVAVRPGWFEVAPGETRELVVELRATRASGAFSFGEIVLTGSLDHLVRLPLAVRPLATT

SEQ ID NO: 109605 - protein, 383 aa, Setaria italica
  Transcript Sequence Number=SeqID_43631
  Gene Ontology: Mol. function=RNA binding
  Homolog annotation: Hit_ID=B6TJ76; Match level="QueryCoverage=88%, HitCoverage=75%, E-value=1e-172, Identity=92%"; Hit description =Nucleic acid binding protein
  Pfam annotation: Domain name=KH_1; Domain location=255-317; Score =58.4; E_value=2.8e-14; Accession=PF00013.21; Description=KH domain
  Pfam annotation: Domain name=KH_1; Domain location=76-145; Score =57.0; E_value=7.2e-14; Accession=PF00013.21; Description=KH domain
  Pfam annotation: Domain name=KH_2; Domain location=76-122; Score=4.8; E_value=0.098; Accession=PF07650.9; Description=KH domain
  Pfam module annotation: Pfam domain module=KH_1::KH_1::KH_2; Domain location=255-317::76-145::76-122
GELIKRLVEETKARVRILEGPVGATERIVLVSGKEDPGLELPPAMDALIRVFKRVIGIADGAAEGTQASAAPGVCAARLLVPGAQAINLIGKQGATIKSIQESTGATIRVISVDERERPFYVTDDERIVEIQGETEKVVKALQAVSNHLRKFLVDHSVLPLFEKTNTTVSQDRSGDGWSDMSHPSIGSAQVNQPPPVVDEYILPVKRDSLYLEREPLVDHNIHRSGVSLYGRDPALSTLRPSGMHGAGPLLTQITQTMQIPLTYAEDIIGVKGANIAYIRANSGAVVTIQESLGSPDDITVEIKGTSSQVQAAQQLIQDSLAAHREPVRSSYVGAGLDPVYRSSYSQYGSSTYSSSSLPSYSSIDDGRYPSSGLGGYGSSYRY

SEQ ID NO: 109606 - protein, 138 aa, Setaria italica
  Transcript Sequence Number=SeqID_43632
SARRKKHGLQDWDECCLCCQESESSDHLLATCSYTQQVWYLVDHLTGNTSILPAAESSLLDWWLLRRRRFHGARKRGFDSTLILVSWSIWKERNNRTFTGDPQRTPQQLAAAVAEDAANWFLAGAHCLFSIGWRFVSR

SEQ ID NO: 109607 - protein, 179 aa, Setaria italica
  Transcript Sequence Number=SeqID_43633
GVIHHEKPSVIFEFKYFLIDPYKGISGFRQCRFTVGRLNLDLDYLCASSTYLLYRQFMHHKQLKELTVRSADLSNSAGTYVAPTSGLVDKLRSYDHGMKVAMLGVIPENTLQIVALAAGPRIRLFFDKYNTLQNSKDVYNPLLSQMNSRSIVFSLAYVECALWPASLASPTLMSAKSHA

SEQ ID NO: 109608 - protein, 54 aa, Setaria italica
  Transcript Sequence Number=SeqID_43634
  Gene Ontology: Mol. function=sucrose-phosphatase activity; Biological process=metabolic process
  Homolog annotation: Hit_ID=B1PHV4; Match level="QueryCoverage=100%, HitCoverage=34%, E-value=2e-21, Identity=92%"; Hit description =Sucrose phosphatase (Fragment)
RFDLWESEGDVRVCSLSSLALSLKTESPEGFVVTHIHKTWLNGYSSGVEQASKL

SEQ ID NO: 109609 - protein, 139 aa, Setaria italica
  Transcript Sequence Number=SeqID_43635
  Gene Ontology: Mol. function=sucrose-phosphatase activity; Biological process=metabolic process
  Homolog annotation: Hit_ID=Q94E75; Match level="QueryCoverage=86%, HitCoverage=28%, E-value=6e-64, Identity=95%"; Hit description =Probable sucrose-phosphatase 1
  Pfam annotation: Domain name=S6PP; Domain location=8-139; Score=52.1; E_value=4.2e-13; Accession=PF05116.5; Description=Sucrose-6F -phosphate phosphohydrolase
MDKLNGSARLMIVSDLDHTMVDHHDEENLSLLRFGALWESVYCQDSLLVFSTGRSPTLYKELRKEKPMLTPDITIMSVGTEITYGEAMVPDDGWEEYLNNKWDRNIVVQETASFSELKLQACSAACIIAVFISILLVVN

SEQ ID NO: 109610 - protein, 423 aa, Setaria italica
  Transcript Sequence Number=SeqID_43636
  Gene Ontology: Mol. function=sucrose-phosphatase activity; Biological process=metabolic process
  Homolog annotation: Hit_ID=Q9FQ11; Match level="QueryCoverage=100%, HitCoverage=100%, E-value=0.0, Identity=92%"; Hit description =Sucrose-phosphatase 1
  Pfam annotation: Domain name=Hydrolase_3; Domain location=12-242; Score=-22.4; E_value=7.7e-05; Accession=PF08282.4; Description =haloacid dehalogenase-like hydrolase
  Pfam annotation: Domain name=S6PP; Domain location=8-261; Score =558.9; E_value=6.1e-165; Accession=PF05116.5; Description=Sucrose-6F- phosphate phosphohydrolase
  Pfam annotation: Domain name=S6PP_C; Domain location=262-393; Score =328.8; E_value=1.1e-95; Accession=PF08472.2; Description=Sucrose-6 -phosphate phosphohydrolase C-termi
  Pfam module annotation: Pfam domain module=Hydrolase_3::S6PP::S6PP_C; Domain location=12-242::8-261::262-393
MDKLNGSARLMIVSDLDHTMVDHHDEENLSLLRFGALWESIYCQDSLLVFSTGRSPTLYKELRKEKPMLTPDITIMSVGTEITYGEAMVPDDGWEEYLNNKWDRNIVVQETASFSELKLQPETEQRPHKVSFFVDKKSAQEVIKSVAKKLDKRGLDAKIIYSGGQDLDILPQGAGKGQALAYLLKKLSSCGKPPNNTLVCGDSGNDAELFSIPDVHGVMVNNAQEELLQWYTENAKDNPKIIHASERCAAGIIQAIGHFKLGPNVSPRDVDFPYAKEASFKPTDAVVKFYVLYEKWRRAEVPKSDSVIQFFKNITDANGVIIHPAGLECSLHASVDALGSCYGDKQGKKYRTWVDRLFITQTGSHSWLVRFDLWESEGDVRVCSLSSLALSLKTESPEGFVVTHIHKTWLNGYSSGVEQASKL

SEQ ID NO: 109611 - protein, 82 aa, Setaria italica
  Transcript Sequence Number=SeqID_43637
  Gene Ontology: Mol. function=electron carrier activity; Cellular component=extracellular region; Biological process=response to oxidative stress
  Homolog annotation: Hit_ID=B6U2M7; Match level="QueryCoverage=100%, HitCoverage=25%, E-value=1e-22, Identity=68%"; Hit description =Peroxidase 68
DPRSPNAFDNGYFRDLVARRVLLRSDQALYGSGGGNGTTDALVRAYAGNGTAFAADFAAAMVRMGSLVGSGGEVRLNCRRVN

SEQ ID NO: 109612 - protein, 93 aa, Setaria italica
  Transcript Sequence Number=SeqID_43638
SWCQEDTSTSVDTMRAMNSIAVCIILLVMSCALTCTYGAGEESPICIRTTIFCGVKKCMKSCQSMYGDRFIRAECQRVVTFFQACCCHLDAPG

SEQ ID NO: 109613 - protein, 68 aa, Setaria italica
  Transcript Sequence Number=SeqID_43639
  Subcellular localization annotation: CTP_CleavageSite=48; ConfidenceScore=5.18e-01
LEIFELVSVVVWFFPFLDKGGFLTQQFQLPTSVGCFLLSRNVTAGSTYASILSHFFTREARIFAMSSP

SEQ ID NO: 109614 - protein, 70 aa, Setaria italica
  Transcript Sequence Number=SeqID_43640
MDSNRNRSQPPPGYPRMDDAEQQGGGKKKKGCCGGSSRRRATSGKRGEASFIEGCIAALCCCWLCELCCD

SEQ ID NO: 109615 - protein, 278 aa, Setaria italica
  Transcript Sequence Number=SeqID_43641
  Gene Ontology: Mol. function=binding; Cellular component =cytoskeleton; Biological process=post-chaperonin tubulin folding pathway
  Homolog annotation: Hit_ID=B9H4T3; Match level="QueryCoverage=58%, HitCoverage=50%, E-value=6e-54, Identity=60%"; Hit description =Tubulin folding cofactor (Fragment)
  Pfam annotation: Domain name=TBCC; Domain location=125-243; Score =233.5; E_value=5.4e-67; Accession=PF07986.4; Description=Tubulin binding cofactor C
SPEGDAAASLAAAAAAIDDLDRLVAESSHALPPYELRSALATAADLRAAHRAAASEIRPKKSFSFRNKSRAPKNPPQDPATVPQPQPPPPEQPKPSIDAILPGTGYKDRNGATLVKDLRVSNDKDGDFTLADLVSCEVYLKGTCRALYVHKLRDCRVFVGAVLGSVLIEDVEGCTFVMAAHQIRIHEAKATDFYLRVRSRPIIEDCSGVRFAPHALEYDGIDEDLKESGLEEETGNWANVDDFKWLRAVQSPNWCLVPEEERLQIVDISEVHEQEDDS

SEQ ID NO: 109616 - protein, 133 aa, Setaria italica
  Transcript Sequence Number=SeqID_43642
  Gene Ontology: Mol. function=translation initiation factor activity; Biological process=RNA metabolic process
  Homolog annotation: Hit_ID=Q03387; Match level="QueryCoverage=96%, HitCoverage=16%, E-value=2e-42, Identity=65%"; Hit description =Eukaryotic initiation factor iso-4F subunit p82-34
  Pfam annotation: Domain name=MA3; Domain location=2-78; Score=7.5; E _value=0.006; Accession=PF02847.9; Description=MA3 domain
WLLKEAINLALDKGANSIDPLVKLLEHLHSKNIFKTVDLETGCLLYGSLLDDLAIDLPKAPAHFGEVVGRLILSRCLGIGVLEDTLKKMEDTFFRSAVFKAATTVIGAHSSGQAILSSHIAEIEACSNLLSLK

SEQ ID NO: 109617 - protein, 729 aa, Setaria italica
  Transcript Sequence Number=SeqID_43643
  Gene Ontology: Mol. function=translation initiation factor activity; Biological process=RNA metabolic process
  Homolog annotation: Hit_ID=Q03387; Match level="QueryCoverage=98%, HitCoverage=95%, E-value=0.0, Identity=61%"; Hit description =Eukaryotic initiation factor iso-4F subunit p82-34
  Pfam annotation: Domain name=MA3; Domain location=562-674; Score =106.7; E_value=7.8e-29; Accession=PF02847.9; Description=MA3 domain
  Pfam annotation: Domain name=MIF4G; Domain location=168-393; Score =231.0; E_value=2.9e-66; Accession=PF02854.11; Description=MIF4G domain
  Pfam module annotation: Pfam domain module=MA3::MIF4G; Domain location=562-674::168-393
YDRPTGAGDFLRPHGGSSTGFAAKLGDSCFEPLERVRYTRDQLLEMREIVDIAKEILKLQQDINVLLLGEEREDQNWARNDSNVQTQSQNRYTEKDTRDWRSRSETLPVVGEEKSWDKIREAKESRVSSGKQEQFAAKAQTRPTPALVKAEVPWSVRRGNLSEKERVLKTVKGILNKLTPEKFDLLKGQLIEAGITTADILKDVITLIFEKAVFEPTFCQMYAQLCSELNESLPSFPPEEPGDREITFKRVLLNNCQEAFEGAGNLRDEVEKLTGPEQEMERRDKERLVKLRTLGNIRLIGELLKQKMVTEKIVHHIVQELLGSDSNSCPAEENVEAICQFFNTIGKQLDENPKSRRFNDVYFNRLKELTSNTQLAVRLRFMVRDVLDLRSNNWVPRREEIKAKKISEIHTEAEMKLGLRPGSTANIRNGRTGTGGSLSPGAFPMNGPGTGGMMPGMPGTRKMPGMPGLDNDNWEVPRSKSRADPLRSHTQLVNKPSVVNSRLLPQGSGALVSGKTSALLGSGGPISRPSSFSPGLAVAPAPAAAPVVEKPAAAPKPNLPSLQKKAVSLLEEYFHVCILDEAQQCIEELKSPDYYPEVVKEAINLALEILNALLCFIVKLLEHLHSKNIFKTVDLETGCLLYGSLLDDLAIDLPKAPAHFGEVVGRLILSRCLGIGVLEDTLKKMEDTFFRSAVFKAATTVIGAHSSGQAILSSHIAEIEACSNLLSLK

SEQ ID NO: 109618 - protein, 93 aa, Setaria italica
  Transcript Sequence Number=SeqID_43644
LAHLCRHSMHSKLAVQRHHGQFQRRGGGGCFCHQCPRRGLPAWLPLAAPHLAATRDSHRGLQLSAYLPQGLGQLSGCVFEVTPDLVDTSGLRA

SEQ ID NO: 109619 - protein, 281 aa, Setaria italica
  Transcript Sequence Number=SeqID_43645
  Gene Ontology: Mol. function=protein tyrosine/serine/threonine phosphatase activity; Cellular component=intracellular; Biological process=protein amino acid dephosphorylation
  Homolog annotation: Hit_ID=B9RA78; Match level="QueryCoverage=99%, HitCoverage=30%, E-value=3e-68, Identity=48%"; Hit description =Phosphoprotein phosphatase, putative
  Pfam annotation: Domain name=Act-Frag_cataly; Domain location=1-162; Score=7.1; E_value=3.1e-08; Accession=PF09192.2; Description=Actin -fragmin kinase, catalytic
GEMTCSELMEALELSRCLILMSYIHGSPLLESSKAFNLREAACVTASSLGRVLMLDLILRNEDRLPCRQLGWRGNPANLMISDKSSSPNVDRLQDSISTTESSNRLIREILLREKRSHSTNGRLDSVELNPMSQKLEELKNERENTESTNDTFHIVAIDTGVPRRPPAGRRMKDHERYPKVVELILNCSDYSANILYEISGGKLGHPGPDEFTCTDSCVSLSDEDNAVAIHEFRGSFRAALRDLEGFHLFLLQLYQKLDGLLRSFFAIITKSSEEPDNNDC

SEQ ID NO: 109620 - protein, 438 aa, Setaria italica
  Transcript Sequence Number=SeqID_43646
  Gene Ontology: Mol. function=protein tyrosine/serine/threonine phosphatase activity; Cellular component=intracellular; Biological process=protein amino acid dephosphorylation
  Homolog annotation: Hit_ID=B9RA78; Match level="QueryCoverage=93%, HitCoverage=43%, E-value=1e-129, Identity=57%"; Hit description =Phosphoprotein phosphatase, putative
  Pfam annotation: Domain name=DSPc; Domain location=208-350; Score =99.4; E_value=1.3e-26; Accession=PF00782.12; Description=Dual specificity phosphatase, catalytic domain
VSTRYLLSKVLIPSRALSFHLFLLQLYQKLDGLLRVFLSIITKSSEEPDNNDCVLSDFPSPGASYSTPCKQLNNELHSDSEMLKSTTKSSSAGSRGSSDSVSPLSRDSWSNKFFKGSAEAPRNLRMTMKLRDFYKNPKVDPELLKEIEQWNEALKTDVIKFCQENNFHSGFFDGTENNMVADAYELKVRLEHIIERIALISDAANTERPSLVVNNLFIGGALAARSKYTLQHLGITHVLCLCSNEIGQSDSQFPDLFEYKNFSIRDDDDANISDLFEEASDFIDHVNHIGGKVLVHCFEGKSRSATVVLAFLMLRMGFTLAKAWNLLKKVHRRAQPNDGFAKALLALDKKLHGKVSMDWQHKRPEMKVCPICSKNVGLSTSSLKLHLQKAHKRLSAGSVDSAMTMEIQKSIESLRISRGGSLSPSQKLTKAFANELSF

SEQ ID NO: 109621 - protein, 122 aa, Setaria italica
  misc_feature (113)..(113): Xaa can be any naturally occurring amino acid
  Transcript Sequence Number=SeqID_43647
  Gene Ontology: Mol. function=hydrolase activity, acting on glycosyl bonds; Cellular component=cytoplasm; Biological process=base -excision repair
  Homolog annotation: Hit_ID=B6TTA0; Match level="QueryCoverage=94%, HitCoverage=37%, E-value=7e-47, Identity=80%"; Hit description =Uracil-DNA glycosylase
RPEDDAANLRLAESKAKASTTAAKLEELLVEKTWVEALDGELRKPYALELCRFVTHERLHGPLPVYPPPHLVFHALNATPFDRVKAVIIGQDPYHGPGQAMGLSFSVPEGIKXPSSLGNIFK

SEQ ID NO: 109622 - protein, 166 aa, Setaria italica
  Transcript Sequence Number=SeqID_43648
  Gene Ontology: Mol. function=ARF GTPase activator activity; Cellular component=plasma membrane; Biological process=regulation of ARF GTPase activity
  Homolog annotation: Hit_ID=B6SZL6; Match level="QueryCoverage=99%, HitCoverage=99%, E-value=2e-73, Identity=81%"; Hit description =GTPase activating protein
  Pfam annotation: Domain name=C2; Domain location=8-89; Score=93.9; E _value=5.6e-25; Accession=PF00168.22; Description=C2 domain
MECLLGLLKVKVVRGVNLAICDPLTHSSDPYVVLRLGQQKVKSSIKYHTINPEWNEELTLSITNMMHPVKIELFDHDTFTKDDSMGDAEFCILDFVEIAKRDLSDVPDGTVMKTIHPEKANCFATESHITWKDGKISQDIVLKLRNTETGELVLHLHWVNIPGVAR

SEQ ID NO: 109623 - protein, 65 aa, Setaria italica
  Transcript Sequence Number=SeqID_43649
  Gene Ontology: Mol. function=structural constituent of ribosome; Cellular component=ribonucleoprotein complex; Biological process =translation
  Homolog annotation: Hit_ID=O22584; Match level="QueryCoverage=83%, HitCoverage=36%, E-value=2e-13, Identity=74%"; Hit description=40S ribosomal protein S14
  Pfam annotation: Domain name=Ribosomal_S11; Domain location=1-61; Score=32.3; E_value=1.4e-07; Accession=PF00411.11; Description =Ribosomal protein S11
  Subcellular localization annotation: CTP_CleavageSite=31; ConfidenceScore=5.04e-01
ELGITALHIKLRATGGNKTKTPGPGAQSALRALARSGMKIGRIEDVTPVPTDSTRRKGGRRGRRL

SEQ ID NO: 109624 - protein, 67 aa, Setaria italica
  Transcript Sequence Number=SeqID_43650
  Gene Ontology: Mol. function=structural constituent of ribosome; Cellular component=cytosolic small ribosomal subunit; Biological process=translation
  Homolog annotation: Hit_ID=Q3T076; Match level="QueryCoverage=88%, HitCoverage=37%, E-value=5e-17, Identity=79%"; Hit description =Ribosomal protein S14
  Pfam annotation: Domain name=Ribosomal_S11; Domain location=1-62; Score=13.6; E_value=3.7e-06; Accession=PF00411.11; Description =Ribosomal protein S11
YAAMLAAQDVAQRCKELGITALHIKLRATGGNKTKTPGPGAQSALRALARSGMKIGRIGEHAVNIFN

SEQ ID NO: 109625 - protein, 184 aa, Setaria italica
  misc_feature (16)..(16): Xaa can be any naturally occurring amino acid
  Transcript Sequence Number=SeqID_43651
  Gene Ontology: Mol. function=nucleic acid binding; Cellular component= nucleus; Biological process=response to stress
  Homolog annotation: Hit_ID=B6TDT8; Match level="QueryCoverage=53%, HitCoverage=49%, E-value=7e-41, Identity=85%"; Hit description =Glycine-rich RNA-binding protein 2
  Pfam annotation: Domain name=RRM_1; Domain location=27-97; Score =98.0; E_value=3.2e-26; Accession=PF00076.14; Description=RNA recognition motif. (a.k.a. RRM, RBD, o
  Pfam annotation: Domain name=Ribosomal_S11; Domain location=145-183; Score=-33.0; E_value=0.013; Accession=PF00411.11; Description =Ribosomal protein S11
  Pfam module annotation: Pfam domain module=RRM_1::Ribosomal_S11; Domain location=27-97::145-183
GSVRVREVFRFGGERXEMAASDVEYRCFVGGLAWATDDNSLHNAFSPFGEVLESKIILDRDTQRSRGFGFVTFASEQAMRDAIEGMNGKELDGRSITVNEAQSRGGRRRSEHAVAAMSGRKKTREPKEENVTLGPAVREGEYVFGVAHIFASFNDTFIHITDLSGRETMVRITGGMKVKADRDE

SEQ ID NO: 109626 - protein, 151 aa, Setaria italica
  Transcript Sequence Number=SeqID_43652
  Gene Ontology: Mol. function=structural constituent of ribosome; Cellular component=ribonucleoprotein complex; Biological process =translation
  Homolog annotation: Hit_ID=Q9SIH0; Match level="QueryCoverage=90%, HitCoverage=91%, E-value=1e-59, Identity=81%"; Hit description=40S ribosomal protein S14-1
  Pfam annotation: Domain name=Ribosomal_S11; Domain location=29-147; Score=250.6; E_value=3.8e-72; Accession=PF00411.11; Description =Ribosomal protein S11
MSGRKKTREPKEENVTLGPAVREGEYVFGVAHIFASFNDTFIHVTDLSGRETLVRITGGMKVKADRDESSPYAAMLASQDVAQRCKELGITALHIKLRATGGNKTKTPGPGAQSALRALARSGMKIGRIEDVTPVPTDSTRRKGGRRGRRL

SEQ ID NO: 109627 - protein, 151 aa, Setaria italica
  Transcript Sequence Number=SeqID_43653
  Gene Ontology: Mol. function=structural constituent of ribosome; Cellular component=ribonucleoprotein complex; Biological process =translation
  Homolog annotation: Hit_ID=Q9SIH0; Match level="QueryCoverage=90%, HitCoverage=91%, E-value=2e-59, Identity=81%"; Hit description=40S ribosomal protein S14-1
  Pfam annotation: Domain name=Ribosomal_S11; Domain location=29-147; Score=251.3; E_value=2.4e-72; Accession=PF00411.11; Description =Ribosomal protein S11
MSGRKKTREPKEENVTLGPAVREGEYVFGVAHIFASFNDTFIHITDLSGRETMVRITGGMKVKADRDESSPYAAMLAAQDVAQRCKELGITALHIKLRATGGNKTKTPGPGAQSALRALARSGMKIGRIEDVTPVPTDSTRRKGGRRGRRL

SEQ ID NO: 109628 - protein, 67 aa, Setaria italica
  Transcript Sequence Number=SeqID_43654
QNRQFVQWLVYILFDGCKPVVVSTPSFSNFKNLLGFRLQRISYLYIADKIWFSQSVDNLTRKQSIPS

SEQ ID NO: 109629 - protein, 192 aa, Setaria italica
  Transcript Sequence Number=SeqID_43655
  Gene Ontology: Mol. function=calcium ion binding
  Homolog annotation: Hit_ID=Q10BR5; Match level="QueryCoverage=100%, HitCoverage=32%, E-value=1e-96, Identity=59%"; Hit description =Calreticulin family protein, expressed
  Pfam annotation: Domain name=PPR; Domain location=19-53; Score=44.3; E_value=4.8e-10; Accession=PF01535.12; Description=PPR repeat
  Pfam annotation: Domain name=PPR; Domain location=54-88; Score=46.8; E_value=8.5e-11; Accession=PF01535.12; Description=PPR repeat
  Pfam annotation: Domain name=PPR; Domain location=89-123; Score=30.2; E_value=8.6e-06; Accession=PF01535.12; Description=PPR repeat
  Pfam module annotation: Pfam domain module=PPR::PPR::PPR; Domain location=19-53::54-88::89-123
GEIVAAMRIFNEIPEKDIFSWNSMVAGYAQAGYCGKAYELFCKMESLGVRRNVITWNIMISGYIRNGDDERVFELFQMMESCGVKRDTASWNILIAGSVHNGHLDRALRIFRQMQALLVRPDYITILSIIPAFANLVAAWKVREIHACIFHHNLEMDGKIENALIHAYSKSGDLAGACAVFDRHSSRNTISW

SEQ ID NO: 109630 - protein, 113 aa, Setaria italica
  misc_feature (22)..(22): Xaa can be any naturally occurring amino acid
  Transcript Sequence Number=SeqID_43656
  Gene Ontology: Mol. function=peptidase activity; Cellular component =nucleus; Biological process=ribosome biogenesis
  Homolog annotation: Hit_ID=Q8H7V4; Match level="QueryCoverage=98%, HitCoverage=6%, E-value=4e-29, Identity=52%"; Hit description =Putative polyprotein from transposon TNT
MQVYRIGPVCEKYNSHPEVHGXFVNQELLDLDSMGYPKLPSSMLGDGMILVNTFEETFGDMHGEGVWRKFSKRASNINRNIVALASYDRTNGRKACTGFSIEWNGSTIILTFS

SEQ ID NO: 109631 - protein, 63 aa, Setaria italica
  Transcript Sequence Number=SeqID_43657
DFHRHKPSVQCVIPHPENLKAKLCLRLVKTNRYLIKLRKRETTVIVFSSETYISTMCHTFNSL

SEQ ID NO: 109632 - protein, 103 aa, Setaria italica
  Transcript Sequence Number=SeqID_43658
SLPCKRNDTARSTKSDRYCKNLEKKEGINCCHFKAMQVYPIRNQSVPRASDWTSEWKLACVFARQFINAVHGEAMNRLDATKRSDAQIHNHFFTGKRMLVITG

SEQ ID NO: 109633 - protein, 58 aa, Setaria italica
  Transcript Sequence Number=SeqID_43659
  Gene Ontology: Mol. function=glyceraldehyde-3-phosphate dehydrogenase (phosphorylating) activity; Cellular component=cytoplasm; Biological process=glucose metabolic process
  Homolog annotation: Hit_ID=Q8VXM5; Match level="QueryCoverage=94%, HitCoverage=17%, E-value=3e-20, Identity=83%"; Hit description =Glyceraldehyde-3-phosphate dehydrogenase (Fragment)
  Pfam annotation: Domain name=Gp_dh_C; Domain location=3-54; Score= -44.1; E_value=0.00054; Accession=PF02800.12; Description =Glyceraldehyde 3-phosphate dehydrogenas
FYRAASEGPLKGIMGYTDEDLVFTDFTGDSRSSIFDAKAGIALNDNFVKLVSWYDNEL

SEQ ID NO: 109634 - protein, 153 aa, Setaria italica
  Transcript Sequence Number=SeqID_43660
  Gene Ontology: Mol. function=protein serine/threonine kinase activity; Biological process=protein amino acid phosphorylation
  Homolog annotation: Hit_ID=Q5W239; Match level="QueryCoverage=49%, HitCoverage=12%, E-value=2e-19, Identity=64%"; Hit description =Ser/Thr receptor-like kinase
MHPMLPNHGKKNTSSKLVHHIDAANTMGQRSGSHLGFQPTLHLAAHLGCSCHALGMTQSLITKFLAPVQLDRFLDCVLVGCSVDSVATNQDDIVGPSSCLSLSNNTSQFWYLVRPWTDMSTLPMGCEVVAKSIPIPSICQRCELGKGRTILFG

SEQ ID NO: 109635 - protein, 75 aa, Setaria italica
  Transcript Sequence Number=SeqID_43661
IYVPCFLWEFFKDSDSPHPGRLSLKLRGIFMHDVHSTVFIQKKRITMMQLQKRSLQNADLHEPPPYNLMVHCTMS

SEQ ID NO: 109636 - protein, 61 aa, Setaria italica
  Transcript Sequence Number=SeqID_43662
TTTCDQQQKHNNTKRKLQHRHHTKRDQRRLKQKIRTPSQGHGFWPKNQGLIHTLRILIRIS

SEQ ID NO: 109637 - protein, 130 aa, Setaria italica
  misc_feature (25)..(25): Xaa can be any naturally occurring amino acid
  misc_feature (64)..(64): Xaa can be any naturally occurring amino acid
  Transcript Sequence Number=SeqID_43663
  Gene Ontology: Mol. function=RNA-directed DNA polymerase activity; Biological process=RNA-dependent DNA replication
  Homolog annotation: Hit_ID=Q9FW98; Match level="QueryCoverage=85%, HitCoverage=8%, E-value=2e-25, Identity=51%"; Hit description =Putative non-LTR retroelement reverse transcriptase
NSWTDRPLSRAGKDVLLKAVVQAIXQHMSCFQILTAICERTRKLIAEAWWGCEKSKEKDTLAFXEWLSSPKYLGGLGFRDLQLFNQAMLGHQGWRLNQNTATRILQIPLGRSEFEDFATWLHTKSGTYSV

SEQ ID NO: 109638 - protein, 303 aa, Setaria italica
  misc_feature (295)..(296): Xaa can be any naturally occurring amino acid
  misc_feature (303)..(303): Xaa can be any naturally occurring amino acid
  Transcript Sequence Number=SeqID_43664
  Gene Ontology: Mol. function=nucleic acid binding; Cellular component= cytoplasm; Biological process=multicellular organismal development
  Homolog annotation: Hit_ID=Q5Z5B2; Match level="QueryCoverage=98%, HitCoverage=29%, E-value=1e-139, Identity=82%"; Hit description =Protein argonaute 1D
  Pfam annotation: Domain name=DUF1785; Domain location=231-283; Score =110.7; E_value=4.9e-30; Accession=PF08699.2; Description=Domain of unknown function (DUF1785)
RGPAPSAIAPELRQAMETSHEPDNISSPEAGSPDLSPRASTVEVTDQLKDLSVQGESSVGQEIVQAFPVSHNSYKFPHRPGNGSIGTRCLVKANYFFAELPDKDLHQYDVSITPDVTSRIRSRSVMEELVKLHKMSYLGGRLPAYDGRKSLYTAGPLPFTSKEFHITLLEEDDGSGVERRQKTYKVVIKFAARADLRRLEQFIAGRQAEAPQEALQVLDIVLRELPTARYAPFGRSFFSPDLGRRRSLGEGIESWRGFYQSIRPTQMGLSLNIDMSATAFFEPLPCDRFCAQLLXXDIHSRPX

SEQ ID NO: 109639 - protein, 96 aa, Setaria italica
  misc_feature (84)..(84): Xaa can be any naturally occurring amino acid
  misc_feature (93)..(93): Xaa can be any naturally occurring amino acid
  Transcript Sequence Number=SeqID_43665
  Gene Ontology: Mol. function=transferase activity; Cellular component= chloroplast
  Homolog annotation: Hit_ID=Q6K7Q1; Match level="QueryCoverage=90%, HitCoverage=15%, E-value=1e-39, Identity=88%"; Hit description=UDP -glucoronosyl/UDP-glucosyl transferase family protein-like
  Pfam annotation: Domain name=PPR; Domain location=13-47; Score=31.2; E_value=4.2e-06; Accession=PF01535.12; Description=PPR repeat
  Pfam annotation: Domain name=PPR; Domain location=48-82; Score=41.4; E_value=3.7e-09; Accession=PF01535.12; Description=PPR repeat
  Pfam module annotation: Pfam domain module=PPR::PPR; Domain location =13-47::48-82
RKGTKGECPPGVATYNAILRKLCEDGNMKEVNQLLNEMDERKLQADHVTCNTLINAYCKRGDMASACKVKRKMMESGLQLNQFXYKALIHGFXKAK

SEQ ID NO: 109640 - protein, 49 aa, Setaria italica
  Transcript Sequence Number=SeqID_43666
DLNSCQQFSIYSSFCSWFILTFSKIVFTDFSFYLPRFLKLLKKEQVPSS

SEQ ID NO: 109641 - protein, 112 aa, Setaria italica
  misc_feature (23)..(23): Xaa can be any naturally occurring amino acid
  misc_feature (100)..(100): Xaa can be any naturally occurring amino acid
  Transcript Sequence Number=SeqID_43667
  Gene Ontology: Cellular component=chloroplast envelope
RENVMNIVDRLVHKTDICVACGXFFPYSMEQKIEQSTDVLKAILSPVMHEGDVKWPPRDPETVKLMEKEISRREQEGQLDEGFLSEVSAQLRQYIFTCYXAKQDGDKPGLQA

SEQ ID NO: 109642 - protein, 280 aa, Setaria italica
  misc_feature (71)..(71): Xaa can be any naturally occurring amino acid
  misc_feature (96)..(96): Xaa can be any naturally occurring amino acid
  Transcript Sequence Number=SeqID_43668
  Gene Ontology: Cellular component=chloroplast envelope
EDLEYKIVVENVLAFDAGFWVRLAARIDLCKSDDDKAWFYIWRQFCFLCMLFSSIAISLTLQLASLYCLFXKDYEELAENVMNIVDRLVHKTDQKXEQSTDLLKAILSPVMHEGDVKWPPRDPETVKLMEKEISRREQEGQLDEGFLSEVSAQLRQAKQDGDKPGLQAMLQKVLQLYASKSLQKRSYAYKGGQVVVPEKFLESIIQAPENEWNKVLLDGLTVGKGDVSPDDFYAVINKRIERVLIRTEGGSYQQRILVEYLKEIQARAEEVVKVLQGPTI

SEQ ID NO: 109643 - protein, 238 aa, Setaria italica
  misc_feature (113)..(113): Xaa can be any naturally occurring amino acid
  misc_feature (161)..(161): Xaa can be any naturally occurring amino acid
  Transcript Sequence Number=SeqID_43669
  Gene Ontology: Cellular component=chloroplast envelope
EEAWDANPRELDQIVVENVLAFDAGFWVRLAARIDICKSDDDKKDYEELAENVMNIVDRLVHKTDICQKIEQSTDVLKEIISPAIHEGDVKWPPRDPDTLKLMEKEISRREQXGQLDEGFLSEVSAQLRQAKQDGDKPGLQAMLQKVLQLYAATSLQKRSXAYKAHENEWNKVLLDGLTVGKGDVSPDELYAVICKRTERVLIRTEGGSYQQHVLVEFLKEIQARAKEVVKVLQGPTI

SEQ ID NO: 109644 - protein, 54 aa, Setaria italica
  Transcript Sequence Number=SeqID_43670
VHIFRCVHFLQHCSNIMISTYENSNSDTDTMIMAKLQRHNTSSAPFIENCISDT

SEQ ID NO: 109645 - protein, 224 aa, Setaria italica
  misc_feature (152)..(152): Xaa can be any naturally occurring amino acid
  Transcript Sequence Number=SeqID_43671
  Gene Ontology: Mol. function=nucleic acid binding
  Homolog annotation: Hit_ID=B9R8Y3; Match level="QueryCoverage=85%, HitCoverage=73%, E-value=3e-53, Identity=58%"; Hit description=RNA -binding region-containing protein, putative
  Pfam annotation: Domain name=RRM_1; Domain location=7-61; Score=5.5; E_value=0.061; Accession=PF00076.14; Description=RNA recognition motif. (a.k.a. RRM, RBD, o
SPVCLAYPLLRVSGEILEAVVITDKNTGRSKGYGFVTFRDPDAAMRACVDPAPVIDGRRANCNLASLGVQRSRPPTPQHGGTRSFRVMKSFSQQAGIQGGLGAAFPSHATFPHYAIPQGLPYHVYGYSPYTPDYSYPTNFYNIYGGAQYPFXYGGAAAGMVTGTSPFYPYFQFGQSGNTTTNYTSGQGYNLQYPQMFHFSTVSSKLLSKACYSCSCRGYSREVE

SEQ ID NO: 109646 - protein, 155 aa, Setaria italica
  Transcript Sequence Number=SeqID_43672
  Gene Ontology: Mol. function=nucleic acid binding
  Homolog annotation: Hit_ID=B9R8Y3; Match level="QueryCoverage=92%, HitCoverage=53%, E-value=4e-42, Identity=62%"; Hit description=RNA -binding region-containing protein, putative
  Pfam annotation: Domain name=RRM_1; Domain location=2-54; Score=14.1; E_value=0.0098; Accession=PF00076.14; Description=RNA recognition motif. (a.k.a. RRM, RBD, o
VTFEQFGEILEAVVITDKNTGRSKGYGFVTFRDPDAAMRACVDPAPVIDGRRANCNLASLGVQRSRPPTPQHGGTRSFRVMKSFSQQAGIQGGLGAAFPSHATFPHYAIPQGLPYHVYGYSPYTPDYSYPTNFYNMDKRDLFQSPCQLLLLHKMG

SEQ ID NO: 109647 - protein, 41 aa, Setaria italica
  misc_feature (27)..(27): Xaa can be any naturally occurring amino acid
  Transcript Sequence Number=SeqID_43673
TGMTMALTAPTLPTPTQAAHPYRLIPXSHFAVSAAPEQPLA

SEQ ID NO: 109648 - protein, 84 aa, Setaria italica
  Transcript Sequence Number=SeqID_43674
GEPVPLIRDRFRVVLMFVFSTWHYLPSFQTQYWVLQRRLWSSQALLCDSLTQWPIDKFLLSWVTHSCRCLLSLVVYLPIGFRFP

SEQ ID NO: 109649 - protein, 295 aa, Setaria italica
  Transcript Sequence Number=SeqID_43675
  Gene Ontology: Mol. function=nucleic acid binding
  Homolog annotation: Hit_ID=B9R8Y3; Match level="QueryCoverage=88%, HitCoverage=98%, E-value=4e-82, Identity=60%"; Hit description=RNA -binding region-containing protein, putative
  Pfam annotation: Domain name=RRM_1; Domain location=18-87; Score =68.8; E_value=2.1e-17; Accession=PF00076.14; Description=RNA recognition motif. (a.k.a. RRM, RBD, o
MSPPSVMGQFGDTTYTKVFVGGLAWETQKETMRKYFEQFGEILEAVVITDKNTGRSKGYGFVTFRDPDAAMRACVDPAPVIDGRRANCNLASLGVQRSRPPTPQHGGTRSFRVMKSFSQQAGIQGGLGAAFPSHATFPHYAIPQGLPYHVYGYSPYTPDYSYPTNFYNIYGGAQYPFYGGAAAGMVTGTSPFYPYFQFGQSGNTTTNYTSGQGYNLQYPQMFHFSTVSSTAAAVTGFAQQFGGPLSLAASPQAQAVCMTMALTAPTLPTPTQAAHPYRLIPSHFAVSAAPEQPLA

SEQ ID NO: 109650 - protein, 54 aa, Setaria italica
  Transcript Sequence Number=SeqID_43676
  Homolog annotation: Hit_ID=Q7XAD6; Match level="QueryCoverage=77%, HitCoverage=11%, E-value=1e-09, Identity=73%"; Hit description=Ap25
PTSSSPSSEAGATEMFPFPMTPSSWTWEQLEGVFGSLSPLSPHPQLGFPEVTVN

SEQ ID NO: 109651 - protein, 188 aa, Setaria italica
  Transcript Sequence Number=SeqID_43677
  Gene Ontology: Mol. function=hydrolase activity; Cellular component =nucleus; Biological process=metabolic process
  Homolog annotation: Hit_ID=Q53KT2; Match level="QueryCoverage=97%, HitCoverage=51%, E-value=4e-65, Identity=68%"; Hit description=PrMC3, putative, expressed
  Pfam annotation: Domain name=Abhydrolase_3; Domain location=1-166; Score=82.1; E_value=2e-21; Accession=PF07859.5; Description =alphabeta hydrolase fold
AALRFVGNHHHHDHQPPVDASRCFLAGDSAGGNIAHHVARRYALDPSAFPRVRLAGLIAIQPFFGGEERTPAELRLDGAPIVNVPRTDWMWRAFLPPGADRSHEACSPTAAVAGIKSAPAFPPVTVVVGGYDPLQDWQRRYCDALRREGKEVRVLEYPDAIHAFYVFPEFPDAKDLMLRIKEIVAGSE

SEQ ID NO: 109652 - protein, 60 aa, Setaria italica
  Transcript Sequence Number=SeqID_43678
PTQTCFEYKSFVVTTIRNLVLLLSADQMHIFRKHRNSWVFEHTRPSITELLRKVADECVL

SEQ ID NO: 109653 - protein, 65 aa, Setaria italica
  Transcript Sequence Number=SeqID_43679
PGPCLKHVPYPPSLLMYTDPLLNFFCSSILCYSLLYFVWTLLFRYFPPICIQTKLLFFVFNCEFS

SEQ ID NO: 109654 - protein, 59 aa, Setaria italica
  Transcript Sequence Number=SeqID_43680
STDRPHIYITRCSITASKPSTGLLISEHSNLTWHPAKFTGKPNCFTNSPIQDHKLCQII

SEQ ID NO: 109655 - protein, 187 aa, Setaria italica
  Transcript Sequence Number=SeqID_43681
  Homolog annotation: Hit_ID=Q5KS41; Match level="QueryCoverage=84%, HitCoverage=33%, E-value=5e-30, Identity=43%"; Hit description =FOLDED PETALS
TLVELGATGEADDEPLSPTAQFYSDLCIVAVVGLAAPIDIELARAGLEVTLVRHPRFCSIDVTDGPEHRWVRTPVNLDDHIIVPDLDPAAIAADPDKVLEDYVSFLSTLPMDKSRPLWELHILDFPTSEAASAAVFRINHALGDGTSLISLLLACTRSAADPKALPVMPSAMPPPARRKGRRRVYGA

SEQ ID NO: 109656 - protein, 45 aa, Setaria italica
  Transcript Sequence Number=SeqID_43682
  Gene Ontology: Mol. function=diacylglycerol kinase activity; Biological process=activation of protein kinase C activity
  Homolog annotation: Hit_ID=B6TDW8; Match level="QueryCoverage=100%, HitCoverage=12%, E-value=4e-17, Identity=91%"; Hit description=D -erythro-sphingosine kinase/ diacylglycerol kinase
PTADPVSGDLEVVILQDFKWYDFLLKLHRLYGGTHLSVNGVSSIR

SEQ ID NO: 109657 - protein, 118 aa, Setaria italica
  Transcript Sequence Number=SeqID_43683
NIIFKNHFFALLKITSEITNKTYTDEHISTYIAYYKTNKLTRCSLDKAELHCHVTCTWDLCKSYYIDPACGLLICVASKDYNKHQLVNNVLTTRPDHVFSKGCRLKHQCYTVSFEVFP

SEQ ID NO: 109658 - protein, 133 aa, Setaria italica
  Transcript Sequence Number=SeqID_43684
  Gene Ontology: Mol. function=phosphatase activity; Biological process= metabolic process
  Homolog annotation: Hit_ID=B6TXH8; Match level="QueryCoverage=100%, HitCoverage=48%, E-value=2e-53, Identity=79%"; Hit description =Phosphatase phospho1
  Pfam annotation: Domain name=Put_Phosphatase; Domain location=1-133; Score=93.0; E_value=1.1e-24; Accession=PF06888.4; Description =Putative Phosphatase
IHAAGRTLDDVAAALRAVPIDPRVPAAIRAACALGCDLRVLSDANAFFIDTVLDHHGLRGCFTEVNTNPSRVDADGRLRIGPYHAAPHGCGVGTCPPNMCKGQVLDRILREAAAGGGRKRVIYLGDGRGDYCP

SEQ ID NO: 109659 - protein, 317 aa, Setaria italica
  Transcript Sequence Number=SeqID_43685
IPKTKGGLFNGSWRSEMDLLLIDVATKACYKAGMYEQSPPWTEDPSISDFQLAAFRALLASFLSTHHERPLYLEEGLELFNRGKLETGTELAKFCSHALLALDARIHPRQLHPQYISKIVARDDLGFVSQPSHSVRKHRATDDLGDDCMYRLVSVAIEPVDPLTKDNAVENCTPVEFSGELSMQNDAQQTHIITGEHPPEITAYCLTEEVQAVKMTDGLYGNPSDFGTLGNSIPPDSFSFTPPDFYNPGDETSTKKCILSGDASSRQNVPNHASGTSTAASVCHSEWDSLDPLLDIGDANLDPGFFPDMVDVDPGSD

SEQ ID NO: 109660 - protein, 188 aa, Setaria italica
  Transcript Sequence Number=SeqID_43686
  Gene Ontology: Mol. function=protein serine/threonine kinase activity; Cellular component=chloroplast; Biological process=protein amino acid phosphorylation
  Homolog annotation: Hit_ID=B9RH93; Match level="QueryCoverage=94%, HitCoverage=20%, E-value=2e-50, Identity=52%"; Hit description =Kinase, putative
DPIPTLADDKADVPSPVYSTARVFKEEAVYSFPLAVPGWHFIRIYLFPLKGGDVDLASATFSVVTDDNVLLHSFTPENKPVLKEYLVNATENRLAVKFQPLTGSAAFVNAIEVVNAPDEIITDTALAIAPLGETSGLSHDAYQVLYRLNVGGPAIGPANDTLGRQWDPDTPYVQSKEAVKDVSVPTST

SEQ ID NO: 109661 - protein, 68 aa, Setaria italica
  Transcript Sequence Number=SeqID_43687
  Gene Ontology: Mol. function=protein disulfide oxidoreductase activity; Cellular component=chloroplast; Biological process =glycerol ether metabolic process
  Homolog annotation: Hit_ID=Q01JS0; Match level="QueryCoverage=94%, HitCoverage=36%, E-value=3e-25, Identity=82%"; Hit description =OSIGBa0160I14.3 protein
  Pfam annotation: Domain name=Thioredoxin; Domain location=1-64; Score= -9.0; E_value=0.0011; Accession=PF00085.12; Description=Thioredoxin
RIRQQEYDGRIKCYRLDADDYPQIATAYNIDRIPTVLLFKDGEKIHSITGTLPKAVYVKAIEKSISEQ

SEQ ID NO: 109662 - protein, 106 aa, Setaria italica
  Transcript Sequence Number=SeqID_43688
  Gene Ontology: Mol. function=inorganic diphosphatase activity; Cellular component=cytoplasm; Biological process=phosphate metabolic process
  Homolog annotation: Hit_ID=O48556; Match level="QueryCoverage=100%, HitCoverage=49%, E-value=5e-51, Identity=92%"; Hit description =Soluble inorganic pyrophosphatase
  Pfam annotation: Domain name=Pyrophosphatase; Domain location=53-106; Score=-70.6; E_value=0.026; Accession=PF00719.11; Description =Inorganic pyrophosphatase
MSEEDKTAAAAAEQPKRAPKLNERILSSLSRRSVAAHPWHDLEIGPGAPAVFNVVVEITKGSKVKYELDKKTGLIKVDRVLYSSVVYPHNYGFIPRTLCEDNDPME

SEQ ID NO: 109663 - protein, 150 aa, Setaria italica
  Transcript Sequence Number=SeqID_43689
  Subcellular localization annotation: CTP_CleavageSite=93; ConfidenceScore=5.78e-01
SSPRRRRGGDERARAPSSFPSPRPFRRPPSSAVRGPRVPPRLVQPARNAPPARPTAKGFVSRGGRHRRRPTPRRSWTGAGRGSVRAWIGFFPTCQLKPSHLAWLLGRIARALFRGIFPVLRDPRGINPRVFLLQFAQFVANSFSARRGYG

SEQ ID NO: 109664 - protein, 247 aa, Setaria italica
  Transcript Sequence Number=SeqID_43690
  Gene Ontology: Mol. function=inorganic diphosphatase activity; Cellular component=cytoplasm; Biological process=phosphate metabolic process
  Homolog annotation: Hit_ID=O48556; Match level="QueryCoverage=87%, HitCoverage=100%, E-value=1e-116, Identity=94%"; Hit description =Soluble inorganic pyrophosphatase
  Pfam annotation: Domain name=Pyrophosphatase; Domain location=85-239; Score=190.0; E_value=6.7e-54; Accession=PF00719.11; Description =Inorganic pyrophosphatase
MQNGPCIHTCASPSAPPAARSSSRSEDPVLRMSEEDKTAAAAAAEQPKRAPKLNERILSSLSRRSVAAHPWHDLEIGPGAPAVFNVVVEITKGSKVKYELDKKTGLIKVDRVLYSSVVYPHNYGFIPRTLCEDNDPMDVLVLMQEPVIPGSFLRARAIGLMPMIDQGEKDDKIIAVCADDPEYRHYNDISELSPHRLQEIKRFFEDYKKNENKEVAVDEFLPATTARDAIQYSMDLYAQYILQSLRQ

SEQ ID NO: 109665 - protein, 164 aa, Setaria italica
  Transcript Sequence Number=SeqID_43691
  Gene Ontology: Mol. function=ATP-dependent helicase activity; Cellular component=integral to membrane; Biological process=transport
  Homolog annotation: Hit_ID=B9RTJ5; Match level="QueryCoverage=85%, HitCoverage=66%, E-value=1e-61, Identity=78%"; Hit description =Coated vesicle membrane protein, putative
  Pfam annotation: Domain name=EMP24_GP25L; Domain location=1-155; Score=119.5; E_value=1.1e-32; Accession=PF01105.16; Description =emp24gp25Lp24 family
KRQAKVPFAVPLSAGYLLALPVTSPGGNTVHTLKGKSGEKFEFKAPRGGMYKFCFHNPYGAPETVSFYIHVGHIPNEHNLAKDEHLDPINVKIAELKEALESVTAEQKYLKAREARHRHTNESTRKRVMFYTMAEYLAFMAASALQVVYIRRLFSKTKIKTVKP

SEQ ID NO: 109666 - protein, 81 aa, Setaria italica
  Transcript Sequence Number=SeqID_43692
SIPHPSCYCHSLPSLNVSWIKETFLHFTKWKKKSICNLGIPLCPTVRELMLGSSQRATIYIAHGEANPNLPCVLLHLTKNA

SEQ ID NO: 109667 - protein, 115 aa, Setaria italica
  Transcript Sequence Number=SeqID_43693
  Gene Ontology: Mol. function=kinase activity; Biological process =protein amino acid phosphorylation
  Homolog annotation: Hit_ID=Q6EQG8; Match level="QueryCoverage=93%, HitCoverage=15%, E-value=4e-38, Identity=72%"; Hit description =Leucine-rich repeat family protein /protein kinase family protein -like
  Pfam annotation: Domain name=LRR_1; Domain location=48-70; Score=9.2; E_value=5.3; Accession=PF00560.25; Description=Leucine Rich Repeat
  Pfam annotation: Domain name=LRR_1; Domain location=72-94; Score =18.2; E_value=0.035; Accession=PF00560.25; Description=Leucine Rich Repeat
  Pfam annotation: Domain name=LRR_1; Domain location=96-115; Score =7.2; E_value=13; Accession=PF00560.25; Description=Leucine Rich Repeat
  Pfam module annotation: Pfam domain module=LRR_1::LRR_1::LRR_1; Domain location=48-70::72-94::96-115
LQILEIEGSLLDGPIPPSLSKLTNLHDLRISDLRGSGSSFPDLSRMPSLKKLILRNCSIGGSIPSYIGTWTTLKHLDLSFNRLSGQIPASFAYMGRVDYIYLSGNSLTGNITLVL

SEQ ID NO: 109668 - protein, 60 aa, Setaria italica
  Transcript Sequence Number=SeqID_43694
  Gene Ontology: Mol. function=protein dimerization activity; Cellular component=nucleus; Biological process=regulation of transcription, DNA-dependent
  Homolog annotation: Hit_ID=B6UI01; Match level="QueryCoverage=96%, HitCoverage=14%, E-value=1e-19, Identity=82%"; Hit description=ABA response element binding factor
TKDADLNHLKEENARLKAEEKTILLSKKKMLVEKMMEQARENINAKKGGRGLRRCGSAMW

SEQ ID NO: 109669 - protein, 50 aa, Setaria italica
  Transcript Sequence Number=SeqID_43695
RSLTTYYYIRCRSKGNAIFYQPYYCFLVPCIFVFMNLLSHLARSAGIYSS

SEQ ID NO: 109670 - protein, 133 aa, Setaria italica
  misc_feature (104)..(104): Xaa can be any naturally occurring amino acid
  Transcript Sequence Number=SeqID_43696
  Gene Ontology: Mol. function=protein serine/threonine kinase activity; Biological process=protein amino acid phosphorylation
  Homolog annotation: Hit_ID=Q5ZCI1; Match level="QueryCoverage=92%, HitCoverage=19%, E-value=2e-42, Identity=71%"; Hit description =Mitogen-activated protein kinase 10
YDARRLAMNSGYPPQQQIPQTYGYYQTPGKPACSEPLQAERYTLHQQAYACANSTTVSDVALDMRAPPFHHLSAGPKSDSSDRLTADTSLYTRSLNGITATAAXVAASAHRKNIEKEAGLKPWLDAGCQMPLG

SEQ ID NO: 109671 - protein, 122 aa, Setaria italica
  misc_feature (11)..(11): Xaa can be any naturally occurring amino acid
  misc_feature (33)..(33): Xaa can be any naturally occurring amino acid
  misc_feature (48)..(48): Xaa can be any naturally occurring amino acid
  misc_feature (86)..(86): Xaa can be any naturally occurring amino acid
  Transcript Sequence Number=SeqID_43697
  Gene Ontology: Mol. function=protein serine/threonine kinase activity; Biological process=protein amino acid phosphorylation
  Homolog annotation: Hit_ID=Q5ZCI1; Match level="QueryCoverage=77%, HitCoverage=15%, E-value=4e-38, Identity=81%"; Hit description =Mitogen-activated protein kinase 10
RKVVGPVMPYXNGNTKDHYDARRLAMNSGYPPXQQIPQTYGYYQTPGXPACSEPLQAERYTLHQQAYACANSTTVSDVALDMRAPXFHHLSAGPKSLLRVVVLEADLELDGLCELPVLLPGL

SEQ ID NO: 109672 - protein, 175 aa, Setaria italica
  misc_feature (102)..(102): Xaa can be any naturally occurring amino acid
  Transcript Sequence Number=SeqID_43698
  Gene Ontology: Mol. function=structural constituent of ribosome; Cellular component=ribonucleoprotein complex; Biological process =translation
  Homolog annotation: Hit_ID=B7F845; Match level="QueryCoverage=94%, HitCoverage=76%, E-value=1e-74, Identity=84%"; Hit description =Ribosomal protein L1
  Pfam annotation: Domain name=Ribosomal_L1; Domain location=1-168; Score=97.0; E_value=6.4e-26; Accession=PF00687.13; Description =Ribosomal protein L1pL10e family
TETVELQIGLKNYDPQKDKRFSGSVKLPHIPRPKMKVCMLGDAQHVEEAEKIGLDYMDVEALKKMNKNKKLVKKLAKKYHAFLASEAIIKQIPRLLGPGLNXGKFPTLVTHQESLESKVNETKATVKFQLKKVLCMGVAVGNLSMEEKQIQQNIQMSVNLTVAFVSFTFDSRDSW

SEQ ID NO: 109673 - protein, 103 aa, Setaria italica
  Transcript Sequence Number=SeqID_43699
  Gene Ontology: Mol. function=structural constituent of ribosome; Cellular component=ribonucleoprotein complex; Biological process =translation
  Homolog annotation: Hit_ID=B7F845; Match level="QueryCoverage=84%, HitCoverage=40%, E-value=2e-42, Identity=97%"; Hit description =Ribosomal protein L1
  Pfam annotation: Domain name=Ribosomal_L1; Domain location=3-99; Score=-85.5; E_value=0.00091; Accession=PF00687.13; Description =Ribosomal protein L1pL10e family
LAGVDYGYRSFCFHVITGKFPTLVTHQESLESKVNETKATVKFQLKKVLCMGVAVGNLSMEEKQIQQNIQMSVNFLVSLLKKNWQNVRCLYIKSTMGKPNRVF

SEQ ID NO: 109674 - protein, 216 aa, Setaria italica
  Transcript Sequence Number=SeqID_43700
  Gene Ontology: Mol. function=structural constituent of ribosome; Cellular component=ribonucleoprotein complex; Biological process =translation
  Homolog annotation: Hit_ID=B7F845; Match level="QueryCoverage=100%, HitCoverage=100%, E-value=1e-106, Identity=88%"; Hit description =Ribosomal protein L1
  Pfam annotation: Domain name=Ribosomal_L1; Domain location=8-212; Score=233.1; E_value=7.2e-67; Accession=PF00687.13; Description =Ribosomal protein L1pL10e family
MSKLQTEVLKDAISQVVSEAREKNRKFTETVELQIGLKNYDPQKDKRFSGSVKLPHIPRPKMKVCMLGDAQHVEEAEKIGLDYMDVEALKKMNKNKKLVKKLAKKYHAFLASEAIIKQIPRLLGPGLNKAGKFPTLVTHQESLESKVNETKATVKFQLKKVLCMGVAVGNLSMEEKQIQQNIQMSVNFLVSLLKKNWQNVRCLYIKSTMGKPNRVF

SEQ ID NO: 109675 - protein, 599 aa, Setaria italica
  misc_feature (110)..(110): Xaa can be any naturally occurring amino acid
  Transcript Sequence Number=SeqID_43701
  Gene Ontology: Mol. function=protein serine/threonine kinase activity; Cellular component=cytoplasm; Biological process=protein amino acid phosphorylation
  Homolog annotation: Hit_ID=Q5ZCI1; Match level="QueryCoverage=100%, HitCoverage=100%, E-value=0.0, Identity=70%"; Hit description =Mitogen-activated protein kinase 10
  Pfam annotation: Domain name=Pkinase; Domain location=25-316; Score =301.7; E_value=1.5e-87; Accession=PF00069.17; Description=Protein kinase domain
  Pfam annotation: Domain name=Pkinase_Tyr; Domain location=25-314; Score=11.6; E_value=1.7e-14; Accession=PF07714.9; Description =Protein tyrosine kinase
  Pfam module annotation: Pfam domain module=Pkinase::Pkinase_Tyr; Domain location=25-316::25-314
MQQEQRKKSSAEADFFTEYGDANRYKIQEVIGKGSYGVVCSAIDLHTRQRVAIKKIHNIFEHVSDAARILREIKLLRLLRHPDIVEIKHIMLPPSRKDFKDIYVVFELMXSDLHQVIKANDDLTKEHYQFFLYQLLRALKYIHTANVYHRDLKPKNILANSNCKLKICDFGLARVAFNDTPTTVFWTDYVATRWYRAPELCGSFFSKYTPAIDIWSIGCIFAEVLTGKPLFPGKNVVHQLDLMTDLLGTPSMDTISRVRNEKARRYLSSMRKKDPVPFSQKFPNADPLALKLLEKLLAFDPKDRPTAEEALRDPYFKGLARVEREPSCQPIKKVEFDFEHKRMSKEEIRELIFREILEYHPQLLNSYINGTERTTFLYPSAVDQFKKQFSHLEESGGNGTSVPTDRKHASLPRTTVVHSNPIPAKEQPLATSSRVRPVSDDSCKNPWEKERGPVNVPRASLPPQGLQAQAAGPGRVNGSVMNSGYPHQQIPQAYGYHQVPARLDSTNQSQAIGGYTMHSQANACANSKGTADVAVNMRAPPFHVPAGPKNNPLDRIASGTDIYTRSLNGIVAAAAASVGTGTGTHRNVGVVPSAMSRMY

SEQ ID NO: 109676 - protein, 74 aa, Setaria italica
  Transcript Sequence Number=SeqID_43702
SLFFCLLQAEIEMVAAGLEKNLQVAERVHLLTLFQSACTTGNIKTAAEALGLVSSFYDHDFLGTPKCVLHCRSH

SEQ ID NO: 109677 - protein, 438 aa, Setaria italica
  Transcript Sequence Number=SeqID_43703
  Subcellular localization annotation: CTP_CleavageSite=55; ConfidenceScore=5.89e-01
MASAVVAVPAMAAATTTAIFSPSLPSLLRSHLTCGHRAATTTTVTFSSRRFRDVNPSHKRSRGKATLAPATDEGFGVLEAELWRLRRRVELRLHRLAFEADEAYRDLRYAVRDVGGDRVVITFRRSSLRFAAGALLCSLAFAVAARALLWMVLRAWWRRGLGRGWWGGRGGGRAVVWRRDRSLGGKEVVVAVSSSSVAPAPTSHVQEPARVVRRREPQAKVPDWWPEVGVTIVEPRLEMEKRLANRLVRAIIDNRITGRDYRYDDAIQLRQLCKISGIKVSFDTENARNSFYRAAVNFVLDDCSRAAQDVGAVQVNGENPRDFLAGLATNIGLDKSHAATLVRASVAARTRTCFLQCWALEIQGKRQEALDELLKICGIHNMFPPEDNSAEIEMVAAGLEKNLQVAERVHLLTLFQSACTTGNIKTAAEALGLSLPDE

SEQ ID NO: 109678 - protein, 111 aa, Setaria italica
  Transcript Sequence Number=SeqID_43704
  Gene Ontology: Mol. function=translation elongation factor activity; Cellular component=nucleus; Biological process=transcription
  Homolog annotation: Hit_ID=Q2QX86; Match level="QueryCoverage=98%, HitCoverage=47%, E-value=4e-26, Identity=55%"; Hit description =Transcription elongation factor, putative, expressed
  Subcellular localization annotation: CTP_CleavageSite=49; ConfidenceScore=5.47e-01
MVAGDGDSPDKVQPKNHQSTKASDFKYSPSPQSHNGFSSERSIYQNSVESTMEKRRTSPAPAYHNTKPNNNSNYSTTSSSVLARTMREQKYTLMDPGKLDSARKRLSGKFT

SEQ ID NO: 109679 - protein, 68 aa, Setaria italica
  Transcript Sequence Number=SeqID_43705
  Gene Ontology: Mol. function=translation elongation factor activity; Cellular component=nucleus; Biological process=transcription
  Homolog annotation: Hit_ID=Q2QX86; Match level="QueryCoverage=86%, HitCoverage=25%, E-value=1e-10, Identity=50%"; Hit description =Transcription elongation factor, putative, expressed
RKWKEIVDDWVRLHNSAGDGGSSIISDGNSPDKVQPKNHQSTKASDFKYSPSPQSHSEFPYPAHKRFK

SEQ ID NO: 109680 - protein, 352 aa, Setaria italica
  Transcript Sequence Number=SeqID_43706
  Gene Ontology: Mol. function=translation elongation factor activity; Cellular component=nucleus; Biological process=transcription
  Homolog annotation: Hit_ID=Q53PV2; Match level="QueryCoverage=93%, HitCoverage=92%, E-value=2e-91, Identity=57%"; Hit description =Transcription elongation factor, putative, expressed
  Pfam annotation: Domain name=TFIIS; Domain location=107-193; Score =131.9; E_value=2e-36; Accession=PF08711.3; Description=Transcription factor S-II (TFIIS)
MTAAGMGSDGRLRRALAAFGGGGDVWDLVDAALTAAARDNPDELRARRDGIVERLYAGARCHNCDAGAPSPPQPRKAPEAAAAAEAVSPVSPDEEVDADGLGEDDDDAGVESKILAIRDFLEDPDQSEDEMVSLLQNLADMDITYKALQETDIGRHVNGLRKHPSGEVRQLVKLLVRKWKEIVDDWVRLHNSAGDGGSSIISDGDSPDKVQPKNHQSTKASDFKYSPSPQSHNGFSSERSIYQNSVESTMEKRRTSPAPAYHNTKPNNNSNYSTTSSSVLARTMREQKYTLMDPGKLDSARKRLQENYQEAQNAKKQRTIQVMDIHDIPKPKNRNTFIRKSSGGGGLPARHR

SEQ ID NO: 109681 - protein, 116 aa, Setaria italica
  Transcript Sequence Number=SeqID_43707
  Gene Ontology: Mol. function=protein methyltransferase activity; Biological process=protein amino acid methylation
  Homolog annotation: Hit_ID=B9SE56; Match level="QueryCoverage=99%, HitCoverage=33%, E-value=2e-37, Identity=57%"; Hit description=N6 -DNA-methyltransferase, putative
ARHVRDRRPFQYVVGNEHWRDLVVAVRDGVLIPRPETEAVVDMVRNVEGFADGWWADLGTGSGAIAVAVARELGPEGKVFAVDVSEVAIEVARLNVPRYGMQDKVEIRHGSWFEPL

SEQ ID NO: 109682 - protein, 93 aa, Setaria italica
  Transcript Sequence Number=SeqID_43708
TYYNLGRREYKIIIHSRLLGVLDLTCIYISFNNLGCHASKYARLYVTPRTYPYSSFSQKGNLPADHQDKLPGRTQPPLSLEPQKNWQPQSSCQ

SEQ ID NO: 109683 - protein, 98 aa, Setaria italica
  Transcript Sequence Number=SeqID_43709
LSTKRQDGIYNRINITWTMDTAVTKLQLQSAQRPDDHIKVAHDQMENSYKMLVSQITKHQPFGFMVIGSQPMQMTSGVLTDHSSKIKEHSYLKRPRDR

SEQ ID NO: 109684 - protein, 137 aa, Setaria italica
  Transcript Sequence Number=SeqID_43710
NSHSSLQEAHGAKTVRHPLADLGVDDSGKMLRNGQFSVSAALMLEVHPGEQQGLRIANRVISHELTIPRCPSCYNSSETRQLAGCQAEAQDQQKQHLPFVMPNSQVLCPAANKGTYQKASELHIDCTSKGSCSICFL

SEQ ID NO: 109685 - protein, 146 aa, Setaria italica
  Transcript Sequence Number=SeqID_43711
  Gene Ontology: Mol. function=protein kinase activity; Biological process=protein amino acid phosphorylation
  Homolog annotation: Hit_ID=B6SMM4; Match level="QueryCoverage=99%, HitCoverage=35%, E-value=5e-48, Identity=74%"; Hit description =Protein kinase APK1B
AAVIVSDPGLRARLTHFGAVELADPAAAREAGESPYAAPDSGEPSREADVYAFGVLLLELLSGEEPARYRFDRGTKEFQRVSVLETAAAAAAGGSVRNWVDRRLGDSFPIAAAERLVEVALRCAAAEDRPDMTWVAGKISKVYLES

SEQ ID NO: 109686 - protein, 70 aa, Setaria italica
  Transcript Sequence Number=SeqID_43712
IKHESYDQRRPNDVLVRLGEFELKGVHFFCERRLELPWKVMHLLPASPSGKIISHVALQCKLQQCYYLVR

SEQ ID NO: 109687 - protein, 245 aa, Setaria italica
  misc_feature (18)..(18): Xaa can be any naturally occurring amino acid
  misc_feature (188)..(188): Xaa can be any naturally occurring amino acid
  misc_feature (236)..(236): Xaa can be any naturally occurring amino acid
  Transcript Sequence Number=SeqID_43713
  Gene Ontology: Mol. function=pseudouridine synthase activity; Biological process=pseudouridine synthesis
  Homolog annotation: Hit_ID=Q10LQ9; Match level="QueryCoverage=91%, HitCoverage=60%, E-value=2e-96, Identity=76%"; Hit description=TRNA pseudouridine synthase family protein, expressed
GACLPLKSMSSETGMEEXSSEDNTPSDHDEDLNISSMIDSGVEDNCLNDVAKHFGNQVQIQARWLYEPDESDRLNASHFRDIITCSCGELQSSSGIQFVELTICGVSFMLHQIRKMVGTAVAVKRGLLPKDIIELSLAKFSRIVLPIAPSEVLILRDNSFCTKNKEGRLVRPGIESMNKSAEVRKGVXEFYKAALLPELAKFLDPSMPPWKEWVENLDQFATIPDSQLDEVREALXIWKADYDRV

SEQ ID NO: 109688 - protein, 270 aa, Setaria italica
  misc_feature (32)..(32): Xaa can be any naturally occurring amino acid
  Transcript Sequence Number=SeqID_43714
  Gene Ontology: Mol. function=metal ion binding; Cellular component =plasma membrane
  Homolog annotation: Hit_ID=B6SXK5; Match level="QueryCoverage=97%, HitCoverage=37%, E-value=1e-103, Identity=73%"; Hit description =Protein binding protein
  Pfam annotation: Domain name=VWA; Domain location=1-142; Score=-7.0; E_value=0.021; Accession=PF00092.20; Description=von Willebrand factor type A domain
FSSTAQRLFPLRRMSHHGRQQALQAINLLGAXGGGTNIADALKKAVKVIEDRSYKNSVCSIILLSDGQDTYSISSNFQGTSAGRRSLVPSSILNEHHLVPLHAFGFGADHDSDTLHSIAEASGGTFSFIEDEGVMQDAFAQCIGGLLSVSAQEMHLSMECVDPGVQLRSIKCGSYPSKVARDERNGSVDIGQLYADEERDILLSVTIPKSSEQTSLLRVACAYKDPVTNETIKIQGDEVKIKRPTSTVSEQMSIEVDRERNRIQAASSIE

SEQ ID NO: 109689 - protein, 190 aa, Setaria italica
  misc_feature (10)..(10): Xaa can be any naturally occurring amino acid
  misc_feature (178)..(178): Xaa can be any naturally occurring amino acid
  Transcript Sequence Number=SeqID_43715
  Gene Ontology: Mol. function=transcription elongation regulator activity; Cellular component=intracellular; Biological process =positive regulation of RNA elongation from RNA polymerase II promoter
  Homolog annotation: Hit_ID=B9SJK4; Match level="QueryCoverage=100%, HitCoverage=19%, E-value=2e-50, Identity=52%"; Hit description =Suppressor of ty, putative
MSPPRDSWEXGDRSTWASSPAYQPGTPRARPYEAPTPGSGWANGWGDASGNAQSTYAPSTPVVQPMTPVPAASYLPGTPGGQPMTPGDAGMDLMSPVIGGEAEGTWLLPDVLVNVSRGGDEVTDGVVKEVFPDGSCRVALGSQGNGDELIASANELEVVRPKKNRKLKIMNGSMRGVXGKLIGVDGSDGI

SEQ ID NO: 109690 - protein, 86 aa, Setaria italica
  Transcript Sequence Number=SeqID_43716
  Subcellular localization annotation: CTP_CleavageSite=53; ConfidenceScore=5.37e-01
MALLRLQEQCSLLRISSSHHPNPFKPPRNPRRTQLLPPNAAKNATPSEIPVPRAPAAAPKTAIPARKAAPWREALVPVAAAVASWP

SEQ ID NO: 109691 - protein, 90 aa, Setaria italica
  Transcript Sequence Number=SeqID_43717
RRRRGGGIGQRHADRAGDTNREEREENNGKELQCASPRARSANTARRGGLSAKSAGDFGAEDLGISLPGGGRLGDGRLWVACLPLPFLFR

SEQ ID NO: 109692 - protein, 189 aa, Setaria italica
  Transcript Sequence Number=SeqID_43718
  Gene Ontology: Mol. function=protein dimerization activity; Cellular component=nucleus; Biological process=regulation of transcription, DNA-dependent
  Homolog annotation: Hit_ID=Q5IRE8; Match level="QueryCoverage=67%, HitCoverage=62%, E-value=2e-38, Identity=67%"; Hit description=ABRE -binding factor Embp-2 (Fragment)
  Pfam annotation: Domain name=bZIP_1; Domain location=155-189; Score =16.0; E_value=0.0073; Accession=PF00170.13; Description=bZIP transcription factor
MQGVPYTAGEPVAAAEGKNKRKSSGAPSVGSASGSSDAGREESSDKRDASADLKLLPSAKRRKSSSANVQGEPSQAATTQDAAAETQSASKRRSAAKLSVSTPETAAISETRPNLNIGMDLWSNSPVKAETSGQGEINAAASSQHDITLSQMQDERELKRERRKQSNRESARRSRLRKQQECEELAQKV

SEQ ID NO: 109693 - protein, 101 aa, Setaria italica
  Transcript Sequence Number=SeqID_43719
AEEDVEAEHEGEEHRRHGRQHRRRRRDRRGRHRHRRSIDRPTNQPHGLPCLPSPSSALASKNLELCSSLTRAGSSAAGVPVSPAAAAAGSSASLPRGSLMA

SEQ ID NO: 109694 - protein, 55 aa, Setaria italica
  Transcript Sequence Number=SeqID_43720
INLAFVTQACVDLDTDKDTRFFREEDPIDHVLPHRCLADCCRHYSHQMVQHAQPI

SEQ ID NO: 109695 - protein, 87 aa, Setaria italica
  Transcript Sequence Number=SeqID_43721
  Gene Ontology: Mol. function=transferase activity, transferring glycosyl groups; Cellular component=integral to Golgi membrane; Biological process=protein amino acid glycosylation
  Homolog annotation: Hit_ID=Q4JEY4; Match level="QueryCoverage=74%, HitCoverage=14%, E-value=1e-21, Identity=76%"; Hit description =Sialyltransferase-like protein
TLFLLCLNVDCINWKLSIVLCCRRPGAGRDGPLGTCTMIKKREKGKAPNRSGLRDAAVKHLEYMKGVTRYPLERRDGGGYLCMINDR

SEQ ID NO: 109696 - protein, 44 aa, Setaria italica
  Transcript Sequence Number=SeqID_43722
SLRLFSDLKLAVPSYSEIGLLRNASEFLMVQISSAFSFRDRSDG

SEQ ID NO: 109697 - protein, 97 aa, Setaria italica
  Transcript Sequence Number=SeqID_43723
  Gene Ontology: Mol. function=nucleic acid binding
  Homolog annotation: Hit_ID=Q5F1W8; Match level="QueryCoverage=98%, HitCoverage=14%, E-value=8e-20, Identity=55%"; Hit description =Putative nuclear protein
LDHLDYQGGGMPQHESPTLDDGLLVDPADAIPYLSGDSLPFMNDQITCNVMKSASTSPESSLKQVQEPLKAGSDVQNDASEQNVHNSNSKEQATSVD

SEQ ID NO: 109698 - protein, 262 aa, Setaria italica
  misc_feature (68)..(68): Xaa can be any naturally occurring amino acid
  Transcript Sequence Number=SeqID_43724
  Gene Ontology: Mol. function=nucleic acid binding
  Homolog annotation: Hit_ID=Q5F1W8; Match level="QueryCoverage=96%, HitCoverage=36%, E-value=2e-70, Identity=57%"; Hit description =Putative nuclear protein
MEYISPERNLEGTCGDPGPLFGDQDGSLLDHLDYQGGGMPQHESPTLDDGLLVDPADGIASAGSTKVXSSSVGDSLPFMNDQITCNVMKSASTSPESSLKQVQEPLKAGSDVQNDASEQNVHNSNSKEQATSVDCDVHQNTEVIGAVLPPELPESSGNDASNFQPEIMYSDAYHGDSLLTENSNKDCQLNNSSADDDELPNSPALQMENEDMEKLQETSHNEKSGSEDDQMNGRKSSPIDGKDKENFNTSVEPPSWEQRTKK

SEQ ID NO: 109699 - protein, 450 aa, Setaria italica
  Transcript Sequence Number=SeqID_43725
  Gene Ontology: Mol. function=nucleic acid binding; Cellular component= ribonucleoprotein complex
  Homolog annotation: Hit_ID=Q5JJM4; Match level="QueryCoverage=100%, HitCoverage=76%, E-value=5e-47, Identity=63%"; Hit description =Peptidylprolyl cis-trans isomerase-like protein
  Pfam annotation: Domain name=RRM_1; Domain location=371-441; Score =81.5; E_value=3.1e-21; Accession=PF00076.14; Description=RNA recognition motif. (a.k.a. RRM, RBD, o
NSLLTENSNKDCQLNNSSADDDELPNSPALQMENEDMEKLQETSHNEKSGSEDDQMNGRKSSPIDGKDKENFNTSVEPPSWEQTEQENPGTRNGSSTPDNRFDSPPDRFARLERDTPSPDGRVSPDRFARLERDTPSPDGRVSPPVGSPHTHHSEKMESQRHAKDVGHSESPPARRRSGSSEKHDPSRKRPSSREMSPHAQNHSPVERKRRRESRHGDGSPRRRSASPRRRSTPPRRRSISPRRSSHKRRESPRRGDSPRRRHSPRRRESPRKRESPRRRDSPKRRRDSPRRRDRSRSRSPSRRHDRHRREHDRSRSRSPHRRDHHRRSPRRHSPRRRSPSSSHRHNSPRRHHWSPPANRKTGLGKPGKNLFIAGFSYATTERDLEKKFCKFGRVTSARVVRDKRTGDSRGFGFLSLEKDEDADAAIRACDETEWNGRIILVEKSKAPAW

SEQ ID NO: 109700 - protein, 325 aa, Setaria italica
  Transcript Sequence Number=SeqID_43726
SAYEYTSMKSLNEAKYGFWGALARKAKSLLDEDGSPGQHESPAGQQSLRDGASVGVQHPRSQQLPGETWKSETPPSQKRSEAITSSLNYIGGTIKNALEEGRTIVENKTADIIQETRKLNVRRKGTVSNTQGEAGHKLTQRYLPQNPLDHETQLKASRDVANAMAAKAKLLLRELKTVKADLAFAKERCAQLEEENKMLRESYDKGDNPEDDDLIRLQLETLLAEKARLAHENSVYARENRFLREIVEYHQLTMQDVIYVDEGIEEVTEVYPTQVLPRTGSSVGRASTPATPKPAPSSTSIVVPESCPVVPASPKSLLRASSLSN

SEQ ID NO: 109701 - protein, 179 aa, Setaria italica
  misc_feature (20)..(20): Xaa can be any naturally occurring amino acid
  misc_feature (63)..(63): Xaa can be any naturally occurring amino acid
  Transcript Sequence Number=SeqID_43727
  Gene Ontology: Mol. function=single-stranded DNA binding; Cellular component=nucleus; Biological process=nucleotide-excision repair
  Homolog annotation: Hit_ID=B9RUC5; Match level="QueryCoverage=64%, HitCoverage=7%, E-value=2e-40, Identity=70%"; Hit description=DNA -repair protein UVH3, putative
DTNNSEGTIASINQEKMDEXEETGFTGEGKHFTSVPLQEGAEIDDDDDDDDEGMIIPMTKGNXDPAVLASLPPSMQLDLLVQMRERVMAENRQKYQTIKKEPAKIFRASKYSPISKTVAFRREIDQVQKCSAGKGVGGVQTSKIASEANREFIFSTSFTGDKQMLTQRGEKEQIVIMLN

SEQ ID NO: 109702 - protein, 77 aa, Setaria italica
  Transcript Sequence Number=SeqID_43728
MGFMLRVRLASFFAGAAAAAAGGGYFLYKDYKLAHDSMALKVKGLQDSTDARYKALEKRLAALEGQQSTGAAPDSSD

SEQ ID NO: 109703 - protein, 322 aa, Setaria italica
  misc_feature (193)..(193): Xaa can be any naturally occurring amino acid
  Transcript Sequence Number=SeqID_43729
  Homolog annotation: Hit_ID=B4FYC0; Match level="QueryCoverage=100%, HitCoverage=98%, E-value=1e-165, Identity=86%"; Hit description=GAGA- binding transcriptional activator
  Pfam annotation: Domain name=DUF1004; Domain location=1-322; Score =635.8; E_value=4.2e-188; Accession=PF06217.4; Description=Protein of unknown function (DUF1004)
RENGRQRPDQYKAVHTQWMMPQLKDHHSMNLLALMNEKDSAIRERDHALAEKKAAIAERDMAFAQRDAAMAERNAAIVERDNALAALELARTNGFNMNNGNGFHQVPPLNGTKNIHNHDQLSHVQTSPLQLADSPYDHTREMHISEAYPIATAPSSIGKGKKPRKNSSQASPLKRPSGVLRKTKKVAGDWKNXGMSGGGEDSARASVMKNEWKDQDLGLNQVPFDESTMPAPACSCTGELRQCYKWGNGGWQSSCCTMSMSMYPLPVMPNRRHARMGGRKMSGSAFTKLLSRLAAEGHDLSTPVDLKDHWAKHGTNRYITIR

SEQ ID NO: 109704 - protein, 205 aa, Setaria italica
  Transcript Sequence Number=SeqID_43730
  Gene Ontology: Mol. function=protein serine/threonine kinase activity; Biological process=protein amino acid phosphorylation
  Homolog annotation: Hit_ID=Q2R440; Match level="QueryCoverage=77%, HitCoverage=15%, E-value=6e-37, Identity=52%"; Hit description =Leucine Rich Repeat family protein
  Pfam annotation: Domain name=LRRNT_2; Domain location=45-82; Score =43.1; E_value=1.1e-09; Accession=PF08263.4; Description=Leucine rich repeat N-terminal domain
  Pfam annotation: Domain name=LRR_1; Domain location=112-134; Score =11.3; E_value=2; Accession=PF00560.25; Description=Leucine Rich Repeat
  Pfam annotation: Domain name=LRR_1; Domain location=136-158; Score =8.9; E_value=5.9; Accession=PF00560.25; Description=Leucine Rich Repeat
  Pfam annotation: Domain name=LRR_1; Domain location=160-182; Score =12.6; E_value=1.2; Accession=PF00560.25; Description=Leucine Rich Repeat
  Pfam annotation: Domain name=LRR_1; Domain location=184-203; Score =9.8; E_value=4; Accession=PF00560.25; Description=Leucine Rich Repeat
  Pfam annotation: Domain name=LRR_1; Domain location=88-110; Score =7.4; E_value=12; Accession=PF00560.25; Description=Leucine Rich Repeat
  Pfam module annotation: Pfam domain module=LRRNT_2::LRR_1::LRR_1::LRR_ 1::LRR_1::LRR_1; Domain location=45-82::112-134::136-158::160 -182::184-203::88-110
ASVPRTCHECFNSMKSAAPMPHVLLLILFWTSCSSAQPSAPKSNEGTDRDCLLAIKGSYRSGVLASWNATDDFCQWPGVICSHRHKQRVLELNLSSAGLVGTINPSFNNLTFLASLDLSSNALHGGIPSSLGRLRWLRYLNLYNNSLQGDITAELQNCTSLASINLAFNQLSGVLPVWLGGLSKLTSVYMGHNNFTGIIPPSLAN

SEQ ID NO: 109705 - protein, 130 aa, Setaria italica
  Transcript Sequence Number=SeqID_43731
  Gene Ontology: Mol. function=racemase and epimerase activity, acting on carbohydrates and derivatives; Biological process=carbohydrate metabolic process
  Homolog annotation: Hit_ID=Q6B6L8; Match level="QueryCoverage=80%, HitCoverage=27%, E-value=1e-56, Identity=99%"; Hit description=UDP-D- glucuronate decarboxylase
  Pfam annotation: Domain name=Epimerase; Domain location=1-125; Score=- 60.3; E_value=0.013; Accession=PF01370.13; Description=NAD dependent epimerasedehydratase family
LLRWHKTNVVGTLNMLGLAKRIGARFLLTSTSEVYGDPLQHPQVETYWGNVNPIGVRSCYDEGKRTAETLTMDYHRGANLEVRIARIFNTYGPRMCIDDGRVVSNFVAQVATSCSHLFWHLDAYALYFFN

SEQ ID NO: 109706 - protein, 110 aa, Setaria italica
  Transcript Sequence Number=SeqID_43732
  Gene Ontology: Mol. function=racemase and epimerase activity, acting on carbohydrates and derivatives; Biological process=carbohydrate metabolic process
  Homolog annotation: Hit_ID=Q8W2F7; Match level="QueryCoverage=72%, HitCoverage=34%, E-value=4e-38, Identity=93%"; Hit description=DTDP -glucose 4-6-dehydratase-like protein (Fragment)
TRIAQVERTNVLPFHQLHQPFHLGNPGEFTMLELAKVVQDTIDKEARIEFRPNTADDPHKRKPDISRAKELLGWEPKVPLHEGLPLMVTDFRKRIFGDQGEFTEAAGGLS

SEQ ID NO: 109707 - protein, 116 aa, Setaria italica
  misc_feature (38)..(38): Xaa can be any naturally occurring amino acid
  Transcript Sequence Number=SeqID_43733
  Gene Ontology: Mol. function=catalytic activity; Biological process =cellular metabolic process
  Homolog annotation: Hit_ID=Q6B6L8; Match level="QueryCoverage=98%, HitCoverage=29%, E-value=2e-54, Identity=90%"; Hit description=UDP-D- glucuronate decarboxylase
WHKTNVVGTLNMLGLAKRINARFLLTSTSEVYGDPLQXHPQVETYWGNVNPTGVRSCYDEGKRTAETLTMDYHRGANLEVRIARIFNTYGPRMCIDDGRVVSNFVAQVIQELLLLY

SEQ ID NO: 109708 - protein, 191 aa, Setaria italica
  Transcript Sequence Number=SeqID_43734
  Gene Ontology: Mol. function=catalytic activity; Biological process =cellular metabolic process
  Homolog annotation: Hit_ID=Q6B6L9; Match level="QueryCoverage=87%, HitCoverage=40%, E-value=1e-53, Identity=66%"; Hit description=UDP-D- glucuronate decarboxylase (Fragment)
KPLAWLPRAARYAAAEHRPVFALAGMLIAAAVITIASPSTSSSTGAAVASYSSSNSHHNSNPLARFSVEPAHHRDLASTRHFVGGKVPLGLKRKALRVLVTGGAGFVGSHLVDRLLERGDSVIVVDNLFTGRKDNVVHHFGNPNFEMIRHDVVEPILLEVDQIYHLACPASPVHYKYNPIKTIISLLSCFL

SEQ ID NO: 109709 - protein, 378 aa, Setaria italica
  misc_feature (17)..(17): Xaa can be any naturally occurring amino acid
  Transcript Sequence Number=SeqID_43735
  Gene Ontology: Mol. function=catalytic activity; Biological process =cellular metabolic process
  Homolog annotation: Hit_ID=Q6B6L9; Match level="QueryCoverage=89%, HitCoverage=84%, E-value=1e-173, Identity=87%"; Hit description=UDP -D-glucuronate decarboxylase (Fragment)
  Pfam annotation: Domain name=3Beta_HSD; Domain location=60-319; Score= -74.6; E_value=2.2e-05; Accession=PF01073.11; Description=3-beta hydroxysteroid dehydrogenaseisomerase family
  Pfam annotation: Domain name=Epimerase; Domain location=59-292; Score= 187.3; E_value=4.2e-53; Accession=PF01370.13; Description=NAD dependent epimerasedehydratase family
  Pfam annotation: Domain name=NAD_binding_4; Domain location=61-274; Score=-26.8; E_value=1.8e-07; Accession=PF07993.4; Description=Male sterility protein
  Pfam annotation: Domain name=Polysacc_synt_2; Domain location=59-338; Score=-153.8; E_value=0.00038; Accession=PF02719.7; Description =Polysaccharide biosynthesis protein
  Pfam annotation: Domain name=RmlD_sub_bind; Domain location=57-361; Score=-127.8; E_value=3.6e-05; Accession=PF04321.9; Description=RmlD substrate binding domain
  Pfam module annotation: Pfam domain module=3Beta_HSD::Epimerase::NAD _binding_4::Polysacc_synt_2::RmlD_sub_bind; Domain location=60 -319::59-292::61-274::59-338::57-361
  Subcellular localization annotation: CTP_CleavageSite=68; ConfidenceScore=5.68e-01
MLFAAALFTFSSSTTSXLVPSYPAASAGFNHLAVAGHPSFRESVGGKVPLGLRRRALRVLVTGGAGFVGSHLVDRLVERGDSVIVVDNFFTGRKGNVAHHLQNPRFEVIRHDVVEPILLEVDQIYHLACPASPVHYKYNPIKTIKTNVVGTLNMLGLAKRINARFLLTSTSEVYGDPLQHPQVETYWGNVNPIGVRSCYDEGKRTAETLTMDYHRGANLEVRIARIFNTYGPRMCIDDGRVVSNFVAQALRKEPLTVYGDGKQTRSFQYVSDLVEGLMKLMEGEHIGPFNLGNPGEFTMLELAKVVQDTIDPNARIEFRQNTQDDPHKRKPDISRAKELLGWEPKIPLREGLPLMVTDFRKRIFGDQDSAATTGNQQG

SEQ ID NO: 109710 - protein, 110 aa, Setaria italica
  Transcript Sequence Number=SeqID_43736
VTRANFSSRIHSHSNLTGVWNSGCLCTPKQDRITETNGTARCYTLFLGYQIHNIPSKSRIQTHQFLAAPTQKHRHFRHHTGTLSVRGRFSQLQEAVHDLQLAVELHLLLH

SEQ ID NO: 109711 - protein, 107 aa, Setaria italica
  misc_feature (40)..(40): Xaa can be any naturally occurring amino acid
  misc_feature (86)..(86): Xaa can be any naturally occurring amino acid
  Transcript Sequence Number=SeqID_43737
  Gene Ontology: Mol. function=2-amino-4-hydroxy-6-hydroxymethyldihydrop teridine diphosphokinase activity; Cellular component=mitochondrion; Biological process=folic acid and derivative biosynthetic process
  Homolog annotation: Hit_ID=A4UIY8; Match level="QueryCoverage=93%, HitCoverage=18%, E-value=5e-37, Identity=76%"; Hit description =HPPK/DHPS
MQSEKNLQYDDVCKEVASELYTQVREAELSGVPLWRIVLXPGIGFSKKCGHNNEIIKGLKSIRSEIGKMSIGASHVPILLGPSRKXSFLREICNHSNLVDLGPVTIS

SEQ ID NO: 109712 - protein, 73 aa, Setaria italica
  Transcript Sequence Number=SeqID_43738
LLCCSMGFSYYIISGVSCCNKPEMMFFLYDLLSKFFNEACVRLRSFGKESRGMEIKVNKKTRLSKFNKNYLDP

SEQ ID NO: 109713 - protein, 235 aa, Setaria italica
  Transcript Sequence Number=SeqID_43739
  Gene Ontology: Mol. function=2-amino-4-hydroxy-6-hydroxymethyldihydrop teridine diphosphokinase activity; Cellular component=mitochondrion; Biological process=folic acid and derivative biosynthetic process
  Homolog annotation: Hit_ID=A4UIY8; Match level="QueryCoverage=95%, HitCoverage=42%, E-value=1e-99, Identity=81%"; Hit description =HPPK/DHPS
  Pfam annotation: Domain name=Pterin_bind; Domain location=1-182; Score=177.5; E_value=3.9e-50; Accession=PF00809.14; Description =Pterin binding enzyme
QGPFAKRLSPREELERLIPVLDEITKIPEMEGKLLSVDTFYAEVASEAVKRGVHMINDVSGGQLDPRILKVAAELGVPYVAMHMRGDPSTMQSEQNLHYDDVCKEVASELYTQVREAELSGIPLWRIVLDPGIGFSKKSKHNLEVIMGLESIRKEMGSMSIGASHVPILLGPSRKRFLGEICNRANPVERDVATVAAVTAGILNGANIVRVHNAGYGADAAKVCDALHKGRRWEE

SEQ ID NO: 109714 - protein, 114 aa, Setaria italica
  misc_feature (21)..(21): Xaa can be any naturally occurring amino acid
  Transcript Sequence Number=SeqID_43740
  Gene Ontology: Mol. function=aspartic-type endopeptidase activity; Biological process=proteolysis
  Homolog annotation: Hit_ID=Q2L3E7; Match level="QueryCoverage=100%, HitCoverage=25%, E-value=1e-24, Identity=54%"; Hit description =Chloroplast nucleoid binding protein
FAALWSAFARLMMGRYRRAPXLSFLDTCYNFTGHDTLRVPSVALVFAGGATVNLDVSGVLVKLGSDEPGVACLGFTSTGDDKPVGILGNTQQKTFAVVYDVVNRRIGFGAKGCA

SEQ ID NO: 109715 - protein, 276 aa, Setaria italica
  misc_feature (31)..(31): Xaa can be any naturally occurring amino acid
  misc_feature (94)..(94): Xaa can be any naturally occurring amino acid
  misc_feature (221)..(221): Xaa can be any naturally occurring amino acid
  misc_feature (246)..(246): Xaa can be any naturally occurring amino acid
  misc_feature (249)..(249): Xaa can be any naturally occurring amino acid
  Transcript Sequence Number=SeqID_43741
  Gene Ontology: Mol. function=zinc ion binding; Cellular component =intracellular; Biological process=regulation of transcription, DNA -dependent
  Homolog annotation: Hit_ID=Q0ZQJ9; Match level="QueryCoverage=92%, HitCoverage=44%, E-value=5e-45, Identity=42%"; Hit description=EMF2
  Pfam annotation: Domain name=VEFS-Box; Domain location=222-276; Score= -41.4; E_value=0.093; Accession=PF09733.1; Description=VEFS-Box of polycomb protein
  Subcellular localization annotation: CTP_CleavageSite=46; ConfidenceScore=5.31e-01
VSFALSITMSPGFVESNFSSRTVSCTIFVSXKLNSVCPYQLHVSVCAQEAGARDMFKSLYNSYLYNDVPPSSLPHIIRVCNVTYSHRMTSSTLXFLISKKEQVVNVSLKHNTWTNEDFPAGVDPRQRTFSFFSKYKKRRRIVTMTEGIITSKVTEAIVPSKATEVILPSKAIETIVPSKAAETIWHGYLIGTSVSDTSVDPAYSVHGSHLSPPRVLQFWKXPRRLSVDQLDPRNQLLLQKRQFFHXHKXQQMALEEVLSDHDSEDEVDDDVADFED

SEQ ID NO: 109716 - protein, 90 aa, Setaria italica
  Transcript Sequence Number=SeqID_43742
  Gene Ontology: Mol. function=zinc ion binding; Cellular component =intracellular; Biological process=regulation of transcription, DNA -dependent
  Homolog annotation: Hit_ID=Q1W6L0; Match level="QueryCoverage=84%, HitCoverage=11%, E-value=1e-14, Identity=48%"; Hit description =Embryonic flower 2
TFPLTLHSYNIFLYSFIEPILPVTEDFCCSFCLVKCGSFTGLQCHLLSSHDQFNFGFLISKKEQVVNVSLKHNTWTNEVRRFKCMLLSSY

SEQ ID NO: 109717 - protein, 138 aa, Setaria italica
  Transcript Sequence Number=SeqID_43743
  Subcellular localization annotation: CTP_CleavageSite=82; ConfidenceScore=5.18e-01
EIYHSVTFFINPTSSPLFPVHLLHLWRKRCAQVVGGSPQAAVPQPTQPMARPYISSTLPHSCTTVWLGRRPPLCPRINPLLRPQLGSATAPKLASSHGCPSLATPKSAVSQLCPVTPLPVRLKYIMAPAEELNGFVFH

SEQ ID NO: 109718 - protein, 257 aa, Setaria italica
  misc_feature (48)..(48): Xaa can be any naturally occurring amino acid
  misc_feature (70)..(70): Xaa can be any naturally occurring amino acid
  misc_feature (159)..(159): Xaa can be any naturally occurring amino acid
  Transcript Sequence Number=SeqID_43744
  Gene Ontology: Mol. function=zinc ion binding; Cellular component =intracellular; Biological process=regulation of transcription, DNA -dependent
  Homolog annotation: Hit_ID=Q0ZQJ9; Match level="QueryCoverage=99%, HitCoverage=44%, E-value=2e-53, Identity=46%"; Hit description=EMF2
  Pfam annotation: Domain name=VEFS-Box; Domain location=190-257; Score= 15.3; E_value=9.3e-06; Accession=PF09733.1; Description=VEFS-Box of polycomb protein
KLNSVCPYQLHVSVCAQEAGARDMFKSLYNSYLYNDVPPSSLPHIIRXHELCHGMVYFLTVESFNGIKEXHQFAVTEDFCCSFCLVKCGSFTVRKEQVVNVSLKHNTWTNEDFPAGVDPRQRTFSFFSKYKKRRRIVTMTEGIITSKVTEAIVPSKATXGTSVSDTSVDPAYSVHGSHLSPPRVLQFGKTRRLSVDQLDPRNQLLLQKRQFFHSHKGQQMALEEVLSDHDSEDEVDDDVADFEDRRMLDDFINISKV

SEQ ID NO: 109719 - protein, 197 aa, Setaria italica
  Transcript Sequence Number=SeqID_43745
  Gene Ontology: Mol. function=zinc ion binding; Cellular component =intracellular; Biological process=regulation of transcription, DNA -dependent
  Homolog annotation: Hit_ID=Q0ZQJ9; Match level="QueryCoverage=89%, HitCoverage=28%, E-value=2e-63, Identity=63%"; Hit description=EMF2
  Pfam annotation: Domain name=VEFS-Box; Domain location=47-187; Score =288.7; E_value=1.3e-83; Accession=PF09733.1; Description=VEFS-Box of polycomb protein
RQKQLRAETIWHGYLIGTSVSDTSVDPAYSVHGSHLSPPRVLQFGKTRRLSVDQLDPRNQLLLQKRQFFHSHKGQQMALEEVLSDHDSEDEVDDDVADFEDRRMLDDFINISKDEKSIMHMWNSFVSRQRVIADSHMPWACKAFSQLHGQLLARNPSLLGCWRLFMIKLWNHNLLDARTMNTCNIIIEGFRNKRLPK

SEQ ID NO: 109720 - protein, 95 aa, Setaria italica
  misc_feature (19)..(19): Xaa can be any naturally occurring amino acid
  Transcript Sequence Number=SeqID_43746
  Gene Ontology: Mol. function=starch synthase activity; Cellular component=chloroplast; Biological process=glucan biosynthetic process
  Homolog annotation: Hit_ID=B2Z4A6; Match level="QueryCoverage=95%, HitCoverage=9%, E-value=2e-48, Identity=96%"; Hit description=Starch synthase IV
  Pfam annotation: Domain name=Glyco_transf_5; Domain location=1-94; Score=-67.5; E_value=2.1e-06; Accession=PF08323.3; Description =Starch synthase catalytic domain
VGGLADVISGLGKALQKKXGHLVEIILPKYDCMQHNQINNLKVLDVVVQSYFEGNTFANKIWTGTVEGLPVYFIEPQHPGKFFWRAQYYGELLVI

SEQ ID NO: 109721 - protein, 141 aa, Setaria italica
  misc_feature (69)..(69): Xaa can be any naturally occurring amino acid
  Transcript Sequence Number=SeqID_43747
  Gene Ontology: Mol. function=ATP-dependent helicase activity; Cellular component=nucleus; Biological process=ribosome biogenesis
  Homolog annotation: Hit_ID=B6SPG8; Match level="QueryCoverage=48%, HitCoverage=10%, E-value=6e-34, Identity=97%"; Hit description=ATP -dependent rRNA helicase spb4
DLIVQYDPPQDPNVFIHRAGRTARYDQEGDAIVFLLPKEDTYVEFLKLRGVPLTERECPSNTEDVVPQXDKVREKQRKKALKRKAEEEAQNPKPEKRRAREKPEKPKRKKTGKQRQSVQTKEDLDELAHEYRLLKKLKRGG

SEQ ID NO: 109722 - protein, 576 aa, Setaria italica
  Transcript Sequence Number=SeqID_43748
  Gene Ontology: Mol. function=ATP-dependent helicase activity; Cellular component=nucleus; Biological process=multicellular organismal development
  Homolog annotation: Hit_ID=B6SPG8; Match level="QueryCoverage=100%, HitCoverage=89%, E-value=0.0, Identity=83%"; Hit description=ATP -dependent rRNA helicase spb4
  Pfam annotation: Domain name=DEAD; Domain location=1-153; Score =148.3; E_value=2.4e-41; Accession=PF00270.21; Description=DEADDEAH box helicase
  Pfam annotation: Domain name=Helicase_C; Domain location=239-315; Score=99.9; E_value=8.5e-27; Accession=PF00271.23; Description =Helicase conserved C-terminal domain
  Pfam module annotation: Pfam domain module=DEAD::Helicase_C; Domain location=1-153::239-315
TGSGKTLAFIVPVVEILRRRSSPPKSHEVLAVIVSPTRELSSQICNVAQPFFATLKGVSSMLLVGGLNINAELKRLEEEGANILVGTPGKLFDIMQREGTLDYKNVEILILDEADRLLDMGFQKHINFILSKLPKLRRTGLFSATQTKAVADLSKAGLRNPMRVEVKTETKLTSEDAGQQELGPSKTPLGLRLEYMMCEASKKSSQLVDFLVQNSGKKIMVYFATCACVDYWAVVLPLLNSLKGSPIIPYHGKMKQGPREKALASFSALSSGILVCTDVAARGLDIPSVDLIVQYDPPQDPNVFIHRAGRTARYDQEGDAIVFLLPKEDTYVEFLKLRGVPLTERECPSNTEDVVPQIRSAALEDRNVMEKGLRAFVSFIRAYKEHHCSYIFRWKDLEIGKLAMEYGLLQIPFMPEVKHHSLSLEGFIPVDDVDVTQIKYKDKVREKQRKKALKRKAEEEAQNPKPEKRRAREKPEKPKRKKTGKQRQSVQTKEDLDELAHEYRLLKKLKRGDIDEDEYEKLTGFGDSDGEASDGKASDLDKGKERGSKVKLKQKGKARGGSRKFEGKSKMRSKRR

SEQ ID NO: 109723 - protein, 78 aa, Setaria italica
  Transcript Sequence Number=SeqID_43749
  Homolog annotation: Hit_ID=B9RYW7; Match level="QueryCoverage=80%, HitCoverage=8%, E-value=3e-10, Identity=52%"; Hit description =Ankyrin repeat-containing protein, putative
VVTCKEARFGPSTSFTKNRRSIDGSAQHLIFQVVTVTGREVHFEASCASSVEFWVKGINLIVKESIWSTPDKETLESS

SEQ ID NO: 109724 - protein, 163 aa, Setaria italica
  Transcript Sequence Number=SeqID_43750
  Subcellular localization annotation: CTP_CleavageSite=41; ConfidenceScore=5.65e-01
FLLPSPKQPLLSGRAAAAAVSARPRRTSPRVLRSLGEASPAASSADEPLPCFLSYNTMVSRPVVLVFLLVILIVTSQFEWKQQLVNELESTTRNHQHISSREELVKDKIILSQEKMIQKLNDFIQNLQQQLVQCRENNKTIHSSGTSLTSYISEIQRHQMMDD

SEQ ID NO: 109725 - protein, 118 aa, Setaria italica
  Transcript Sequence Number=SeqID_43751
  Gene Ontology: Mol. function=serine-type endopeptidase activity; Cellular component=cell wall; Biological process=negative regulation of catalytic activity
  Homolog annotation: Hit_ID=Q69TZ6; Match level="QueryCoverage=93%, HitCoverage=18%, E-value=2e-47, Identity=86%"; Hit description =Putative subtilisin-like serine proteinase
  Subcellular localization annotation: CTP_CleavageSite=32; ConfidenceScore=5.18e-01
LSLIGNYLVVSSAGNAGRQGSATNLAPWMLTVAAGTTDRSFVSYIRLENGTFIMGESLSTYHMKTSVRTIPASEANAGYFTPYQYSFCLDSSLNRTKARGKILICRRTGGSSESRLST

SEQ ID NO: 109726 - protein, 155 aa, Setaria italica
  misc_feature (14)..(14): Xaa can be any naturally occurring amino acid
  misc_feature (19)..(19): Xaa can be any naturally occurring amino acid
  Transcript Sequence Number=SeqID_43752
  Gene Ontology: Mol. function=serine-type endopeptidase activity; Cellular component=cell wall; Biological process=negative regulation of catalytic activity
  Homolog annotation: Hit_ID=Q69TZ6; Match level="QueryCoverage=100%, HitCoverage=27%, E-value=1e-59, Identity=73%"; Hit description =Putative subtilisin-like serine proteinase
  Pfam annotation: Domain name=PA; Domain location=29-129; Score=51.4; E_value=3.5e-12; Accession=PF02225.14; Description=PA domain
GTTDRSFVSYIRLXNGTSXMGESLSTYHMKPSVRTIPASEANAGYFTPYQSSFCLDSSLNRTKARGKILICRRTGGSSESRLSTSMIVKEAGAAGMILIDEMGDHVATHFAVPGTAVGKEMGDKILSYIKSTRHASTKILPAKTIIRLRYGPRVA

SEQ ID NO: 109727 - protein, 54 aa, Setaria italica
  Transcript Sequence Number=SeqID_43753
LIIRSLTHHGSIARENKRSMVKLPHAPIQERQCMACPHHLTYNFCAPFLLEKVV

SEQ ID NO: 109728 - protein, 379 aa, Setaria italica
  Transcript Sequence Number=SeqID_43754
  Homolog annotation: Hit_ID=A6MZW8; Match level="QueryCoverage=75%, HitCoverage=96%, E-value=5e-72, Identity=55%"; Hit description=DNA binding protein (Fragment)
RFKERHIQQMMPQQQRPLPGTSTVPTVQNGSQMQQQSQGCAAGVIPASQPQHKQQHPAQNPLGNPMLPHQPSANTSHKQKKQQGQQQPRQNQQQRNQGSQQAKLMKSLGRGNMMHQNPVDASQASGISANCKNQIPDKNVMQQGPGHLVGSKGSIPSIPQPGSQPKIYTSQMPLSPMQTPDVSNQGAVKGSSNHTLLTSQQGQLHSPSQLATQQQQQLRYMNPSQNNIQRLMMQQNRHMNTDGRTELPVDQVQHNQVISSASLARSTDSGSPGISSMSQRKQESSHDPSAVTSTPQLASSPQDTFVGSDKLLPSSSQSMLQRQMSGGMPIHGHAIGGQLQQQQSRQQLQSQHLQQQQQQHQRPVVQGSVYAHPSNSGPG

SEQ ID NO: 109729 - protein, 153 aa, Setaria italica
  misc_feature (7)..(7): Xaa can be any naturally occurring amino acid
  misc_feature (142)..(142): Xaa can be any naturally occurring amino acid
  Transcript Sequence Number=SeqID_43755
  Gene Ontology: Mol. function=transferase activity, transferring glycosyl groups; Cellular component=integral to membrane; Biological process=protein amino acid glycosylation
  Homolog annotation: Hit_ID=B9R916; Match level="QueryCoverage=100%, HitCoverage=22%, E-value=3e-60, Identity=68%"; Hit description =Galactosyltransferase, putative
GVNVVSXKYVMKCDDDTFVRLDSVITEIKKVPSGRSLYMGSINIQHRPLRHGKWAVTYEEWPEEVYPAYANGPGYILSSDIADFIMSEFTKQGLTLFKMEDVSMGLWVEQFNRTRPVEYIHSSKFCPYGCTDDYYTAHYQSXPKLILCMWQKV

SEQ ID NO: 109730 - protein, 213 aa, Setaria italica
  misc_feature (97)..(97): Xaa can be any naturally occurring amino acid
  Transcript Sequence Number=SeqID_43756
  Gene Ontology: Mol. function=metal ion binding; Cellular component =integral to membrane
  Homolog annotation: Hit_ID=B6TV66; Match level="QueryCoverage=100%, HitCoverage=52%, E-value=1e-66, Identity=59%"; Hit description =Protein binding protein
  Pfam annotation: Domain name=PHD; Domain location=140-184; Score= -2.3; E_value=0.048; Accession=PF00628.21; Description=PHD-finger
  Pfam annotation: Domain name=zf-C3HC4; Domain location=141-181; Score= 35.3; E_value=2.4e-07; Accession=PF00097.17; Description=Zinc finger, C3HC4 type (RING finger)
  Pfam module annotation: Pfam domain module=PHD::zf-C3HC4; Domain location=140-184::141-181
MASPRFYALVACFKLALDCFFAIWFVVGNVWIFGSRSSAHDAPNLYRICIVFLAFGFIGYALPFILCTMICCCLPCIISILGVHEDLDLNRGATTDXLNALVAYKFKSKRVHDGDVGEDCGGVLAAGTDKERTISAEDAICCICLSKFSNNEDLRELPCTHVFHMECIDKWLQINALCPLCKAEIGVSKGVPESGSGGTQDDNRVGNDVESQR

SEQ ID NO: 109731 - protein, 55 aa, Setaria italica
  Transcript Sequence Number=SeqID_43757
VADLTEEFYTRTSLETQVKEQPSSNASSVTIHSGFRNFTQEHYLATLAQANSPIV

SEQ ID NO: 109732 - protein, 233 aa, Setaria italica
  Transcript Sequence Number=SeqID_43758
PPAGRAVRYGLFADYGDSSEFRVVCVSRDAASGELRALFLSSGELSWADVAGVACQTDLAAGSRAMQANRSLYWRLHGGERMVAFSTVSMEFSVLDLPPALRELSFDTVDRGEEEDANVLHLLTMSGFRIEVWTGTADGDGGMAWRRVEKSVRFHKVLTEMINPSVDSYQHELDVIGVATGIVFLRQWNHLFSIDLETMKFKMLPSKDCEAALIYPYTIAWPASFLNPAGQGA

SEQ ID NO: 109733 - protein, 242 aa, Setaria italica
  misc_feature (215)..(215): Xaa can be any naturally occurring amino acid
  Transcript Sequence Number=SeqID_43759
  Gene Ontology: Mol. function=nucleotide binding; Biological process =apoptosis
  Homolog annotation: Hit_ID=A5HJB1; Match level="QueryCoverage=90%, HitCoverage=95%, E-value=2e-29, Identity=40%"; Hit description =Putative NB-ARC domain-containing protein (Fragment)
LELPSEVTMLTKLQHLIIDVGRFGSSASNKICRLEHLQTLKNIEANSCVVRNLGCLTRMRSLGIRKVLESYNTDLWTSVSKMTALTNLLVITADRDRDVLDLSDLKPLPYLEKLMLSGKLDKGAIPPVFDHFPKLKSLRLCFSGFHEDPLAFLSVMFQNLGHLNLYRCYGGTRLTFRAGWFPMLRHLYLSSMGELKEVEIEDGTMRSLHRLELWXLKSLMSVPEGLVHLKSLQQLCIGSMMP

SEQ ID NO: 109734 - protein, 135 aa, Setaria italica
  Transcript Sequence Number=SeqID_43760
  Gene Ontology: Mol. function=receptor activity; Cellular component =endoplasmic reticulum; Biological process=intracellular protein transport
  Homolog annotation: Hit_ID=B6U1I6; Match level="QueryCoverage=100%, HitCoverage=62%, E-value=2e-69, Identity=96%"; Hit description=B -cell receptor-associated protein 31-like containing protein
MIQLLFLVLFAEGTVALLLMVKVGPLRELAMRVVDQVKTGKGPATVKTLACTLTVILMSDVASILKIQNRGLKLGSVSPMDQVLWRTHLLEASLIGYTLFLAFVIDRLHHYLRKLMTLRKTSSTSREEVEKLQME

SEQ ID NO: 109735 - protein, 67 aa, Setaria italica
  Transcript Sequence Number=SeqID_43761
  Gene Ontology: Mol. function=DNA binding; Biological process =regulation of transcription
  Homolog annotation: Hit_ID=B6TUH8; Match level="QueryCoverage=85%, HitCoverage=26%, E-value=7e-18, Identity=74%"; Hit description=NAC domain-containing protein 78
HFNQFKQEVAQEIKSHSNTESNWVICRVFDSTCGSQVNYHEEGMELSCLDEVFLSLDDYDEVSLSNN

SEQ ID NO: 109736 - protein, 152 aa, Setaria italica
  misc_feature (104)..(104): Xaa can be any naturally occurring amino acid
  misc_feature (151)..(151): Xaa can be any naturally occurring amino acid
  Transcript Sequence Number=SeqID_43762
  Gene Ontology: Mol. function=catalytic activity; Cellular component =plasma membrane
  Homolog annotation: Hit_ID=B6U7X6; Match level="QueryCoverage=96%, HitCoverage=27%, E-value=1e-55, Identity=75%"; Hit description =Catalytic/ protein phosphatase type 2C
DGPAWRKRRRGSREGAACGGAFSSGGKKVPGGGGEMTEDELARVSGRMFGNGASAVACLHTQQGRKGTNQDAMVVWESFSSSDSIFCGVFDGHGPYGHFVAKKXRDSLPVKLRTQWQTGANGASSPHQNGSISGSINSEETGSVVDDEVGXS

SEQ ID NO: 109737 - protein, 154 aa, Setaria italica
  misc_feature (54)..(54): Xaa can be any naturally occurring amino acid
  misc_feature (85)..(85): Xaa can be any naturally occurring amino acid
  Transcript Sequence Number=SeqID_43763
  Gene Ontology: Mol. function=catalytic activity; Cellular component =plasma membrane
  Homolog annotation: Hit_ID=Q9M8R7-2; Match level="QueryCoverage=98%, HitCoverage=24%, E-value=3e-40, Identity=55%"; Hit description =Isoform 2 of Probable protein phosphatase 2C 33
LDLVIGNLGDSRAIMGTRDASNNLTSVQLTVDLKPNLPSMFVCSFITLIISLGXMPMAFKLKPILICIWDLSFLSVLKVPSIELXCKYLIFISCSLGEAARIQQCKGRVFALQDEPDVARVWLPNNDSPGLAMARAFGDFCLKDYGLISVPEIS

SEQ ID NO: 109738 - protein, 418 aa, Setaria italica
  Transcript Sequence Number=SeqID_43764
  Gene Ontology: Mol. function=catalytic activity; Cellular component =plasma membrane
  Homolog annotation: Hit_ID=B6U7X6; Match level="QueryCoverage=99%, HitCoverage=79%, E-value=0.0, Identity=78%"; Hit description =Catalytic/ protein phosphatase type 2C
  Pfam annotation: Domain name=PP2C; Domain location=6-270; Score =101.4; E_value=3e-27; Accession=PF00481.13; Description=Protein phosphatase 2C
  Subcellular localization annotation: CTP_CleavageSite=17; ConfidenceScore=5.05e-01
IGPIGTLTVKLGSQKVRDSLPVKLRTQWQTGANGASSPHQNGSISGSINSEETGSVVDDEWGESINGDESEKLPEMFLPLKQSYLKAFKLMDKELKLHPTVDCFCSGSTAVTLVKQGLDLVIGNLGDSRAIMGTRDASNNLTSVQLTVDLKPNLPREAARIQQCKGRVFALQDEPDVARVWLPNNDSPGLAMARAFGDFCLKDYGLISVPEISYRRLSEKDEFIILATDGVWDVLSNKEAVDIVASAPSRATAARALVDCAVRSWRLKFPTSKSDDCAVVCLFLDHEKSTDSVQESESKEETPETTGEEVSTPDASAEVDEDIADVNAHISSEEHIATATLQHSNTLREVDEIVPVDEPPVLKEPERCGSARSLADCISTNEEEEWSALEGVTRVNSLLNLPRKLSGDKRSASWRKRR

SEQ ID NO: 109739 - protein, 117 aa, Setaria italica
  misc_feature (17)..(17): Xaa can be any naturally occurring amino acid
  misc_feature (38)..(38): Xaa can be any naturally occurring amino acid
  Transcript Sequence Number=SeqID_43765
  Gene Ontology: Mol. function=protein serine/threonine kinase activity; Biological process=protein amino acid phosphorylation
  Homolog annotation: Hit_ID=B9SV42; Match level="QueryCoverage=88%, HitCoverage=14%, E-value=4e-25, Identity=53%"; Hit description =Receptor protein kinase zmpk1, putative
TDQVVWQSFDSPTDTLXPSQNLMRETKLVSPSGYHILXFDNDNVLRLPYNGPDITSIYWPSPDYNALQNGRTRFNSSKIAVLDNEGIFRSSDGFKMTASDSGQGFRCNCPPGIIVVL

SEQ ID NO: 109740 - protein, 61 aa, Setaria italica
  Transcript Sequence Number=SeqID_43766
PYEFQQSMLQQNNSIEKLRMNILASLHISRLVLVANESPLPAMVGSGMLTVVFASQPGYMK

SEQ ID NO: 109741 - protein, 148 aa, Setaria italica
  misc_feature (112)..(112): Xaa can be any naturally occurring amino acid
  Transcript Sequence Number=SeqID_43767
  Gene Ontology: Mol. function=protein serine/threonine kinase activity; Biological process=protein amino acid phosphorylation
  Homolog annotation: Hit_ID=B9SV42; Match level="QueryCoverage=72%, HitCoverage=14%, E-value=1e-28, Identity=48%"; Hit description =Receptor protein kinase zmpk1, putative
  Pfam annotation: Domain name=PAN_1; Domain location=39-121; Score =28.5; E_value=2.8e-05; Accession=PF00024.18; Description=PAN domain
  Pfam annotation: Domain name=PAN_2; Domain location=38-102; Score =9.7; E_value=0.00015; Accession=PF08276.3; Description=PAN-like domain
  Pfam module annotation: Pfam domain module=PAN_1::PAN_2; Domain location=39-121::38-102
MTASDSGQGFRCNCPPGYEMNDPKNWNKGCRPTFSVNCGQQQEDFTFVKIPHGDFYGFDLTSNKSISFEECMQICLDSCFCLSFTYKAGEGLCYTKDRLYNGQVYPYFPGDXKYVKHPKKVTSRSSASRHSSLTIRIPAVNATTEQLH

SEQ ID NO: 109742 - protein, 313 aa, Setaria italica
  Transcript Sequence Number=SeqID_43768
  Gene Ontology: Mol. function=nucleoside-triphosphatase activity; Cellular component=protein complex
  Homolog annotation: Hit_ID=A6N1G2; Match level="QueryCoverage=23%, HitCoverage=76%, E-value=7e-17, Identity=62%"; Hit description=ATP binding protein (Fragment)
DDDDVTSISSKDAVEHNLIQSASTEVHRRNLTHADTARNDGEHSGANNDGKVSNLTYDEGNCRPDIQRSENRTESAECLNDLQKAGNSVGSSASIDNTEIPRNVVSSEAYGDDNELKKNNPLNDVESSHLIDGQLQYDMNNLSVPKALCLYKCCSACFRAVYKMVHDTLSNSLMPNLHCLTVDDMHDILSSWCMNLLATVRKCYSSQDEVNCEENFETTHNKETCLEHCACQSDLHHLSRECICHSENNDETGTANTDCLSGQSLSFCFKDGVWMPSNLTAETELHCSFRRFCICSILGTISMLVNSPVDEII

SEQ ID NO: 109743 - protein, 403 aa, Setaria italica
  misc_feature (232)..(232): Xaa can be any naturally occurring amino acid
  Transcript Sequence Number=SeqID_43769
  Gene Ontology: Mol. function=hydrolase activity, acting on ester bonds; Cellular component=vacuole; Biological process=lipid metabolic process
  Homolog annotation: Hit_ID=Q5VP32; Match level="QueryCoverage=91%, HitCoverage=89%, E-value=1e-133, Identity=66%"; Hit description =Lipase-like
  Pfam annotation: Domain name=Lipase_GDSL; Domain location=41-368; Score=148.2; E_value=2.6e-41; Accession=PF00657.14; Description=GDSL- like LipaseAcylhydrolase
MASSAPGRGGRRPISPAAAAAAVVVMVLVGAEPAAACYQRLFSFGDSLADTGNFRFYYGNSSGEPALRPPYGETFFRRPTGRFSNGRLVLDFIADTMGLPFVRPYLSGRRAEDFACGANFAVGGATALGPDFFRDRGFNIGDGRVHLDTEMKWFRDLLDLLCPGGRSDCSDMMGQSLFLVGEIGGNDYNLPLLSRLPIEKIRSFTPSVVAKISSTITELIGLGAKTLVVPGXNLPIGCVPRYLSIFRSDNKEDYEPESGCLRWMNEFSKYHNKLLVEELEKLRKLHPGVSIIYADYYGAAMEIFLFPERFGIEEPLVACCGGEGTHGVSPAAACGYGEYKVCDNPDKYGSWDGFHPSEAAYKAIAMGLLRGTYTQPSIASTTSSCPKLTELVSSVEYKVLYDL

SEQ ID NO: 109744 - protein, 140 aa, Setaria italica
  Transcript Sequence Number=SeqID_43770
GPRQQSSAGNDVEGGGGAAARANAERRGRREEAAAVARRQSKRAAAASLLEDTASSPAFFGYSKAMGSAEANGYGGADAPMMEIANAADFSYAFSTTTGFKSPLNGTALGGYMQMQYSPAPVNPMPTRQVSRGAPEKKRW

SEQ ID NO: 109745 - protein, 114 aa, Setaria italica
  Transcript Sequence Number=SeqID_43771
KETGRRSRKVDQAGSGGEQLFRTQVSYMYSPIYMELFNSVSKRRHRPRHSGSGARLSKPVSNLQNPGAGPISLSSPHRFRGRRRGPATSAAPSLHPAGRASTETRSARSPGRTT

SEQ ID NO: 109746 - protein, 47 aa, Setaria italica
  Transcript Sequence Number=SeqID_43772
FIGMLLLLQVHTLIWSFSKNLLSYDFSEICFRSLIEVLIPFSNTKKF

SEQ ID NO: 109747 - protein, 104 aa, Setaria italica
  misc_feature (89)..(89): Xaa can be any naturally occurring amino acid
  Transcript Sequence Number=SeqID_43773
  Gene Ontology: Biological process=cell division
  Homolog annotation: Hit_ID=B6SH69; Match level="QueryCoverage=73%, HitCoverage=12%, E-value=1e-34, Identity=94%"; Hit description =Cyclin-dependent protein kinase
PRPANWVATYCYNLKSLTDHLVKITNSPTVAAVCVFLASKTEDTPCPLDHVVRVAYETMYRRDTAAAQRIRQKDVFEKQKALILIGERXLVLTTIRFDFNIQHP

SEQ ID NO: 109748 - protein, 496 aa, Setaria italica
  Transcript Sequence Number=SeqID_43774
  Gene Ontology: Cellular component=nucleus; Biological process=cell division
  Homolog annotation: Hit_ID=B6SH69; Match level="QueryCoverage=94%, HitCoverage=77%, E-value=0.0, Identity=75%"; Hit description=Cyclin -dependent protein kinase
  Pfam annotation: Domain name=Cyclin_N; Domain location=4-129; Score =23.9; E_value=4.4e-05; Accession=PF00134.15; Description=Cyclin, N -terminal domain
MGKDGITQSKESELRNLYCSFIRDVGIRLKLPQMTLATAIMFCHRFYLHQSLAKFGWQTVAAVCVFLASKTEDTPCPLDHVVRVAYETMYRRDTAAAQRIRQKDVFEKQKALILIGERLVLTTIRFDFNIQHPYRPLFDAMTNLGINQKEVKQVAWNFVNDWLKTTLCLQYKPQYIAAGSLYLAAKLHNIKLPLHGARVWWHQFDVAPKPLEAVIQQMMEHAAVKKLMPARPSPVKQKEVPCEAKLHVSNSPDSVLNQSSLLISSSSPDIGEPSDHMQVDSCQYLISSHTGDGSVSGPDSSLLNGSAYINVSSKAHDEESLDQASITKHDDEMMSCSNQTSLYAVAATDDSAECMKQDVSHCTVNGKNLNQASGNWHGDSANPLPVVTALGAKADKESTRCVDPSIGSSNRCTDSLNADILRTDQRLADAASVPIDHAPSASPVVVEADPLRAELKKVDVARIKDLLLKNSPSSFLPVPKPGSGVVQQQSPPPRPS

SEQ ID NO: 109749 - protein, 261 aa, Setaria italica
  Transcript Sequence Number=SeqID_43775
  Homolog annotation: Hit_ID=B6SH69; Match level="QueryCoverage=96%, HitCoverage=42%, E-value=7e-75, Identity=62%"; Hit description =Cyclin-dependent protein kinase
TLFTLLVYEESLDQASITKHDDEMMSCSNQTSLYAVAATDDSAECMKQDVSHCTVNGKNLNQASGNWHGDSANPLPVVTALGAKADKESTRCVDPSIGSSNRCTDSLNADILRTDQRLADAASVPIDHAPSASPVVVEADPLRAELKKVDVARIKDLLLKRKRKKEIQEQAVGSDDLSEEAWIERELESGIITKQEPAASDGLSDEAWIERELESGIVVGPRNKQAITLDGLSEDDWIERELESGIIVEPAPASKKQKLKT

SEQ ID NO: 109750 - protein, 59 aa, Setaria italica
  Transcript Sequence Number=SeqID_43776
  Homolog annotation: Hit_ID=B6SH69; Match level="QueryCoverage=88%, HitCoverage=8%, E-value=2e-19, Identity=88%"; Hit description=Cyclin- dependent protein kinase
LRSRLWELESGIVVGPRNKQAITLDGLSEDDWIERELESGIIVEPAPASKKQKLKTSCC

SEQ ID NO: 109751 - protein, 88 aa, Setaria italica
  Transcript Sequence Number=SeqID_43777
  Subcellular localization annotation: CTP_CleavageSite=31; ConfidenceScore=5.40e-01
FVQFSQHNQQGKKSSEYNDSHSSHMRPTSKRVSYLSSFPRALLFISLLCLSLLCSCIKLTPVRLIQWITCNLRCYVTSSMDSNLTNNL

SEQ ID NO: 109752 - protein, 103 aa, Setaria italica
  Transcript Sequence Number=SeqID_43778
  Gene Ontology: Mol. function=hydrolase activity, acting on glycosyl bonds; Cellular component=anchored to membrane; Biological process =cell wall organization and biogenesis
  Homolog annotation: Hit_ID=Q9SLP3; Match level="QueryCoverage=98%, HitCoverage=23%, E-value=2e-33, Identity=68%"; Hit description =Polygalacturonase
ASTGVRIDAPEDSPNTDGIHVAESTAVTIQNCRIGTGDDCISIVNASFNIRMKNIDCGPGHGISIGSLGKGGTFAAVENVALDTARISRAQNGVRIKTWQGGA

SEQ ID NO: 109753 - protein, 67 aa, Setaria italica
  Transcript Sequence Number=SeqID_43779
SESKLIYITVQQFPSRDDTLYSKLFRAEGKMKAGYSRIKSSLSMLWNLHDKNFSSMKHLIKLSLRVG

SEQ ID NO: 109754 - protein, 415 aa, Setaria italica
  Transcript Sequence Number=SeqID_43780
  Gene Ontology: Mol. function=protein serine/threonine kinase activity; Biological process=protein amino acid phosphorylation
  Homolog annotation: Hit_ID=B9SJP9; Match level="QueryCoverage=93%, HitCoverage=34%, E-value=1e-164, Identity=71%"; Hit description =Serine/threonine protein kinase, putative
  Pfam annotation: Domain name=Pkinase; Domain location=142-405; Score =207.2; E_value=4.5e-59; Accession=PF00069.17; Description=Protein kinase domain
  Pfam annotation: Domain name=Pkinase_Tyr; Domain location=142-405; Score=262.0; E_value=1.4e-75; Accession=PF07714.9; Description =Protein tyrosine kinase
  Pfam module annotation: Pfam domain module=Pkinase::Pkinase_Tyr; Domain location=142-405::142-405
KRPIVRKTSNNEVDPKQKPTEHEIRTKQLEAGVTALQECGDISEDRLNFVPELIASLKKAALEDATETQMAQSDANAAVSPVPDDDDNGKKLDVATAGNTDAIQDSDLHGSSDQQKSSKIESTTAEAEALSKGLQTINNDDLEEIRELGSGTYGAVYHGKWRGCDVAIKRIKASCFAGRPSERERLIADFWKEALILSSVHHPNVVSFYGVVRDGPDGSLATVTEFMVNGSLKQFLRKKDRTIDRRKRVILAMDAAFGMEYLHGKNIVHFDLKCENLLVNMRDPQRPICKIGDLGLSKVKQHTLVSGGVRGTLPWMAPELLSGKSNMVSEKIDVYSFGIVMWELLTGEEPYSDMRAAEIIGGIVNDSLRPQIPAWCDPEWKALMESCWSSDPTERPSFTDISQRLRKMAAAMNVK

SEQ ID NO: 109755 - protein, 675 aa, Setaria italica
  misc_feature (649)..(649): Xaa can be any naturally occurring amino acid
  Transcript Sequence Number=SeqID_43781
  Gene Ontology: Mol. function=ATPase activity, coupled to transmembrane movement of substances; Cellular component=integral to membrane; Biological process=transport
  Homolog annotation: Hit_ID=Q8GU76; Match level="QueryCoverage=99%, HitCoverage=99%, E-value=0.0, Identity=59%"; Hit description=MDR -like ABC transporter
  Pfam annotation: Domain name=ABC_membrane; Domain location=403-675; Score=128.1; E_value=2.9e-35; Accession=PF00664.15; Description=ABC transporter transmembrane region
  Pfam annotation: Domain name=ABC_tran; Domain location=107-291; Score= 228.8; E_value=1.4e-65; Accession=PF00005.19; Description=ABC transporter
  Pfam module annotation: Pfam domain module=ABC_membrane::ABC_tran; Domain location=403-675::107-291
FWYAGVFIRNGQSDGGKAFTAIFSAIVGGMSLGQAFSNLGAFSKGKIAGYKLLEIIRQKPSIVNDHKDGKWLAEVHGNIEFKEVTFSYPSRPDVMIFRDFSLFFPAGKTVAVVGGSGSGKSTVVALIERFYDPNEGQVLLDNVDIKTLQLRWLRDQIGLVNQEPALFATTILENILYGKPDATVAEVEAAATASNAHSFISLLPNGYNTMVGERGTQLSGGQKQRIAIARAMLKNPKILLLDEATSALDADSESIVQEALDRLMVGRTTVVVAHRLSTIRNVNMIAVIQQGQVVETGTHDELLAKGSTGAYASLVRFQESARNRDLGGASTRRSRSMHLTSSLSTKSLSLRSGSLRNLSYQYSTGADGRIEMISNADNDRKYPAPRGYFLKLLKLNAPEWPYAVLGAIGSVLSGFIGPTFAIVMGEMLDVFYYRDPNEMEKKTKLYVFIYIGTGIYAVVAYLVQHYFFSIMGENLTTRVRRMMLSAILRNEVGWFDEEENNSSLVAARLAVDAADVKSAIAERISVILQNMTSLMTSFVVGFIIEWRVALLILATFPLLVLANFAQQISMKGFAGDTAKAHAKSSMVAGEGVSNIRTVAAFNAQSKILSLFSHELRIPEQQILRRSQTSGLLFGLSQLCLYSSEALILXETVSLAPEIVRGGESIRSIFGILNPQ

SEQ ID NO: 109756 - protein, 399 aa, Setaria italica
  Transcript Sequence Number=SeqID_43782
  Gene Ontology: Mol. function=protein binding; Cellular component =nucleus; Biological process=nuclear mRNA splicing, via spliceosome
  Homolog annotation: Hit_ID=B4FBI9; Match level="QueryCoverage=99%, HitCoverage=94%, E-value=0.0, Identity=85%"; Hit description =Cleavage stimulation factor, 50 kDa subunit
  Pfam annotation: Domain name=WD40; Domain location=138-176; Score =42.1; E_value=2.2e-09; Accession=PF00400.24; Description=WD domain, G-beta repeat
  Pfam annotation: Domain name=WD40; Domain location=183-220; Score =11.4; E_value=1.8; Accession=PF00400.24; Description=WD domain, G -beta repeat
  Pfam annotation: Domain name=WD40; Domain location=226-264; Score =21.9; E_value=0.0026; Accession=PF00400.24; Description=WD domain, G- beta repeat
  Pfam annotation: Domain name=WD40; Domain location=270-308; Score =18.5; E_value=0.028; Accession=PF00400.24; Description=WD domain, G -beta repeat
  Pfam annotation: Domain name=WD40; Domain location=357-396; Score =18.3; E_value=0.031; Accession=PF00400.24; Description=WD domain, G -beta repeat
  Pfam annotation: Domain name=WD40; Domain location=82-120; Score =32.5; E_value=1.7e-06; Accession=PF00400.24; Description=WD domain, G-beta repeat
  Pfam annotation: Domain name=eIF2A; Domain location=47-221; Score= -109.1; E_value=0.032; Accession=PF08662.3; Description=Eukaryotic translation initiation factor eIF
  Pfam module annotation: Pfam domain module=WD40::WD40::WD40::WD40::WD4 0::WD40::eIF2A; Domain location=138-176::183-220::226-264::270 -308::357-396::82-120::47-221
  Subcellular localization annotation: CTP_CleavageSite=39; ConfidenceScore=5.30e-01
GQSLGQAAAAVAAATMTPLSAADSVPANHLLRLVAKGLAAERGGAASAFDSAGFGGVVPPLGSGAVDFSVQDVRGSSKSFPKHEAKHVSDHKNIARCARFSPDGKYFATGSADTSIKFFEVAKIKQTMVGDSKDGSARPVIRTFYDHMQPINDLDFHPESPILISASKDNTIKFFDFSKTNARKAFRVIQDTHNVRSVCFHPCGDYLLAGTDHPVAHLYDVNTFTCYLSANPQDSGSPINQVRYSCTGSLYVTASKDGSLRIWDGVSAECVRPIIGAHGSAEATSAVFTKDERYLLSCGKDSSVKLWEVGTGRLVKQYAGAVRRQFRCQAVFNETEEFVLSVDEQNNEVVVWDALTAEKVARLPPGGTGAPRWLDHSPVEPAFVTCGNDRSIRFWKQTV

SEQ ID NO: 109757 - protein, 44 aa, Setaria italica
  Transcript Sequence Number=SeqID_43783
  Gene Ontology: Mol. function=hydrolase activity; Cellular component =cytoskeleton; Biological process=cell division
  Homolog annotation: Hit_ID=Q8LF21; Match level="QueryCoverage=93%, HitCoverage=6%, E-value=2e-13, Identity=85%"; Hit description =Dynamin-related protein 1C
RDFLPRGSGIVTRRPLVLQLHKTQDGAQEYAEFLHMPKGRLMLM

SEQ ID NO: 109758 - protein, 230 aa, Setaria italica
  Transcript Sequence Number=SeqID_43784
  Gene Ontology: Mol. function=hydrolase activity; Cellular component =plasma membrane; Biological process=response to cadmium ion
  Homolog annotation: Hit_ID=Q9FNX5; Match level="QueryCoverage=99%, HitCoverage=36%, E-value=1e-118, Identity=86%"; Hit description =Dynamin-related protein 1E
  Pfam annotation: Domain name=Dynamin_N; Domain location=1-143; Score =150.8; E_value=4.2e-42; Accession=PF00350.15; Description=Dynamin family
SLELQLHKTQDGAQEYAEFLHMPKRRFTDFALVRKEIEDETDRLTGKTKQISPVPIHLSIYSPNVVNLTLIDLPGLTKVAVEGQPETIVQDIENMVRSYVDKPNCIILAISPANQDIATSDAIKLARDVDPTGERTFGVLTKLDLMDKGTNALDVLEGRAYRLQHPWVGIVNRSQADINKNVDMIIARRKEQEFFASSPDYSHLASRMGSEYLAKLLSQQLEAVIRARIP

SEQ ID NO: 109759 - protein, 85 aa, Setaria italica
  Transcript Sequence Number=SeqID_43785
  Gene Ontology: Mol. function=cation transmembrane transporter activity; Cellular component=integral to membrane; Biological process=cation transport
  Homolog annotation: Hit_ID=Q7XPF8; Match level="QueryCoverage=87%, HitCoverage=12%, E-value=3e-13, Identity=51%"; Hit description =Cation transporter HKT4
SCNCFLLLNFGWDSKPMEGLKWFQKLVCTLFQSVNRRHAGETVIDISNLPPAILVLFALFMSVSPQSLPSDGSSLPNSVDDQTRV

SEQ ID NO: 109760 - protein, 110 aa, Setaria italica
  Transcript Sequence Number=SeqID_43786
  Homolog annotation: Hit_ID=B4FAP8; Match level="QueryCoverage=100%, HitCoverage=85%, E-value=9e-40, Identity=73%"; Hit description =Erwinia induced protein 2
MALQWMILACVVAVEAAVAALVTLPAPRAVRGQIVALTSLLLQPMASVIPFAAFQLLDIYWKKEHRLMCTSEICTAEERIRFEKSMFKAQRNVILCVSACLLYWCIYRVV

SEQ ID NO: 109761 - protein, 89 aa, Setaria italica
  Transcript Sequence Number=SeqID_43787
  Homolog annotation: Hit_ID=B4FAP8; Match level="QueryCoverage=97%, HitCoverage=67%, E-value=4e-41, Identity=91%"; Hit description =Erwinia induced protein 2
GRQRMASVIPFAAFQLLDIYWKKEHRLMCTSEICTAEERIRFEKSMFKAQRNVILCVSACLLYWCIYRVVKYNKDIKALEETEKRLKEE

SEQ ID NO: 109762 - protein, 137 aa, Setaria italica
  Transcript Sequence Number=SeqID_43788
  Gene Ontology: Mol. function=electron carrier activity; Biological process=oxidation reduction
  Homolog annotation: Hit_ID=B6SSW8; Match level="QueryCoverage=85%, HitCoverage=22%, E-value=3e-56, Identity=88%"; Hit description =Cytochrome P450 CYP714B3
KNTLLSIQSDILVKIPKGHILNACRFFPSTRNKQAWELHKEVHKLILEIVKESGEDRNLLSAILHSASYSRVGIAEAENFIVDNCKSIYFAGYESTAVTAAWCLMLLGLHPEWQDRVRAEVHEVCRGRPLDSQSLQK

SEQ ID NO: 109763 - protein, 110 aa, Setaria italica
  misc_feature (26)..(26): Xaa can be any naturally occurring amino acid
  Transcript Sequence Number=SeqID_43789
  Gene Ontology: Mol. function=protein serine/threonine kinase activity; Biological process=protein amino acid phosphorylation
  Homolog annotation: Hit_ID=A5HNE9; Match level="QueryCoverage=100%, HitCoverage=22%, E-value=8e-49, Identity=85%"; Hit description =Sucrose non-fermenting related protein kinase 1b
ATVAYYLLLDNRFKATSGYLGTVASXDRNLNQLASSESTSSGVRNYVPGSTDPHSNGLRTHYPVERKWALGLQSRALPREILIEVLKALQELNVSWKKNGHYNMKCRWCP

SEQ ID NO: 109764 - protein, 161 aa, Setaria italica
  misc_feature (22)..(22): Xaa can be any naturally occurring amino acid
  misc_feature (69)..(69): Xaa can be any naturally occurring amino acid
  Transcript Sequence Number=SeqID_43790
  Gene Ontology: Mol. function=protein serine/threonine kinase activity; Biological process=protein amino acid phosphorylation
  Homolog annotation: Hit_ID=A5HNE9; Match level="QueryCoverage=91%, HitCoverage=24%, E-value=2e-60, Identity=79%"; Hit description =Sucrose non-fermenting related protein kinase 1b
  Pfam annotation: Domain name=UBA; Domain location=92-128; Score=22.7; E_value=0.0016; Accession=PF00627.23; Description=UBATS-N domain
  Pfam annotation: Domain name=UBA_2; Domain location=92-132; Score =9.8; E_value=0.1; Accession=PF08587.3; Description=Ubiquitin associated domain (UBA)
  Pfam module annotation: Pfam domain module=UBA::UBA_2; Domain location=92-128::92-132
SKRFKGGIYTLPSHLSALARDXLIPRMLVVEPMKRITIREIREHQWFQNRLPRYLAVPPPDTTQQAKMXTSPYHSSPDNAVTFSYNGHFLKIDEDTLRDVVNMGFNKDHVCESLCSRLQNEATVAYYLLLDNRFKATSGYLGADYQESMVSTHLHDYIWGH

SEQ ID NO: 109765 - protein, 44 aa, Setaria italica
  Transcript Sequence Number=SeqID_43791
  Gene Ontology: Mol. function=protein serine/threonine kinase activity; Biological process=protein amino acid phosphorylation
  Homolog annotation: Hit_ID=A6MZP9; Match level="QueryCoverage=86%, HitCoverage=23%, E-value=2e-14, Identity=97%"; Hit description =Carbon catabolite derepressing protein kinase (Fragment)
  Pfam annotation: Domain name=KA1; Domain location=7-43; Score=42.6; E_ value=1.5e-09; Accession=PF02149.11; Description=Kinase associated domain 1
HCFLLHQLYKTRDEKYLLDMQRVTGPQLLFLDFCAAFLTKLRVL

SEQ ID NO: 109766 - protein, 56 aa, Setaria italica
  misc_feature (22)..(22): Xaa can be any naturally occurring amino acid
  Transcript Sequence Number=SeqID_43792
  Gene Ontology: Mol. function=protein serine/threonine kinase activity; Biological process=protein amino acid phosphorylation
  Homolog annotation: Hit_ID=A5HNE9; Match level="QueryCoverage=73%, HitCoverage=8%, E-value=9e-17, Identity=97%"; Hit description =Sucrose non-fermenting related protein kinase 1b
QIISGVEYCHRNMVVHRDLKPXNLLLDSKYNVKLADFGLSNCSIVYCIGSIFCKYL

SEQ ID NO: 109767 - protein, 468 aa, Setaria italica
  Transcript Sequence Number=SeqID_43793
  Gene Ontology: Mol. function=protein serine/threonine kinase activity; Cellular component=nucleoplasm; Biological process=protein amino acid phosphorylation
  Homolog annotation: Hit_ID=A5HNE9; Match level="QueryCoverage=98%, HitCoverage=90%, E-value=0.0, Identity=95%"; Hit description=Sucrose non-fermenting related protein kinase 1b
  Pfam annotation: Domain name=KA1; Domain location=422-467; Score =77.0; E_value=6.8e-20; Accession=PF02149.11; Description=Kinase associated domain 1
  Pfam annotation: Domain name=NifQ; Domain location=277-398; Score= -69.5; E_value=0.098; Accession=PF04891.4; Description=NifQ
  Pfam annotation: Domain name=Pkinase; Domain location=1-228; Score =274.8; E_value=1.9e-79; Accession=PF00069.17; Description=Protein kinase domain
  Pfam annotation: Domain name=Pkinase_Tyr; Domain location=5-226; Score=-25.0; E_value=4.6e-12; Accession=PF07714.9; Description =Protein tyrosine kinase
  Pfam annotation: Domain name=UBA; Domain location=250-286; Score =22.7; E_value=0.0016; Accession=PF00627.23; Description=UBATS-N domain
  Pfam annotation: Domain name=UBA_2; Domain location=250-290; Score =9.8; E_value=0.1; Accession=PF08587.3; Description=Ubiquitin associated domain (UBA)
  Pfam module annotation: Pfam domain module=KA1::NifQ::Pkinase::Pkinase _Tyr::UBA::UBA_2; Domain location=422-467::277-398::1-228::5-226::250- 286::250-290
TNKRIQLNCRQMKNMEMEEKAKREIKILKLFIHPHIIRLYEVIYTPTDIYVVMEYCKYGELFDYIVEKGRLQEDEARRIFQQIISGVEYCHRNMVVHRDLKPENLLLDSKYNVKLADFGLSNVMHDGHFLKTSCGSPNYAAPEVISGKLYAGPEVDVWSCGVILYALLCGTLPFDDENIPNLFKKIKGGIYTLPSHLSALARDLIPRMLVVEPMKRITIREIREHQWFQNRLPRYLAVPPPDTTQQAKMIDEDTLRDVVNMGFNKDHVCESLCSRLQNEATVAYYLLLDNRFKATSGYLGADYQESMDRNLNQLASSESTSSGVRNYVPGSTDPHSNGLRTHYPVERKWALGLQSRAHPREIMIEVLKALQELNVSWKKNGHYNMKCRWCPEFSEAHDMLDSSNSFLGDSTIMDNDDANGRLPAVIKFEIQLYKTRDEKYLLDMQRVTGPQLLFLDFCAAFLTKLRVL

SEQ ID NO: 109768 - protein, 70 aa, Setaria italica
  Transcript Sequence Number=SeqID_43794
  Gene Ontology: Mol. function=protein binding
  Homolog annotation: Hit_ID=Q8LSP0; Match level="QueryCoverage=90%, HitCoverage=10%, E-value=3e-22, Identity=69%"; Hit description =Putative WD-40 repeat protein
  Pfam annotation: Domain name=WD40; Domain location=16-56; Score=18.8; E_value=0.023; Accession=PF00400.24; Description=WD domain, G-beta repeat
TTSSTQVRVGRLKEGGEVTTKLVGEHDSRVHKVAIEPGSPYIFYSCGEDGLVQHFDLRSDSATKLFTCYS

SEQ ID NO: 109769 - protein, 156 aa, Setaria italica
  misc_feature (28)..(28): Xaa can be any naturally occurring amino acid
  Transcript Sequence Number=SeqID_43795
  Gene Ontology: Mol. function=protein binding
  Homolog annotation: Hit_ID=B9T1Y8; Match level="QueryCoverage=75%, HitCoverage=24%, E-value=6e-35, Identity=57%"; Hit description=WD -repeat protein, putative
  Pfam annotation: Domain name=WD40; Domain location=46-84; Score=41.9; E_value=2.5e-09; Accession=PF00400.24; Description=WD domain, G-beta repeat
  Pfam annotation: Domain name=WD40; Domain location=89-129; Score=5.3; E_value=9.4; Accession=PF00400.24; Description=WD domain, G-beta repeat
  Pfam module annotation: Pfam domain module=WD40::WD40; Domain location=46-84::89-129
MAAAVEAAGGRKASCFFEVGRRDIGSSXPRASSRRISGSEYIVMRMTQYGKLRGHDGCVNTVSFNPAGDLLVSGSDDTNIILWDWFAKTKRLVYPSGHQENVFHARVMPFTDDSTIVTVAADGQVRVGRLKEGGEVTTKLVGEHDSRVHKVAIEPG

SEQ ID NO: 109770 - protein, 120 aa, Setaria italica
  Transcript Sequence Number=SeqID_43796
TIEEYEHVTGNVLVGEMNAPSLHGMNSPTTNSSEAARLTIPKTEVAELKNLSEDSCSNGKTRKGEQEIWTNKERCHLIEAIEMHGMDFSSISVHVGTKSIQQCKISSATAKMTLILARSM

SEQ ID NO: 109771 - protein, 111 aa, Setaria italica
  misc_feature (83)..(83): Xaa can be any naturally occurring amino acid
  Transcript Sequence Number=SeqID_43797
  Homolog annotation: Hit_ID=Q4ABN9; Match level="QueryCoverage=67%, HitCoverage=68%, E-value=6e-17, Identity=50%"; Hit description=80A08_ 28
  Subcellular localization annotation: CTP_CleavageSite=65; ConfidenceScore=5.42e-01
MAVSSPRRALLAAVFFGFLLAAATCIRTATFSSSQNLAEDKSRLGSTPPSCHNRCSACNPCTPVQVTTVPGLGSSVRLGPRHXDTVAAFSRYSNYKPLGWKCRCDGRLYDP

SEQ ID NO: 109772 - protein, 78 aa, Setaria italica
  misc_feature (62)..(62): Xaa can be any naturally occurring amino acid
  Transcript Sequence Number=SeqID_43798
KAGEPEKPVRIFTSTTVTCFGSTGLNYGTVYTCSPTASLEGNAYAATVGRYGNVICSVLLKXSQPTATNIGNALQHYP

SEQ ID NO: 109773 - protein, 60 aa, Setaria italica
  Transcript Sequence Number=SeqID_43799
SNYCIRDLASKISQGLSLQHAFSYSYSSTIHCSLILSWLKPTLYNLLLIRHLPLLLSYQG

SEQ ID NO: 109774 - protein, 76 aa, Setaria italica
  misc_feature (18)..(18): Xaa can be any naturally occurring amino acid
  Transcript Sequence Number=SeqID_43800
QSWRLIMMVLARIQECIXRSLTSRISRLKVVGLDPLRKNDQQPTKQSKSKQKQTTWTQAKHASVSSFSHTNQSNCR

SEQ ID NO: 109775 - protein, 57 aa, Setaria italica
  Transcript Sequence Number=SeqID_43801
  Subcellular localization annotation: CTP_CleavageSite=40; ConfidenceScore=5.45e-01
QSQSLHTGTINLAKIQGRTCCFRLFLLLSLPSLLSRPSTSFSYSTSSLRNYSRYSTD

SEQ ID NO: 109776 - protein, 163 aa, Setaria italica
  misc_feature (46)..(46): Xaa can be any naturally occurring amino acid
  misc_feature (68)..(68): Xaa can be any naturally occurring amino acid
  misc_feature (116)..(116): Xaa can be any naturally occurring amino acid
  Transcript Sequence Number=SeqID_43802
  Gene Ontology: Mol. function=binding; Cellular component =intracellular; Biological process=RNA processing
  Homolog annotation: Hit_ID=B9SKM7; Match level="QueryCoverage=96%, HitCoverage=18%, E-value=2e-19, Identity=39%"; Hit description=Pre -mRNA-processing protein prp39, putative
ALSRALKSVKREALLEICRFSAMYKECIGDIPGARQQYHEIYSEIXPTSHEAIEAHANFERRLGDDEXACSVYEDAIAAERKLGKVSDLPALLFQYAFFAYVVLNNPIKSRQILSXLHSHNLTHPVIKGVIDLVSCFPESKDTLFREFLDPLVQKYCINFLTK

SEQ ID NO: 109777 - protein, 42 aa, Setaria italica
  misc_feature (15)..(15): Xaa can be any naturally occurring amino acid
  Transcript Sequence Number=SeqID_43803
VAVGMLRSCHQMAAXLVFELVLFLAGVACILFPVETKGREMD

SEQ ID NO: 109778 - protein, 66 aa, Setaria italica
  Transcript Sequence Number=SeqID_43804
FIFQIMLLTPAGRVNLQFSDLHFLYSSAFFLGVIFSCSTNYCDHNFNLRLISPLILGAHDCSGCFH

SEQ ID NO: 109779 - protein, 122 aa, Setaria italica
  Transcript Sequence Number=SeqID_43805
RVASGAWAPFCAPEPRRIYGELDRGAHEIRALFQSAPEADTCHVGPDESDPRRPRSGEAESCSEGSGASDLGTVGRVRRSLVIKGSECPTPGHWVGRGGAGLVPPHVGPTAVFVTSGGPGPS

SEQ ID NO: 109780 - protein, 328 aa, Setaria italica
  Transcript Sequence Number=SeqID_43806
  Gene Ontology: Mol. function=protein binding; Cellular component =plasma membrane
  Homolog annotation: Hit_ID=Q2QN32; Match level="QueryCoverage=98%, HitCoverage=68%, E-value=0.0, Identity=94%"; Hit description=Lipase, putative, expressed
  Pfam annotation: Domain name=DUF620; Domain location=32-275; Score =654.0; E_value=1.3e-193; Accession=PF04788.4; Description=Protein of unknown function (DUF620)
  Subcellular localization annotation: CTP_CleavageSite=30; ConfidenceScore=5.13e-01
CSTQETSSAQYILQQYLAASGGQRLLSSIRNAYAMGKVRMVATEFETGGRVVRNRMAAQRAEPGRFVLWQMAPEMWYIELAVGGSKVHAGCNGKLVWRHTPWLGAHAAKGPVRPLRRALQGLDPLTAASMFAGARCIGERKVNGEDCFILKLCADPEMLRARSEGLAEIIRHVLFGYFSQKTGLLVHLEDSHLTRIQSTTGGDAVYWETTINSFIEDYRPVEGIMIAHSGRSAVTLFRFGEAAMSHTKTRMEEAWSIEEVAFNVPGLSMDCFIPPTDIKSGSVSETVELPQGEKSKVGLLPCHRAKVAALEKADDNVAWSGALQLDCK

SEQ ID NO: 109781 - protein, 46 aa, Setaria italica
  Transcript Sequence Number=SeqID_43807
MPRKHAPAFTPEAASASASTGAGQPHNLPVLQAKMKRDPEGYEEEL

SEQ ID NO: 109782 - protein, 92 aa, Setaria italica
  misc_feature (1)..(4): Xaa can be any naturally occurring amino acid
  misc_feature (7)..(7): Xaa can be any naturally occurring amino acid
  misc_feature (14)..(14): Xaa can be any naturally occurring amino acid
  Transcript Sequence Number=SeqID_43808
XXXXFFXFFFFFFXFFFFIHTKIPPWYYYHRSVQGLLQAIGNLYLCSEHLLHILNWLLHIGRTLVPTIHSHGNNIIVQGLLQAIGNLYLCSE

SEQ ID NO: 109783 - protein, 66 aa, Setaria italica
  Transcript Sequence Number=SeqID_43809
KKNIAHKEINRDFHCAPKYIFYYLRECNDASRGTSTYHRSEAGTDGRRTAQSPSRPGKTDGRRHVR

SEQ ID NO: 109784 - protein, 70 aa, Setaria italica
  Transcript Sequence Number=SeqID_43810
LRMYESAPAGSSKRDWLKIAVWILTTLLTLAFSGKVAAVMPPPVAVVVWLMAFATIAGGFVTFFIYKEKK

SEQ ID NO: 109785 - protein, 120 aa, Setaria italica
  Transcript Sequence Number=SeqID_43811
YYLDYFMGSLHENSSEHPALGCSRAPGRVHPLDGETAQAIFQRATHFEEKTDTITYRFMLDEIILQANCTKFIESLQAVVAYQSRPAIGKQQRQSSPSRKLPRARPASMLPPLLTPTTLV

SEQ ID NO: 109786 - protein, 162 aa, Setaria italica
  Transcript Sequence Number=SeqID_43812
MATAHQAVTPRPREEDPAAERLIFVPVEQQADYQQDGRQGNNGDGAFPWLTLLGFGFLTFNSVMAILRAQGDRMAIAFVGFSYADLVALFACLRMYESAPAGSSKRDWLKIAVWILTTLLTLAFSGKVAAVMPPPVAVVVWLMAFATIAGGFVTFFIYKEKK

SEQ ID NO: 109787 - protein, 55 aa, Setaria italica
  Transcript Sequence Number=SeqID_43813
SMHRYLVQFLIHHIQKDDTIWNQNCFSKNKCYSKQAKGFLHKWRYRLWSMTAHKI

SEQ ID NO: 109788 - protein, 120 aa, Setaria italica
  Transcript Sequence Number=SeqID_43814
  Subcellular localization annotation: CTP_CleavageSite=57; ConfidenceScore=5.73e-01
FFFVTSTGKTATTNRPNSLAHQKCAPQVPSYFTYISRTLSKATRNTDSGETAFTNTCSVHRQVLQVRTANTLIIDGSGALISHVQGCSDWCGGDKAGGDAFSTQVQRPLSASALESNDPY

SEQ ID NO: 109789 - protein, 152 aa, Setaria italica
  Transcript Sequence Number=SeqID_43815
  Gene Ontology: Mol. function=superoxide dismutase activity; Cellular component=cytoplasm; Biological process=superoxide metabolic process
  Homolog annotation: Hit_ID=Q0DRV6; Match level="QueryCoverage=100%, HitCoverage=100%, E-value=4e-75, Identity=92%"; Hit description =Superoxide dismutase [Cu-Zn] 1
  Pfam annotation: Domain name=Sod_Cu; Domain location=1-152; Score =350.8; E_value=2.6e-102; Accession=PF00080.12; Description =Copperzinc superoxide dismutase (SODC)
MVKAVVVLGSSEGVKGTIYFTQEGDGPTTVTGSVSGLKPGLHGFHVHALGDTTNGCMSTGPHYNPAGKEHGAPEDDNRHAGDLGNCTAGADGVANIHVTDSQIPLTGPNSIIGRAVVVHADPDDLGKGGHELSKSTGNAGGRIACGIIGLQG

SEQ ID NO: 109790 - protein, 98 aa, Setaria italica
  Transcript Sequence Number=SeqID_43816
  Gene Ontology: Mol. function=superoxide dismutase activity; Cellular component=cytoplasm; Biological process=superoxide metabolic process
  Homolog annotation: Hit_ID=B6TIS2; Match level="QueryCoverage=83%, HitCoverage=69%, E-value=1e-37, Identity=96%"; Hit description =Superoxide dismutase [Cu-Zn]
  Pfam annotation: Domain name=Sod_Cu; Domain location=2-98; Score =100.8; E_value=4.6e-27; Accession=PF00080.12; Description=Copperzinc superoxide dismutase (SODC)
SFLILLNFLVGSKVVIGAPEDDNRHAGDLGNVTAGADGVANIHVTDSQIPLTGPNSIIGRAVVVHADPDDLGKGGHELSKSTGNAGGRIACGIIGLQG

SEQ ID NO: 109791 - protein, 152 aa, Setaria italica
  Transcript Sequence Number=SeqID_43817
  Gene Ontology: Mol. function=superoxide dismutase activity; Cellular component=cytoplasm; Biological process=superoxide metabolic process
  Homolog annotation: Hit_ID=Q0DRV6; Match level="QueryCoverage=100%, HitCoverage=100%, E-value=1e-75, Identity=93%"; Hit description =Superoxide dismutase [Cu-Zn] 1
  Pfam annotation: Domain name=Sod_Cu; Domain location=1-152; Score =355.5; E_value=9.8e-104; Accession=PF00080.12; Description =Copperzinc superoxide dismutase (SODC)
MVKAVVVLGSSEGVKGTIYFTQEGDGPTTVTGSVSGLKPGLHGFHVHALGDTTNGCMSTGPHYNPAGKEHGAPEDDNRHAGDLGNVTAGADGVANIHVTDSQIPLTGPNSIIGRAVVVHADPDDLGKGGHELSKSTGNAGGRIACGIIGLQG

SEQ ID NO: 109792 - protein, 411 aa, Setaria italica
  Transcript Sequence Number=SeqID_43818
  Homolog annotation: Hit_ID=Q7XQ91; Match level="QueryCoverage=56%, HitCoverage=22%, E-value=6e-46, Identity=44%"; Hit description =OSJNBa0018M05.17 protein
  Pfam annotation: Domain name=DUF789; Domain location=234-409; Score= -70.1; E_value=1.6e-07; Accession=PF05623.4; Description=Protein of unknown function (DUF789)
KKKINKLKYVGRASVPVTKEVRTDHRSHRQNHIGGIQPQHGTAIKHPSKNFMQRPSSVRMETHNGLPAEDSKLQASPNYFIGPREKTYEQSTSDFDKAQRLYLHGKLSVALHSRESIHCETGSVSSSETTTPKSSGESTDISVALSVQKRRLHDSVQINDANETISGQSSPGSKSTTTELLVGCGTVPSVQGNHGCQQFCNSRTHLVEMLRVVNDAYKVQVAADVHLAAGYPITDLETFIYSATPVIGHAPCLRGSNCSWDQAVSSSVCQHDISNVSLRTIWEWYEEPGCYGLEVKALNDLSSKTSCSSSSEFFAYFVPYLSAIQLFGWSRNNMDHSFGVQGRELLKASNTASSLSSDPVHAKVHKPFEESNAYSSESSLVVEGHGELMFEYFETEQPSFRPPETAKAHRG

SEQ ID NO: 109793 - protein, 136 aa, Setaria italica
  misc_feature (101)..(101): Xaa can be any naturally occurring amino acid
  misc_feature (114)..(114): Xaa can be any naturally occurring amino acid
  Transcript Sequence Number=SeqID_43819
  Gene Ontology: Mol. function=transferase activity, transferring glycosyl groups; Cellular component=integral to membrane; Biological process=protein amino acid glycosylation
  Homolog annotation: Hit_ID=B6UBC9; Match level="QueryCoverage=95%, HitCoverage=67%, E-value=1e-23, Identity=59%"; Hit description =Transferase, transferring glycosyl groups
  Subcellular localization annotation: CTP_CleavageSite=55; ConfidenceScore=5.44e-01
PGSANRLLVLFAATCLILAAASFAFAVSASRGRPPPPQPPPAVAFRCGPAEDSLRSFLASSSSGRNYSAGDREKVLAVVGVHTEHGSAARRAALRATWFPXQPEGIVSLEHGTXVLTFRFVTGRPKDKTKNGKILT

SEQ ID NO: 109794 - protein, 86 aa, Setaria italica
  misc_feature (85)..(85): Xaa can be any naturally occurring amino acid
  Transcript Sequence Number=SeqID_43820
DINDMSLETIQVQSYGLKLLHPLYLNLLSSHSCTMLHRCHSSWYYCYDEAPPPQRHEAHFARKPFFLAGGVGDGGFSSSRIFGGXL

SEQ ID NO: 109795 - protein, 483 aa, Setaria italica
  Transcript Sequence Number=SeqID_43821
  Gene Ontology: Mol. function=zinc ion binding; Cellular component =nucleus; Biological process=regulation of transcription
  Homolog annotation: Hit_ID=Q5NBA7; Match level="QueryCoverage=45%, HitCoverage=45%, E-value=2e-47, Identity=47%"; Hit description =Putative ascorbate oxidase promoter-binding protein AOBP
  Pfam annotation: Domain name=zf-Dof; Domain location=101-163; Score =140.5; E_value=5.3e-39; Accession=PF02701.7; Description=Dof domain, zinc finger
MELAGAASPRSPESHVAPPRPPPQPPEKDACEDTGDMSMAVEKPCTRQEVDLGQTNRSSLNSSSECENQAASNDEMTGSESNLETAKTEGDVSNGEKVLKKPDKILPCPRCNSMDTKFCYYNNYNIKQPRHFCKSCQRYWTAGGSMRNIPVGAGRRKSKSSSANCRSILIPGSSVATPAGEAALFPLSINGNQAAVNFGPDSPLCNSMASVLKIGGEQSKNANPASTAQPRNGETQTCPASTTASDGPRSESHKGAVSAHQNGVVGHGNGVTSIHPIPFFPGPPFVYPWSPAWNGIPALAAPVCPAPAEAANSSENGNSSCNAQWNVPPMVPVLPPGFCGPPFPVPVMPSSVWPFITPWPNGAWSTPWLGPSSSVPASSPTSSSTCSDSSSPVLGKHSRDSRPQGDEKAERCLWIPKTLRIDDPDEAAKSSIWTTLGIEPGERGMFRPFQSKPEGREQISSSAKVLQANPAALSRSQSFQEKT

SEQ ID NO: 109796 - protein, 97 aa, Setaria italica
  misc_feature (91)..(91): Xaa can be any naturally occurring amino acid
  Transcript Sequence Number=SeqID_43822
  Homolog annotation: Hit_ID=Q2QNV4; Match level="QueryCoverage=98%, HitCoverage=8%, E-value=2e-24, Identity=51%"; Hit description =Pentatricopeptide, putative, expressed
DGWYYFKSMEKLFGIRPEREHHNCMVDLLGRAGKLDEAVEFIHEMSLDADSVIWRTLLGACRMHKNANLAAYAAREILKLEPDDQGARVLXSNTYAD

SEQ ID NO: 109797 - protein, 54 aa, Setaria italica
  Transcript Sequence Number=SeqID_43823
LQSILNKLRSQWYMSMTQRNKWLNLKHQTSRIGGMNDTSGQFIRVMNGFSQHKQ

SEQ ID NO: 109798 - protein, 85 aa, Setaria italica
  Transcript Sequence Number=SeqID_43824
  Gene Ontology: Mol. function=mismatched DNA binding; Cellular component=MutSalpha complex; Biological process=mismatch repair
  Homolog annotation: Hit_ID=Q9M5L9; Match level="QueryCoverage=100%, HitCoverage=13%, E-value=2e-35, Identity=88%"; Hit description =Mismatch binding protein Mus3 (Fragment)
  Pfam annotation: Domain name=MutS_IV; Domain location=1-70; Score =47.2; E_value=6.3e-11; Accession=PF05190.10; Description=MutS family domain IV
YLKKQRKLLRCASVDYVNVGKDMYLIEVPESLGGSVPGNYELQSTKKGFYRYWTPELKDLISELSKAEAERESILKGILQNLIQL

SEQ ID NO: 109799 - protein, 387 aa, Setaria italica
  Transcript Sequence Number=SeqID_43825
  Gene Ontology: Mol. function=mismatched DNA binding; Cellular component=MutSalpha complex; Biological process=mismatch repair
  Homolog annotation: Hit_ID=Q9M5L9; Match level="QueryCoverage=98%, HitCoverage=60%, E-value=0.0, Identity=86%"; Hit description =Mismatch binding protein Mus3 (Fragment)
  Pfam annotation: Domain name=MutS_V; Domain location=81-326; Score =355.2; E_value=1.3e-103; Accession=PF00488.13; Description=MutS domain V
FLSSTKKGFYRYWTPELKDLISELSKAEAERESILKGILQNLIQLFVEHHSEWRQLVSVVAELDVLISLSIASDYFEGASCRPTIKESNGPDDTPTFHARNLGHPILRSDSLGKGSFVPNDVKIGGPGNASFIVLTGPNMGGKSTLLRQVCLTIILAQIGADVPAENLELSLVDRIFVRMGARDHIMSGQSTFLVELMETASVLSSATKNSLVVLDELGRGTSTSDGQAIAASVLEYLVHQVQCLGLFSTHYHRLAVEHKDAKVSLCHMACEVGKGEGGLEEVTFLYRLTPGACPKSYGVNVARLAGIPASVLQRANEKSNDFEANYGKRHRMIKDKHASAQSEDKFSAIRDLFRIVNAWPCPDGQAASINMLREVQKLAKVQAVEG

SEQ ID NO: 109800 - protein, 104 aa, Setaria italica
  Transcript Sequence Number=SeqID_43826
GVYSNGKGKKYDSGMKGKEKESSDEESEDQGLCFNISSPLWGEHLSFGTFQHLEIKNIWKMHLNDSPSVAINEYGTNLHKFKFESLEVIEAKHARSVRNLYLKR

SEQ ID NO: 109801 - protein, 287 aa, Setaria italica
  Transcript Sequence Number=SeqID_43827
  Gene Ontology: Cellular component=microtubule; Biological process =microtubule cytoskeleton organization and biogenesis
  Homolog annotation: Hit_ID=B9RTR7; Match level="QueryCoverage=74%, HitCoverage=41%, E-value=7e-26, Identity=33%"; Hit description =Protein FRIGIDA, putative
  Pfam annotation: Domain name=Frigida; Domain location=1-195; Score= -34.1; E_value=7.4e-07; Accession=PF07899.3; Description=Frigida-like protein
AEKTGLEEEKGVGEETKEGKKGDGHKGAPEQPEAQIFLQMVAAFGLKDKFDGEFLRRLFVANGRKRELARIACVLGFEDSLGDIVEELIKSGNAVDAIYVAHEADLLEKFPPVPLLKAYMRDSGDKAQAVLKSGRHSSSALEEANNLEGNAYRSVIRCVESCHLQSVFSIDGIRKKLAKLEKEKVERKKPGGPSRFQNKRSRGAAGPYPFPPAKAARGSGSSFGPSFQNPVSRSFNYAAHAGYINPAGAPPYYVPGRRGGVPYGGPGASYAGSPNFAAGGTQQPFRR

SEQ ID NO: 109802 - protein, 75 aa, Setaria italica
  Transcript Sequence Number=SeqID_43828
GSFIFFRLGAVIGVQDVAGDVVEDEVRLRLVHLRRARVPVDAAEQDGGGTSSSTTSPATSCTPMTAPRRKKMNEP

SEQ ID NO: 109803 - protein, 81 aa, Setaria italica
  Transcript Sequence Number=SeqID_43829
KFDGTPIKDLPSFNPYSLKTCLIMLGRLASRLNWVGHVLIMKHVNHALFMLLYMFNYKNTCFNRNMENHTRKQYNHNIIWL

SEQ ID NO: 109804 - protein, 135 aa, Setaria italica
  Transcript Sequence Number=SeqID_43830
  Homolog annotation: Hit_ID=Q8RW42; Match level="QueryCoverage=41%, HitCoverage=81%, E-value=2e-21, Identity=82%"; Hit description=CGI -144-like protein (Fragment)
  Pfam annotation: Domain name=DUF1754; Domain location=3-99; Score =80.6; E_value=5.7e-21; Accession=PF08555.2; Description=Eukaryotic family of unknown function
MSEYQNVVGGRLKLKGKTLDIKEGGVKKKKKQQHREESSQIGHDGLHEGGISELPTDHNNELTEGEKTGEEEGNPLPDYDHLTPAERRYMEQKQKIDMQKMAKVANKSHIDRIQDFNQYLANLSEHYDIPKVGPG

SEQ ID NO: 109805 - protein, 136 aa, Setaria italica
  Transcript Sequence Number=SeqID_43831
  Homolog annotation: Hit_ID=Q8RW42; Match level="QueryCoverage=41%, HitCoverage=81%, E-value=8e-22, Identity=80%"; Hit description=CGI -144-like protein (Fragment)
  Pfam annotation: Domain name=DUF1754; Domain location=3-100; Score =100.9; E_value=4.4e-27; Accession=PF08555.2; Description=Eukaryotic family of unknown function
MSEYQNVVGGRLKLKGKALDVKEGGVKKKKKKKQHREESSQIGHDELHEGGSSELPTDPNNELTEADKLGEEEGNPHPDYDHLTPAERRYMEQKQKIDMQKLAKVSNKSHRDRIQDFNQYLANLSEHYDIPKVGPG

SEQ ID NO: 109806 - protein, 166 aa, Setaria italica
  Transcript Sequence Number=SeqID_43832
  Gene Ontology: Mol. function=protein binding; Cellular component =chloroplast; Biological process=apoptosis
  Homolog annotation: Hit_ID=Q2R0M2; Match level="QueryCoverage=96%, HitCoverage=26%, E-value=2e-65, Identity=75%"; Hit description =Leucine Rich Repeat family protein, expressed
  Pfam annotation: Domain name=LRR_1; Domain location=22-44; Score=9.9; E_value=3.8; Accession=PF00560.25; Description=Leucine Rich Repeat
  Pfam annotation: Domain name=LRR_1; Domain location=46-68; Score =13.7; E_value=0.73; Accession=PF00560.25; Description=Leucine Rich Repeat
  Pfam module annotation: Pfam domain module=LRR_1::LRR_1; Domain location=22-44::46-68
YISFRGISRIESLPDSIGKLRDLQVLDLRACHNLEELGQGIAKLDKLEYLDLSECHLLVSMPKGLGQLTRLEILKGFVVANSNSRDFCHLNELTKLEKLRKLGIVIGKMAMPLEDEFLKLGEFKALESLRISWGVLSSDKNGTTEASRRHSVATMSYALPPRPCSV

SEQ ID NO: 109807 - protein, 74 aa, Setaria italica
  Transcript Sequence Number=SeqID_43833
TNFQTWTCNLCKFLFRIGCCMCISLLTLVRLAPFQHCGWSCTFIGLTYSLLQASQTLERQKCTHIKTVAELMAF

SEQ ID NO: 109808 - protein, 90 aa, Setaria italica
  Transcript Sequence Number=SeqID_43834
  Gene Ontology: Mol. function=nucleotidyltransferase activity
  Homolog annotation: Hit_ID=B9RD63; Match level="QueryCoverage=92%, HitCoverage=5%, E-value=3e-09, Identity=42%"; Hit description =Nucleotidyltransferase, putative
LAFQDFPELPWLNDKGYYVIEEFVANRLEIALRMSWAAAGGGGGGGRKAVRVGKGVKEKAGLAANAFWREKGYVDWWMRLEPRMRARIMG

SEQ ID NO: 109809 - protein, 91 aa, Setaria italica
  Transcript Sequence Number=SeqID_43835
  Homolog annotation: Hit_ID=Q9LWW0; Match level="QueryCoverage=96%, HitCoverage=17%, E-value=6e-40, Identity=87%"; Hit description =Pentatricopeptide (PPR) repeat-containing protein-like
EPQNTANLVILSNIYAACGKWDGVARVWKLLREKDHKKSAGYSYIEFDGRMHKFLVEDKSHPRYEEVYETLDSVTLTMKLVGLENLEEEEC

SEQ ID NO: 109810 - protein, 204 aa, Setaria italica
  Transcript Sequence Number=SeqID_43836
RLNLAQSKALLFVNQKIQEATPTADIFLENRAKLFPDGSHSDESETEDGSSWETMSHEEMQGSSHSPYGSEPSVNKIFDRISWTSGNDSEGGQTNRLCDDLSNMYLTDMKQPKKKESAISKLWKSSPLKHCEFRTKDAAEMTNGRSSSASLPNGVFSTAKGLNLDMGDSTPSTAQWSSPDSMNSQLNRRISSRFVYLVSSLVFL

SEQ ID NO: 109811 - protein, 212 aa, Setaria italica
  misc_feature (87)..(87): Xaa can be any naturally occurring amino acid
  Transcript Sequence Number=SeqID_43837
  Gene Ontology: Mol. function=nucleoside-triphosphatase activity; Cellular component=membrane; Biological process=transport
  Homolog annotation: Hit_ID=B6U7G4; Match level="QueryCoverage=99%, HitCoverage=32%, E-value=1e-111, Identity=91%"; Hit description=ABC -2 type transporter family protein
  Pfam annotation: Domain name=ABC_tran; Domain location=1-136; Score =1.6; E_value=3e-06; Accession=PF00005.19; Description=ABC transporter
DLFFSQLTVRETLSLAAELQLTDTWAPERKERYVNDLLFRLGLVNCADSIVGDAKVRGISGGEKKRLSLACELIASPSVIFADEPTXTGLDAFQAEKVMETLRQLAEDGHTVICSIHQPRGSVYGKFDDIVLLSEGEIVYMGPAKEEPLTYFASLGYQCPDHMNPAEFLADLISVDYGSAESVQSSQKRIENLIEAFSNKALATEGNGSIAK

SEQ ID NO: 109812 - protein, 541 aa, Setaria italica
  misc_feature (154)..(154): Xaa can be any naturally occurring amino acid
  misc_feature (168)..(168): Xaa can be any naturally occurring amino acid
  Transcript Sequence Number=SeqID_43838
  Gene Ontology: Mol. function=nucleoside-triphosphatase activity; Cellular component=membrane; Biological process=transport
  Homolog annotation: Hit_ID=B6U7G4; Match level="QueryCoverage=95%, HitCoverage=78%, E-value=0.0, Identity=89%"; Hit description=ABC-2 type transporter family protein
  Pfam annotation: Domain name=ABC2_membrane; Domain location=254-465; Score=200.6; E_value=4.4e-57; Accession=PF01061.16; Description=ABC -2 type transporter
  Pfam annotation: Domain name=ABC_tran; Domain location=1-143; Score =23.0; E_value=7.2e-08; Accession=PF00005.19; Description=ABC transporter
  Pfam module annotation: Pfam domain module=ABC2_membrane::ABC_tran; Domain location=254-465::1-143
LYAFVRQKDLFFSQLTVRETLSLAAELQLTDTWAPERKERYVNDLLFRLGLVNCADSIVGDAKVRGISGGEKKRLSLACELIASPSVIFADEPTTGLDAFQAEKVMETLRQLAEDGHTVICSIHQPRGSVYGKFDDIVLLSEDIVYIEKPAKEXAYMVTMSFSINNLXHFASLGYQCPDHMNPAEFLADLISVDYGSAESVQSSQKRIENLIEAFSNKALATEGNGSIAKPEESEFSAKAVQKSSMKQRRGWWRQFRLLFKRAWMQAFRDGPTNKVRARMSAASAVIFGSVFWRMGKSQTSIQDRMGLLQVAAINTAMAALTKTLGVFPKERTIVDRERAKGSYALGPYLSSKLLAEIPIGAAFPLIFGSILYPMAKLHPTFSRFAKFCGIVTVESFAASAMGLTVGAMAPTTEAAMALGPSLMTVFIVFGGYYVNPDNTPVIFRWIPRISLIRWAFQGLCINEFKGLQFEQQHSYDIQTGEQALERFSLGGIRIADTLVAQGRILMFWYWSTYLLLKKNRPKYQPLLPPLEDDQNKQQVE

SEQ ID NO: 109813 - protein, 39 aa, Setaria italica
  misc_feature (20)..(20): Xaa can be any naturally occurring amino acid
  Transcript Sequence Number=SeqID_43839
NLGSYFSQHPKRAWQCHYTXHKMVPITYGITGCSLLFSL

SEQ ID NO: 109814 - protein, 125 aa, Setaria italica
  misc_feature (21)..(21): Xaa can be any naturally occurring amino acid
  misc_feature (114)..(114): Xaa can be any naturally occurring amino acid
  Transcript Sequence Number=SeqID_43840
  Gene Ontology: Cellular component=integral to membrane
  Homolog annotation: Hit_ID=B9SSP0; Match level="QueryCoverage=86%, HitCoverage=61%, E-value=1e-33, Identity=65%"; Hit description=P53 induced protein, putative
  Pfam annotation: Domain name=EI24; Domain location=1-124; Score= -91.2; E_value=0.0027; Accession=PF07264.3; Description=Etoposide -induced protein 2.4 (EI24)
MNFLLLSLIYAYYCFEYKWNXLFAVSLNKRLEFFESNWAFFAGFGAPCVLPIFFFSPLTSYGLMAILYPLFVLTAAGTQAEQVIDELKPAHEGKLQRVPVFFVAKRLTTQVTCXLQLFPAMQKEE

SEQ ID NO: 109815 - protein, 190 aa, Setaria italica
  misc_feature (13)..(13): Xaa can be any naturally occurring amino acid
  misc_feature (23)..(23): Xaa can be any naturally occurring amino acid
  Transcript Sequence Number=SeqID_43841
  Gene Ontology: Cellular component=integral to membrane; Biological process=negative regulation of cell growth
  Homolog annotation: Hit_ID=B9SSP0; Match level="QueryCoverage=76%, HitCoverage=80%, E-value=3e-42, Identity=55%"; Hit description=P53 induced protein, putative
  Pfam annotation: Domain name=EI24; Domain location=4-189; Score=61.5; E_value=3.1e-15; Accession=PF07264.3; Description=Etoposide-induced protein 2.4 (EI24)
HTAATAIYSFLRXGPLLEYFFMXWVYPLYVFSFILSTLWYNDIAKHALDVVKSKSLDSTRALDDRNVTEPEDQPEGFDRVALGIGEHVYSILLLTIFFVEVSVIGYVPYFGKAMNFLLLSLIYAYYCFEYKWNFFAVSLNKRLEFFESNWAFFAGFGAPCVLPIFFFSPLTSYGLMAILYPLVLLSTFQL

SEQ ID NO: 109816 - protein, 57 aa, Setaria italica
  Transcript Sequence Number=SeqID_43842
VSTAPKRPLIVFLFIILKQDDCIADLCFIVLFMLFHLYPPHILCGKFLQCKHELRIT

SEQ ID NO: 109817 - protein, 127 aa, Setaria italica
  misc_feature (74)..(74): Xaa can be any naturally occurring amino acid
  misc_feature (110)..(110): Xaa can be any naturally occurring amino acid
  Transcript Sequence Number=SeqID_43843
  Gene Ontology: Mol. function=protein serine/threonine kinase activity; Cellular component=cytoplasm; Biological process=protein amino acid phosphorylation
  Homolog annotation: Hit_ID=B6SYP5; Match level="QueryCoverage=100%, HitCoverage=25%, E-value=3e-52, Identity=80%"; Hit description=MPK17- 2-putative MAPK
  Pfam annotation: Domain name=Pkinase; Domain location=6-127; Score= -79.2; E_value=0.0009; Accession=PF00069.17; Description=Protein kinase domain
  Pfam annotation: Domain name=Pkinase_Tyr; Domain location=6-121; Score=-156.7; E_value=0.0026; Accession=PF07714.9; Description =Protein tyrosine kinase
  Pfam module annotation: Pfam domain module=Pkinase::Pkinase_Tyr; Domain location=6-127::6-121
GEASQFQIQEVIGKGSYGVVAAAIDTHTGERVAIKKIKDVFENVSDAARILREIKLLRLLRHPNIVQIKHIMLXPPTRREFRDIYVVFELMESDLHQVINANDNLTPEHXRFFLYQLLRALKYIHAA

SEQ ID NO: 109818 - protein, 87 aa, Setaria italica
  Transcript Sequence Number=SeqID_43844
  Homolog annotation: Hit_ID=B6U151; Match level="QueryCoverage=98%, HitCoverage=15%, E-value=1e-20, Identity=62%"; Hit description =Glutamyl-tRNA
  Subcellular localization annotation: CTP_CleavageSite=52; ConfidenceScore=5.70e-01
MPPPLQAHRLLISHRRLPTPARRRFTAVSSVQSAPATTLAPGPATSSILSIRESLLSGERTAVDITSEYLSRLRRTEPSVRSFIHVA

SEQ ID NO: 109819 - protein, 100 aa, Setaria italica
  Transcript Sequence Number=SeqID_43845
LFFFSFGSYFWFNLLLLSFWVIIVVQRLRLHNTRLKEQQQRLTIFIKSHLRANVYWQLGKVFSCSLLAQQVKYLTAHLDLQGLTKSAMFLSPPSKEIDSN

SEQ ID NO: 109820 - protein, 400 aa, Setaria italica
  Transcript Sequence Number=SeqID_43846
QPLVAMNRKIREKSCTPKFGFVARSSNRGHIIEIVRKRCNKILTELEEGNYLPKNLAKAMSVANLYKKQKLRSVDISQSEFFPFTKETISLQNDILNALWSLPKLRHDKRKLLRPILDQDSKVERTHLKAALRNYLTDCLFECDEGSLPDEALRAIAFINRTCGHQQVVLTEKRKEVEVDAVLNLSSHLQALAHCWVEECSCGEELISLGNDSCNEDNDFILSGTNYFNLSSVQQPMQEPCCSSNIGTDVVRECCWSETVGDMQNVSGAEDSGPKSEEMLRKSCLRTEDSGGIGHYSGNEAAGSGMGPYAEKSVNASHLKESRCSKINGICDETSIVAHKLIGQILDKWLLVNEVDEPSRSHLGSGLVSQSPQDDDKEPVNSTENLEGDNFYSCCGTCVA

SEQ ID NO: 109821 - protein, 100 aa, Setaria italica
  Transcript Sequence Number=SeqID_43847
RKNQMGAPFTKSCQHQEFLLLLGSEVNWSFYHQQIVRNTDQLFLHFQNHQTSSTSLKKRRITSLVMSRRYLQSHRFEIHLTSSCQLKNTKSRQMRTSVTN

SEQ ID NO: 109822 - protein, 80 aa, Setaria italica
  Transcript Sequence Number=SeqID_43848
SVKCNRTAQSRARTRQICLLGSLPHLSALPLEPPHPLLLPLGPHRGGGELATTGRRTPTTTTTTLLRKGVDGERKERRRT

SEQ ID NO: 109823 - protein, 96 aa, Setaria italica
  Transcript Sequence Number=SeqID_43849
SVKCNRTAESRARTRQICLLGSLPHLSALPLEPPHPLLLPLGPHRGGGGARSPARPLSRSPSRRGSGGRTKRDLRELRRGGASSSRRRGSIQGAPN

SEQ ID NO: 109824 - protein, 164 aa, Setaria italica
  Transcript Sequence Number=SeqID_43850
GGGRYEEEDDYRKKPSAGGYGGGGRYEDEYSKKPSGGHGGGRYEEDDGYKKPSGGGYGYGASSGGGHGGRYEEDDYKKKPSGHSGGRYEEEEGYKKTGGHSGGKYGEEDDKKKKKHGDDESEGGGIGDYLKLAQGFMNKKNGEGESGGGMGDYLKLAEGFMKKR

SEQ ID NO: 109825 - protein, 239 aa, Setaria italica
  Transcript Sequence Number=SeqID_43851
  Gene Ontology: Mol. function=adenyl-nucleotide exchange factor activity; Cellular component=chloroplast; Biological process=protein folding
  Homolog annotation: Hit_ID=B4FLR0; Match level="QueryCoverage=95%, HitCoverage=69%, E-value=1e-114, Identity=91%"; Hit description=GrpE protein homolog
  Pfam annotation: Domain name=GrpE; Domain location=32-203; Score =172.8; E_value=9.8e-49; Accession=PF01025.11; Description=GrpE
TAADDGAGSTDETPSIIVTALQSYKEALINDDEAKAAEIEAFLLSIEDEKNSFMNKITVLDAELATQRERILRISADFDNFRKRTENEKLNMMSNVQGELIENFLPVLDNFERAKSQIKVETEGEEKINNSYQSIYKQFIEILNSLGVEDVETVGKPFDPMLHEAIMREESTEYEEGIILQEFRKGFKLGERLLRPAMVKVSAGPGPEKSGDDEDPTEVEDSVAPLKVEDAEDDDGDAE

SEQ ID NO: 109826 - protein, 49 aa, Setaria italica
  Transcript Sequence Number=SeqID_43852
ECFLHEMTIFMRVVNYSHENSMPLTKSPFSGSDRRSGSILTSMLDYACM

SEQ ID NO: 109827 - protein, 42 aa, Setaria italica
  Transcript Sequence Number=SeqID_43853
  Homolog annotation: Hit_ID=B2KJ70; Match level="QueryCoverage=95%, HitCoverage=14%, E-value=2e-09, Identity=76%"; Hit description=WRKY transcription factor 28 (Fragment)
MARSMESVDGNGGGLVVTELSHIKELVRQLEVHLGGSHDLCR

SEQ ID NO: 109828 - protein, 123 aa, Setaria italica
  misc_feature (92)..(92): Xaa can be any naturally occurring amino acid
  Transcript Sequence Number=SeqID_43854
  Gene Ontology: Mol. function=protein serine/threonine kinase activity; Biological process=protein amino acid phosphorylation
  Homolog annotation: Hit_ID=B6SVE4; Match level="QueryCoverage=100%, HitCoverage=16%, E-value=2e-64, Identity=94%"; Hit description =MAPKKK5
  Subcellular localization annotation: CTP_CleavageSite=31; ConfidenceScore=5.40e-01
GNGNVSFHPLPLPPGALSPMQTGFSNQPAPKVEMPSVAGQWQKGRLLGSGTFGCVYEATNRHTGALCAMKEVNIIPDDAKSAESLKQLEQEXKFLSQFKHENIVQYYGSDIIEVRFYIYLEYV

SEQ ID NO: 109829 - protein, 93 aa, Setaria italica
  misc_feature (89)..(89): Xaa can be any naturally occurring amino acid
  Transcript Sequence Number=SeqID_43855
  Gene Ontology: Cellular component=membrane
  Homolog annotation: Hit_ID=B6TT89; Match level="QueryCoverage=83%, HitCoverage=33%, E-value=3e-17, Identity=61%"; Hit description=YGGT family protein
  Subcellular localization annotation: CTP_CleavageSite=82; ConfidenceScore=5.01e-01
MASPNADPPQHHVSTPPLLLAVRHIPFPGVHRPRALPAPDVLTPIARRLEELASAAAAHPLLKPLFAVHSHLSSFSQSRRLLVAARRDXLLSG

SEQ ID NO: 109830 - protein, 137 aa, Setaria italica
  Transcript Sequence Number=SeqID_43856
  Gene Ontology: Mol. function=nucleotide binding; Cellular component =endoplasmic reticulum lumen; Biological process=response to stress
  Homolog annotation: Hit_ID=P24067; Match level="QueryCoverage=96%, HitCoverage=19%, E-value=7e-57, Identity=81%"; Hit description =Luminal-binding protein 2
KTQVFTTYQDRQTTVSIKVFEGERSMTKDNRLLAKFDLAGIPPAPRGTPQIEVTFEVDANGILHVQAADKGTGKSEKITITSDDRRLSQEEIDRMVRTSEEFAEEDKKVRERVDARNKLETYIYQVKSAVDDTKMTE

SEQ ID NO: 109831 - protein, 219 aa, Setaria italica
  misc_feature (102)..(102): Xaa can be any naturally occurring amino acid
  Transcript Sequence Number=SeqID_43857
  Gene Ontology: Mol. function=DNA binding
VGELGVQVARSKDATTSDGAACGMPEGPVLRLFGKRVVVNNLHQQQNSNTGDLQHVADMELDTSAETPTSGTGKFSSHGAEEAKTWSPWLTGTQQLMYYLPXGEVLSVHSACQFLSYGNGSISYRVLNPQTVTSDKQQHQPSEAADCKFTRAEGSWTESITTSNNVPETAPQNSDSIESTQVNNNEDEVIPVPGSRKYSTVPAYLRGFVPYKKCAAQSV

SEQ ID NO: 109832 - protein, 99 aa, Setaria italica
  Transcript Sequence Number=SeqID_43858
  Subcellular localization annotation: CTP_CleavageSite=74; ConfidenceScore=5.64e-01
SSRIPLSLWETMTMTRSWECRSLTAPAMRKLGLSFRRWRSSTRSSSTSTKPRATPSTKPRATPRSICSSPTMVNCDEVMNKLIFFSCVTYHHNSCLIHY

SEQ ID NO: 109833 - protein, 173 aa, Setaria italica
  misc_feature (158)..(158): Xaa can be any naturally occurring amino acid
  misc_feature (162)..(162): Xaa can be any naturally occurring amino acid
  misc_feature (168)..(168): Xaa can be any naturally occurring amino acid
  Transcript Sequence Number=SeqID_43859
  Gene Ontology: Mol. function=protein dimerization activity
  Homolog annotation: Hit_ID=Q53M48; Match level="QueryCoverage=100%, HitCoverage=19%, E-value=3e-35, Identity=39%"; Hit description=HAT family dimerisation domain containing protein
KSVQRVLNRASKESQELYQTCLTSTLRCSRYLLKQGLAFRGHDESSSSLNKGNLLELIDFLKDNNEEVRNAYDRGGLNSKMTSPDIQKDFERCCAEEITEAIMEEIGNRPFSVLIDESRDISVKEKMAVILRYEFSVSRIRGQGSDGASNMRGEFNGXQKKXLDENPXAFYVH

SEQ ID NO: 109834 - protein, 447 aa, Setaria italica
  misc_feature (55)..(55): Xaa can be any naturally occurring amino acid
  misc_feature (115)..(115): Xaa can be any naturally occurring amino acid
  misc_feature (151)..(151): Xaa can be any naturally occurring amino acid
  Transcript Sequence Number=SeqID_43860
  Gene Ontology: Mol. function=protein dimerization activity
  Homolog annotation: Hit_ID=Q53M48; Match level="QueryCoverage=97%, HitCoverage=44%, E-value=1e-115, Identity=47%"; Hit description=HAT family dimerisation domain containing protein
VSFALVHVKETTADALKEALLAVLDRNKLSVSRIRGQGSDGASNMRGEFNGLQKXILDENPYAFYVHCFAHQLQLVVVSIANCCSSVNDFFEYISLIVTTTSTSCKRRDTLIDNXRQNILRSIENGEVPTRRGLNQETVLARPGDTRWGSXHVTLVRLSQMWDSVIKVLQIVNEDARVPNQAAGLIQKMECFEFVFIMVLMLKLLGITNELSHALQTKGFNIVNALELIHDVKAQFNTMRESDWDNLFDEAGQFCDVNGIPIPNMAEEIPVRGRSRRDGFTITNLHHYRVGIFYVVLNKICAEMNHRFSEVTTELLMCFSCLDPKNSFSSFDVNKLARLAELYDEDFSNHDRGVIRGQLETYILHLIELVLLVPVSTTTVERAFSAMKTIKSKSHNKIADDWFNNLMVCYIERELFNSLDEATILRRFQNLKSRKMQLPCNCAHVQP

SEQ ID NO: 109835 - protein, 188 aa, Setaria italica
  Transcript Sequence Number=SeqID_43861
  Gene Ontology: Mol. function=ATPase activity, coupled to transmembrane movement of substances; Cellular component=integral to membrane; Biological process=transport
  Homolog annotation: Hit_ID=B4ERW4; Match level="QueryCoverage=98%, HitCoverage=26%, E-value=4e-81, Identity=79%"; Hit description=ABC _transporter (Fragment)
EPGDSVAGLLSRFKANLEALTGDGDSSGRNVVTAFKLTKAVVRTVWWHVAVTAFYALVYNVATYVGPYLIDSLVQYLNGDERYASQGQLLVLVFIVAKVLECLSQRHWFFRLQQAGMRARSALVAVVYQKSLALSGQSRRSRTNGEMINIVSVDADRVDAFAWYMHEIWLLPLQVGMAMFILYSTLGL

SEQ ID NO: 109836 - protein, 105 aa, Setaria italica
  misc_feature (36)..(36): Xaa can be any naturally occurring amino acid
  Transcript Sequence Number=SeqID_43862
  Gene Ontology: Mol. function=hydrolase activity, acting on acid anhydrides, catalyzing transmembrane movement of substances; Cellular component=integral to membrane; Biological process=copper ion transport
  Homolog annotation: Hit_ID=Q6JAG2; Match level="QueryCoverage=99%, HitCoverage=10%, E-value=7e-36, Identity=76%"; Hit description =Putative copper-exporting ATPase
  Subcellular localization annotation: CTP_CleavageSite=62; ConfidenceScore=5.11e-01
VIVLSLLTWLVWFLAGSSMVTLTHGYLLPWIAFNLXFSFGISVMVIRFRPCALGLATPTAVMVATGVGASKGVLIKGGQALESAHKVDCIVFDKTGTLTIGKPVS

SEQ ID NO: 109837 - protein, 85 aa, Setaria italica
  Transcript Sequence Number=SeqID_43863
LNECPVDLICRRNLLCSDLGSVPALVILPVCGCPGFCLQGAFFQFVTKKKRERLAVYRNLFGTRWENHAIVWRRGPPLRAPYEFP

SEQ ID NO: 109838 - protein, 111 aa, Setaria italica
  misc_feature (39)..(39): Xaa can be any naturally occurring amino acid
  Transcript Sequence Number=SeqID_43864
  Gene Ontology: Mol. function=protein binding
QGIIDAMSEIDESLLVTEGCRTALLALRYYGNHHRCFWXFLIDEVLYKILAGHCSSEHQTHQMRHGDLFNKDYKDIMNMHPYVWDILGYLAVHCNNEYLSVRKRKTVSCRH

SEQ ID NO: 109839 - protein, 143 aa, Setaria italica
  misc_feature (7)..(7): Xaa can be any naturally occurring amino acid
  Transcript Sequence Number=SeqID_43865
  Gene Ontology: Mol. function=transferase activity; Cellular component= endoplasmic reticulum membrane; Biological process=metabolic process
  Homolog annotation: Hit_ID=B6SHC0; Match level="QueryCoverage=100%, HitCoverage=47%, E-value=4e-69, Identity=86%"; Hit description =Dehydrodolichyl diphosphate synthase 6
  Pfam annotation: Domain name=Prenyltransf; Domain location=1-131; Score=-82.9; E_value=0.00014; Accession=PF01255.11; Description =Putative undecaprenyl diphosphate syntha
LMASTAXNTGLVFSVCMPYNSTSEIVNAVNEVCAERREMLLREHAGDSDDQAANNGVNSEISVADLDRHMYSAGCPDPDIVIRTSGETRLSNFLLWQTTFSHLQNPDPLWPEFSFRHLVWAILQYQRAYPYLEQNRNLAKKQL

SEQ ID NO: 109840 - protein, 366 aa, Setaria italica
  Transcript Sequence Number=SeqID_43866
  Homolog annotation: Hit_ID=Q9SSM1; Match level="QueryCoverage=73%, HitCoverage=61%, E-value=7e-87, Identity=58%"; Hit description =F3N23.26 protein
  Pfam annotation: Domain name=DUF1995; Domain location=59-324; Score =342.8; E_value=6.5e-100; Accession=PF09353.2; Description=Domain of unknown function (DUF1995)
  Subcellular localization annotation: CTP_CleavageSite=36; ConfidenceScore=5.60e-01
APSAASSPSPPRLPATAYSSSSSRRLRPRRLAVSPRAEAGTGTGTGDVEALRAGVSVYKPRSYDVLVSDAARSLACAIDDGKTRLEIEFPPLPSSISSYKGSSDEFIDANIQLALVVARKLKELKGTRSCIVFPDQPEKRRASQLFKTAIDTIEGVTVSSLDDVPTDPVNSFFKSIRNTLDFDFSDDNEDRWKSDEPPSLYIFINSSTRDLASIEKYVEKFATSVPALLFNLELDTLRSDLGLLGFPPKDLHYRFLSQFTPVFYIRQRDYSKTIAVTPYIVNYSGAVFRQYPGPWQVMLKQADGSYACVAESAARFTLGQAKEELLRVIGLQEEEGSSLEFLRRGYKNATWWEENVDQETSAAWRT

SEQ ID NO: 109841 - protein, 75 aa, Setaria italica
  Transcript Sequence Number=SeqID_43867
TCISNHPPAIFISFPVYLLASCWSGLLFSISVVCPLLTGETELPGCSQTNSLAFQYAVATRKWSFEEEVDLEQKR

SEQ ID NO: 109842 - protein, 105 aa, Setaria italica
  Transcript Sequence Number=SeqID_43868
  Gene Ontology: Mol. function=DNA binding; Cellular component =chromosome; Biological process=nucleosome assembly
  Homolog annotation: Hit_ID=B6TMR1; Match level="QueryCoverage=76%, HitCoverage=50%, E-value=4e-25, Identity=75%"; Hit description =Histone H2A
  Pfam annotation: Domain name=Histone; Domain location=1-50; Score =38.4; E_value=2.8e-08; Accession=PF00125.16; Description=Core histone H2AH2BH3H4
QRVGTGAPVYLAAVLEYLAAEVLELAGNAARDNKKTRIIPRHVLLAIRNDEELGRLLAGVTIAHGGVLPNINPVLLPKKTAEKASSGGSKEAKSPKKAAKSPKKA

SEQ ID NO: 109843 - protein, 134 aa, Setaria italica
  Transcript Sequence Number=SeqID_43869
EPVIVGNETRETNQPVQQFVVYVGFEHECPYGHRFLLSEKHMKEIDSSCLQYQRPYVNKEAESKHAQKLLLNASSLTASTVDINNGRKNSKPLELSGRNSQQQSMQIRVNAETSQPFFLWSFLVFLLVIVLKGG

SEQ ID NO: 109844 - protein, 145 aa, Setaria italica
  Transcript Sequence Number=SeqID_43870
  Gene Ontology: Mol. function=hydrolase activity, acting on glycosyl bonds; Cellular component=extracellular region; Biological process =cell wall organization and biogenesis
  Homolog annotation: Hit_ID=B9SSX2; Match level="QueryCoverage=100%, HitCoverage=36%, E-value=3e-44, Identity=59%"; Hit description =Polygalacturonase, putative
  Pfam annotation: Domain name=Glyco_hydro_28; Domain location=1-144; Score=-115.1; E_value=0.0023; Accession=PF00295.9; Description =Glycosyl hydrolases family 28
KESEEAGVENVTVAGASFVGTENGLRIKTWGRAAVEGAYVRGVVFEHAFMHDVRNPIIIDQNYCPNHICPHQSSAVKISDVRYTDIRGSSASQVAVKFDCSATNPCSGIGLRDIKLTLDGGKPAEATCQHADGKASGYVEPPSCL

SEQ ID NO: 109845 - protein, 96 aa, Setaria italica
  Transcript Sequence Number=SeqID_43871
KCLFSNTMFLEDYSCVFCTNTNDEDIEYLFLHRQFASACWNFIGLNNMIFNPQLFSVEAVIAVFIKEFLLVIHRAKKNISLEFRNDYNICYNVLFL

SEQ ID NO: 109846 - protein, 212 aa, Setaria italica
  Transcript Sequence Number=SeqID_43872
  Gene Ontology: Mol. function=nucleotide binding; Cellular component =intracellular
  Homolog annotation: Hit_ID=Q7EZT3; Match level="QueryCoverage=79%, HitCoverage=36%, E-value=1e-44, Identity=58%"; Hit description =Putative GTP-binding protein
  Pfam annotation: Domain name=GTP1_OBG; Domain location=49-202; Score =257.5; E_value=3.3e-74; Accession=PF01018.14; Description=GTP1OBG family
DDEIVVFHPDYDDEDEDEDEEAFEEDDDYEEGDGEAKEKGVPAVMRCFDTAKIFAKAGDGGNGVVAFRREKYVPYGGPSGGDGGRGGDVYVQVDGEMNSLLPFRKSVHFRAGRGAHGMGQQQAGAKGEDVVIKVPPGTVVRSSDDGVELLELMKPGQRALLLPGGRGGRGNTAFKSGTNKVPRIAEKGEKGPEMWLALELKLVADVGIVGAP

SEQ ID NO: 109847 - protein, 61 aa, Setaria italica
  Transcript Sequence Number=SeqID_43873
SSTLTHLLLHQHSSSEKYEHQTLLAGYTTRKTYQLSYAKFVLTTCLWAIIKPNEPVRNARR

SEQ ID NO: 109848 - protein, 191 aa, Setaria italica
  misc_feature (106)..(106): Xaa can be any naturally occurring amino acid
  Transcript Sequence Number=SeqID_43874
  Pfam annotation: Domain name=F-box; Domain location=31-79; Score =17.5; E_value=0.055; Accession=PF00646.25; Description=F-box domain
MRLRSGRHLVSPLTVPQGGHHHRQRLRGSDDRINSLPKDLLLQVLVRLKHAERAACIGAVCRSWHGLWTELLELTFGFVKPRMLEAVLSKVTRPRLDLLNITVEGXRGAQVSLLLRAATRLVPEKLMFRVWNHLTLEDDPIELPCFDRTSSLALEVMGFHLLPPLSREFTALKSLSLSDCRGIDIRALLPL

SEQ ID NO: 109849 - protein, 85 aa, Setaria italica
  Transcript Sequence Number=SeqID_43875
  Gene Ontology: Mol. function=carbon-sulfur lyase activity; Cellular component=nucleus; Biological process=metabolic process
  Homolog annotation: Hit_ID=B6T550; Match level="QueryCoverage=90%, HitCoverage=54%, E-value=2e-33, Identity=81%"; Hit description =Proline-rich polypeptide 6 isoform 1
MSSSVPTKAEEVVVHAGGCHCRRVRWRVEAPASVVAWVCNCSNCSMRGNTHTVVPASKFNLQAGSDEFITTYTFGTHTAKHTFCR

SEQ ID NO: 109850 - protein, 83 aa, Setaria italica
  Transcript Sequence Number=SeqID_43876
  Gene Ontology: Mol. function=protein serine/threonine kinase activity; Biological process=protein amino acid phosphorylation
  Homolog annotation: Hit_ID=B6T6P9; Match level="QueryCoverage=100%, HitCoverage=21%, E-value=5e-36, Identity=85%"; Hit description =BRASSINOSTEROID INSENSITIVE 1-associated receptor kinase 1
MGWASCCKRSDGAEPGRKKKKKDTAWRVFSLKELQLATNNFNYDNKLGEGGFGSVYWGQLWDGSQIAVKRLKSWSNKAETEFA

SEQ ID NO: 109851 - protein, 100 aa, Setaria italica
  Transcript Sequence Number=SeqID_43877
WCCTVIFKNFALVEDFHIPVTDHCPLCKQLPMTAAFARPTTPTFRRRDRRTRPYWAGPAAEAARPVFLLPLRSAAGSATSSAAAAAWTRSSLAPPDPPAP

SEQ ID NO: 109852 - protein, 98 aa, Setaria italica
  Transcript Sequence Number=SeqID_43878
  Gene Ontology: Mol. function=electron carrier activity; Cellular component=integral to membrane; Biological process=oxidation reduction
  Homolog annotation: Hit_ID=B9R7Y0; Match level="QueryCoverage=100%, HitCoverage=20%, E-value=9e-32, Identity=61%"; Hit description =Cytochrome P450, putative
NIDARSLHYDPTIYDNPTTFDPSRFNGEDVKQPYSFLVFGAGGRTCLGMNLAKIMMLIFLHRLVTTFRWEMADDDTSLEKWAMFPRLRNGCPIHLTPI

SEQ ID NO: 109853 - protein, 81 aa, Setaria italica
  misc_feature (81)..(81): Xaa can be any naturally occurring amino acid
  Transcript Sequence Number=SeqID_43879
QAYVAILNCNYSISGCVIGLIRRIQMGVFASSACVCSPRTIRITPLQKILLSKDTSRVWQSKSSSVVSCKTKKKKKKKKKX

SEQ ID NO: 109854 - protein, 431 aa, Setaria italica
  Transcript Sequence Number=SeqID_43880
  Gene Ontology: Mol. function=protein serine/threonine kinase activity; Cellular component=plasma membrane; Biological process =protein amino acid phosphorylation
  Homolog annotation: Hit_ID=C4P7R8; Match level="QueryCoverage=100%, HitCoverage=100%, E-value=0.0, Identity=93%"; Hit description=CBL -interacting protein kinase 04
  Pfam annotation: Domain name=APH; Domain location=22-207; Score= -11.9; E_value=0.015; Accession=PF01636.15; Description =Phosphotransferase enzyme family
  Pfam annotation: Domain name=Kdo; Domain location=6-199; Score=-72.9; E_value=0.0093; Accession=PF06293.6; Description=Lipopolysaccharide kinase (Kdo)
  Pfam annotation: Domain name=NAF; Domain location=303-363; Score =73.5; E_value=7.7e-19; Accession=PF03822.6; Description=NAF domain
  Pfam annotation: Domain name=Pkinase; Domain location=20-277; Score =287.5; E_value=2.9e-83; Accession=PF00069.17; Description=Protein kinase domain
  Pfam annotation: Domain name=Pkinase_Tyr; Domain location=20-275; Score=50.6; E_value=4.3e-17; Accession=PF07714.9; Description =Protein tyrosine kinase
  Pfam annotation: Domain name=RIO1; Domain location=33-193; Score= -75.2; E_value=0.01; Accession=PF01163.14; Description=RIO1 family
  Pfam module annotation: Pfam domain module=APH::Kdo::NAF::Pkinase::Pki nase_Tyr::RIO1; Domain location=22-207::6-199::303-363::20-277::20 -275::33-193
MAGTKSKSSSKAGSPLLGKYELGRLLGRGTFAKVYHARCLAGGDPVAVKVLDKPELSATGMAVRVLREVSAMRRLRHPNVLRLHEVLATRSKVYLVMELAPGGDLLSRLASLPTRRLPEQAARRVFLQLVSALIYSHARGVFHRDVKPQNVLIDADGNLKVSDFGLAALPDSLRDDGHLHTACGTPAFTAPEVLRRKAYDGAKADAWSCGVILFVLLAGHLPFDDANIADMCRKAHRREYVVPRWVSQPARRLVSRLLDPNPATRLAVAELASHPWFKRSLSVDSQLGGLLGGQAERELAFQAPPALNAFDIISMSPGLDLSGLFGDNRRTREKRFMTTASPEQTVERLGQAGAKLGYFMVGKKGAERLPLGGLSGLVAMSMEMLEVSAELMLVELRLEAGDGDEAEAFGWEDLRVELGDVVTAWHVCEEG

SEQ ID NO: 109855 - protein, 100 aa, Setaria italica
  misc_feature (19)..(19): Xaa can be any naturally occurring amino acid
  Transcript Sequence Number=SeqID_43881
  Homolog annotation: Hit_ID=B6UDX2; Match level="QueryCoverage=81%, HitCoverage=30%, E-value=2e-30, Identity=83%"; Hit description =Remorin
  Pfam annotation: Domain name=Remorin_C; Domain location=31-98; Score =6.6; E_value=0.00058; Accession=PF03763.5; Description=Remorin, C -terminal region
ATPARSRASGLEVVPAGPXPPPPAHVEASQVKKEEVETKVSAWQTAEVAKINNRFKREEVVINGWETEQVEKASAWLKKIEVIQIQSTTDETLPYPFFPS

SEQ ID NO: 109856 - protein, 286 aa, Setaria italica
  Transcript Sequence Number=SeqID_43882
  Homolog annotation: Hit_ID=B6UDX2; Match level="QueryCoverage=86%, HitCoverage=88%, E-value=1e-94, Identity=75%"; Hit description =Remorin
  Pfam annotation: Domain name=Remorin_C; Domain location=173-284; Score=149.4; E_value=1.1e-41; Accession=PF03763.5; Description =Remorin, C-terminal region
MLHEQQAPAVAAAAAAAPPPVPSAPSSSHDEDGDGGEGAATTFRDIHPLTPDPPTPLPPARTGSAASWDTASHRSYSSEEQYMTMSREFTAMVAAGATMQTGPNANSGGGYDNGAADQLTSIGEDELEETNPLAIVPDSHPIATPARSRASGLEVVPAGPPPPPPAHVEASQVKKEEVETKVSAWQTAEVAKINNRFKREEVVINGWETEQVEKASAWLKKIERKLDEQRAKALEKTQNDIAKARRKAEEKRASAEAKRGLKLAKVLELANFMKAVGRVPTKRSFF

SEQ ID NO: 109857 - protein, 126 aa, Setaria italica
  Transcript Sequence Number=SeqID_43883
AKDTKPLPNQPLGTLSTTFELLRFLFHQEPHPPKPVDAGAEHPHKPLLHRILASLRSLPSCKLRLYLIGRMVGGQLTDELRLEAQFGGGPADGVGALRIGRPRTSGSSVQWVHKPYQTPHVSPHFL

SEQ ID NO: 109858 - protein, 112 aa, Setaria italica
  Transcript Sequence Number=SeqID_43884
TEWIRNYYLLRYELQATMVVAGDGSNVAREATMAPMCKRQSEATSTTMEARITAESIRGPIIVRTITRSEKLRMELKSSSRQGPAVDMESLEVGEGHKATAEPTIRNLVHDL

SEQ ID NO: 109859 - protein, 116 aa, Setaria italica
  Transcript Sequence Number=SeqID_43885
  Gene Ontology: Mol. function=phosphatidylcholine-sterol O -acyltransferase activity; Biological process=lipid metabolic process
  Homolog annotation: Hit_ID=Q33AV3; Match level="QueryCoverage=57%, HitCoverage=20%, E-value=5e-12, Identity=53%"; Hit description =Retrotransposon protein, putative, Ty3-gypsy subclass
TCINGIGVPTAEKLVYWDGDFGAKPDEVLYGDGDGASNIASLLALDTLIGADPEQVYFRSVLIHNTSHGGAISDDFALDRLVNEVLEASRAILGQFVATAPRSIHGLKFTEQNKVV

SEQ ID NO: 109860 - protein, 567 aa, Setaria italica
  Transcript Sequence Number=SeqID_43886
  Homolog annotation: Hit_ID=B6U170; Match level="QueryCoverage=93%, HitCoverage=92%, E-value=0.0, Identity=84%"; Hit description =Calmodulin binding protein
  Pfam annotation: Domain name=Calmodulin_bind; Domain location=101 -403; Score=525.9; E_value=4.9e-155; Accession=PF07887.3; Description= Calmodulin binding protein-like
  Pfam annotation: Domain name=zf-ZPR1; Domain location=95-197; Score= -85.9; E_value=0.037; Accession=PF03367.5; Description=ZPR1 zinc -finger domain
  Pfam module annotation: Pfam domain module=Calmodulin_bind::zf-ZPR1; Domain location=101-403::95-197
MSQKRQPEESDGPRRGGGGGEAGGSSSSSSLPYRPGEPKRPRVALRDVITEVMRNTSIEKFFMAIEPLIRRVVKEEIESAFANHTSMMARSVTDTLPCPSKNLKLQFMTKLSLPIFTGSKIEGEGSLSITIALVDTLTRQVVASGKESLMKVEIVVLEGDFESGEDDDWTAQEFNNNIVKEREGKRPLISGDVYVGLIDGIGTVGELSFTDNSSWTRSRKFRLGARTEDGCFNGIRVREAKTESFVVKDHRGELYKKHHPPFLDDEVWRLEKIGKDGAFHKRLNRESICTVKDFLTLLHLDGPRLRKILGGGMSTKMWEATVEHAETCVLTDKVHYYYPDSLNKAGVVFNVVGEVRGLISDKFVSVDDLTEKEKAEARVAVKQAYEHWKNVFTCDNGTLVGNPSQLFNMRSLSLHENQYNPFPTQVSTDDFGLSHSPLPSPDIFSMEPSSSLDPCVLETEVGNENRFQSGVLPVGGHEVPQESQTLDKFSNSLVYEDSNHPPFSDMYYGPVDPSISFDTQDLGAALKGFIATISKPKAYRGWRTLSYVLGWIFYTKRIVARRKKYGK

SEQ ID NO: 109861 - protein, 65 aa, Setaria italica
  Transcript Sequence Number=SeqID_43887
  Subcellular localization annotation: CTP_CleavageSite=26; ConfidenceScore=5.52e-01
SFVFTTSPASPLPAAPPPAQLLVLLRSGAAALPHLCSRWAGGGAVRRSCNGRTNLQDLQPGWLAY

SEQ ID NO: 109862 - protein, 487 aa, Setaria italica
  Transcript Sequence Number=SeqID_43888
  Gene Ontology: Mol. function=hydrolase activity, hydrolyzing O -glycosyl compounds; Biological process=carbohydrate metabolic process
  Homolog annotation: Hit_ID=Q5N9F8; Match level="QueryCoverage=96%, HitCoverage=99%, E-value=0.0, Identity=84%"; Hit description=Beta -glucanase-like protein
  Pfam annotation: Domain name=Glyco_hydro_43; Domain location=157-425; Score=-111.8; E_value=0.00038; Accession=PF04616.6; Description =Glycosyl hydrolases family 43
  Subcellular localization annotation: CTP_CleavageSite=21; ConfidenceScore=5.01e-01
MKISKGRKKMRNKQRKSSALSFDAGRGPLLSCITWSLVGFGLFVCFLSFKNQADGGQRQTRTYFSDLPATRELEDIEEDHFHLPPPHKVNPRAVKRRGPRKKLKVIDDYLEESSAVHALFFPDQRTAVDPTKGGNDTMYFYPGRVWLDTDGNAIQAHGGGVMYDDKTAKFYWYGENKDGPTYQAHPKGAQRVDIIGVSCYSSKDLWSWTHEGIVLPGEPTNVTHDLHKSKVLERPKVIYNDHTGKYIMWMHIDDANYTKASVGVAVSNSPTGPFTYLYSFRPHGFESRDMTVFKDDDGTAYLFYSSRGNTELHISPLTEDYLHITAAMKRILIRRFREAPAVFKHQETYYMITSGCSGWAPNRALAHAADSIMGPWETLGNPCVGGNRFYRLTTFLSQSTFVLPLPGLPGTFIFMADRWSPSNLRDSRYVWLPLFIGGLADEPLDYSFGFPLWSRVSIYWHKKWRLPEAWRVGPRHATGDRQGTQGI

SEQ ID NO: 109863 - protein, 372 aa, Setaria italica
  Transcript Sequence Number=SeqID_43889
  Gene Ontology: Mol. function=nucleotide binding; Cellular component =nucleus; Biological process=defense response
  Homolog annotation: Hit_ID=A9XBJ0; Match level="QueryCoverage=100%, HitCoverage=26%, E-value=1e-110, Identity=53%"; Hit description=Pm3b- like disease resistance protein 2Q2
  Pfam annotation: Domain name=NACHT; Domain location=121-275; Score= -31.7; E_value=0.023; Accession=PF05729.4; Description=NACHT domain
  Pfam annotation: Domain name=NB-ARC; Domain location=99-372; Score =198.9; E_value=1.4e-56; Accession=PF00931.14; Description=NB-ARC domain
  Pfam module annotation: Pfam domain module=NACHT::NB-ARC; Domain location=121-275::99-372
DIFDEFEYEALRRQAKKNGHITKLGKAGVKLFPTHNRVIFRIRMASKLQRVVDAIKDLVHHMNELGFNSHQHQQAPALKEGRETDSNIVDPKNIVSRSRHEERKKIVEILVNDQATNGDLKVLPIVGMGGLGKTTLAQLIYNDPQVKDHFQLLKWVCVSDDFNLRNLANKICNASESSLEKALKELQEQLKGKRYFLVLDDVWDEKSFLDKWEKFKACLEQGGVGSAVLTTTRNTEIAQLIGTVGISHERKYLDVGTLGKEFIQEIIETRAFSLHKRDDELVNLVGPIAERCAGSPLAAKALGSILRKKTTTEEWEDVLQSSICTDETGILPILKLSYDELPTDMKPCFAFCALYPKDYQIDVDNLIQLWMA

SEQ ID NO: 109864 - protein, 185 aa, Setaria italica
  misc_feature (8)..(8): Xaa can be any naturally occurring amino acid
  misc_feature (11)..(11): Xaa can be any naturally occurring amino acid
  Transcript Sequence Number=SeqID_43890
  Gene Ontology: Mol. function=ATP-dependent helicase activity; Cellular component=nucleus; Biological process=ribosome biogenesis
  Homolog annotation: Hit_ID=Q5K5B6; Match level="QueryCoverage=99%, HitCoverage=34%, E-value=9e-95, Identity=89%"; Hit description=DEAD -box ATP-dependent RNA helicase 57
  Pfam annotation: Domain name=DEAD; Domain location=62-185; Score =74.0; E_value=5.3e-19; Accession=PF00270.21; Description=DEADDEAH box helicase
  Pfam annotation: Domain name=ResIII; Domain location=58-185; Score= -29.4; E_value=0.015; Accession=PF04851.7; Description=Type III restriction enzyme, res subunit
  Pfam module annotation: Pfam domain module=DEAD::ResIII; Domain location=62-185::58-185
GRRKEIEXEIXRAAVLRKRFDIHIAGQNVPAPLESFEELISRYGCDSYLVGNLSKLGFQEPTPIQRQAIPILLSGRECFACAPTGSGKTLAFLFPLLMKIKPGSKGGVKAVILCPTRELAAQTVRECKKMAKGRKYYIKLMTKDLSKSGNFKDMHCDILVSTPLRLDHAVKKRDLDLSSVEYLVL

SEQ ID NO: 109865 - protein, 90 aa, Setaria italica
  Transcript Sequence Number=SeqID_43891
  Gene Ontology: Mol. function=catalytic activity; Biological process =DNA repair
MAQPAFLSSLRSRLRSAPPPTPHHRLQPSRGYHVELGAREKALLEEDVALKRFKSYKNGVKQVSKIGNVLTLAVVLACSYEIAVVATSTK

SEQ ID NO: 109866 - protein, 63 aa, Setaria italica
  Transcript Sequence Number=SeqID_43892
MSSFAGQRSRPWVGMAGVGTPSEPAGDSVAARDDAAAASSMRGGADASTNASAISFGFAATAV

SEQ ID NO: 109867 - protein, 136 aa, Setaria italica
  Transcript Sequence Number=SeqID_43893
  Homolog annotation: Hit_ID=Q9LNA8; Match level="QueryCoverage=89%, HitCoverage=14%, E-value=3e-38, Identity=58%"; Hit description =F5O11.10
KWRSEGLDPLYAQAVQVRQPDPATGKMKIANKQSSRLVWETCLSELKSLGKVAVRLIFLHATARVIRCPPMMARWLTASSGGIARAQRLVFVVANSKLERKDLTNDDDRDAEMLTDGDDDMMLADPTTTATVDPHR

SEQ ID NO: 109868 - protein, 112 aa, Setaria italica
  Transcript Sequence Number=SeqID_43894
  Gene Ontology: Mol. function=electron carrier activity; Cellular component=integral to membrane; Biological process=oxidation reduction
  Homolog annotation: Hit_ID=B1PZ14; Match level="QueryCoverage=95%, HitCoverage=21%, E-value=1e-53, Identity=91%"; Hit description=CPD brassinosteroid C-23 hydroxylase
HFLQVINETLRVANLISGVFRRANTDIHFKDYTIPKGCKIFASFRAVHLNTEHYENARTFDPWRWQSKNKLQNAVGASLFTPFGGGPRLCPGYELARVVVSVFLHHLVTRFR

SEQ ID NO: 109869 - protein, 266 aa, Setaria italica
  misc_feature (134)..(134): Xaa can be any naturally occurring amino acid
  Transcript Sequence Number=SeqID_43895
  Gene Ontology: Mol. function=electron carrier activity; Cellular component=integral to membrane; Biological process=oxidation reduction
  Homolog annotation: Hit_ID=B6SWP5; Match level="QueryCoverage=92%, HitCoverage=48%, E-value=1e-103, Identity=75%"; Hit description =Cytochrome P450 CYP90A21
  Pfam annotation: Domain name=p450; Domain location=1-263; Score= -149.2; E_value=0.00018; Accession=PF00067.14; Description=Cytochrome P450
  Subcellular localization annotation: CTP_CleavageSite=43; ConfidenceScore=5.02e-01
VKLIDGFFSIPFPFAHLLPFTTYGQALKVLARLPFVPTIYFIRCTLRSLKLEDRAMDSEDEGKREKKDMVEELLEAEDGSFSVEEMVDFCLSLLVAGYETTSVLMTLAVKFLTETPTALAQLKEEHDNIRDINXKTQPLEWSDYKSMPFTQCVINETLRVANLISGVFRRANTDIHFKDYIIPKGCKIFASFRAVHLNTEHYENARTFDPWRWQSKNKTSERGRCQLFTPFGGGPRLCPGYELARVVGKKTILSSSASSQLKRVTR

SEQ ID NO: 109870 - protein, 354 aa, Setaria italica
  misc_feature (11)..(11): Xaa can be any naturally occurring amino acid
  Transcript Sequence Number=SeqID_43896
  Gene Ontology: Mol. function=electron carrier activity; Cellular component=integral to membrane; Biological process=oxidation reduction
  Homolog annotation: Hit_ID=B6SWP5; Match level="QueryCoverage=99%, HitCoverage=69%, E-value=1e-174, Identity=86%"; Hit description =Cytochrome P450 CYP90A21
  Pfam annotation: Domain name=p450; Domain location=2-346; Score= -15.8; E_value=6.8e-11; Accession=PF00067.14; Description=Cytochrome P450
RPASPPLLAHXTDRLILATMRDWEPAATVRLLDEAKKITFNLTVKQLVSIEPGPWTESVRREYVKLIDGFFSIPFPFAHLLPFTTYGQALKARKKVAGALREVIGKRMDDKLEDRAMDSEDDGKREKKDMVEELLEAEDGSFSVEEMVDFCLSLLVAGYETTSVLMTLAVKFLTETPTALAQLKEEHDNIRDIKGKNQPLEWSDYKSMPFTQCVINETLRVANLISGVFRRANTDIHFKDYIIPKGCKIFASFRAVHLNTEHYENARTFDPWRWQSKNKLQNAVGASLFTPFGGGPRLCPGYELARVVVSVFLHHLVTRFSWEEAEEDRIVFFPTTRTVKGYPINLRRRTDSVF

SEQ ID NO: 109871 - protein, 155 aa, Setaria italica
  Transcript Sequence Number=SeqID_43897
  Gene Ontology: Mol. function=N-acetyltransferase activity; Biological process=metabolic process
  Homolog annotation: Hit_ID=B6TIB6; Match level="QueryCoverage=99%, HitCoverage=93%, E-value=6e-65, Identity=83%"; Hit description =Glucosamine 6-phosphate N-acetyltransferase
  Pfam annotation: Domain name=Acetyltransf_1; Domain location=76-155; Score=48.9; E_value=2e-11; Accession=PF00583.16; Description =Acetyltransferase (GNAT) family
MASTSPESAVAAAGDVNDPIQIRRLELSDQERGFVDLLSQLSTCPDLTPAEFAMRFAELAAQGDDHVILVAEDPSAPERRILATGCLFVERKFLRGGGKVGHVEDVVVDAAARGRGLGLRIVHRLVGIARDAGCYKVILDCTPELRAYYAKCGIC

SEQ ID NO: 109872 - protein, 146 aa, Setaria italica
  misc_feature (12)..(12): Xaa can be any naturally occurring amino acid
  misc_feature (83)..(83): Xaa can be any naturally occurring amino acid
  misc_feature (96)..(96): Xaa can be any naturally occurring amino acid
  Transcript Sequence Number=SeqID_43898
  Subcellular localization annotation: CTP_CleavageSite=72; ConfidenceScore=5.82e-01
KTAGTASSPPPXSPAASSSSIIFLSSTGCFPASPAPASRLQRAPERKCRTLSAVSMSSTCPPHGSSWYCGIVAARRRLPRPSXTTTTSTTATDGEXFLAAHRPRRRRNDGENHGETYRHHHHPAPFFHSFLTGCFSWIFGLLRNSS

SEQ ID NO: 109873 - protein, 35 aa, Setaria italica
  misc_feature (32)..(32): Xaa can be any naturally occurring amino acid
  Transcript Sequence Number=SeqID_43899
  Homolog annotation: Hit_ID=B6SZG1; Match level="QueryCoverage=88%, HitCoverage=8%, E-value=2e-09, Identity=90%"; Hit description =CONSTANS-like protein CO6
MELHKYWGVGGRRCGSCEAAPAAVHCRSCPGXASQ

SEQ ID NO: 109874 - protein, 65 aa, Setaria italica
  Transcript Sequence Number=SeqID_43900
  Gene Ontology: Mol. function=oxidoreductase activity
  Homolog annotation: Hit_ID=Q2R0H4; Match level="QueryCoverage=81%, HitCoverage=14%, E-value=5e-18, Identity=81%"; Hit description =Oxidoreductase, aldo/keto reductase family protein, expressed
LLILLLILLLLSAFVLRHPLVASAVFGATKLWQLYEVLQAARIHLPEEILVEINDVHARYPNPCP

SEQ ID NO: 109875 - protein, 310 aa, Setaria italica
  Transcript Sequence Number=SeqID_43901
  Gene Ontology: Mol. function=DNA binding; Biological process =regulation of transcription
  Homolog annotation: Hit_ID=B6TM86; Match level="QueryCoverage=91%, HitCoverage=93%, E-value=1e-103, Identity=69%"; Hit description=DNA binding protein
  Pfam annotation: Domain name=Myb_DNA-binding; Domain location=135 -182; Score=40.1; E_value=8.5e-09; Accession=PF00249.23; Description =Myb-like DNA-binding domain
  Pfam annotation: Domain name=Myb_DNA-binding; Domain location=23-75; Score=29.3; E_value=1.6e-05; Accession=PF00249.23; Description=Myb -like DNA-binding domain
  Pfam module annotation: Pfam domain module=Myb_DNA-binding::Myb_DNA -binding; Domain location=135-182::23-75
PGPQPWPEEASSSGGGGDGEEGSGAWTREQEKAFENAVATMAEDGDDGDARWEKLAEAVEGKTADEVRRHYEFLVEDVEGIDSGRVPLPTYAADGGAEEGGTGGGGGGGKKGSGGGGGHGEKGSAKSVEQERRKGIAWTEDEHRLFLLGLEKYGKGDWRSISRNFVISRTPTQVASHAQKYFIRLNSINRERRRSSIHDITSVNNGDASAVQGPITGQTNGQAANPGKPSKQSPQPANAPPGVDAYGTTIGQPVGGPLVSAVGTPVTLPVPAPPHMAYGMHTPVPGAVVPGAPVNIAPMPYPMPPPSSHG

SEQ ID NO: 109876 - protein, 574 aa, Setaria italica
  misc_feature (449)..(449): Xaa can be any naturally occurring amino acid
  Transcript Sequence Number=SeqID_43902
  Gene Ontology: Mol. function=Rab GTPase activator activity; Cellular component=intracellular; Biological process=regulation of Rab GTPase activity
  Homolog annotation: Hit_ID=Q2R1Y1; Match level="QueryCoverage=54%, HitCoverage=59%, E-value=2e-46, Identity=35%"; Hit description =RabGAP/TBC domain-containing protein, putative, expressed
  Pfam annotation: Domain name=TBC; Domain location=212-412; Score= -32.2; E_value=3e-05; Accession=PF00566.10; Description=TBC domain
QSMHASIGTGELAYAVGSKLMDVRTLPKETDSGEEVSTSQQTSHQEPCNVVENSNLNCGSGGTPQSQKRKGCSKSAEPVGFNIHNDSSVYDSSNFMVPSTAVNNCLRDSGDYDDIGEPRYDSETFTDFPSLSGTNLFANGGEDSNGVEESHCSFSVPEDRLRLRDERMHSFQINNNIDLIIESNSFSNDLFRPSNSDSAIFHSDAYKQDRWLDDGYSKEIIDSLRISDAPEADLVDGTKSNGSVADKDRVSEWLWTLHRIVVDVVRTDSHLDFYGESRNMARMSDILAVYAWVDPSTGYCQGMSDLLSPFVVIYEDDADAFWCFEMLLRRMRENFQMEGPTGVMKQLQALWKILELTDVELFEHLSAIGAESLHFAFRMLLVLFRRELSFEESLIMWEMMWAADFDEEAIRRLEENCLGPLLVDLRTDLSCEVKEVHRMNSSTRRKSKXRKSHRRNGEICGACHPGTRSSTRNHLCGLSGATIWARPQLMLQLSANVLAKSGDDELPIFCVAAILIINRHRIIRGTRSIDDAIKMFNDNMLKINVKRCVRLAIKLRKKYLYKSLKGGSSDDKES

SEQ ID NO: 109877 - protein, 331 aa, Setaria italica
  Transcript Sequence Number=SeqID_43903
  Gene Ontology: Mol. function=phosphopyruvate hydratase activity; Cellular component=phosphopyruvate hydratase complex; Biological process=glycolysis
  Homolog annotation: Hit_ID=B9F777; Match level="QueryCoverage=100%, HitCoverage=72%, E-value=1e-179, Identity=90%"; Hit description =Enolase
  Pfam annotation: Domain name=Enolase_C; Domain location=38-329; Score= 513.9; E_value=2e-151; Accession=PF00113.14; Description=Enolase, C -terminal TIM barrel domain
ELGANAMLAVSIAACKAGAAEKEVPLYKHIADLVGKSATTLPVPAITVINGGKHAGNGLPIQEIMILPVGAKNFEEAMQMGSETYHHLKDIILEKYGAESCNIGDHGGFAPNISSISEGLDLVIAAIERAGYNGRIKLAIDVAATDFCVGKKYDLEFKSKKKSGQNFKTADDMIEIYSQLCSEYPLVSIEQPFDKDDWEHSKKLTTLELCQVAGDDLLMSDPERIKRAVNEYTCNALVLKVNQVGTVTEAIEVVKQAKDAHWGVMVSHRSGDTEDSFVADLAVGAAAGQIKAGAPCRGECLTKYNQLLRIEEELGNEGVYAGDNWRTASTS

SEQ ID NO: 109878 - protein, 138 aa, Setaria italica
  Transcript Sequence Number=SeqID_43904
  Subcellular localization annotation: CTP_CleavageSite=30; ConfidenceScore=5.58e-01
FFPFAFLCSSQIISRFNQTNRLKNSNSSTSCFLIKNFKKEHMSICLSRNNKISLSPKIPCACMSCYSVSSSPNYEKQIGVMAQSMSIPLFSISLPANLFFPKLSCRYSLSMSQFCLYRAATAHHAREEGETENKYLTP

SEQ ID NO: 109879 - protein, 137 aa, Setaria italica
  Transcript Sequence Number=SeqID_43905
  Gene Ontology: Mol. function=nucleoside-triphosphatase activity; Cellular component=intrinsic to membrane; Biological process=defense response
  Homolog annotation: Hit_ID=Q2L3S2; Match level="QueryCoverage=100%, HitCoverage=13%, E-value=5e-58, Identity=78%"; Hit description =Putative ATPase
KAVDMVLFIKKTALPLAIDSFMSFSRCGSALELLKVCTNVLEEVEKSYASRMQDWNRGSLCWRKKLQPNHRVDEFVWQEVTLLKATLLETRAKLLLRGGLFDTGEELCRTCISIRTVMLGHGHAQTLAAQETLAKLV

SEQ ID NO: 109880 - protein, 124 aa, Setaria italica
  Transcript Sequence Number=SeqID_43906
  Gene Ontology: Mol. function=transporter activity; Cellular component= membrane; Biological process=oligopeptide transport
  Homolog annotation: Hit_ID=Q10PG1; Match level="QueryCoverage=98%, HitCoverage=19%, E-value=1e-58, Identity=87%"; Hit description =Peptide transporter PTR2, putative, expressed
NQKVPVPMSILWQAPQYLLVGVGEVFTSIGQAEFFYNQSPDAMRSLCSAFALVTVSLGSYLSSFILTLVSYFTTRNGQLGWIPDNLNEGHLDRFFWLITGLSSLNLLVFLYYAQQYKCKRASVA

SEQ ID NO: 109881 - protein, 439 aa, Setaria italica
  Transcript Sequence Number=SeqID_43907
  Gene Ontology: Mol. function=transporter activity; Cellular component= membrane; Biological process=oligopeptide transport
  Homolog annotation: Hit_ID=Q10PG1; Match level="QueryCoverage=96%, HitCoverage=68%, E-value=0.0, Identity=86%"; Hit description=Peptide transporter PTR2, putative, expressed
  Pfam annotation: Domain name=PTR2; Domain location=22-424; Score =497.2; E_value=2.2e-146; Accession=PF00854.13; Description=POT family
  Subcellular localization annotation: CTP_CleavageSite=41; ConfidenceScore=5.04e-01
AGTCYLTPLIGATLADSYWGKYRTIAVFSTIYFLGMAALTLSASVPSFMPPQCVGSVCPQPTLPQYLIYFVGLYMIALGAGGIKPCVSSFGADQFDDTDPVEKTKKGAFFNWFYFCINIGSLISGTVLIWVQENYGYGIGFGIPTFFIALAIGSFFLGSEIYRFQIPGGSPLTRACQVVVAATRKRKMDLPVDGSLLYELDGKSSAIEGSRKLEHSSEFSFLDKAAVILWNERDGYHDPWRLCTVTQVEELKILLRMFPIWTTGIVFFTVCAQNSSMFIEQGMALDNQIGSFKIPPATLSSLDVISVVVWVPIYERLVVPIARRFTGKERGFSELQRMGIGLFVSTIAVAVAALVEIKRLQVARAEGMVHQKVPVPMSILWQAPQYLLVGVGEVFTSIGQAEFFYNQSPDAMRSLCSAFALVTVSLGSYSSSLLFLILC

SEQ ID NO: 109882 - protein, 79 aa, Setaria italica
  misc_feature (67)..(67): Xaa can be any naturally occurring amino acid
  Transcript Sequence Number=SeqID_43908
  Subcellular localization annotation: CTP_CleavageSite=41; ConfidenceScore=5.36e-01
SAHPRSRCWRRPIRGRPSLRPGRPTSSTAMRTARSHRWAAPAAAASSRARDAAWGARWVLVCHGKKXVPCGGQRSISRL

SEQ ID NO: 109883 - protein, 81 aa, Setaria italica
  Transcript Sequence Number=SeqID_43909
LFKILDQKFTSDVRQQLAWATCMLWNIGMPLEVRTAHVTAQTTKARCLKPPRPLHFIYQPTTQTVLLKLSLYISQTSQQRL

SEQ ID NO: 109884 - protein, 85 aa, Setaria italica
  Transcript Sequence Number=SeqID_43910
SRVTSSIMSLCYFLKLVSLSYFLSVLPTSDHKFLPMSCELVKSYFLLHVSEEGQKVTFNLIQLIDKLLPMRFKTGTSYVMSHVIL

SEQ ID NO: 109885 - protein, 68 aa, Setaria italica
  Transcript Sequence Number=SeqID_43911
  Subcellular localization annotation: CTP_CleavageSite=50; ConfidenceScore=5.47e-01
RSFSTGLTGERLPKTPRSRRRTPCRHKLLPRQTGGTPLRTVAAPELAPPRTSRRRRRRVGGNKRSGRR

SEQ ID NO: 109886 - protein, 135 aa, Setaria italica
  misc_feature (20)..(20): Xaa can be any naturally occurring amino acid
  Transcript Sequence Number=SeqID_43912
KVLSGKAANASDDGDEEEEXKPAKRGRKQSAREANVSTKNAGSIVGDEAADQDQEAEEDAKPAKRGRKQIEKTAKGSLKEAGHEDDDEEADDKIEAKPGKRRGQKMQRTEAKSSSPNKVEDAGPARRPQRKARQT

SEQ ID NO: 109887 - protein, 245 aa, Setaria italica
  misc_feature (102)..(102): Xaa can be any naturally occurring amino acid
  misc_feature (146)..(146): Xaa can be any naturally occurring amino acid
  Transcript Sequence Number=SeqID_43913
  Gene Ontology: Mol. function=aspartic-type endopeptidase activity; Cellular component=chromatin; Biological process=RNA-dependent DNA replication
  Homolog annotation: Hit_ID=Q8SA93; Match level="QueryCoverage=100%, HitCoverage=9%, E-value=2e-69, Identity=54%"; Hit description =Putative polyprotein
EGDANTAFFHPQARFRKKKNFIAKLQVGDWLATSQEDKQEAVLDFYDKLLGTAEDRNFSIDLDEIGLQPRDLSPLDDPFTEDEIWATIRDLPLDKAPGPDGXWSIIKGDLLAAFHAIHQGHVFRFRLLNSAFITLLPRKMDALHVXDYRPISLIHSFAKLVTKVLANRLAPLLPSMVSTNQSAFVRGRNIHDNFLFVQQMVKSLHMKKEAHILLKLDISKAFNSVSCSFLLEVMRQLGFGQRWRD

SEQ ID NO: 109888 - protein, 56 aa, Setaria italica
  Transcript Sequence Number=SeqID_43914
QPMGFYFKMRFTVYMPQMTLTVIHWNNSRSAIVDPPNGDMTSYQSVVFVKYKLVAC

SEQ ID NO: 109889 - protein, 131 aa, Setaria italica
  Transcript Sequence Number=SeqID_43915
  Gene Ontology: Mol. function=protein tyrosine phosphatase activity; Cellular component=chloroplast; Biological process=cell division
  Homolog annotation: Hit_ID=Q66T88; Match level="QueryCoverage=100%, HitCoverage=100%, E-value=3e-60, Identity=81%"; Hit description =Rhodanese-like protein
  Pfam annotation: Domain name=Rhodanese; Domain location=10-114; Score= 17.5; E_value=0.0082; Accession=PF00581.12; Description=Rhodanese -like domain
MARRGVSYVSAAQLVSMARDPRVAIVDVRDEERSYDGHIAGSHHYASDTFTERMPDLAQATGAKETLVFHCALSKVRGPSCAQMFHDYLSEAKEDSGVKNIMVLERGFNGWELSGRPVCRCKDTPCKGVCS

SEQ ID NO: 109890 - protein, 115 aa, Setaria italica
  misc_feature (14)..(14): Xaa can be any naturally occurring amino acid
  misc_feature (19)..(19): Xaa can be any naturally occurring amino acid
  Transcript Sequence Number=SeqID_43916
  Gene Ontology: Mol. function=aspartic-type endopeptidase activity; Biological process=DNA integration
  Homolog annotation: Hit_ID=Q53P77; Match level="QueryCoverage=98%, HitCoverage=8%, E-value=4e-31, Identity=53%"; Hit description =Retrotransposon protein, putative, unclassified
FLTIVEAEYMAGAXGACQXLWLTRLLGDIGGVKVQLPVLRMDNQLAIALSKNPVLHDRSKHIDVKFHYIRKCVEDGRICLDYVSTQEQLEDVLTKSLGRARFCELRDRIGIVRLN

SEQ ID NO: 109891 - protein, 62 aa, Setaria italica
  Transcript Sequence Number=SeqID_43917
  Subcellular localization annotation: CTP_CleavageSite=46; ConfidenceScore=5.41e-01
NCCCRIRVRKPTCPSCNFSCGCCGLRNCFTSRFFRCCPSCFSCGSCCSCRSCFKCCCCGDAR

SEQ ID NO: 109892 - protein, 104 aa, Setaria italica
  Transcript Sequence Number=SeqID_43918
HSVTAPIFHSEVVVAKLLNKSGSTSGIESSGNIQVGDVVTGISINEEPLQYLATGPILDHKEHLNQIFSALCHARGHIRLQLERSDNKAGQSINFFFPELNFPW

SEQ ID NO: 109893 - protein, 55 aa, Setaria italica
  Transcript Sequence Number=SeqID_43919
  Gene Ontology: Mol. function=catalytic activity; Biological process =cellular metabolic process
  Homolog annotation: Hit_ID=B6U6R0; Match level="QueryCoverage=100%, HitCoverage=16%, E-value=5e-14, Identity=70%"; Hit description =Dihydroflavonol-4-reductase
KDLGIRFTPVHEYLYEAVKSLQEKGFLPKASATKVTERRSSPPQKQPAPVLISKL

SEQ ID NO: 109894 - protein, 101 aa, Setaria italica
  Transcript Sequence Number=SeqID_43920
  Gene Ontology: Mol. function=beta-amylase activity; Biological process=polysaccharide catabolic process
  Homolog annotation: Hit_ID=Q3S4X4; Match level="QueryCoverage=80%, HitCoverage=16%, E-value=2e-14, Identity=46%"; Hit description=Beta -amylase
NKRNDLDRRHGARIAGENASLAMSHTSSFSRIRSNILTTELMRPCHFTYQRMGADFFSPDHFPQFMEFVRSVVCGEWDEDDAPGDEDRAMAASGSAKAKAA

SEQ ID NO: 109895 - protein, 49 aa, Setaria italica
  Transcript Sequence Number=SeqID_43921
KNSRTARRPRNMRVRCPWNSNARPQTSHEPSNHVTYITHMMELEARMSA

SEQ ID NO: 109896 - protein, 144 aa, Setaria italica
  Transcript Sequence Number=SeqID_43922
  Gene Ontology: Mol. function=electron carrier activity; Cellular component=extracellular region; Biological process=response to oxidative stress
  Homolog annotation: Hit_ID=B4FKV6; Match level="QueryCoverage=75%, HitCoverage=31%, E-value=8e-45, Identity=83%"; Hit description =Peroxidase 54
  Pfam annotation: Domain name=peroxidase; Domain location=49-144; Score=-16.4; E_value=1.2e-08; Accession=PF00141.15; Description =Peroxidase
MPSSTRPRAAAAVAGVLAAAVAALCLHGAAAQLCETYYDDTCPDAYNIVKQVLIDAHKSDVRIYASLIRLHFHDCFVQGCDGSLLLDGVPGVINSEKGAPPNNNSARGFPVVDKAKAALEGACPGVVSCADILALRPSVVFFRS

SEQ ID NO: 109897 - protein, 181 aa, Setaria italica
  Transcript Sequence Number=SeqID_43923
  Gene Ontology: Mol. function=pyridoxal phosphate binding; Biological process=metabolic process
  Homolog annotation: Hit_ID=B6UAN7; Match level="QueryCoverage=82%, HitCoverage=31%, E-value=5e-66, Identity=84%"; Hit description =Isopenicillin N epimerase
RWRRTRPPTDAAAAAAANGHDHDNGHGNGNGPSPAKRPRAVISAAEIRAEFAHHDAAVARVNNGSFGCCPASVLAAQAHWQRLFLAQPDAFYFHGLQQGLVRSRAAVAGAVGAGDVSEVSLVDNATTAAAIVLQHAAWSFAEGHFARGDAVLMLHYAYGAVKKSIHAYVARAGATVVEVPL

SEQ ID NO: 109898 - protein, 40 aa, Setaria italica
  Transcript Sequence Number=SeqID_43924
MHVTHTGAHTFGRVQCANVADQPADRLYNFSGTNTPDPTL

SEQ ID NO: 109899 - protein, 121 aa, Setaria italica
  Transcript Sequence Number=SeqID_43925
  Gene Ontology: Mol. function=electron carrier activity; Cellular component=extracellular region; Biological process=response to oxidative stress
  Homolog annotation: Hit_ID=B4FKV6; Match level="QueryCoverage=100%, HitCoverage=35%, E-value=2e-38, Identity=65%"; Hit description =Peroxidase 54
  Pfam annotation: Domain name=peroxidase; Domain location=1-121; Score= 61.2; E_value=3.9e-15; Accession=PF00141.15; Description=Peroxidase
HVRAVFLQGCDGSILLDNSSSIVSEKFAAPNNNSARGYPVVDAVKAALEEACPGVVSCADILAIAAKISVELSGGPRWRVPLGRRDGTTANITAANDLPSPFDNLTALQQKSATVGLDDTD

SEQ ID NO: 109900 - protein, 340 aa, Setaria italica
  Transcript Sequence Number=SeqID_43926
  Gene Ontology: Mol. function=electron carrier activity; Cellular component=extracellular region; Biological process=response to oxidative stress
  Homolog annotation: Hit_ID=B6T7B1; Match level="QueryCoverage=91%, HitCoverage=89%, E-value=1e-131, Identity=74%"; Hit description =Peroxidase 54
  Pfam annotation: Domain name=peroxidase; Domain location=45-301; Score=426.2; E_value=5.2e-125; Accession=PF00141.15; Description =Peroxidase
MATSPRAAVAGVVAAAAVALCLHGAAAQLCEDYYDDTCPDAYDIVKQVLIDAHRSDVRIYASLIRLHFHDCFVLGCDGSILLDNMTGMQTEKEAVPNMGSARGYDVVDAAKAALEDACPGVVSCADILALAAEISVELSGGPKWGVLLGRLDGKTSSISGANNLPAPFETLDMLRRKFRAVGLNSDVDLVALSGAHTFGRVQCLNIADSPADRLYNFSGTNRPDPTLDPAYRAFLIRRCPTKNGNSRVLNDLDPTTPDLFDKNYYTNLEVNRGILTSDQELKSSPQARGTTAPIVDQFARSQDAFFKSFAQSMINMGNIQPITDPSMGEVRCDCKKVNDS

SEQ ID NO: 109901 - protein, 291 aa, Setaria italica
  Transcript Sequence Number=SeqID_43927
  Gene Ontology: Mol. function=electron carrier activity; Cellular component=extracellular region; Biological process=response to oxidative stress
  Homolog annotation: Hit_ID=B4FKV6; Match level="QueryCoverage=99%, HitCoverage=83%, E-value=1e-132, Identity=79%"; Hit description =Peroxidase 54
  Pfam annotation: Domain name=peroxidase; Domain location=1-252; Score= 424.1; E_value=2.2e-124; Accession=PF00141.15; Description=Peroxidase
LIDAHKSDVRIYASLIRLHFHDCFVQGCDGSLLLDGVPGVINSEKGAPPNNNSARGFPVVDKAKAALEGACPGVVSCADILALAAEISVELSGGPKWGVLLGRLDGTTADFNGASNLPAPFENLTVLQGKFKAVGLNDVDLVALSGAHTFGRVQCANIADAPADRLYNFSGTNRPDPTLDSAYRAFLSQRCPRNGNSMVLNDLDPTTPDIFDKNYYTNLEVNRGFLTSDQELKSSPQARGTTAPIVDQFARSQDAFFKSFAQSMINMGNIKPVTDPSVGEVRCNCRKVNDS

SEQ ID NO: 109902 - protein, 340 aa, Setaria italica
  Transcript Sequence Number=SeqID_43928
  Gene Ontology: Mol. function=electron carrier activity; Cellular component=extracellular region; Biological process=response to oxidative stress
  Homolog annotation: Hit_ID=B4FKV6; Match level="QueryCoverage=89%, HitCoverage=90%, E-value=1e-121, Identity=70%"; Hit description =Peroxidase 54
  Pfam annotation: Domain name=peroxidase; Domain location=54-302; Score=460.5; E_value=2.5e-135; Accession=PF00141.15; Description =Peroxidase
MAPSRRGRMSCSPHQLVVVLLSAAAALGFGVRAGAAQLCGEYYDRTCPDVHRIVRRVLKKAHEADARIYASLTRLHFHDCFVQGCDGSILLDNSSSIVSEKFAAPNNNSARGYPVVDAVKAALEEACPGVVSCADILAIAAKISVELSGGPRWRVPLGRRDGTTANITAANDLPSPFDNLTALQQKFGAVGLDDTDLVALSGAHTFGRVQCQFVTPRLYNFSGTNRPDPTLDRGYRAFLSLRCPRGGDGTALNDLDPTTPDAFDNSYYTNIEARRGTLQSDQELLSTPGAPTAAIVGRFAGSQKAFFKSFARSMINMGNIEVLTGSQGEVRKNCRVVNGS

SEQ ID NO: 109903 - protein, 337 aa, Setaria italica
  Transcript Sequence Number=SeqID_43929
  Gene Ontology: Mol. function=electron carrier activity; Cellular component=extracellular region; Biological process=response to oxidative stress
  Homolog annotation: Hit_ID=B6T7B1; Match level="QueryCoverage=92%, HitCoverage=91%, E-value=1e-153, Identity=83%"; Hit description =Peroxidase 54
  Pfam annotation: Domain name=peroxidase; Domain location=48-298; Score=458.0; E_value=1.4e-134; Accession=PF00141.15; Description =Peroxidase
MASSSSAPRAAAVAGVLVVMAALCLHGATAQLCEEYYDDTCPDAYDTVKQVLIDAHDSDTRIFASLIRLHFHDCFVQGCDGSLLLDTVPGMQSEKESPPNNASARGFEVVDAAKSALEAACPGVVSCADILAIAAEISVELSGGPSWGVLLGRLDGKTSDFNGSLDLPAPTDNLTVLQQKFSNLSLNDVDLVALSGGHTFGRVQCQFVTDRLYNFSGTNMPDPTLDSAYRAFLSQRCPRNGNGSVLNDLDPTTPDTFDNNYYTNIEVNRGILNSDQELKSSPQAQGTTAPIVDQFASSQDAFFASFAQSMINMGNIRPLRDPSVGEVRTNCRRVNGR

SEQ ID NO: 109904 - protein, 342 aa, Setaria italica
  Transcript Sequence Number=SeqID_43930
  Gene Ontology: Mol. function=electron carrier activity; Cellular component=extracellular region; Biological process=response to oxidative stress
  Homolog annotation: Hit_ID=B6T7B1; Match level="QueryCoverage=94%, HitCoverage=93%, E-value=1e-137, Identity=74%"; Hit description =Peroxidase 54
  Pfam annotation: Domain name=peroxidase; Domain location=51-305; Score=453.9; E_value=2.5e-133; Accession=PF00141.15; Description =Peroxidase
MASSHSPRSASGATAVMAVLFVAAMCLHGAMAQPLREDYYDGTCPDAYNIVKQVLIDAHESDERIYASLIRLHFHDCFVQGCDGSILLDNMTGMQSEKESPPNNGSARGYEVVDAVKCALEDACPGVVSCADILAIAAEISVELSGGPSWGVLLGRLDGRTSDFNGSQDLPAPFENLTTLQSKFQAVGLNDVDLVALSGAHTFGRVQCANVADQPADRLYNFSGTNMPDPTLDSAYRAFLSQRCPRNGDSSVLNDLDPTTPDTFDNHYYTNIEVNRGFLTSDQELKSAPEAQGTTAPIVDQFASSQDAFFASFAQSMINMGNIRPVTDPSQGEVRTNCRRVN

SEQ ID NO: 109905 - protein, 85 aa, Setaria italica
  Transcript Sequence Number=SeqID_43931
  Pfam annotation: Domain name=Dev_Cell_Death; Domain location=1-62; Score=-20.3; E_value=2.7e-05; Accession=PF10539.1; Description =Development and cell death domain
CYVYWHHSTQDSKNKVKFKIDKDCLPLTESSIKQAIKENYSARSKFDPELTARQVHRLLALFKPANAPQPAPNNHREGRRHREER

SEQ ID NO: 109906 - protein, 207 aa, Setaria italica
  misc_feature (14)..(14): Xaa can be any naturally occurring amino acid
  Transcript Sequence Number=SeqID_43932
SLPIEEVCQPRFDXERRLQFIRVPLEDPYRAPRFAPLPVESELGHSLARGDHNRYYQPALAPEPRHIPLTLEHHHVPSVPELRHVPAAYYHTLAPSSDSYYRSAENLAPERYADRTVAEITTRDTIIPRDYTRVPGEISSRTDRLEDLYHTRSIAARGAHVEELYPPGEFAARADRVGITTRADHLEDLYRSDRLATRAVDPLLPVS

SEQ ID NO: 109907 - protein, 581 aa, Setaria italica
  Transcript Sequence Number=SeqID_43933
  Homolog annotation: Hit_ID=B9RA64; Match level="QueryCoverage=14%, HitCoverage=11%, E-value=2e-12, Identity=45%"; Hit description =Nucleotide binding protein, putative
  Pfam annotation: Domain name=Dev_Cell_Death; Domain location=147-270; Score=238.1; E_value=2.1e-68; Accession=PF10539.1; Description =Development and cell death domain
  Subcellular localization annotation: CTP_CleavageSite=36; ConfidenceScore=5.21e-01
SSSVGAGTAGGDASASAVLPQPSHVAEASPGAQMPKSATVAEASPVAQTPKPASDAEGSEPAPAPATAEASASGAKLKPKPADADAVAASAASKGKGVGADNRGGDGRMKSRRERARNGKGKEVDEDGGSKGKGRKAVGKKEERGDIAGFIFMCNAKTKQECYKNLLFGLPSGKIGMVKKIRPGARLFLYDFDLKLLYGVYKAASHGGLNLVPEAFDGKFPAQVKFKIDKDCLPLTESSIKQAIKENYSARSKFDPELTARQVHRLLALFKPANAPQPAPNNHREGRRHREERRHREERRQPYHFEERWPSLPIEEVCQPRFDEERRPAVIRVPLEDPYRAPRFAPLPVESELGHSLARGDHNRYYQPALAAEPRHIPLTLEHHHVPSVPELRHVPAAYYHTLAPSSDSYYRSAENLAPERYADRTVAVLLFQFTHCTILTNLSSILYDLSTMDAIIPRDYTRVPGEISSRTDRLEDLYHTRSIAARGAHVEELYPPGEFAARADRVGITTRADHLEDLYRSDRLATRAVDPLPRSTYYTAAYETHPAYAETSARPVSARANGPGVPVSSLYSFGGGPAYR

SEQ ID NO: 109908 - protein, 122 aa, Setaria italica
  misc_feature (4)..(4): Xaa can be any naturally occurring amino acid
  Transcript Sequence Number=SeqID_43934
PRIXIVRTGPDKGRLRLSSDGLPCLNNTCHKPKGSACQSLESVAATQFKPGISCNHGSREGNCTCVFWDLVMVLREMTIPVIKGHQRWDDKTRNSCHLLHPGQYHCGTRLISELETGVAKNG

SEQ ID NO: 109909 - protein, 62 aa, Setaria italica
  Transcript Sequence Number=SeqID_43935
KFHVEKGCTNTETVLFKSIYVAAAPRQLLISIPFANRYLEVGSLNGLIHLVTEVGAYILHIR

SEQ ID NO: 109910 - protein, 128 aa, Setaria italica
  misc_feature (11)..(11): Xaa can be any naturally occurring amino acid
  Transcript Sequence Number=SeqID_43936
TLEEIKHLWRXHCCATKYGRDLSMRVDNFEHPSETNVLCSDWNSWKDPIIRFSGTTDSVGTQFFLKNVHPGMKAAASALFGSPDSLHARPNTFGELLRAIVSPSRTVQEAVNWALKGQWKQDKLQQVV

SEQ ID NO: 109911 - protein, 108 aa, Setaria italica
  Transcript Sequence Number=SeqID_43937
  Subcellular localization annotation: CTP_CleavageSite=62; ConfidenceScore=5.33e-01
LSQFRFSGTTDSVGTQFFLKNVHPGMKAAASALFGSPDSLHARPNTFGELLRAIVSPSRTVQEAVNWALKGVDPDIALHMRMMSSRYRTLYSICLNKLKVTGKLSVFT

SEQ ID NO: 109912 - protein, 210 aa, Setaria italica
  misc_feature (68)..(68): Xaa can be any naturally occurring amino acid
  Transcript Sequence Number=SeqID_43938
  Subcellular localization annotation: CTP_CleavageSite=30; ConfidenceScore=5.04e-01
AQEEGGGFRSPESRASMRSSGSLTSPSAPVCSRSWSISEDSLRRYVSYASESCIQELLAASDSGRPPXGDGDDGWKVLVYQNGVEISKRRAGPAHVFRSRWLLQDVSPEQFMAAANAVDAAKQWESDQLVEASYIRELGEDLSIIHLKFGDTSSTRRPARRRDLVVYERRQAMDDGTLVVAVASLPKEIAAGLLPPAKGGGSNPVGRGLL

SEQ ID NO: 109913 - protein, 199 aa, Setaria italica
  Transcript Sequence Number=SeqID_43939
  Gene Ontology: Mol. function=methyltransferase activity; Cellular component=cytoplasm
  Homolog annotation: Hit_ID=B6TJD2; Match level="QueryCoverage=99%, HitCoverage=60%, E-value=1e-111, Identity=94%"; Hit description =Arginine N-methyltransferase 2
MDAESKAVMMAWERPLMEAHARAVCQGGGKVLNIGFGMGLVDEAIQRYEPEEHTIVEAHPEVYARMLKLGWGEKKNVRIVFGRWQDVMPQLGSYDGIFFDTYGEYYEDMREFHQHLPKLLKPGGIYSYFNGLCGDNAFFHVVYCQLVALELANLGYSTQFIPLPVKDCLADEVWKGVKQKYWQLDTYHLPVCQSESEAE

SEQ ID NO: 109914 - protein, 251 aa, Setaria italica
  Transcript Sequence Number=SeqID_43940
  Gene Ontology: Cellular component=chromosome, centromeric region; Biological process=cell cycle
  Homolog annotation: Hit_ID=B6T5H5; Match level="QueryCoverage=99%, HitCoverage=99%, E-value=1e-76, Identity=58%"; Hit description=Mis12 protein
  Pfam annotation: Domain name=Mis12; Domain location=13-150; Score =62.2; E_value=2e-15; Accession=PF05859.4; Description=Mis12 protein
MEEGDESAPRAGAEAEAALGLSPQLFVDEVLDRIADISAEAFEYCLHEAAAPGVLGAATAAQKAAELQRGLNGIRHVVKNALDKRMTNWEKYCFEHCFNIPEGFMVPEDDNSCAKDSHKDGTNSYLDVELDSIRRKLESANKESENLQREMSSLENQTTYKRKLDSAIAEIQKLFDDKFVQENFEDLAKAIPVLQQKIIGMKKKRTETGNLIDQQVWNTNGLRDSKRQALGNGFTACTEDIQGIVNILQNK

SEQ ID NO: 109915 - protein, 213 aa, Setaria italica
  misc_feature (190)..(190): Xaa can be any naturally occurring amino acid
  misc_feature (200)..(200): Xaa can be any naturally occurring amino acid
  Transcript Sequence Number=SeqID_43941
MSGVYDEKPPTEVSTDPSSSRNSIDEDDDWVIVKKQRITILIPPPTPDAANPESDRPTVSSKHSTLTQSKRDWNAARKKHPKQLIAKTPKDFPPEDGISEKFQVEGSESTVQKDVPRIVGDIPPQCPAAPVVKSEWTEGGCQAVEGLFHQGSGKVTNSSGIMDDPRMPVISSPVANKIMRARLLESRVAXFGGLRNWLFXRGLGWFVGILDSE

SEQ ID NO: 109916 - protein, 111 aa, Setaria italica
  Transcript Sequence Number=SeqID_43942
  Gene Ontology: Mol. function=electron carrier activity
  Homolog annotation: Hit_ID=B6TES1; Match level="QueryCoverage=100%, HitCoverage=50%, E-value=5e-15, Identity=93%"; Hit description=Blue copper protein
NALSSYSKGHTYAFQLKEAKDYYFICSYGYCYNGMKVHVTARSTGSSPSSSSGGSSDDSSSSDDSSDDTPSPPSKKSKANYTVGDEKGWNPDVDYTAWVKKHKPFFKGDWL

SEQ ID NO: 109917 - protein, 197 aa, Setaria italica
  Transcript Sequence Number=SeqID_43943
  Gene Ontology: Mol. function=electron carrier activity
  Homolog annotation: Hit_ID=B6TES1; Match level="QueryCoverage=50%, HitCoverage=50%, E-value=1e-51, Identity=94%"; Hit description=Blue copper protein
  Pfam annotation: Domain name=Cu_bind_like; Domain location=36-118; Score=54.8; E_value=3.3e-13; Accession=PF02298.9; Description =Plastocyanin-like domain
MEMRLALALLVLAVAASQLPSAAEAANYTVGDEKGWNPDVDYTAWVKKHKPFFKGDWLIFEYQNGRSDVVQVDEVGYDNCDKANALSSYSKGHTYAFQLKEAKDYYFICSYGYCYNGMKVHVTARSTGSSPSSSSGGSSDDSSSSDDSSDDTPSPPSKKSKAKSSAASPSLLAGATSYASIIAATGAAALLLNRIML

SEQ ID NO: 109918 - protein, 127 aa, Setaria italica
  misc_feature (9)..(9): Xaa can be any naturally occurring amino acid
  Transcript Sequence Number=SeqID_43944
  Gene Ontology: Mol. function=diacylglycerol kinase activity; Biological process=activation of protein kinase C activity
  Homolog annotation: Hit_ID=B9T3T5; Match level="QueryCoverage=82%, HitCoverage=17%, E-value=2e-27, Identity=51%"; Hit description =Pentatricopeptide repeat-containing protein, putative
  Pfam annotation: Domain name=PPR; Domain location=56-90; Score=48.0; E_value=3.7e-11; Accession=PF01535.12; Description=PPR repeat
  Pfam annotation: Domain name=PPR; Domain location=91-125; Score=29.1; E_value=1.8e-05; Accession=PF01535.12; Description=PPR repeat
  Pfam module annotation: Pfam domain module=PPR::PPR; Domain location =56-90::91-125
AVERGEWVXRYLEAEGFGRRSGNVMLETALVDMYCKCGCMEEAWRVFNGVRNHDVVLWNAMIGGLAMHGHGNHAIELFRRMLEKGFVPNESTFVVVLCACTHTGRVDEGKEIFRSMRDHGVEPRREH

SEQ ID NO: 109919 - protein, 302 aa, Setaria italica
  Transcript Sequence Number=SeqID_43945
  Gene Ontology: Mol. function=protein dimerization activity
  Homolog annotation: Hit_ID=A8QW53; Match level="QueryCoverage=100%, HitCoverage=81%, E-value=2e-88, Identity=59%"; Hit description=O -methyltransferase 3
  Pfam annotation: Domain name=Methyltransf_2; Domain location=24-279; Score=245.4; E_value=1.4e-70; Accession=PF00891.10; Description=O -methyltransferase
RVMRALTVSGIFSFEQPADRRSHDSAVYKLTAASRLLVVGDESSTAAGQLPPFLSVKILLWPCLDSPVSKGMHAWFRQDKQQSGPTLAPFALAYSGQTIWERAEHHATVFPFNNAMASDTAFLMPIVLRECGEVFRGLTSLVDVAGGLGGAAATIAAAFPDLKCTVLDLPQVVAKAPSGANVQYVAGDMFESIPPTNAVFLKWILHDWGDEECVKILKNCKQAISLRDAGGKVIIIDMVVGSGPSDDIKHAETQVLFDLLIMNINGVERDEQEWRKIFFEAGFKDYKIIPVLGVRSIIELYP

SEQ ID NO: 109920 - protein, 121 aa, Setaria italica
  Transcript Sequence Number=SeqID_43946
  Gene Ontology: Mol. function=transferase activity, transferring groups other than amino-acyl groups; Cellular component=cytoplasm; Biological process=biosynthetic process
  Homolog annotation: Hit_ID=Q2R3A4; Match level="QueryCoverage=99%, HitCoverage=27%, E-value=3e-18, Identity=45%"; Hit description =Chalcone and stilbene synthases, N-terminal domain containing protein
  Pfam annotation: Domain name=ACP_syn_III; Domain location=1-68; Score= -2.5; E_value=0.0019; Accession=PF08545.2; Description=3-Oxoacyl -[acyl-carrier-protein (ACP)]
SSGSAALRVGKDIAENNPGARVLVACAELSLKFLREAREDRPETLIMQSLFGDGAAAVILGAGGVTDGDDGAAGSGVERPLFELVSASQTWIPDTEDAAAGQLAEGGLVFRPSPKMPALLR

SEQ ID NO: 109921 - protein, 234 aa, Setaria italica
  misc_feature (72)..(72): Xaa can be any naturally occurring amino acid
  misc_feature (104)..(104): Xaa can be any naturally occurring amino acid
  Transcript Sequence Number=SeqID_43947
  Gene Ontology: Mol. function=serine-type endopeptidase activity; Cellular component=chloroplast; Biological process=response to stress
  Homolog annotation: Hit_ID=B9SF71; Match level="QueryCoverage=72%, HitCoverage=30%, E-value=2e-61, Identity=73%"; Hit description =Protease degQ, putative
  Pfam annotation: Domain name=Trypsin; Domain location=1-190; Score= -28.5; E_value=0.0076; Accession=PF00089.18; Description=Trypsin
MYSGKVKLPLIVLYRVTLADQSVYEAQVVGFDQDKDVAVLRIKAPKDKLRPIPVGVSADLLVGQKVYAIGTXFGLDHTLTTGVIRWTLFFKLIHLLAGSYGMHXDSVFAVCAYSSSGLRREISSAATGRPIQDVIQTDAAINPGNSGGPLLDSSGNLIGVNTAIYSPSGASSGVGFSIPVDTVRTFSSLISNNLLPIIFHSRGLCPPVPSKEKYSTQVSSSVQIFLFFLILPSS

SEQ ID NO: 109922 - protein, 346 aa, Setaria italica
  misc_feature (12)..(12): Xaa can be any naturally occurring amino acid
  misc_feature (35)..(35): Xaa can be any naturally occurring amino acid
  Transcript Sequence Number=SeqID_43948
  Gene Ontology: Mol. function=serine-type endopeptidase activity; Cellular component=chloroplast; Biological process=response to stress
  Homolog annotation: Hit_ID=B9SF71; Match level="QueryCoverage=99%, HitCoverage=74%, E-value=1e-176, Identity=89%"; Hit description =Protease degQ, putative
  Pfam annotation: Domain name=PDZ; Domain location=232-327; Score=9.4; E_value=0.074; Accession=PF00595.16; Description=PDZ domain (Also known as DHR or GLGF)
  Pfam annotation: Domain name=Trypsin; Domain location=53-230; Score =49.5; E_value=1.3e-11; Accession=PF00089.18; Description=Trypsin
  Pfam module annotation: Pfam domain module=PDZ::Trypsin; Domain location=232-327::53-230
AGAASAFVVATXRKLQADELATVRLFQENDDLLTXTPSVVYITNLAVRQDAFTLDVLEVPQGSGSGFVWDKSGHIVTNFHVIRGASDLRVTLADQSVYEAQVVGFDQDKDVAVLRIKAPKDKLRPIPVGVSADLLVGQKVYAIGNPFGLDHTLTTGVISGLRREISSAATGRPIQDVIQTDAAINPGNSGGPLLDSSGNLIGVNTAIYSPSGASSGVGFSIPVDTVGGIVDQLIKFGKVTRPILGIKFAPDQSVEQLGLSGVLVLDAPSNGPAGKAGLQSTKRDAYGRLILGDIITSVNGTKVTNGSDLYRILDQCKVGETVTVEVLRGDHKEKIPVILEPKPDES

SEQ ID NO: 109923 - protein, 125 aa, Setaria italica
  misc_feature (33)..(33): Xaa can be any naturally occurring amino acid
  Transcript Sequence Number=SeqID_43949
REPDTGLSVKKRRRREWLWKQRAAMPAALASAXGVAMTRAAGRSYRSARAACRRSSASFLARARSSVQSVRRHWYPACCATWSASWIGFASIAFAPSPILPHHAVREIKRRRDFGGAGGEAIGRP

SEQ ID NO: 109924 - protein, 216 aa, Setaria italica
  Transcript Sequence Number=SeqID_43950
  Gene Ontology: Mol. function=transcription repressor activity; Biological process=regulation of nitrogen utilization
  Homolog annotation: Hit_ID=Q2QUH8; Match level="QueryCoverage=89%, HitCoverage=61%, E-value=8e-76, Identity=69%"; Hit description =Isoflavone reductase, putative, expressed
  Pfam annotation: Domain name=NmrA; Domain location=29-216; Score =156.5; E_value=8.2e-44; Accession=PF05368.5; Description=NmrA-like family
LQSAENRSQSKRSRNQERRLLPAMEKSKVLVVGGSTGFVGRRIVAASLAQGYPTFVLMRPEIGLDVDKLQALLSFKAQGARLVEASLDDRAGLVAAVRQVDVVVSALSGTHRSQTILLQHKLVEAIKEAGNIKRFIPSEFGMDPSRMGHALQPGRAIFDEKMELRRAIEAAKIPHTYISANCFAAYFCPNLAQMGTLLPPKDEVRVYGDWQCQSIL

SEQ ID NO: 109925 - protein, 264 aa, Setaria italica
  Transcript Sequence Number=SeqID_43951
  Gene Ontology: Mol. function=transcription repressor activity; Biological process=regulation of nitrogen utilization
  Homolog annotation: Hit_ID=Q2QUH8; Match level="QueryCoverage=86%, HitCoverage=73%, E-value=1e-101, Identity=72%"; Hit description =Isoflavone reductase, putative, expressed
  Pfam annotation: Domain name=NmrA; Domain location=8-255; Score =289.2; E_value=9.2e-84; Accession=PF05368.5; Description=NmrA-like family
YWSNCSKVNYFLRNVTVRRAGLVAAVRQVDVVVSALSGTHRSQTILLQHKLVEAIKEAGNIKRFIPSEFGMDPSRMGHALQPGRAIFDEKMELRRAIEAAKIPHTYISANCFAAYFCPNLAQMGTLLPPKDEVRVYGDGNVKVIFVDEDDVASYTIKSLDDPRTLNKTVYLRPPENILTQNELIAKWEKLSGNVIEKIYIPVDEFLASMKDMDIGGQIAVGHFYHIFYEGCLTNFDIGEDGAEATLLYPEVEYTRMDEYMKRYL

SEQ ID NO: 109926 - protein, 109 aa, Setaria italica
  Transcript Sequence Number=SeqID_43952
  Gene Ontology: Mol. function=transcription factor activity; Cellular component=nucleus; Biological process=regulation of transcription, DNA-dependent
MLRSRKMPPMRKVRIFCSDPDATDSSGDENDENPKKEKKIIREVLVPVKKYKTSQPLRPIMPCGIKDLNGPERKVPSSRYRGVRLRDSGRWQAEIRNPLTKKREYSLHD

SEQ ID NO: 109927 - protein, 95 aa, Setaria italica
  misc_feature (19)..(19): Xaa can be any naturally occurring amino acid
  misc_feature (59)..(59): Xaa can be any naturally occurring amino acid
  Transcript Sequence Number=SeqID_43953
  Gene Ontology: Mol. function=endonuclease activity; Cellular component=nucleus; Biological process=tRNA processing
  Homolog annotation: Hit_ID=B6U9N4; Match level="QueryCoverage=98%, HitCoverage=30%, E-value=1e-33, Identity=76%"; Hit description =Nuclear ribonuclease Z
LSDFILDPDNADVLKAKIXVVESTYIDDSKSIEDAREKGHTHLSEIASLSDKLENKAIXLLNHFSNRYTAEDIDVAINRLPPPFRSRVYALKEGF

SEQ ID NO: 109928 - protein, 119 aa, Setaria italica
  Transcript Sequence Number=SeqID_43954
  Gene Ontology: Mol. function=protein serine/threonine kinase activity; Biological process=protein amino acid phosphorylation
  Homolog annotation: Hit_ID=B9RXY2; Match level="QueryCoverage=92%, HitCoverage=12%, E-value=4e-24, Identity=47%"; Hit description=S -locus-specific glycoprotein S6, putative
  Pfam annotation: Domain name=S_locus_glycop; Domain location=1-90; Score=71.5; E_value=3.1e-18; Accession=PF00954.12; Description=S -locus glycoprotein family
PFSAPGRGGLYSYDVLDNATVLTRFVVNSSGQIQRLMWIDMTQSWSLFWSYPLDECDGYRACGPYGVCSVERSPICGCAPGFDPRFPAEWALRDGSGGCRRRTELNCTGDGDGFATLTN

SEQ ID NO: 109929 - protein, 48 aa, Setaria italica
  Transcript Sequence Number=SeqID_43955
LVTLTTCVSSLNKERIFLVTALYHTSSEKHHGVAARLLHRRSRPFTRT

SEQ ID NO: 109930 - protein, 208 aa, Setaria italica
  Transcript Sequence Number=SeqID_43956
  Homolog annotation: Hit_ID=Q7XS41; Match level="QueryCoverage=100%, HitCoverage=23%, E-value=4e-74, Identity=65%"; Hit description =OSJNBa0074L08.11 protein
FNPVDDRYFISGSLDEKVRIWSTQNREIVDWRDLHEMVTAACYTPDGQVLIIYTSFLDLNIFVLRSNMFPSYLKSALIGSHKGSCHIYDTSDNRLLQKKQIDLQNKKKKSSQKKITGFQFLPGNTSRVLITSADSRIRVADGLNLVHKYKGFRNTSSQIAACLAANGRYVISASEDSHVYIWRNDDNLEQGRSKGNVTVTNSYEYFHC

SEQ ID NO: 109931 - protein, 534 aa, Setaria italica
  misc_feature (168)..(168): Xaa can be any naturally occurring amino acid
  misc_feature (176)..(176): Xaa can be any naturally occurring amino acid
  Transcript Sequence Number=SeqID_43957
  Homolog annotation: Hit_ID=Q7XS41; Match level="QueryCoverage=99%, HitCoverage=69%, E-value=0.0, Identity=76%"; Hit description =OSJNBa0074L08.11 protein
  Pfam annotation: Domain name=WD40; Domain location=169-206; Score =39.3; E_value=1.5e-08; Accession=PF00400.24; Description=WD domain, G-beta repeat
  Pfam annotation: Domain name=WD40; Domain location=210-248; Score =36.0; E_value=1.5e-07; Accession=PF00400.24; Description=WD domain, G-beta repeat
  Pfam annotation: Domain name=WD40; Domain location=252-289; Score =7.1; E_value=5.7; Accession=PF00400.24; Description=WD domain, G -beta repeat
  Pfam annotation: Domain name=WD40; Domain location=302-341; Score =0.3; E_value=36; Accession=PF00400.24; Description=WD domain, G-beta repeat
  Pfam annotation: Domain name=WD40; Domain location=343-383; Score =14.9; E_value=0.35; Accession=PF00400.24; Description=WD domain, G -beta repeat
  Pfam annotation: Domain name=WD40; Domain location=451-526; Score =3.1; E_value=17; Accession=PF00400.24; Description=WD domain, G-beta repeat
  Pfam annotation: Domain name=WD40; Domain location=60-98; Score=42.1; E_value=2.2e-09; Accession=PF00400.24; Description=WD domain, G-beta repeat
  Pfam module annotation: Pfam domain module=WD40::WD40::WD40::WD40::WD4 0::WD40::WD40; Domain location=169-206::210-248::252-289::302 -341::343-383::451-526::60-98
LQPSRDRRSSDEKDTCSEKGGRRSSSATDDSQDSARAVHHGPVRVKVRQYGKSYKELSGLFMNQEIQAHNGSIWSIRFSPDGRYLASAGEDCVIHVWEVSEFERKREENGVCNPFVAMVCNGSPEPTLALASLDGSNSEKKRRARFLESRRSVSSDQLMVPEHVFALXEKPIRTFXGNSEDVLDLCWSKSQYLLSSSMDKTVKLWHISSTSCLKTFSHSDYVTCIQFNPVDDRYFISGSLDEKVRIWSTQNREIVDWRDLHEMVTAACYTPDGQSALIGSHKGSCHIYDTSDNRLLQKKQIDLQNKKKKSSQKKITGFQFLPGNTSRVLITSADSRIRVADGLNLVHKYKGFRNTSSQIAACLAANGRYVISASEDSHVYIWRNDDNLEQGRSKGNVTVTNSYEYFHCQDVTAAVALPSAGSAMVSRTNSRKHDEQDCVSEHPLLHAVPELQDSCDFQGQSGNILSTSSNHSGDRATWPEELMTATKQSPRSSASLPSGAGQAPSRSAWGMVIVTAGRGGQIRTFQNFGFPARV

SEQ ID NO: 109932 - protein, 80 aa, Setaria italica
  Transcript Sequence Number=SeqID_43958
MQQMMMADELAAAEQHQQAEADDFEDYVTRLPKAEDFGLGGFQEVPPEVFDEAAGGGIWDHTVGWPSAMMSGGPSQIRPF

SEQ ID NO: 109933 - protein, 78 aa, Setaria italica
  Transcript Sequence Number=SeqID_43959
DAVNLDLVGLTALYDGQCSDCLFLLVLDLCVRLLIGSIRHGVCVVYRNGYVAMFAIEYRGKAGDVYVCVILLTLRKLA

SEQ ID NO: 109934 - protein, 61 aa, Setaria italica
  Transcript Sequence Number=SeqID_43960
QFQISLRLCRTKNFFNVCGFFRSIHNTIENFSSGEGNYKKPSFSTLLSHLRQNRWERLCFI

SEQ ID NO: 109935 - protein, 51 aa, Setaria italica
  Transcript Sequence Number=SeqID_43961
ALCWILHLCIASQALKLFKCPGNGVFIAPSPRTSYCFNGHKNCDHLLIWCS

SEQ ID NO: 109936 - protein, 56 aa, Setaria italica
  Transcript Sequence Number=SeqID_43962
SRLCWDRFVRRGSLTCTVHHHSHSQSPLSGQRVLGTTLRLITPENNSMCLQRIPKA

SEQ ID NO: 109937 - protein, 113 aa, Setaria italica
  Transcript Sequence Number=SeqID_43963
MLGQVCEERQPYMHSASSLSQPISIVRPKGSRYYPKIDNTRGRGGIGRPPYTTRVEDDGRAGEPHHGVHRLVCRLHTSPQHRPAMADHNKMSNARVRDFAATMTRSPWGVDWD

SEQ ID NO: 109938 - protein, 607 aa, Setaria italica
  Transcript Sequence Number=SeqID_43964
  Gene Ontology: Mol. function=electron carrier activity; Cellular component=endoplasmic reticulum membrane; Biological process =oxidation reduction
  Homolog annotation: Hit_ID=Q8VX49; Match level="QueryCoverage=100%, HitCoverage=86%, E-value=0.0, Identity=85%"; Hit description =Cytochrome P450 reductase
  Pfam annotation: Domain name=FAD_binding_1; Domain location=199-424; Score=401.9; E_value=1.1e-117; Accession=PF00667.12; Description=FAD binding domain
  Pfam annotation: Domain name=Flavodoxin_1; Domain location=1-143; Score=170.3; E_value=5.5e-48; Accession=PF00258.17; Description =Flavodoxin
  Pfam annotation: Domain name=NAD_binding_1; Domain location=461-572; Score=119.1; E_value=1.5e-32; Accession=PF00175.13; Description =Oxidoreductase NAD-binding domain
  Pfam module annotation: Pfam domain module=FAD_binding_1::Flavodoxin _1::NAD_binding_1; Domain location=199-424::1-143::461-572
FFGTQTGTAEGFAKALAEEAKARYDRAVFKVVDLDDYAAEDEEYGEKLKKESIALFFLATYGDGEPTDNAARFYKWFSEGNERGEWLSNLQFGVFGLGNRQYEHFNKIGKMVDQLLAEQGGKRIVPVGLGDDDQCIEDDFNAWKELLWPELDKLLRQEDNSSAAATPYTAAIPEYRVLFVKQEDTTNINKSFSLSNGHAVYDIQHPCRANVAVRRELHTPASDRSCIHLEFDIAGTGLKYETGDHVGVYAENCIEIVEEAEKLLGYSPDTLFSIYADQEDGTPLCGGSLPPPFPSPCTVRTALTRYADLLNSPKKSALLALAAHASDPKEAERLRHLASPAGKKEYSQWIVTSQRSLLEVMSEFPSAKPPLGVFFAAISPRLQPRYYSISSSPRMAPTRIHVTCALVYGPTPTGRIHKGVCSTWMKHSTTLEESQECSWAPIFVRQSNFKLPADPTVPIVMVGPGTGLAPFRGFLQERLALKEAGVELGPAILFFGCRNRKMDFIYEDELSNFVDTGALSELIVAFSREGPTKEYVQHKMAQKAGVLWSIISQGGYIYVCGDAKGMARDVHRTLHTIIQEQGSLDNSKTESYVKSLQTEGRYLRDVW

SEQ ID NO: 109939 - protein, 71 aa, Setaria italica
  Transcript Sequence Number=SeqID_43965
SPPLSGSHRLQPFSSKIVSVKFLGERDLGRNIRIFIRTKICSELILSFMFHTFCGCLKLTVHYTNLSNLYI

SEQ ID NO: 109940 - protein, 126 aa, Setaria italica
  Transcript Sequence Number=SeqID_43966
TVGPLRSSLSLRPNFSIAMELVVLILKGSLAQHEVNYHFPVEEALLWRPPTCNLCCCPLCGGDGVSPTWLYWHLSCFWKAPLYTEHRSILLMVSPIGLPIFLILLPLFCLFFCAFFYLSLSAGCSI

SEQ ID NO: 109941 - protein, 342 aa, Setaria italica
  Transcript Sequence Number=SeqID_43967
  Gene Ontology: Mol. function=hydrolase activity
  Homolog annotation: Hit_ID=B6SJL9; Match level="QueryCoverage=93%, HitCoverage=92%, E-value=1e-168, Identity=92%"; Hit description =Catalytic/ hydrolase
  Pfam annotation: Domain name=Abhydrolase_1; Domain location=94-334; Score=15.5; E_value=0.00031; Accession=PF00561.12; Description =alphabeta hydrolase fold
  Pfam annotation: Domain name=PGAP1; Domain location=55-255; Score= -87.6; E_value=0.064; Accession=PF07819.5; Description=PGAP1-like protein
  Pfam module annotation: Pfam domain module=Abhydrolase_1::PGAP1; Domain location=94-334::55-255
MAASLRASSSLRSRLLSSSSGYYPWRLLLSSPVHSDAPHQTETLAFDEIQLSPEKPPTATAFVLHGLLGSGRNWRSFSRILASELHSRSPSDEWRMVLVDLRNHGRSAGIKGFDPPHNMSTAAKDLADLVKARGWPWPDVVVGHSMGGKVALDFAESCSRGVYGESAVLPKQLWVLDSVPGQVLTDNSDGEVERVLQTLASLPSSLPSRKWVVDHMLSLGFSKSLSEWIGSNLKKDNDHVTWAFDLQAAIDMFNSYRERSYWELLEHPPKDLEIAIVQAERSDRWDPDDVQRLKALAKRESKPDAGKVSLHVLPNSGHWVHVDNPKGLLEIMAPNFLSAGKN

SEQ ID NO: 109942 - protein, 44 aa, Setaria italica
  Transcript Sequence Number=SeqID_43968
LKHSWIIKWKLPFHTLLRPLASPLSFIIKILLYSDCFHFCYQID

SEQ ID NO: 109943 - protein, 437 aa, Setaria italica
  Transcript Sequence Number=SeqID_43969
  Gene Ontology: Mol. function=DNA binding
  Homolog annotation: Hit_ID=B5TVL7; Match level="QueryCoverage=100%, HitCoverage=100%, E-value=1e-160, Identity=69%"; Hit description=MYB- like protein E1
  Pfam annotation: Domain name=Myb_DNA-binding; Domain location=61-106; Score=57.2; E_value=6.3e-14; Accession=PF00249.23; Description=Myb -like DNA-binding domain
MASMAQVEERDGLDSSGLSIDKRLPLDAVKSPLKDDAVQPKEGMDGYPVKVRKPYTITKQREKWTEEEHEKFLEALKLYGRSWRQIQEHIGTKTAVQIRSHAQKFFSKVVREPGASNAIEIPPPRPKRKPLHPYPRKCADSSTLANPAVGQPKLAPISSSSGYNVENGSPVSVLSAMQSDTFGSSVSNPSTGCTSPASSDDGNNAPVLVSEEENLLTQQVEDDQSRQEMKLDNSDGDLSEEDSSGGVQETSLKLFGKTVIIPDPKKVCSSDGGCGDGEKSSQPSKQEVLQASSIGGVAAYPTHNGWLLPYHSFQFHMGDSGNARISPLHVWWPYYGFPAGHPRGFSMGLPTEGTCESDTGKSLSAESSSDCLGNVQTTAPTNCKVVKEPLGAIQVPESALSFELKPSTNSAFARVKPGSSRDHSLRGFMPYKRCKVE

SEQ ID NO: 109944 - protein, 62 aa, Setaria italica
  Transcript Sequence Number=SeqID_43970
  Gene Ontology: Mol. function=protein disulfide oxidoreductase activity; Cellular component=extracellular region; Biological process=electron transport chain
  Homolog annotation: Hit_ID=Q7G8Y5; Match level="QueryCoverage=100%, HitCoverage=60%, E-value=6e-26, Identity=95%"; Hit description =Glutaredoxin-C1
ELDEDPRGNEMEKALARLLGRSTGVPAVFIGGRLVGSTDKVMSLHLSGNLVPLLRNAGALWV

SEQ ID NO: 109945 - protein, 103 aa, Setaria italica
  Transcript Sequence Number=SeqID_43971
  Gene Ontology: Mol. function=protein disulfide oxidoreductase activity; Cellular component=extracellular region; Biological process=electron transport chain
  Homolog annotation: Hit_ID=Q7G8Y5; Match level="QueryCoverage=100%, HitCoverage=100%, E-value=3e-50, Identity=95%"; Hit description =Glutaredoxin-C1
  Pfam annotation: Domain name=Glutaredoxin; Domain location=13-76; Score=67.2; E_value=6.3e-17; Accession=PF00462.16; Description =Glutaredoxin
MDRVTKLASQRAVVIFSMSSCCMCHTVTRLFRELGVNPTVVELDEDPRGKEMEKALARLLGRSPAVPAVFIGGRLAGSTDKVMSLHLSGNLVPLLRNAGALWV

SEQ ID NO: 109946 - protein, 53 aa, Setaria italica
  Transcript Sequence Number=SeqID_43972
  Gene Ontology: Mol. function=2,4-dienoyl-CoA reductase (NADPH) activity; Cellular component=plasma membrane
  Homolog annotation: Hit_ID=B6T9B6; Match level="QueryCoverage=98%, HitCoverage=17%, E-value=2e-17, Identity=84%"; Hit description =Peroxisomal 2,4-dienoyl-CoA reductase
YAGKYVNGATIVVDGGLWLSRPRHIPKEEVKALSKVVERKVRTSGVGVPSSKL

SEQ ID NO: 109947 - protein, 58 aa, Setaria italica
  Transcript Sequence Number=SeqID_43973
  Gene Ontology: Mol. function=2,4-dienoyl-CoA reductase (NADPH) activity; Cellular component=plasma membrane
  Homolog annotation: Hit_ID=B6T9B6; Match level="QueryCoverage=93%, HitCoverage=17%, E-value=2e-21, Identity=92%"; Hit description =Peroxisomal 2,4-dienoyl-CoA reductase
QAVGFDGDVRKQEDAARVLAATVEHFGKLDILVNGAAGNFLASPEDLKPKGFRTGTSS

SEQ ID NO: 109948 - protein, 152 aa, Setaria italica
  Transcript Sequence Number=SeqID_43974
  Gene Ontology: Mol. function=2,4-dienoyl-CoA reductase (NADPH) activity; Cellular component=plasma membrane; Biological process =metabolic process
  Homolog annotation: Hit_ID=B6T9B6; Match level="QueryCoverage=95%, HitCoverage=48%, E-value=3e-75, Identity=93%"; Hit description =Peroxisomal 2,4-dienoyl-CoA reductase
SRANDLVILSTLHYTAAWYQIHVSAAKAGVDSITRSLALEWGTDYDIRVNGIAPGPIQDTPGLRKLAPEEMSKGLREMMPLFKFGEKQDIAMAALYLASDAGKYVNGTTLVVDGGLWLSHPRHIPKEEVKDLSKLVEKKVRTSGVGVPSSKL

SEQ ID NO: 109949 - protein, 70 aa, Setaria italica
  misc_feature (4)..(4): Xaa can be any naturally occurring amino acid
  Transcript Sequence Number=SeqID_43975
  Gene Ontology: Mol. function=2,4-dienoyl-CoA reductase (NADPH) activity; Cellular component=plasma membrane
  Homolog annotation: Hit_ID=B6T9B6; Match level="QueryCoverage=80%, HitCoverage=18%, E-value=4e-18, Identity=80%"; Hit description =Peroxisomal 2,4-dienoyl-CoA reductase
GGVXSPKEEDAAKVLAATVEHFGKLDILVNGAAGNFLASPEDLTPKGFRTVLDIVYVPTVSMSRTVRNPL

SEQ ID NO: 109950 - protein, 33 aa, Setaria italica
  Transcript Sequence Number=SeqID_43976
MESPFRADVLKGKAALVTGGGSGICFEIAAQLA

SEQ ID NO: 109951 - protein, 297 aa, Setaria italica
  Transcript Sequence Number=SeqID_43977
  Gene Ontology: Mol. function=2,4-dienoyl-CoA reductase (NADPH) activity; Cellular component=plasma membrane; Biological process =oxidation reduction
  Homolog annotation: Hit_ID=B6T9B6; Match level="QueryCoverage=100%, HitCoverage=98%, E-value=1e-149, Identity=88%"; Hit description =Peroxisomal 2,4-dienoyl-CoA reductase
  Pfam annotation: Domain name=KR; Domain location=14-148; Score=-79.0; E_value=0.018; Accession=PF08659.2; Description=KR domain
  Pfam annotation: Domain name=adh_short; Domain location=13-187; Score= 60.9; E_value=4.9e-15; Accession=PF00106.17; Description=short chain dehydrogenase
  Pfam module annotation: Pfam domain module=KR::adh_short; Domain location=14-148::13-187
MESPFRADVLKGKAALVTGGGSGICFEIAAQLARHGAQVAIMGRRREVLDKAVAALRSQGLRAVGFDGDVRKQEDAARVLAATVEHFGKLDILVNGAAGNFLASPEDLTPKGFRTVLDIDTVGTYTMCYEAIKYLKRGGPGKGPSNGGLIINISATLHYTATWYQIHVSAAKAGVDSITRSLALEWGTDYDIRVNGIAPGPIQGTPGLRKLAPEEMSKGLREMTPLFKLGEKWDIAMAALYLGSDAGKYVNGATIVVDGGLWLSRPRHIPKEEVKALSKVVERKVRTSGVGVPSSKL

SEQ ID NO: 109952 - protein, 87 aa, Setaria italica
  Transcript Sequence Number=SeqID_43978
  Gene Ontology: Mol. function=protein serine/threonine kinase activity; Biological process=protein amino acid phosphorylation
  Homolog annotation: Hit_ID=B6T7B9; Match level="QueryCoverage=93%, HitCoverage=17%, E-value=8e-40, Identity=93%"; Hit description =Phytosulfokine receptor
SLWFCIGPSHGSALSWHIRMKIALDTARGLEYLHEHCNPPIIHRDLKSSNILLDPDFNAKISDFGLAVTSGNHSKGNIKLSGTMGYV

SEQ ID NO: 109953 - protein, 396 aa, Setaria italica
  Transcript Sequence Number=SeqID_43979
  Gene Ontology: Mol. function=protein serine/threonine kinase activity; Biological process=protein amino acid phosphorylation
  Homolog annotation: Hit_ID=B6T7B9; Match level="QueryCoverage=97%, HitCoverage=84%, E-value=0.0, Identity=89%"; Hit description =Phytosulfokine receptor
  Pfam annotation: Domain name=Pkinase; Domain location=96-366; Score =142.2; E_value=1.6e-39; Accession=PF00069.17; Description=Protein kinase domain
  Pfam annotation: Domain name=Pkinase_Tyr; Domain location=96-366; Score=121.3; E_value=3.2e-33; Accession=PF07714.9; Description =Protein tyrosine kinase
  Pfam annotation: Domain name=SKG6; Domain location=9-45; Score=10.8; E_value=0.042; Accession=PF08693.2; Description=Transmembrane alpha -helix domain
  Pfam module annotation: Pfam domain module=Pkinase::Pkinase _Tyr::SKG6; Domain location=96-366::96-366::9-45
VVIVVEGHHHLRRELIAAIVLSSVAGVMIVLAALYAFVLWWRSRRGLVDSKDTQSIDTARIAFVPMLNSFNSYKTSKKSTAAMMDYTSLEAATGKFSESSVLGVGGFGCVYRANFDGGFAAAVKRLGGGAQNCEKEFENELDLLGRIRHPNIVSLVGFCIHEENRFIVYELMENGSLDSQLHGPSHGSALSWHIRMKIALDTARGLEYLHEHCNPPIIHRDLKSSNILLDPDFNAKISDFGLAVTSGNHSKGNIKLSGTMGYVAPEYLLDGKLTEKSDVYAFGVVLLELLLGRKPVEKTAQSQCQSIVTWAMPQLTDRSKLPNIIDPMIKNTMDLKHLYQVAAVAVLCVQPEPSYRPLITDVLHSLVPLVPMELGGTLRINPESPYATQRHSPLLR

SEQ ID NO: 109954 - protein, 262 aa, Setaria italica
  misc_feature (63)..(63): Xaa can be any naturally occurring amino acid
  misc_feature (245)..(245): Xaa can be any naturally occurring amino acid
  misc_feature (258)..(258): Xaa can be any naturally occurring amino acid
  Transcript Sequence Number=SeqID_43980
  Gene Ontology: Mol. function=DNA binding; Cellular component=nucleus
  Homolog annotation: Hit_ID=Q01K78; Match level="QueryCoverage=100%, HitCoverage=41%, E-value=2e-87, Identity=60%"; Hit description =H0525C06.6 protein
  Pfam annotation: Domain name=WAC_Acf1_DNA_bd; Domain location=22-121; Score=168.7; E_value=1.7e-47; Accession=PF10537.1; Description=ATP -utilising chromatin assembly and
MPLFNKKPFSLLEPPKDLDSKEKVFQIRFTKEIFRDYQEYLKRLNLYRQRVWTCKMSGKSNLXFEEALVSEHNSMEKAQNLPTGLMAYVLRMTQYSTLGLHDLINKIYACLLEEVFEGIELHAKKDGSAVPCKIMKIFYSDGTKMCEVGWIRRDKTLINTSVVKAADLFYRRAPVSRNTLKIFIRDSTTQTTPWVIHENLAKKYGIPMDPPKDLMHKKGRKRKENGTIEDGRKKMKKDGIDAHNXTTITIDELLVRPXADDP

SEQ ID NO: 109955 - protein, 92 aa, Setaria italica
  Transcript Sequence Number=SeqID_43981
  Homolog annotation: Hit_ID=B6STZ4; Match level="QueryCoverage=83%, HitCoverage=16%, E-value=3e-10, Identity=50%"; Hit description =Calmodulin binding protein
MGWAPRWLRGLLGGGRKAAETKPVKEKRRWGFGKSFREKAPAPVAARPPTPPVQPSATPRRGYAAATDEADDEQSKRAIAVAAATAAVAEAA

SEQ ID NO: 109956 - protein, 357 aa, Setaria italica
  Transcript Sequence Number=SeqID_43982
  Gene Ontology: Mol. function=DNA binding; Biological process =regulation of transcription
  Homolog annotation: Hit_ID=B9SAN4; Match level="QueryCoverage=94%, HitCoverage=97%, E-value=2e-99, Identity=58%"; Hit description =Transcription factor, putative
  Pfam annotation: Domain name=Myb_DNA-binding; Domain location=41-92; Score=45.7; E_value=1.8e-10; Accession=PF00249.23; Description=Myb -like DNA-binding domain
  Subcellular localization annotation: CTP_CleavageSite=9; ConfidenceScore=5.05e-01
MFSSKKATSAAAAAAAVSSNDRQMCVQGDSGLVLTTDPKPRLRWTVELHERFVDAVTQLGGPDKATPKTIMRVMGVKGLTLYHLKSHLQKFRLGKQPHKEFNDHSVKDAAAMEMQRNAASSSGMMGRSMNDRSVHMNEAIRMQMEVQRRLHEQLEVQKHLQMRIEAQGKYMQSILEKAYQTIASGDVAACPAGGYKSLGNPAIVDVCSFKDIGPSMGFASLQDLHMYGGGHLDLQHQMERPMEAFFANCDMGSLGKKRLSPYAAGKSPMMWGDDEQGKGGIDHLQMAPPMMDAGGIDVMDSIADVYGDVKPMMSSDSTGSKGCFEGKLERPSPRRPHMGNERMGSPSVIGGQTRNLS

SEQ ID NO: 109957 - protein, 117 aa, Setaria italica
  misc_feature (41)..(41): Xaa can be any naturally occurring amino acid
  Transcript Sequence Number=SeqID_43983
  Gene Ontology: Mol. function=nucleic acid binding
  Homolog annotation: Hit_ID=Q7XVU8; Match level="QueryCoverage=99%, HitCoverage=14%, E-value=4e-16, Identity=36%"; Hit description =OSJNBa0035B13.3 protein
PIKHDARDWESCALVLWALHLPRNAGACDIADLLTRELELXQRGEVSVKLHQLKPYLIRFEHAAHAAEARRQGHFTGGGIDIYLRTWSSLTHALGFHIFYRVHLCLDDIPSHAWTSE

SEQ ID NO: 109958 - protein, 148 aa, Setaria italica
  Transcript Sequence Number=SeqID_43984
  Gene Ontology: Mol. function=protein binding; Cellular component =integral to membrane; Biological process=regulation of exocytosis
  Homolog annotation: Hit_ID=Q6UW68; Match level="QueryCoverage=52%, HitCoverage=40%, E-value=2e-11, Identity=40%"; Hit description =Transmembrane protein 205
APDALRLGGSGSGSGAAAAARLVHLLAFATAWGAGLWVAFIGGTIMFKYLPRHQFGSLQGKMFPAYFMLISACSAISVAAFAYLHPWKTASTVERYQLGFLLLALGCNLSNLLVITPMMVEMTMKRYKLEKDLGNTDKTKVRETTKET

SEQ ID NO: 109959 - protein, 109 aa, Setaria italica
  misc_feature (42)..(42): Xaa can be any naturally occurring amino acid
  Transcript Sequence Number=SeqID_43985
RYLPRHQFGSLQGKMFPAYFMLISACSAISVAAFAYLHPWKXTASTVERYQLGFLLLALGCNLSNLLVITPMMVEMTMKRYKLEKDLGIGSEVGNSKNKEMAKRSPTLA

SEQ ID NO: 109960 - protein, 118 aa, Setaria italica
  Transcript Sequence Number=SeqID_43986
  Subcellular localization annotation: CTP_CleavageSite=38; ConfidenceScore=5.28e-01
LAIFVAFSVMLSRKTNFITGQPSRRSWPKILCKAHVSRDSMKEAPQTAQSLRTSLSKLCYHYPVREPKKKKENLQKSPTTTASVPAPARRHRHGRRCPLHLRLLLACSGCATSCRKHR

SEQ ID NO: 109961 - protein, 49 aa, Setaria italica
  Transcript Sequence Number=SeqID_43987
MLRRCVRDLRSLRSLGRIPRPISGESPTFLRSRSNSTKASQKNSTQNTV

SEQ ID NO: 109962 - protein, 620 aa, Setaria italica
  misc_feature (374)..(374): Xaa can be any naturally occurring amino acid
  Transcript Sequence Number=SeqID_43988
  Gene Ontology: Cellular component=mitochondrion
  Homolog annotation: Hit_ID=Q014V4; Match level="QueryCoverage=32%, HitCoverage=28%, E-value=4e-13, Identity=32%"; Hit description =Myosin class II heavy chain (ISS)
  Subcellular localization annotation: CTP_CleavageSite=68; ConfidenceScore=5.34e-01
KLGLLTYDLPEIPRPISGESPTFLRSRSNSTKASQKNSTQNTVPGSQEESSQSGSNVSKLVLGTIVIGAAAVGAHQLGYIDFQLKDKKLPFSFKNPDVAKVYEDLKVPSEQKVDQTQIMSEPNTEVFQASDKEAHTPKDLANEEAGAPEIPIDRDQLVPEEEKKSETLRQETHPVPDEHGSHTELPSQDSPAVEINPVVVDDKETGEVPHEQKTDQTASTVTPVQSSPTTVSPYNDPPTDVHAPKDLSGADVAEQKSLAETYLLQDEPDVSKDATAKETSRDEALPKKPSDDGKVVLDIIEAIHAAEKKQADADAYMYSEEKRKLKEKYEKELKDTRARELMYAEEAAILDKELKKEKLKNAAAIRELQEKAEXQKLRDELQRKEEETRQQIEKAQELAKAEMAAAVAKEKATQIEQIAEANLNIDALCMAFYARSEEARQSHSVHKLALGTLALEHALSSGSPIRSEVELLHKSVEGIDKDSLLELALSSLPEDVLDYGSDTRMELKQKFNSLKETIRHFSLIPEGGGGILTHALARVASSIKIKEDSSGDGIESLISRVERLIVDGDLSTAADALEGGLQGSEAAEIATEWVKQARKRAIAEQTLALLHACASSTTFS

SEQ ID NO: 109963 - protein, 108 aa, Setaria italica
  Transcript Sequence Number=SeqID_43989
PAAQLAGLLLWCRRAPPRASRLLLELKNRKKTEGTENLARTLFKNLPSILHKSRRNLSHRCAGPRANRSMRKISKSLSIHRGFGEKPKPYAKNTIWEKFKIRLNPCGI

SEQ ID NO: 109964 - protein, 146 aa, Setaria italica
  Transcript Sequence Number=SeqID_43990
  Gene Ontology: Cellular component=extracellular region; Biological process=xenobiotic metabolic process
  Homolog annotation: Hit_ID=Q33B32; Match level="QueryCoverage=99%, HitCoverage=34%, E-value=1e-13, Identity=35%"; Hit description =Thaumatin family protein, expressed
  Subcellular localization annotation: CTP_CleavageSite=25; ConfidenceScore=5.32e-01
YSQVFKTACPRSYSYAFDDPTSTFTCGGRPDYTVTFCPGLCPQKSTTMPGATPTTVPGTTTTTTVPGATPTAVPGTSSVPGATPAMPTGTMMPGTTFTDATPDSAMPMGGGGGLGIEGGEQGSVLLGGSSSEGGVSWLANMATGDA

SEQ ID NO: 109965 - protein, 127 aa, Setaria italica
  misc_feature (44)..(44): Xaa can be any naturally occurring amino acid
  misc_feature (75)..(75): Xaa can be any naturally occurring amino acid
  misc_feature (110)..(110): Xaa can be any naturally occurring amino acid
  Transcript Sequence Number=SeqID_43991
  Gene Ontology: Mol. function=transferase activity, transferring phosphorus-containing groups; Cellular component=chloroplast; Biological process=phosphorylation
  Homolog annotation: Hit_ID=A1IM62; Match level="QueryCoverage=97%, HitCoverage=12%, E-value=2e-54, Identity=87%"; Hit description =Pyruvate orthophosphate dikinase
  Pfam annotation: Domain name=PEP-utilizers_C; Domain location=1-127; Score=-91.3; E_value=3.9e-08; Accession=PF02896.10; Description=PEP -utilising enzyme, TIM barrel domain
NQTKGVQVFPEIMVPLVGTPQELGNQVALIRETANKVFAALGKXTIDYKIGTMIEIPRAALVADEIAEQAEFFSXFGTNDLTQMTFGYSRDDVGKFLPIYLSQGILQHDXPFEVLDQRGVGELVKLL

SEQ ID NO: 109966 - protein, 202 aa, Setaria italica
  Transcript Sequence Number=SeqID_43992
SSAISLMSGTTSNPSVLPGQCIPVLLFVFEDDTVDVSSAATSLDDIGDAFSSNQGSTSDGSSKQSSASKGSGSVVMLARAANKSESSSGKKLHSSLEGQIRVLLKKCRVLAGMEPGHIGPRGVNNMSHHVPLFSLDTSRVVALLERSINKKQEPLDIIAGLFEDSFSSKSPLDILSLENNYHPTNHDDSQLIKDFIFRQSDA

SEQ ID NO: 109967 - protein, 92 aa, Setaria italica
  Transcript Sequence Number=SeqID_43993
ASYAFAALLTSKTIQQSQVHKFQKLFGDMHCLLCILSEKRALRDNATSLYLSRKILCSNSWQKSYLKKQIMNNFISLGSSTPYQLSRQFGTE

SEQ ID NO: 109968 - protein, 69 aa, Setaria italica
  Transcript Sequence Number=SeqID_43994
FEGSERNKGILKKQWNGYNSNRSFSHLLEICTQALIRFVETKRNIKGWFNFLLECFNFHRLIQLFSIPQ

SEQ ID NO: 109969 - protein, 37 aa, Setaria italica
  Transcript Sequence Number=SeqID_43995
  Homolog annotation: Hit_ID=B6TUX2; Match level="QueryCoverage=100%, HitCoverage=13%, E-value=2e-12, Identity=91%"; Hit description =Uncharacterized secreted protein
FPLWDGFRAAKCGVVLFVQNAALQVLGVQHFDLPDNV

SEQ ID NO: 109970 - protein, 196 aa, Setaria italica
  Transcript Sequence Number=SeqID_43996
  Homolog annotation: Hit_ID=B6TUX2; Match level="QueryCoverage=100%, HitCoverage=73%, E-value=1e-103, Identity=92%"; Hit description =Uncharacterized secreted protein
  Pfam annotation: Domain name=DUF1223; Domain location=1-179; Score =190.4; E_value=5e-54; Accession=PF06764.3; Description=Protein of unknown function (DUF1223)
LAFHVDYWDHSGWKDPFASSAWTVRQKAYVEALRLDTLFTPQVVVQGRAHCVGTEQDALAQAVRDAPRYPAPAMKATFQRPNPTTLQASFTGTLRSRVEGAGGASVLVALYESGLVTDCGRGENKGKSLLNDHVVRRLEKVAAVREGASAKKSVSGTVQFPLWDGFRAAKCGVVLFVQNAALQVLGVQHFDLPDNV

SEQ ID NO: 109971 - protein, 103 aa, Setaria italica
  Transcript Sequence Number=SeqID_43997
  Gene Ontology: Mol. function=metal ion transmembrane transporter activity; Cellular component=membrane; Biological process=metal ion transport
  Homolog annotation: Hit_ID=Q9SAH0; Match level="QueryCoverage=97%, HitCoverage=22%, E-value=5e-33, Identity=67%"; Hit description =F23A5.26 protein
KKYSTLNLERVRRLKSKLVADFISIQLDNVRNQLIQFELLLTTATFVVAIFGVVSGVFGMNFEVALFKVPHAFEWTLVITGVCGAVVFGSFLWYFRKRRILPL

SEQ ID NO: 109972 - protein, 85 aa, Setaria italica
  Transcript Sequence Number=SeqID_43998
DFRIPYCLEEATATIPPLSGEANRGGCVLARRRPGRRCGEPPPPPLPPPVPAGEGGADSTSRSAVREGIKLLKTAVHGSIHVGTL

SEQ ID NO: 109973 - protein, 88 aa, Setaria italica
  misc_feature (46)..(46): Xaa can be any naturally occurring amino acid
  misc_feature (69)..(69): Xaa can be any naturally occurring amino acid
  Transcript Sequence Number=SeqID_43999
  Gene Ontology: Mol. function=metal ion binding
  Subcellular localization annotation: CTP_CleavageSite=13; ConfidenceScore=5.02e-01
MAGHHHNNTHMPRMDQVNRFQNEPPPFGPKLFMHPRSDAANASSYXGVQTIRSNELPSSSHIGQPHTQXLKAPGTMLASYAGYPHAGR

SEQ ID NO: 109974 - protein, 538 aa, Setaria italica
  Transcript Sequence Number=SeqID_44000
  Gene Ontology: Mol. function=metal ion binding
  Homolog annotation: Hit_ID=Q40221; Match level="QueryCoverage=31%, HitCoverage=34%, E-value=1e-36, Identity=46%"; Hit description =Protein containing C-terminal RING-finger
  Pfam annotation: Domain name=PHD; Domain location=485-529; Score=0.7; E_value=0.022; Accession=PF00628.21; Description=PHD-finger
  Pfam annotation: Domain name=zf-C3HC4; Domain location=486-526; Score= 35.7; E_value=1.9e-07; Accession=PF00097.17; Description=Zinc finger, C3HC4 type (RING finger)
  Pfam module annotation: Pfam domain module=PHD::zf-C3HC4; Domain location=485-529::486-526
MAGHHHNNTHMPRMDQVNRFQNEPPPFGPKLFMHPRSDAANASSYGGATIRSNELPSSSHIGQPHTQPIEAPGTMLASYAGYPHAGSSSSTYAPHNTHHPPALSYPHRSEDCFIPSSHMDDRRVAQKRRNPIIHPMDGASVGSCYAASSSNPQFPRYMPPNPIPVPEPCPPRIPPNMGSSYWSDHCFGNHGGSQRNVRGRHDHNSIHLGYSPAAACSSSSTHGPPRHANAIGPSLSTAAPHDRAPFSVPPRVVPPGTDGNSSMAFRERPYYPAPQRTNVNVPPVPTLPGSSDSIPFLHGGYAPRAVPRNTIRSYPAPAFGSSSNSAAVSHEPAIPSYPPAVTSYPPATSAATSSAPPFHAEVAASSRHLGHVALGPSGSARSRRLRDSYHAFHPLIIEENNLRGSAAERFMMLDQLVIHESREDSDPHWDMRLDIDDMSYEELLALEERIGNVNTGLADEKISSCVMELSCCSSALAQDAKENERCVICLEEYEFKDYMGKLKCGHDYHADCIKKWLQVKNICPICKASAADDSGGTE

SEQ ID NO: 109975 - protein, 131 aa, Setaria italica
  Transcript Sequence Number=SeqID_44001
  Gene Ontology: Mol. function=sulfotransferase activity; Cellular component=integral to membrane
  Homolog annotation: Hit_ID=B6STJ6; Match level="QueryCoverage=100%, HitCoverage=38%, E-value=1e-49, Identity=73%"; Hit description =Flavonol 4-sulfotransferase
  Pfam annotation: Domain name=Sulfotransfer_1; Domain location=1-131; Score=-13.5; E_value=1.2e-06; Accession=PF00685.19; Description =Sulfotransferase domain
NTHLPYTLLPDRVTNAGGCRVVYVCRDPKDMVVSLWHFLRRAKPDLSFVETFESVCDGTVAAGPVWDHVLSYWRPSVARPDRVLFLKYEDLLRDTAANVRRLAEFMGRPFTAAEEAAGDVAAVVELCSFDE

SEQ ID NO: 109976 - protein, 107 aa, Setaria italica
  Transcript Sequence Number=SeqID_44002
TELYSEHLAAHHNINCSCHLSVVTLMSIEIWVRLILSLTMADLMHMASELSKEDSSICPVQAIVLGKFHFCMAHFHFSLFAKFSSECHWMHSRVNLRWLPVPFKIPG

SEQ ID NO: 109977 - protein, 125 aa, Setaria italica
  misc_feature (47)..(47): Xaa can be any naturally occurring amino acid
  Transcript Sequence Number=SeqID_44003
  Gene Ontology: Mol. function=catalytic activity; Cellular component =ribosome; Biological process=metabolic process
  Homolog annotation: Hit_ID=Q6K1V9; Match level="QueryCoverage=100%, HitCoverage=13%, E-value=2e-32, Identity=54%"; Hit description =Ribosomal protein-like
VPGRVVVRWNKQQGHEKLFDDYFADDPVFGPVTFRRRFRMSKELFLXIAAAVEAHCPYFKQKRNAAGDLGHSALKKITAALHMLAYGVPADSLDDWLHIAESTTILSLKKFVKAVIEIFGQQYLR

SEQ ID NO: 109978 - protein, 79 aa, Setaria italica
  Transcript Sequence Number=SeqID_44004
HPESVVDSGCLLLGSTLLLTEHLTVKEQATGGCVGKGFSGIWILLFEVFDFIIKRLILTHSPVFVHLAVLFLGILSSSN

SEQ ID NO: 109979 - protein, 62 aa, Setaria italica
  Transcript Sequence Number=SeqID_44005
  Subcellular localization annotation: CTP_CleavageSite=39; ConfidenceScore=5.07e-01
TDRDDKMWKRQRQICQPRQRTVPFLHPRNSMHFSCPSSRQSLASPVLSCSAHHLICSTLCCL

SEQ ID NO: 109980 - protein, 156 aa, Setaria italica
  misc_feature (86)..(86): Xaa can be any naturally occurring amino acid
  Transcript Sequence Number=SeqID_44006
  Gene Ontology: Mol. function=heat shock protein binding; Biological process=protein folding
  Homolog annotation: Hit_ID=Q10MW6; Match level="QueryCoverage=83%, HitCoverage=19%, E-value=3e-40, Identity=64%"; Hit description=DnaJ domain containing protein, expressed
AADEKLASNQANQKPSSQREENNVPLLTASNFEEICGEKTSVCIIGVFGSTKAKEQLEAVLSEISKKTLIRGQNYISGSALSYALXDRNKQSVFLSSFDKSGFKSSDKLLIAYKPRRGRFAVYKDEVTLEEAEGFVGSVLNGDVQLSPTQQKPVLR

SEQ ID NO: 109981 - protein, 69 aa, Setaria italica
  Transcript Sequence Number=SeqID_44007
VLLFLIVFKIMLGPINSISDDYQKLSNVLELSTAPICLMSSEHIIFSWHGKYNLVRSSCLALCTVTCKL

SEQ ID NO: 109982 - protein, 89 aa, Setaria italica
  Transcript Sequence Number=SeqID_44008
  Gene Ontology: Cellular component=vacuole
  Homolog annotation: Hit_ID=B6U1C0; Match level="QueryCoverage=96%, HitCoverage=14%, E-value=3e-25, Identity=64%"; Hit description =Microtubule-associated protein MAP65-1a
KANEESLTRKDIMERVDKWLSACDEETWLEEYNQDDNRYSAGRGAHLNLKRAEKARILVQKIPSESSFPQLLLLLTSVEHAASWHYQWD

SEQ ID NO: 109983 - protein, 611 aa, Setaria italica
  Transcript Sequence Number=SeqID_44009
  Homolog annotation: Hit_ID=Q67V48; Match level="QueryCoverage=95%, HitCoverage=97%, E-value=0.0, Identity=55%"; Hit description =Putative microtubule-associated protein MAP65-1a
  Pfam annotation: Domain name=MAP65_ASE1; Domain location=45-608; Score=67.1; E_value=6.8e-17; Accession=PF03999.4; Description =Microtubule associated protein (MAP65ASE1 family)
MGEMVMAGYGLDKAVRASVSFDTPCGALLRELEQIWTEIGEREQDKDRMFLELETECMRVYRRKVDSASAERAQLRQSLMAKEAELKALVASIGENTTQFKVDEKHTSLKDQLAAVTPLLEELRAKKEERIKQISNVQSQIEKIKAQISDHSYQNNDGSVKHLNDDHDLSTRRISDLQMQLRNLQKEKSDRLQKVFIYVDEVHCLCAVLGMDFANTVKEVHPSLHGTNSENSTNISDSTLEGLTQTILKLKAEKKTRVLKLQEIVEKLHKLWNLMESAEQDRRQFAKVAAVLGSSEEEITSPGILSLETIQETEEEVERLTKQKASRMKELVLKKRLELEDVCRNAHMEPDMNTAPEKIIALIDSGLVDPCELLSSIEVQIAKANEESLTRKDIMERVDKWLSACDEETWLEEYNQDDNRYSAGRGAHLNLKRAEKARILVQKIPTMIDNLIAKTFAWEDERNVPFLYDGVRLVAILEEQKLRRAQREEDKRRCRDQKKLQSLLLKEKELIFGSKPSPKKTNSFNRRTSSHHSNGNGTGFMTPVPRRVSAGSATPELLTPRSYSGRYNNYFKDNRRLTATPLNFSAVSKDDSMSSFASISGSEPDSPLYLH

SEQ ID NO: 109984 - protein, 207 aa, Setaria italica
  Transcript Sequence Number=SeqID_44010
  Homolog annotation: Hit_ID=Q9SXF7; Match level="QueryCoverage=100%, HitCoverage=39%, E-value=1e-79, Identity=67%"; Hit description=Amino acid transporter-like protein 1
QATMPSTFKHPAHVPFWRGAKVAYLLIAMCLFPVAVGGYWAYGNMMPPGGMLAALYAFHSHDTPQGLLATTCLLVVLNCLSSFQIYSMPVFDSFEAYYTGRTNRPCSPWVRSGFRVFYGFLSLFISVALPFLSSLAGLLGGLTLPVTFAYPCFMWIRVKKPERLSFSWYLNWGLALLGTAFSLAFSLGGVWGIVSNGMKLKFFKPPN

SEQ ID NO: 109985 - protein, 70 aa, Setaria italica
  Transcript Sequence Number=SeqID_44011
EDASSGGVIWHGHGKRSGKIYFGPLRTWRLIGCTNHEVSLPFEATGRSHSRALSRNVNYGWAALAHLTSC

SEQ ID NO: 109986 - protein, 126 aa, Setaria italica
  Transcript Sequence Number=SeqID_44012
  Homolog annotation: Hit_ID=B6TCZ0; Match level="QueryCoverage=91%, HitCoverage=26%, E-value=8e-43, Identity=75%"; Hit description=F-box domain containing protein
ANHDCDLIIGIFILCCRFRTLRPLWEQRVSPNVIYSAHHLPGDTTALAVGGIDGVLRLISQRTGEIIRSIVVDTDRPAEPTSRSRHQIEKKRVREVAPDARVDNISTRLRPQITSLSVGIKKIVTT

SEQ ID NO: 109987 - protein, 374 aa, Setaria italica
  misc_feature (6)..(6): Xaa can be any naturally occurring amino acid
  misc_feature (10)..(10): Xaa can be any naturally occurring amino acid
  Transcript Sequence Number=SeqID_44013
  Homolog annotation: Hit_ID=B6TCZ0; Match level="QueryCoverage=92%, HitCoverage=78%, E-value=0.0, Identity=88%"; Hit description=F-box domain containing protein
  Pfam annotation: Domain name=F-box; Domain location=29-77; Score =29.4; E_value=1.4e-05; Accession=PF00646.25; Description=F-box domain
  Pfam annotation: Domain name=WD40; Domain location=190-229; Score =0.2; E_value=37; Accession=PF00400.24; Description=WD domain, G-beta repeat
  Pfam annotation: Domain name=WD40; Domain location=233-270; Score =16.1; E_value=0.15; Accession=PF00400.24; Description=WD domain, G -beta repeat
  Pfam annotation: Domain name=WD40; Domain location=277-314; Score =7.9; E_value=4.6; Accession=PF00400.24; Description=WD domain, G -beta repeat
  Pfam annotation: Domain name=WD40; Domain location=318-357; Score =0.1; E_value=38; Accession=PF00400.24; Description=WD domain, G-beta repeat
  Pfam module annotation: Pfam domain module=F-box::WD40::WD40::WD40::WD 40; Domain location=29-77::190-229::233-270::277-314::318-357
MEAGSXRGRXGSAALKRRRGSGAGSGSGSTAQSLNDDILRSVFSRLDDHFDLARCSAVCSSWNRIIVTAHLMRDLYYKRNPPARGSNSNISVKSYFEALAMDEHASSLSNGPADAYQWVGHPMRATLCRMKGGSILTGVGDKILRLWSAETCKFMNEYNVPNAKTLVDFEFDENKIVGLTSSQICIWRRSEPRSIFQSSGASFNHGLCMSYADPEVVIGCEDGRAFVYDMYSRSCSSIYRLHSSPVTCLTITDDQLILGGSTFGNIAIADQTSGQKIGVLKSAYAPLAIRSLSFSTNSHMIFAGSSAGYAHCWDLRTLRPLWEQRVSPNVIYSAHHLPGDTTALAVGGIDGVLRLISQRTGEIIRSIVVDTDRP

SEQ ID NO: 109988 - protein, 173 aa, Setaria italica
  Transcript Sequence Number=SeqID_44014
  Homolog annotation: Hit_ID=Q53MM4; Match level="QueryCoverage=93%, HitCoverage=36%, E-value=6e-70, Identity=79%"; Hit description=F-box domain containing protein, expressed
  Subcellular localization annotation: CTP_CleavageSite=36; ConfidenceScore=5.40e-01
LNSVFFFTISASVLKSAYAPLAIRSLSFSTNSHMIFAGSSAGYAHCWDLRTLRPLWEQRVSPNVIYSAHHLPGDTTALAVGGIDGVLRLISQRTGEIIRSIVVDTDRPAEPTSRSRHQIEKKRVREVAPDARVDNISTRLRPQITSLSVGIKKIVTTHGENYIRVLKFCPKNS

SEQ ID NO: 109989 - protein, 98 aa, Setaria italica
  misc_feature (81)..(81): Xaa can be any naturally occurring amino acid
  misc_feature (98)..(98): Xaa can be any naturally occurring amino acid
  Transcript Sequence Number=SeqID_44015
  Homolog annotation: Hit_ID=Q5QM27; Match level="QueryCoverage=98%, HitCoverage=27%, E-value=1e-28, Identity=63%"; Hit description=Tubby- like F-box protein 1
EGVAAAEEEDRWARLLPELVAEVVRRVEASGGERWPARKDVVSCASVCRRWRDVAVTVLRPLPESGKITFPASLKQPGPKXFPIQCFINRNKKNSTFX

SEQ ID NO: 109990 - protein, 63 aa, Setaria italica
  Transcript Sequence Number=SeqID_44016
IPVVRPSYRRKQEPYTDLERQHSGGYGGGGQAADDDDALEHKFALPCGQEQSLAHFDFNLEYF

SEQ ID NO: 109991 - protein, 178 aa, Setaria italica
  misc_feature (81)..(81): Xaa can be any naturally occurring amino acid
  misc_feature (164)..(164): Xaa can be any naturally occurring amino acid
  Transcript Sequence Number=SeqID_44017
FQQHRTFAFYTVFLHQVHELHRLYHVQKSLMTEVGCGKHFQSRTEESQQIVQRSRSNHNRSPSTSETNQSACLGNAQHSAXPQVPEHLGLQECKPRTCLSLFSEENSATKEGNRTENPVGSHKAVEDGNCSASVESDLDLKLSIGPSSPATKGKPWLLPISREXPFWSASMRQVGYLI

SEQ ID NO: 109992 - protein, 241 aa, Setaria italica
  misc_feature (14)..(14): Xaa can be any naturally occurring amino acid
  misc_feature (122)..(122): Xaa can be any naturally occurring amino acid
  Transcript Sequence Number=SeqID_44018
  Gene Ontology: Cellular component=chloroplast
  Homolog annotation: Hit_ID=Q1ZY13; Match level="QueryCoverage=90%, HitCoverage=54%, E-value=4e-54, Identity=49%"; Hit description =Fgenesh protein 89
PKCFGGDETSDVPXALLPGLCAKAAVSIKKSIDAWRKKEDKLKNVQPYDVFLSDSHVSFTGIVGAVASGYLGDCSRRVSIRDETQRSNAFRMFNERNKFAAFADLFASVTFTAQYGNFQRLXLDLTKASARFDIASGSLFLCGASRLAQDFFFSRRPDIETFCDVCPDVTVSLQQQIVGPFSFRVESSVAIDPRSQDHFVRVDDSIFAIDWALKVLGSAKATAWYSPKHQEAMVELRFFEA

SEQ ID NO: 109993 - protein, 132 aa, Setaria italica
  Transcript Sequence Number=SeqID_44019
  Gene Ontology: Mol. function=aminoacyl-tRNA ligase activity; Cellular component=cytoplasm; Biological process=tRNA aminoacylation for protein translation
  Homolog annotation: Hit_ID=B9RGT2; Match level="QueryCoverage=90%, HitCoverage=19%, E-value=8e-28, Identity=50%"; Hit description =Tyrosyl-tRNA synthetase, putative
LHLGNLLGLVALSWFRRCGHTAVALVGGATGRVGDPSGKSAERPELDVAAVEANSDAIKSLVAQILGRVPEPAHHSQPCKNEQPLVNSAADSSAKMGSFVILDNYDWWKDITLLDFLKEVGRFARVGTMIAK

SEQ ID NO: 109994 - protein, 62 aa, Setaria italica
  Transcript Sequence Number=SeqID_44020
  Subcellular localization annotation: CTP_CleavageSite=58; ConfidenceScore=5.81e-01
RPPATGAWSWSASSPAAPAREASASTTPSSFSTNCSRSPGPPRFTPSTSSSPSSLAPRAGAP

SEQ ID NO: 109995 - protein, 84 aa, Setaria italica
  Transcript Sequence Number=SeqID_44021
LAGFPGWVFQAMRGVAVGMEPMFYALRALCNPNSSSMEVRLALYQFVIRFPPWLRRYLAMLRYYEAEPLSNIFSFDSYFSDWST

SEQ ID NO: 109996 - protein, 122 aa, Setaria italica
  Transcript Sequence Number=SeqID_44022
VIFFPKKSFDRVYEPQMPESNHRASDGIEPVNDHEDSMPGAKPMGLGRAGTTIDRDEHKRFVREVHEEVSEARQKASTVRSRRQEQDAARREKLRQAYLKKRLEKLIAEKQTSSASDDLPAS

SEQ ID NO: 109997 - protein, 117 aa, Setaria italica
  misc_feature (26)..(26): Xaa can be any naturally occurring amino acid
  misc_feature (39)..(39): Xaa can be any naturally occurring amino acid
  Transcript Sequence Number=SeqID_44023
LISCASIAFTLFLSVIPLKSASNEAXTRLLSVHSQRETXETTYRKTEIYGKVVREEVQSSCVGAVPMDSLKGKLLHRESLRGLPLAPSQGVHWRVIRNHWRVHWSFRLLNLIGSLGN

SEQ ID NO: 109998 - protein, 172 aa, Setaria italica
  Transcript Sequence Number=SeqID_44024
  Gene Ontology: Mol. function=hydrolase activity, acting on ester bonds; Biological process=lipid metabolic process
  Homolog annotation: Hit_ID=A1C0L3; Match level="QueryCoverage=98%, HitCoverage=45%, E-value=1e-52, Identity=57%"; Hit description =UCW116, putative lipase
FQQLMPSICGTDAGCKSYFSNSLFIVGEFGGNDYNAALFTPGKGMAEARSYVPQVVDRITTGVETLIGLGAVDVVVPGVLPIGCFPVYLTLYPSSNKDDYDEIGCLRSFNSLSSYHNELLKQALSGLRSKHAGVRLMYADFYAQVTDMVRSPETFGLEYGLRVCCGAGGEGP

SEQ ID NO: 109999 - protein, 71 aa, Setaria italica
  Transcript Sequence Number=SeqID_44025
  Gene Ontology: Mol. function=microtubule motor activity; Cellular component=microtubule associated complex; Biological process =microtubule-based movement
  Homolog annotation: Hit_ID=Q01IZ0; Match level="QueryCoverage=100%, HitCoverage=6%, E-value=7e-30, Identity=97%"; Hit description =OSIGBa0102D10.3 protein
  Pfam annotation: Domain name=Kinesin; Domain location=1-71; Score= -191.7; E_value=0.012; Accession=PF00225.15; Description=Kinesin motor domain
VKVSTQLNLIDLAGSESSKTETTGLRRKEGSYINKSLLTLGTVIAKLTDGKATHIPYRDSKLTRLLQSSLS

SEQ ID NO: 110000 - protein, 82 aa, Setaria italica
  Transcript Sequence Number=SeqID_44026
  Gene Ontology: Mol. function=zinc ion binding; Cellular component =intracellular
GEDGGGGAGAGRGGDGMTRDFLGLRAFSHREILGLAGFDSSCMGAVAANADMGCYEPQQHAQAPAQQQQSSNEPWHGMGSHS

SEQ ID NO: 110001 - protein, 55 aa, Setaria italica
  Transcript Sequence Number=SeqID_44027
SERAKFHNNKQNMDGSERHFRHPRLPFKCVMDTKKVRTEPGASIELPLYNLPLFD

SEQ ID NO: 110002 - protein, 99 aa, Setaria italica
  Transcript Sequence Number=SeqID_44028
GLGTKSQPGAAALYGKPFVNFDKLFEIYASDLAKGAKAKGPGDQFDLHEELSSADVTEQTQIDSAVDSHSQPPCHGSNSSSGVKSLAGRKRVSFNMSIW

SEQ ID NO: 110003 - protein, 64 aa, Setaria italica
  Transcript Sequence Number=SeqID_44029
  Subcellular localization annotation: CTP_CleavageSite=47; ConfidenceScore=5.56e-01
IHSNWNWNYSAVVILNSRSTPPSPIPHRRGFIASRSLVDRFLPAAPSCVVPGTNARLTSLGLTG

SEQ ID NO: 110004 - protein, 121 aa, Setaria italica
  misc_feature (84)..(84): Xaa can be any naturally occurring amino acid
  Transcript Sequence Number=SeqID_44030
  Gene Ontology: Cellular component=integral to membrane
  Homolog annotation: Hit_ID=B6UGE4; Match level="QueryCoverage=100%, HitCoverage=50%, E-value=6e-57, Identity=87%"; Hit description =Peroxisomal membrane protein 2
  Pfam annotation: Domain name=Mpv17_PMP22; Domain location=53-121; Score=63.0; E_value=1.1e-15; Accession=PF04117.4; Description=Mpv17 PMP22 family
TSYGFLLYGPGSHAWYQFLDRCMPKQTFVNLSTKVILNQILLGPCVIAIVFAWNNLWSGKLSELPSKYQNDALPALLYGFRFWXIPVSVVNFGMIPLPARVAFMSSCSIFWNFYLSTTMNK

SEQ ID NO: 110005 - protein, 77 aa, Setaria italica
  Transcript Sequence Number=SeqID_44031
IVFRAGGLKCVLKLLYEKEKLKSKIKSSFMSGVWNMDFHMWAAKYQFGVSYVCTCVNCTPKGLHVTIPAYFNKLVVI

SEQ ID NO: 110006 - protein, 132 aa, Setaria italica
  Transcript Sequence Number=SeqID_44032
  Gene Ontology: Cellular component=plasma membrane
  Homolog annotation: Hit_ID=B6U7W3; Match level="QueryCoverage=97%, HitCoverage=20%, E-value=4e-43, Identity=71%"; Hit description =Nitrate and chloride transporter
  Pfam annotation: Domain name=Nodulin-like; Domain location=2-131; Score=37.9; E_value=9.3e-13; Accession=PF06813.5; Description =Nodulin-like
RLVLAVGAAMNLGGYLMLYLSVTGRVRPAPPLWLVCLYIAVGANSQAFANTGALVTCVKNFPESRGVMLGLLKGFVGLSGAIFTQLYLAFYGPGGGGGVDTKPLILLVGWLPAAVSVAFLGTIRIIRAPRSP

SEQ ID NO: 110007 - protein, 115 aa, Setaria italica
  misc_feature (20)..(20): Xaa can be any naturally occurring amino acid
  Transcript Sequence Number=SeqID_44033
  Gene Ontology: Cellular component=plasma membrane
  Homolog annotation: Hit_ID=Q851R0; Match level="QueryCoverage=98%, HitCoverage=17%, E-value=5e-58, Identity=95%"; Hit description =Nodulin family protein, putative, expressed
  Pfam annotation: Domain name=Nodulin-like; Domain location=1-115; Score=49.8; E_value=2e-13; Accession=PF06813.5; Description=Nodulin -like
AMNLVGYLMIYLAIDGRTAXPPVWLMCIYICVGANSQSFANTGALVTCVKNFPESRGIVLGLLKGFVGLSGAIFTQLYLAIYGDDAKSLVLLIAWLPAAVSILFVHTIRIMPYPR

SEQ ID NO: 110008 - protein, 103 aa, Setaria italica
  misc_feature (45)..(45): Xaa can be any naturally occurring amino acid
  Transcript Sequence Number=SeqID_44034
RSLGELERWQHQQQQHVAAQQALYLRAVRQRTAAAADIAALLGGXPTQPLVLSGSSFGGGLASPSSTLSSLTTASRAAVPLMHPQPQPQLQQQRQVPLMTSSP

SEQ ID NO: 110009 - protein, 89 aa, Setaria italica
  Transcript Sequence Number=SeqID_44035
LKKVARVWQQTSLDSSNFLPGVHTILFFACCLRRVDVAALPKSRSDPGHCQRQELRLETCDSLVICLCNVELQYITMCILCIPRYTRSC

SEQ ID NO: 110010 - protein, 139 aa, Setaria italica
  misc_feature (41)..(41): Xaa can be any naturally occurring amino acid
  Transcript Sequence Number=SeqID_44036
  Gene Ontology: Mol. function=UDP-glucose:hexose-1-phosphate uridylyltransferase activity; Biological process=carbohydrate metabolic process
  Homolog annotation: Hit_ID=B6TFN9; Match level="QueryCoverage=100%, HitCoverage=40%, E-value=4e-38, Identity=67%"; Hit description =Galactose-1-phosphate uridylyltransferase
  Subcellular localization annotation: CTP_CleavageSite=50; ConfidenceScore=5.13e-01
SEARRDAVFGRWVVFSPARSRRPTDLKSHNPTNPSPAPGAXPPKPSCPFCAGRESECAPQIFRVPPDGSLPWRIRVIENLYPALRRDVEPPPAREGGDGGQAEEEEEPGERALSGFGFHDVVIETPRHDVRLWDLDAEG

SEQ ID NO: 110011 - protein, 68 aa, Setaria italica
  Transcript Sequence Number=SeqID_44037
LFFRVHPDCSLISHSHLTSRSANCKDTSLPLHLYVLKNLPLGIAKFGQFMLQSANPLHMFSQLTQQPF

SEQ ID NO: 110012 - protein, 68 aa, Setaria italica
  Transcript Sequence Number=SeqID_44038
  Subcellular localization annotation: CTP_CleavageSite=33; ConfidenceScore=5.09e-01
SNQYMYVGSSPLGLCFRTKAINPSPLERFLAINCATTAAATTAHRKRTRANLNFLTIYYLHAFPLKLP

SEQ ID NO: 110013 - protein, 164 aa, Setaria italica
  Transcript Sequence Number=SeqID_44039
  Gene Ontology: Mol. function=lipid binding; Cellular component =cytoplasm; Biological process=regulation of ARF protein signal transduction
  Homolog annotation: Hit_ID=B6T5A7; Match level="QueryCoverage=98%, HitCoverage=99%, E-value=1e-66, Identity=78%"; Hit description =Pleckstrin homology domain-containing protein 1
  Pfam annotation: Domain name=PH; Domain location=32-130; Score=95.7; E_value=1.6e-25; Accession=PF00169.21; Description=PH domain
MAASLWRAVMGTGAASADADSAGGGVEFWRIPERAGWLNKQGEYIKTWRRRWFVLKQGRLFWFKDSTVTRASVPRGVIPVASCLTVKGAEDVLNRQFAFELSTPAETMYFIADSEKEKEEWINSIGRSIVQHSSSIADAEVVDYDSRPKATTQPKDSEESEPAA

SEQ ID NO: 110014 - protein, 157 aa, Setaria italica
  Transcript Sequence Number=SeqID_44040
  Gene Ontology: Mol. function=lipid binding; Cellular component =cytoplasm
  Homolog annotation: Hit_ID=B6T5A7; Match level="QueryCoverage=96%, HitCoverage=89%, E-value=8e-67, Identity=82%"; Hit description =Pleckstrin homology domain-containing protein 1
  Pfam annotation: Domain name=PH; Domain location=38-136; Score=90.8; E_value=4.8e-24; Accession=PF00169.21; Description=PH domain
MAASLWRAVMDSVSGSSSSSSPTAPDAASGGVEFWHGAERVGWLNKQGEYIKTWRRRWFVLKQGRLFWFKDPAVTRASVPRGVIPVASCLTVKGAEDVLNRQFAFELSTPRETMYFIADTEKEKEEWINSIGRSIVQHSRSVTDAEVVDYDSRPGDK

SEQ ID NO: 110015 - protein, 310 aa, Setaria italica
  Transcript Sequence Number=SeqID_44041
  Gene Ontology: Mol. function=nicotinate-nucleotide diphosphorylase (carboxylating) activity; Cellular component=chloroplast; Biological process=pyridine nucleotide biosynthetic process
  Homolog annotation: Hit_ID=B9SJ41; Match level="QueryCoverage=96%, HitCoverage=84%, E-value=1e-140, Identity=78%"; Hit description =Nicotinate-nucleotide pyrophosphorylase [carboxylating], putative
  Pfam annotation: Domain name=QRPTase_C; Domain location=113-294; Score=269.0; E_value=1.1e-77; Accession=PF01729.11; Description =Quinolinate phosphoribosyl transferase,
  Pfam annotation: Domain name=QRPTase_N; Domain location=22-111; Score= 133.8; E_value=5.6e-37; Accession=PF02749.8; Description=Quinolinate phosphoribosyl transferase, N-terminal domain
  Pfam module annotation: Pfam domain module=QRPTase_C::QRPTase_N; Domain location=113-294::22-111
FVFPFFLLFCAVIALALSEDAGDRGDVSCLATIPSDVEAEATFIAKADGVIAGISLADMIFNQVDPSLKVEWFESDGNYVHKGLQFGKVYGCARSIIVAERVVLNFMQRMSGIATLTKAMSDAARPASILETRKTAPGLRLVDKWAVLIGGGKNHRLGLFDMVMIKDNHISVAGGIANAMRSVDQFLEKEKLTIPVEVETRTIEEVKDVLKYAAENKTSLTRIMLDNMVVPLTNGDVDVSMLKDAVQLINGRFETEASGNVTIDTVKKIGETGVTYISSGALTHSVKALDISLKIDTELALQVGRRTNRA

SEQ ID NO: 110016 - protein, 30 aa, Setaria italica
  Transcript Sequence Number=SeqID_44042
IGIALKCGSKVEYRSTLCDTAELQFSIEVD

SEQ ID NO: 110017 - protein, 103 aa, Setaria italica
  Transcript Sequence Number=SeqID_44043
  Gene Ontology: Mol. function=double-stranded RNA binding; Cellular component=intracellular
  Homolog annotation: Hit_ID=Q7XUL7; Match level="QueryCoverage=100%, HitCoverage=10%, E-value=3e-43, Identity=79%"; Hit description =OSJNBa0074L08.12 protein
RLKVWDEKDQSRVHVVPAFTPYYAPQAEANCSIPVLCVARNVACNVRGGFFKDFDEGLLPRISNVHYEDEINDISTAPDVGNYLIREDENVAAVNGNRDALPF

SEQ ID NO: 110018 - protein, 879 aa, Setaria italica
  misc_feature (443)..(443): Xaa can be any naturally occurring amino acid
  Transcript Sequence Number=SeqID_44044
  Gene Ontology: Mol. function=double-stranded RNA binding; Cellular component=intracellular
  Homolog annotation: Hit_ID=Q7XUL7; Match level="QueryCoverage=99%, HitCoverage=93%, E-value=0.0, Identity=69%"; Hit description =OSJNBa0074L08.12 protein
  Pfam annotation: Domain name=dsrm; Domain location=637-700; Score =49.4; E_value=1.4e-11; Accession=PF00035.17; Description=Double -stranded RNA binding motif
  Pfam annotation: Domain name=dsrm; Domain location=763-829; Score =36.7; E_value=9.2e-08; Accession=PF00035.17; Description=Double -stranded RNA binding motif
  Pfam module annotation: Pfam domain module=dsrm::dsrm; Domain location=637-700::763-829
AVGARCLVMESRPPAATDVAPLPLVAMYAACLRDNKTAVVPLGDEELHLVAMTSRRNLANHACFWGYKLPFGLYNSCLTMLNLRCLGIVFDLDETLIVANTSRSFEDRIDALQRKQSNETDPQRRNGMLSEIKRYQDDKSILKQYIEGDQVYDDGKMYKAQPEVVPPLSDNQQPMTRPVIRLQDKNIILTRINPLIRDTSVLVRLRPAWEDLRSYLIARGRKRFEVYVCTMAERDYALEMWRLLDPDSRLINSVQLNDRMVCVKSGLKKSLLNVFHDGSCHPGMALVIDDRLKVWDEKDQSRVHVVPAFTPYYAPQAEANCSIPVLCVARNVACNVRGGFFKDFDEGLLPRISNVHYEDEINDISTAPDVGNYLIREDENVAAVNGNRDALPFDGMADAEVERRMKEASGNAQAFHPTVASFVMPVAPPQNFISSSVAPIAPXLGMMPPPFNQPVVQPGFSDPLQGSPAREEGEVPESELDPDTRRRLLILQHGQDTRDATPPLPAIPPVQVPVPPVQPHGNWFPAEDGMNPSNLNIGPAGFTVESDSLLYEKKQPPHPSFFHGGDNPMSSDRFSYQNQRFPSQLPHADDHHILQNHGPPKYRSFSGEELSGRHVPTNQRNNQLESGRHFAQYTGTPAGILEGIALKCGSKVEYRSTLCDTAELQFSIEVWIVGEKIGEGIGRTRREAQRQAAEMSLRNLANKYLSSDPNKMTDLKENGFSSNRNFFGYSGNNRDDILPVPSTSEESRFMKMEENNSRKTGGSVAALKELCTAEGYNLVFQARPYAPDGSVGKESYAQVEVGGQILGKGVASTWEEAKLQAADEALGTLRSMLGQLGHKRSGSPRSVAPNFNKRFKPDFPRTMQRVPYGTYSRIEGHVP

SEQ ID NO: 110019 - protein, 87 aa, Setaria italica
  Transcript Sequence Number=SeqID_44045
SRLQIPTGIKSPLHFCLPWCAPFYPGSTLNRDKRGRIEDQFSTSDPSPPISLPPCSSICVFPPLPFHSPLTDGKEQRRGEVRWRQQW

SEQ ID NO: 110020 - protein, 62 aa, Setaria italica
  Transcript Sequence Number=SeqID_44046
  Gene Ontology: Biological process=mitosis
  Homolog annotation: Hit_ID=B9RI37; Match level="QueryCoverage=90%, HitCoverage=27%, E-value=1e-12, Identity=61%"; Hit description =Mitotic spindle assembly checkpoint protein MAD2B, putative
TAYFRSLPADGDREAQLWIPTDTKLWMQPPQITPIKSVSCDPLKMQLYLEHPSPTEPKNPTG

SEQ ID NO: 110021 - protein, 65 aa, Setaria italica
  Transcript Sequence Number=SeqID_44047
  Gene Ontology: Mol. function=catalytic activity; Cellular component =mitochondrion; Biological process=metabolic process
  Homolog annotation: Hit_ID=B6TIM6; Match level="QueryCoverage=100%, HitCoverage=17%, E-value=4e-28, Identity=87%"; Hit description=CHY1
VSLLTGIVMGGGAGVSLHGRFRVATEKTIFAMPETALGLFPDVGGSYFLSRLPGFYGEYVALAGA

SEQ ID NO: 110022 - protein, 274 aa, Setaria italica
  Transcript Sequence Number=SeqID_44048
  Gene Ontology: Mol. function=signal transducer activity; Cellular component=plasma membrane; Biological process=response to light stimulus
  Homolog annotation: Hit_ID=B6SX07; Match level="QueryCoverage=99%, HitCoverage=46%, E-value=1e-121, Identity=80%"; Hit description =Protein binding protein
  Pfam annotation: Domain name=NPH3; Domain location=1-198; Score =128.5; E_value=2.1e-35; Accession=PF03000.6; Description=NPH3 family
HHQAAQSSAAEETLATQRRVLESVVTMIPGEPGSVTGRFLLRLLRVANYVGASSSTRAQLVRQAGSQLHEATAADLLIPLPSDPQAYDVGAAEAVLEHFLAQFQRPAPPDERRRMGAAMDKVARTFDEYLRTIALDRDFPVGRFADLVECLPDIARSDHDGLYHAIDVYLKEHPELSKADKKRLCRLIDCRKLSPDVRAQAISNDRMPLRTIVQLLFVEQERTMGTAAGASHGGAAVAPADRASVDATSRLATRTREDEPASSADHKSDVHRPR

SEQ ID NO: 110023 - protein, 100 aa, Setaria italica
  Transcript Sequence Number=SeqID_44049
  Gene Ontology: Cellular component=membrane
  Homolog annotation: Hit_ID=B6SKI7; Match level="QueryCoverage=100%, HitCoverage=20%, E-value=1e-36, Identity=74%"; Hit description=CrcB -like protein
LQSADQLLGDVDSSVLAQLIESGRILAPEVDANEDIANALEHHKVGPLPDDAMMPNNGKIAAAPVSSVETKDIISNAPADSSTKVEPYKLSLRLDYAAYM

SEQ ID NO: 110024 - protein, 112 aa, Setaria italica
  Transcript Sequence Number=SeqID_44050
  Gene Ontology: Mol. function=unfolded protein binding; Cellular component=microtubule; Biological process=tubulin complex assembly
  Homolog annotation: Hit_ID=O04350; Match level="QueryCoverage=100%, HitCoverage=99%, E-value=3e-34, Identity=65%"; Hit description =Tubulin-specific chaperone A
  Pfam annotation: Domain name=TBCA; Domain location=6-89; Score=92.3; E_value=1.7e-24; Accession=PF02970.8; Description=Tubulin binding cofactor A
MATLRNLKIKTSTCKRIVKELRSYEKEVEKEAAKTANMKENGADPYDLKQQENVLAESRMMVPDCHKRLETALADLKATLAELKEANEQGAEIGEAESTITEVEAVVKPTEE

SEQ ID NO: 110025 - protein, 202 aa, Setaria italica
  Transcript Sequence Number=SeqID_44051
  Gene Ontology: Mol. function=nucleotide binding; Cellular component =nucleus; Biological process=defense response
  Homolog annotation: Hit_ID=Q852D5; Match level="QueryCoverage=98%, HitCoverage=13%, E-value=1e-50, Identity=55%"; Hit description =Powdery mildew resistance protein PM3b, putative, expressed
VANLWMANGFIPEQSKVCPETFGERIFIELKSRSFFQDLKNVPFYEDEYSIYGKSTKHRYCPRITCKIHDLMHDVAQSAMGEECATIATHPSEREDVLRSARHLYLSIRRPETLLNASQEKGSSAFQTLICDIYEAGYLKCDGYVEGDLKILSKYNSIRALKIMFRTNRALKIDCGSILIRPKYLHHLRYLDLSRSDIKALT

SEQ ID NO: 110026 - protein, 118 aa, Setaria italica
  misc_feature (15)..(15): Xaa can be any naturally occurring amino acid
  misc_feature (28)..(28): Xaa can be any naturally occurring amino acid
  Transcript Sequence Number=SeqID_44052
  Gene Ontology: Mol. function=RNA binding; Cellular component =cytoplasm; Biological process=multicellular organismal development
  Homolog annotation: Hit_ID=B6TVQ3; Match level="QueryCoverage=96%, HitCoverage=40%, E-value=5e-49, Identity=81%"; Hit description =Nucleic acid binding protein
RVEASTGCRVFIRGXGSIKDTEKEEKLXGKPGYEHLNEPLHILIEAELPANIIDTRLRQAQEVMEELLKPVDESQDFYKRQQLRELAMLNSTLREDSPHPGSVSPFSNGGMKRAKPSQ

SEQ ID NO: 110027 - protein, 176 aa, Setaria italica
  Transcript Sequence Number=SeqID_44053
  Gene Ontology: Mol. function=RNA binding; Cellular component =cytoplasm; Biological process=multicellular organismal development
  Homolog annotation: Hit_ID=B9T521; Match level="QueryCoverage=80%, HitCoverage=50%, E-value=5e-58, Identity=75%"; Hit description =Nucleic acid binding protein, putative (Fragment)
  Pfam annotation: Domain name=KH_1; Domain location=71-127; Score=9.5; E_value=0.066; Accession=PF00013.21; Description=KH domain
VHDHGFSDFDRRRFRSPSPMSSPIVRPNLHGNGFGPWNGMPQERLGFPPPGTSMDWQGAPPSPGSYIVKKIIRLEVPVDSYPNFNFVGRILGPRGNSLKRVEASTGCRVFIRGKGSIKDTEKEEKLKGKPGYEHLNEPLHILIEAELPANIIDTRLRQAQEVMEELLKPVVSYSNV

SEQ ID NO: 110028 - protein, 168 aa, Setaria italica
  misc_feature (114)..(114): Xaa can be any naturally occurring amino acid
  Transcript Sequence Number=SeqID_44054
  Gene Ontology: Mol. function=RNA binding; Cellular component =cytoplasm; Biological process=multicellular organismal development
  Homolog annotation: Hit_ID=B9T521; Match level="QueryCoverage=86%, HitCoverage=56%, E-value=3e-34, Identity=50%"; Hit description =Nucleic acid binding protein, putative (Fragment)
  Pfam annotation: Domain name=KH_1; Domain location=76-132; Score =11.0; E_value=0.045; Accession=PF00013.21; Description=KH domain
  Subcellular localization annotation: CTP_CleavageSite=56; ConfidenceScore=5.14e-01
RVSSMVHDHGFSDFDRRRFRSPSPMSSPIVRPNLHGNGFGPWNGMPQERLGFPPPGTSMDWQGAPPSPGSYIVKKIIRLEVPVDSYPNFNFVGRILGPRGNSLKRVEASTGCRXFIRGKGSIKDTEKVSKMLYLLIASHLCACLIYNILSLERFYSLLGHGASLSYLM

SEQ ID NO: 110029 - protein, 196 aa, Setaria italica
  Transcript Sequence Number=SeqID_44055
  Gene Ontology: Mol. function=DNA-directed DNA polymerase activity; Cellular component=DNA polymerase III complex; Biological process =DNA replication
  Homolog annotation: Hit_ID=B9S8E5; Match level="QueryCoverage=100%, HitCoverage=17%, E-value=4e-80, Identity=70%"; Hit description =Replication factor C / DNA polymerase III gamma-tau subunit, putative
ARVFAKALNCLSPEHPRPCDSCTSCIAHNLGKSRNLMEIGPVGNIDMDGIVDVLDNVMLSPAPSHYRVFVFDDCDTLPADTWSVISKVVDRAPRRVVFILVSPNLELPHIILSRCQKFFFPKLRECDIVNTLQWICTSESLDVDKDALKLIASRSDGSLRDAEMTLDQLSLLGQRISLSLVQELVGLVSDDKLVDL

SEQ ID NO: 110030 - protein, 240 aa, Setaria italica
  misc_feature (28)..(28): Xaa can be any naturally occurring amino acid
  misc_feature (105)..(105): Xaa can be any naturally occurring amino acid
  Transcript Sequence Number=SeqID_44056
  Gene Ontology: Mol. function=triacylglycerol lipase activity; Biological process=lipid metabolic process
  Homolog annotation: Hit_ID=Q10B43; Match level="QueryCoverage=78%, HitCoverage=45%, E-value=3e-93, Identity=84%"; Hit description =Lipase family protein, expressed
  Pfam annotation: Domain name=Lipase_3; Domain location=69-210; Score =81.4; E_value=3.3e-21; Accession=PF01764.17; Description=Lipase (class 3)
QLKGHQAHAEVSSLLEYLKLCMFFSKKXFSAFLKFGGYKQEDILIHKTRSRLMQPSFALVCDKRTKCFLLFIRGAISTKERLTAATAAEVPFHHIILSEGQISNXVLGYAHCGMLAGARWIARLAIPHLHNKIQEFPGYQIKVIGHSMGAGIGAILTYILREHYEFSSCSCLAFAPPACMTWELAESGKDFITSLVNRNDVVPAFSKVSTESLRSEVMVSSKLDDVQDHFHHGLFANISQ

SEQ ID NO: 110031 - protein, 131 aa, Setaria italica
  Transcript Sequence Number=SeqID_44057
  Gene Ontology: Mol. function=transporter activity; Cellular component= integral to membrane; Biological process=transport
  Homolog annotation: Hit_ID=B6TCP1; Match level="QueryCoverage=90%, HitCoverage=24%, E-value=2e-53, Identity=90%"; Hit description =Carbohydrate transporter/ sugar porter/ transporter
MARDSDAAARRRWTLVLVNLASVLEKADEVLLPAVYKEVGAALGASPTALGSLTLCRALVQTACYPLAAYASARHDRARVVAVGAFLWAAATFLVAVSGTFLQMAISRGLNGFRLSPVPPPINSLVADYTD

SEQ ID NO: 110032 - protein, 79 aa, Setaria italica
  Transcript Sequence Number=SeqID_44058
SISGGETEHMPALTVAHKTSLILPPRVSICRCQELRVKTTASEFVFYARKARMVAREDTGFILVRAGIALRPVWGAARV

SEQ ID NO: 110033 - protein, 241 aa, Setaria italica
  Transcript Sequence Number=SeqID_44059
  Gene Ontology: Cellular component=vacuole
  Homolog annotation: Hit_ID=B9RG20; Match level="QueryCoverage=68%, HitCoverage=78%, E-value=9e-47, Identity=54%"; Hit description =Transferase, transferring glycosyl groups, putative
  Subcellular localization annotation: CTP_CleavageSite=36; ConfidenceScore=5.16e-01
MLPPPPPLMLLPLLLLLLAASSFAAANAKATPPSATAAAGARAGSPAPVPTPWPEQFHAVIFTNLTESGARLQLIDLYYDWPKGRNLNLIHNQLSGDPTYDVEWTNGTSYVFNSASCRTIRFPVGILPPDWLADGAVYLGREHVDGFDCHLWTKVDFIWYYEEVDTGRPVRWNFFNGMQQHVMSFEVGGVLEDSKWQAPAYCFNGDNADTGNVAADRVDVMNSLIRFAGAPAAAMAASFDQ

SEQ ID NO: 110034 - protein, 401 aa, Setaria italica
  misc_feature (385)..(385): Xaa can be any naturally occurring amino acid
  Transcript Sequence Number=SeqID_44060
  Gene Ontology: Mol. function=heat shock protein binding; Cellular component=endoplasmic reticulum membrane; Biological process=protein folding
  Homolog annotation: Hit_ID=Q9ZSY2; Match level="QueryCoverage=99%, HitCoverage=98%, E-value=0.0, Identity=76%"; Hit description =Chaperone protein dnaJ 15
  Pfam annotation: Domain name=DnaJ; Domain location=11-73; Score =129.3; E_value=1.2e-35; Accession=PF00226.23; Description=DnaJ domain
EGPSAPAVRRDPYEVLSVPRDSSDQEIKSAYRKLALKYHPDKNASNPEASELFKEVAYSYSILSDPEKRRQYDTAGFEALENEGMDMEIDLSNLGTVNTMFAALFSKLGVPIKTTISPTVLEEAMNGTVTVRPLPVGTSATGKVDKQCAHFFGVTISEEQAHSGIVVRVTSPAQSKFKLLYFEQEVNGGYGLALQEDSQKTGKVTSAGMYFLHFQVYRMDSTVNALAMAKDPEAAFFKRLEGLQPCEVSALKPGTHIFAVYGDNFFKPASYMIEAMCAKSYEDTTERLKEIESKILAKRNDLRQFETEYRKALARFQEVTNRYTQEREAVDDMLRERDNIHCSFTTERTLVNPVGAGSSSSRYTTEHSIPESPENGSVDGRDKSXQKKWFNLNLNRSDKKA

SEQ ID NO: 110035 - protein, 134 aa, Setaria italica
  Transcript Sequence Number=SeqID_44061
  Subcellular localization annotation: CTP_CleavageSite=70; ConfidenceScore=5.24e-01
VPLPPRRTGASAAVGPPPAPPLTQAPVPAAPVPLRQQPPPPPPAPAPPHRPVQRNEPETNTPEPVQFAPPQAAVPVLSQTSAAAANVSASSSSSVAGTSQSLIGGMFAPSSMAPAPQFADLGGGVSRPERALPD

SEQ ID NO: 110036 - protein, 77 aa, Setaria italica
  Transcript Sequence Number=SeqID_44062
ASRPVPQRAAVPLPSCHDVVTGLLLAPSRAAPRPSPVCGWEEIRQGWRRARGRGQPHRGCRSSRLTKGDADARSLFA

SEQ ID NO: 110037 - protein, 238 aa, Setaria italica
  misc_feature (16)..(16): Xaa can be any naturally occurring amino acid
  misc_feature (103)..(103): Xaa can be any naturally occurring amino acid
  Transcript Sequence Number=SeqID_44063
  Gene Ontology: Mol. function=zinc ion binding; Cellular component =membrane; Biological process=intracellular signaling cascade
  Homolog annotation: Hit_ID=Q259G7; Match level="QueryCoverage=100%, HitCoverage=15%, E-value=2e-67, Identity=52%"; Hit description =H0124B04.19 protein
  Pfam annotation: Domain name=PMD; Domain location=54-238; Score=37.1; E_value=1.2e-10; Accession=PF10536.1; Description=Plant mobile domain
MAHFHLLDQAYDQTHXGRLIAGGQVLPLLRSRAHDGFLALQYDDRYTPLLQMAGLDVISYQVRRGMPKFNSAAITALVDRWRPETHSFHLPFGEMTVTLQDCXKMLGLSIRGQPVTGPCVSDGWRARVAAFLGREVEEQGTRTSGVLISWLREHFGQCPQDADAETVGHYCRAWILHLFACVLFPDATGDTASWMWIHCLTDWHQAGFYSWGSAVLCFLYRQLCEACRRTSGSPSVGG

SEQ ID NO: 110038 - protein, 57 aa, Setaria italica
  Transcript Sequence Number=SeqID_44064
  Homolog annotation: Hit_ID=B4FQA8; Match level="QueryCoverage=68%, HitCoverage=12%, E-value=4e-10, Identity=74%"; Hit description =Methylglutaconyl-CoA hydratase
CAGADLKERRLMGPTEARDFVNSLRSTFSSIEVCCVTIVCSSIYCRSQNFHKLAHPW

SEQ ID NO: 110039 - protein, 117 aa, Setaria italica
  misc_feature (116)..(116): Xaa can be any naturally occurring amino acid
  Transcript Sequence Number=SeqID_44065
  Homolog annotation: Hit_ID=B6SI40; Match level="QueryCoverage=99%, HitCoverage=28%, E-value=8e-14, Identity=40%"; Hit description=mTERF family protein
HNVEREVKPNIAFLLKCGLTNDGIAKLFLLVPRMFMLKPEGIKGIVECAHKKLGVPCNSAMFKFALATTYSINPQRVGAKLDFLMKALGCSETELRIAVGKMPTTLKLSEVNLTRXV

SEQ ID NO: 110040 - protein, 49 aa, Setaria italica
  Transcript Sequence Number=SeqID_44066
LFHSRYEYLNLKRVLTIVQVDRVYVGSPGVIAVLDHEKKRTFIIRKEGL

SEQ ID NO: 110041 - protein, 315 aa, Setaria italica
  Transcript Sequence Number=SeqID_44067
  Gene Ontology: Mol. function=carbohydrate binding; Biological process= carbohydrate metabolic process
  Homolog annotation: Hit_ID=B9RE17; Match level="QueryCoverage=97%, HitCoverage=98%, E-value=1e-146, Identity=78%"; Hit description =Aldose 1-epimerase, putative
  Pfam annotation: Domain name=Aldose_epim; Domain location=23-298; Score=290.8; E_value=3e-84; Accession=PF01263.12; Description=Aldose 1-epimerase
MSMGHCSEQRPGFEVTKDWNGADQVAIRSPRGASVRVCLHGGQVVSWKNDRGEELLFTSSKAIFKPPKATRGGIPICFPQFGNCGTLEQHGFARNKIWTIDEEAPPLNYGDNNNKASVDLLLKPSEDDLKCWPHCFELRLRVSLSMDGDLSLISRVRNVNGKPFSFAFAYHTYLSVSDISEVRIEGLETLDYLDNLSQRERFTEQGDAITFESEVDRVYVGSPGVIAVLDHEKKRTFIIRKEGLPDIVVWNPWEKKSKTMADFGDDEYKQMLCVDAAAVERAITLKPGEEWTGKLELSAVPSTNCSDHLDHPGRL

SEQ ID NO: 110042 - protein, 92 aa, Setaria italica
  Transcript Sequence Number=SeqID_44068
VVPTRVQFPGLRATVEARAAREARTQEILTAKVEQLRQSLASIKAEIRSTMDEIRNGLEIIRAEYEKFEGYVNDDDDAEQEIASLSMRSIRW

SEQ ID NO: 110043 - protein, 130 aa, Setaria italica
  misc_feature (122)..(122): Xaa can be any naturally occurring amino acid
  Transcript Sequence Number=SeqID_44069
  Gene Ontology: Mol. function=protein binding; Cellular component =endosome; Biological process=protein transport
  Homolog annotation: Hit_ID=B6TVZ1; Match level="QueryCoverage=100%, HitCoverage=61%, E-value=1e-50, Identity=80%"; Hit description=VPS28- like protein
  Pfam annotation: Domain name=VPS28; Domain location=18-130; Score =7.0; E_value=3e-09; Accession=PF03997.4; Description=VPS28 protein
MEVKLWNDKRERELLESYADLYAIIKATEKLERAYVRDLVSAADYEAECLKLISQFNSLSSSLAGAVTVPRFVQAYRLDCPAALNRLLQSGVPATVELRAASSSSAPAATAASAAYHADDNXTFITAMDA

SEQ ID NO: 110044 - protein, 85 aa, Setaria italica
  Transcript Sequence Number=SeqID_44070
LDRINTIGSVESYHFNINSREMVLLKVSMRFSIFISFFTLALCINEVNGSRSERKGPTIGHAVVLPLVTIFLRTFLVLLFLTTVV

SEQ ID NO: 110045 - protein, 857 aa, Setaria italica
  Transcript Sequence Number=SeqID_44071
  Gene Ontology: Mol. function=protein serine/threonine kinase activity; Cellular component=plasma membrane; Biological process =protein amino acid phosphorylation
  Homolog annotation: Hit_ID=Q6ASW0; Match level="QueryCoverage=98%, HitCoverage=76%, E-value=0.0, Identity=86%"; Hit description=Protein kinase, putative, expressed
  Pfam annotation: Domain name=Pkinase; Domain location=546-848; Score =209.3; E_value=9.9e-60; Accession=PF00069.17; Description=Protein kinase domain
  Pfam annotation: Domain name=Pkinase_Tyr; Domain location=546-814; Score=-88.2; E_value=7.3e-08; Accession=PF07714.9; Description =Protein tyrosine kinase
  Pfam module annotation: Pfam domain module=Pkinase::Pkinase_Tyr; Domain location=546-848::546-814
YIACPFIKLSFQKSQDTDQVADRCFDLQLVGDNQREELPKLPPVRLKSEDKLVNMNWEEKINHHGSGAKQSSAADNAFMIGSYLDVPIGQEITSSGGRRTIGSSWLSVSQGIAEDTSDLVSGFATIGDDSLEYPIGEYWDSDEYDDDDDVGYTRQPIEDETWFLAHEIDYPSDNEKATGHTRGPDRHDRPTKDEDDDQSFVEEDSYISGEQYFHGKNIAQVGTSVGPMVHGIPDSDMMAQYDGQLLDPEELNLMHSEPVWQGFVSQNGELGMLGNGKFLNDSERPHPDDPFVEDDQHGSVRSIGVGISSDAADIGSEVRESLIGGSSEGDIEYFNESSLSVSGKRHSQQETEKKRVGGKGAKHDQINYAVDMQKVNLPPGAADGGFSFPPPLHSGKNHDSDAKSLWSKKDEMYCINDPDECQNGMVSDDMLATWRKKNSESSLRSSRDEMTSDVVRSRNSSASYDETEDTANVRHHKLDDAQEEDTGTTLDDEEAAALQEQVRQIKAQEEEFETFNLKIVHRKNRTGFEEDKNFHVVLNSVIAGRYHVSEYLGSAAFSKAIQAHDLHTGMDVCVKIIKNNKDFFDQSLDEIKLLKYVNKHDPADKYHLLRLYDYFYYREHLLIVCELLKANLYEFQKFNRESGGEVYFTMPRLQSIAIQCLEALQFLHGLGLIHCDLKPENILVKSYSRCEIKVIDLGSSCFETDHLCAYVQSRSYRAPEVILGLPYDKKIDIWSLGCILAELCTGNVLFQNDSPATLLARVMGIIGSIEQAMLAQGRETYKYFTKNHMLYERNQESNRLEYLIPKKTSLRHRLPMADQGFIEFVAYLLEVNPKKRPSASEALKHPWLSFPYEPISS

SEQ ID NO: 110046 - protein, 76 aa, Setaria italica
  Transcript Sequence Number=SeqID_44072
  Gene Ontology: Mol. function=drug transporter activity; Cellular component=membrane; Biological process=multidrug transport
  Homolog annotation: Hit_ID=Q8H7P0; Match level="QueryCoverage=86%, HitCoverage=17%, E-value=7e-27, Identity=93%"; Hit description=MatE family protein, expressed
YSNLVVDSCRVRVANELGAGNGKGARFATIVSSITSLVIGLFFWVLIMGLHDKFAIIFTSSSVVLDAVDNLSVLLA

SEQ ID NO: 110047 - protein, 219 aa, Setaria italica
  Transcript Sequence Number=SeqID_44073
  Gene Ontology: Mol. function=catalytic activity; Biological process =metabolic process
  Homolog annotation: Hit_ID=Q942T8; Match level="QueryCoverage=70%, HitCoverage=80%, E-value=6e-54, Identity=70%"; Hit description =P0560B06.4 protein
SIPSLKGSIPGPKFPYVIFCAPPYRSEDYAGDLRVAASNWNGEGSFLFTSSTAVYDCSDNGLCSEDSPCIQIGQSPRTDVLLKAENVVLEAGGCVLRLVGLYKSDRGPHVYWLSKGTLDARPDHILNLIHYEDAASLAIAIMKRRLRGRIFVGCDNEPLSRQEIMDRVNRSGKFDTKFQGFTGTDGPLGKRMENSKTRAEIGWQPKYPSFTEFLGLSNL

SEQ ID NO: 110048 - protein, 226 aa, Setaria italica
  misc_feature (92)..(92): Xaa can be any naturally occurring amino acid
  Transcript Sequence Number=SeqID_44074
  Gene Ontology: Mol. function=catalytic activity; Biological process =metabolic process
  Subcellular localization annotation: CTP_CleavageSite=32; ConfidenceScore=5.75e-01
LHATAPVAASSTLFVHRPAPIPSARVSRPRRRAAMSATTAADSSSTIGVSDATGVDARSLESVGQNDLLIVGPGVLGRIVAEMWKQEHPGSXVYGHTATTDHHCELTELGIIPSLKGSIPGPKFPYVIFCAPPYRSEDYAGDLRVAASNWNGEGSFLFTSSTAVYDCSDNGLCSEDSPCIQIGQSPRTDVLLKAENVVLEAGGCVLRLVGLYISSHANTLTDMSFF

SEQ ID NO: 110049 - protein, 249 aa, Setaria italica
  Transcript Sequence Number=SeqID_44075
  Gene Ontology: Mol. function=magnesium ion binding; Cellular component=integral to membrane; Biological process=photosynthesis, light harvesting
  Homolog annotation: Hit_ID=P27523; Match level="QueryCoverage=96%, HitCoverage=89%, E-value=1e-121, Identity=89%"; Hit description =Chlorophyll a-b binding protein of LHCII type III, chloroplastic
  Pfam annotation: Domain name=Chloroa_b-bind; Domain location=65-235; Score=289.1; E_value=9.9e-84; Accession=PF00504.13; Description =Chlorophyll A-B binding protein
  Subcellular localization annotation: CTP_CleavageSite=36; ConfidenceScore=5.02e-01
MASIMAAATSRVLAAKTLFLGQGRAAANASPLRDVAAAASGRITMSNDLWYGPDRVKYLGPFSAQTPSYLTGEFPGDYGWDTAGLSADPEAFARNRALEVIHGRWAMLGALGCITPEVLEKWVRVDFKEPVWFKAGAQIFSEGGLDYLGNPNLVHAQSILAVLGFQVILMGLVEGFRINGLDGVGEGNNLYPGGQYFDPLGLADDPVTFAELKVKEIKNGRLAMFSMFGFFVQAIVTGNGAPRRTCSTT

SEQ ID NO: 110050 - protein, 138 aa, Setaria italica
  Transcript Sequence Number=SeqID_44076
RRSGPTSLAVQEEDDCDIGMGFWFPADWTVRDRSIVAGALWNTSHGAAGAVSASSIDFDSNRGNFSDVEYRYTMVDEAKKRYYADVLRGHINKAKGPFPAANFTYHDFEFRFFMDNVTGGSELGEAHPVTTHTESETY

SEQ ID NO: 110051 - protein, 75 aa, Setaria italica
  Transcript Sequence Number=SeqID_44077
  Gene Ontology: Mol. function=binding
  Homolog annotation: Hit_ID=Q10RT3; Match level="QueryCoverage=72%, HitCoverage=6%, E-value=2e-10, Identity=62%"; Hit description=HEAT repeat family protein, expressed
EQDAVDPILINLLIRLRNLQVSMNTKMRSNAFAAYGALSAYGVGLQRTAFIEQVAYSFHFSCIIVLTFVGCGCGD

SEQ ID NO: 110052 - protein, 53 aa, Setaria italica
  Transcript Sequence Number=SeqID_44078
  Gene Ontology: Mol. function=binding
  Homolog annotation: Hit_ID=Q10RT3; Match level="QueryCoverage=98%, HitCoverage=6%, E-value=7e-18, Identity=88%"; Hit description=HEAT repeat family protein, expressed
CQHVSDDSPTVRSLCLRGLVQIPDSHMLKYIQQVLGVILALLEDPNESVQLTL

SEQ ID NO: 110053 - protein, 327 aa, Setaria italica
  misc_feature (12)..(12): Xaa can be any naturally occurring amino acid
  Transcript Sequence Number=SeqID_44079
  Gene Ontology: Mol. function=binding
  Homolog annotation: Hit_ID=Q10RT3; Match level="QueryCoverage=96%, HitCoverage=36%, E-value=1e-146, Identity=80%"; Hit description=HEAT repeat family protein, expressed
  Pfam annotation: Domain name=HEAT; Domain location=130-165; Score =15.7; E_value=0.2; Accession=PF02985.14; Description=HEAT repeat
  Pfam annotation: Domain name=HEAT; Domain location=246-283; Score =21.1; E_value=0.0046; Accession=PF02985.14; Description=HEAT repeat
  Pfam annotation: Domain name=HEAT; Domain location=4-40; Score=20.6; E_value=0.0065; Accession=PF02985.14; Description=HEAT repeat
  Pfam annotation: Domain name=HEAT; Domain location=42-78; Score=26.9; E_value=8.4e-05; Accession=PF02985.14; Description=HEAT repeat
  Pfam module annotation: Pfam domain module=HEAT::HEAT::HEAT::HEAT; Domain location=130-165::246-283::4-40::42-78
LKRTTLLEQLVXELCQHVSDDSPTVRSLCLRGLVQIPDSHMLKYIQQVLGVILALLEDPNESVQLTAVQCLLTVLNLSEQDAVDPILINLLIRLRNLQVSMNTKMRSNAFAAYGALSAYGVGLQRTAFIEQIHATLPRLILHLHDDDLSVRLACRNTFQLLAPLMEVDGLSLLLSKQYFTSDRRSDYEDFIKDLARQLCRLSPARVDSYLESAIQAFDAPWPVIRANAVCLVSCMLSFLDDQRFIAPYFSQVFATLVGRMSQSPDAIVRAAASSALGILIKRSNMLRSMISRFDRAESSRNSQSGDSDTKAPSELQEEQEEVRMMCT

SEQ ID NO: 110054 - protein, 477 aa, Setaria italica
  Transcript Sequence Number=SeqID_44080
  Gene Ontology: Mol. function=binding
  Homolog annotation: Hit_ID=Q10RT3; Match level="QueryCoverage=98%, HitCoverage=54%, E-value=0.0, Identity=76%"; Hit description=HEAT repeat family protein, expressed
  Pfam annotation: Domain name=HEAT; Domain location=365-401; Score =21.9; E_value=0.0027; Accession=PF02985.14; Description=HEAT repeat
  Pfam annotation: Domain name=HEAT; Domain location=403-439; Score =26.9; E_value=8.4e-05; Accession=PF02985.14; Description=HEAT repeat
  Pfam module annotation: Pfam domain module=HEAT::HEAT; Domain location=365-401::403-439
FNISLSLPKQKAYANDIDLESSYSALSSLEELVSVVRREASVDQTEVFQRVVSSVCILLSKDELVILLHSCTLATCDKVKQSADASIQAIIMFITRRGKELREADVSRTTQSLLSSAVSLTDKHSRQEVLNAISCLAENTNHIVVFDEVLSVAGRDICTKDIPRIRGGWAIQDVFYAFSQHKELALLFLEYTLSILHKEPVTINSSEKGETTSESSADDCILQATMFAVNAFMRGGGKIGKQAVEKSYPSVLAGLILKLGSLHGLAELGRNELLRSLLIAFQSFCECVGDVEMGKIFARDGEQTEKEKWIDLVQEVACSSSVKRPKEVLPTCVILSKALNRNQRAEREAAAAALSEFIRHIEKEPTLLEQLVEELCQHVSDDSPTVRSLCLRGLVQIPDSHMLKYIQQVLGVILALLEDPNESVQLTAVQCLLTVLNLSEQDAVDPILINLLIRLRNLQVSMNTKMRSTRLVPNRLS

SEQ ID NO: 110055 - protein, 41 aa, Setaria italica
  Transcript Sequence Number=SeqID_44081
TVNFVHVLKAIKYNIRNLARVIYIIHCTKHMTFKCSDKLQS

SEQ ID NO: 110056 - protein, 48 aa, Setaria italica
  Transcript Sequence Number=SeqID_44082
LLSSHGNGIDRFVTKNYALIKLEKMDKGVFWISCLSKMTIVSSKIEQR

SEQ ID NO: 110057 - protein, 103 aa, Setaria italica
  Transcript Sequence Number=SeqID_44083
  Gene Ontology: Mol. function=RNA-directed DNA polymerase activity; Cellular component=exocyst; Biological process=exocytosis
  Homolog annotation: Hit_ID=B6SVR8; Match level="QueryCoverage=63%, HitCoverage=9%, E-value=1e-32, Identity=100%"; Hit description =Protein binding protein
DLGREGSARVRGARCPRDAIAEWEVGSGSGSGSGHSSSRMSIKERFKNFNMAFEEIYRNQTLWKVPDPQLREELKISISENVIPAYRAFLGRYGNQVDGGRNP

SEQ ID NO: 110058 - protein, 200 aa, Setaria italica
  Transcript Sequence Number=SeqID_44084
  Gene Ontology: Cellular component=exocyst; Biological process =exocytosis
  Homolog annotation: Hit_ID=B6SVR8; Match level="QueryCoverage=100%, HitCoverage=28%, E-value=7e-87, Identity=79%"; Hit description =Protein binding protein
  Pfam annotation: Domain name=Exo70; Domain location=1-200; Score =36.7; E_value=8.8e-09; Accession=PF03081.7; Description=Exo70 exocyst complex subunit
  Pfam annotation: Domain name=Serglycin; Domain location=71-198; Score= -53.4; E_value=0.03; Accession=PF04360.4; Description=Serglycin
  Pfam module annotation: Pfam domain module=Exo70::Serglycin; Domain location=1-200::71-198
MTAGEIHPMTRYVMNYLRLLVVYSETLDVLLADDNCDQDAFRNSDDQDQEHLQSMTPLGRRLLKLISYLEANLEEKSRLYEDAALECIFAMNNLLYIVQKVKDSELGKILGDHWIKRRSGKIRQYSKSYLRISWTKALSYFKEDGHGSGSGSGSGSGSGSGSGSGSGHSSSRMSIKERFKNFNMAFEEIYRNQTLWKVPD

SEQ ID NO: 110059 - protein, 132 aa, Setaria italica
  misc_feature (31)..(31): Xaa can be any naturally occurring amino acid
  Transcript Sequence Number=SeqID_44085
  Gene Ontology: Mol. function=sequence-specific DNA binding; Cellular component=nucleus; Biological process=regulation of transcription, DNA-dependent
  Homolog annotation: Hit_ID=Q0DBL6; Match level="QueryCoverage=68%, HitCoverage=32%, E-value=1e-42, Identity=90%"; Hit description=Heat stress transcription factor C-2b
  Pfam annotation: Domain name=HSF_DNA-bind; Domain location=9-132; Score=90.8; E_value=5e-24; Accession=PF00447.9; Description=HSF-type DNA-binding
MTAGGGAAAPFVWKTYMMVEDPGTDGVIGWXRGNNSFVVVDPAGFSRLLLPAHFKHNNFSSFVRQLNTYGFRKVQPDRWEFAHASFLRGQTHLLRNIVRRGSSAAGGGGGGKRKDAAALAGSAELSAEDMAM

SEQ ID NO: 110060 - protein, 125 aa, Setaria italica
  misc_feature (26)..(26): Xaa can be any naturally occurring amino acid
  misc_feature (78)..(78): Xaa can be any naturally occurring amino acid
  Transcript Sequence Number=SeqID_44086
  Gene Ontology: Mol. function=sequence-specific DNA binding; Cellular component=nucleus; Biological process=regulation of transcription, DNA-dependent
  Homolog annotation: Hit_ID=Q942D6; Match level="QueryCoverage=100%, HitCoverage=50%, E-value=1e-44, Identity=74%"; Hit description=Heat stress transcription factor C-1b
  Pfam annotation: Domain name=HSF_DNA-bind; Domain location=1-121; Score=74.4; E_value=4.1e-19; Accession=PF00447.9; Description=HSF -type DNA-binding
PFVAKTFHMVSDSATDAVVRWGGASXNTFLVLDPAAFSDYLLPSYFKHRNFASFVRQLNTYGFRKVDTDRWEFAHESXFLRGQAHLLPLIVRKKKKAGGGGRELCEEGEEVRGTIRDVRRLREEQ

SEQ ID NO: 110061 - protein, 90 aa, Setaria italica
  Transcript Sequence Number=SeqID_44087
INQEHGRTVPRAVQLKRLPLYHSSKKLALFAYSFAVLLLEQPVLLAQPPYCLVIIGAGREPVLLARPRGCRRGHRWQRRRMGRGWGATKG

SEQ ID NO: 110062 - protein, 114 aa, Setaria italica
  Transcript Sequence Number=SeqID_44088
  Subcellular localization annotation: CTP_CleavageSite=23; ConfidenceScore=5.14e-01
LYPYFSLCSLLVHLFFSVIQVPSQAELGSSLVILTLESASSPMSPLKVLVPSSFEAASTLIPHALIAPSVTVLEVIRPATPRSSPESSSPSRSFLLPVSAVVLHVPMSLLLCHR

SEQ ID NO: 110063 - protein, 166 aa, Setaria italica
  Transcript Sequence Number=SeqID_44089
  Gene Ontology: Mol. function=protein serine/threonine kinase activity; Cellular component=ubiquitin ligase complex; Biological process=protein amino acid phosphorylation
  Homolog annotation: Hit_ID=Q2HTK4; Match level="QueryCoverage=96%, HitCoverage=18%, E-value=2e-37, Identity=47%"; Hit description =Protein kinase; U box
SPRASLWKDRVRILAEQRSALAYLHSRRPHAIIHADLKLTNILLDAGNASRLGDFGTARAVHVKPLEEETIGRRTNPMGTTGYMDPVFFMTGELTTESDVYAFGVVILQLLTGLLDLNVAEQAREAVKMDAVHSVLDASAGAWPEVQAERLLKLALRCCSLERKRP

SEQ ID NO: 110064 - protein, 152 aa, Setaria italica
  misc_feature (59)..(59): Xaa can be any naturally occurring amino acid
  misc_feature (88)..(88): Xaa can be any naturally occurring amino acid
  Transcript Sequence Number=SeqID_44090
  Gene Ontology: Mol. function=carbohydrate binding; Biological process= carbohydrate metabolic process
  Homolog annotation: Hit_ID=Q7XSR8; Match level="QueryCoverage=99%, HitCoverage=46%, E-value=7e-69, Identity=82%"; Hit description =OSJNBa0041A02.19 protein
  Pfam annotation: Domain name=Aldose_epim; Domain location=1-152; Score=-76.1; E_value=0.077; Accession=PF01263.12; Description=Aldose 1-epimerase
PKVNPYLYQVTSWKNDHGDELLFVSSKAIFKPPKAIRGGIPICFPQFGTQGNLEKHGFXRNRFWAIDDNPPPFPVNTAIKTFADLILXPSEEDLKVWPHSFEFRLRVALAPGGDLILTSRIRNTNIDGRTFSFTFAYHTYLSVSDISEIRVR

SEQ ID NO: 110065 - protein, 101 aa, Setaria italica
  Transcript Sequence Number=SeqID_44091
  Gene Ontology: Mol. function=alanine-tRNA ligase activity; Cellular component=cytoplasm; Biological process=alanyl-tRNA aminoacylation
  Homolog annotation: Hit_ID=Q9FFC7; Match level="QueryCoverage=100%, HitCoverage=10%, E-value=2e-48, Identity=78%"; Hit description =Alanyl-tRNA synthetase
IENVGRTARHQTFFEMLGNFSFGDYFKKEATAWAWELATKEYGLPAERLWISVFEDDNEAFNIWHNEVGVPKERIKRMGAEDNFWTSGATGPCGPCSEMYY

SEQ ID NO: 110066 - protein, 221 aa, Setaria italica
  Transcript Sequence Number=SeqID_44092
  Gene Ontology: Mol. function=nutrient reservoir activity; Cellular component=extracellular region
  Homolog annotation: Hit_ID=Q6I544; Match level="QueryCoverage=88%, HitCoverage=88%, E-value=1e-95, Identity=87%"; Hit description =Germin-like protein 5-1
  Pfam annotation: Domain name=Cupin_1; Domain location=62-210; Score =176.6; E_value=6.9e-50; Accession=PF00190.14; Description=Cupin
  Pfam annotation: Domain name=Cupin_2; Domain location=97-172; Score =52.8; E_value=1.3e-12; Accession=PF07883.3; Description=Cupin domain
  Pfam module annotation: Pfam domain module=Cupin_1::Cupin_2; Domain location=62-210::97-172
MAIPSPLLSFAIVVAVLLLPSPSLAGDPELLQDICVADITSTMKVNGFPCKATVTEDDFYFKGLANPGNTNNTYGSVVTGANVEKVPGLNTLGVSLSRIDYAPGGLNPPHTHPRATEIVFVLQGTLDVGFITTGNKLIAKTITAGDVFVFPRGLVHFQKNNEDVPAAVISAFNSQLPGTQSLPMTLFAATPEVPNYVLTKAFQVGSKEVEKIKSRLAQKKS

SEQ ID NO: 110067 - protein, 96 aa, Setaria italica
  Transcript Sequence Number=SeqID_44093
  Pfam annotation: Domain name=DUF506; Domain location=1-96; Score= -29.4; E_value=9.2e-07; Accession=PF04720.4; Description=Protein of unknown function (DUF506)
ACALRFVAERLRDAGYNSAICRSKWPRTPEIPSGEHSYVDVVVPTRSGKAVRVVIEPGFRGEFEMARGGAEYRALVAALPEVFVGRSEKLRAVVRV

SEQ ID NO: 110068 - protein, 174 aa, Setaria italica
  Transcript Sequence Number=SeqID_44094
  Homolog annotation: Hit_ID=Q9SRT1; Match level="QueryCoverage=56%, HitCoverage=33%, E-value=2e-19, Identity=41%"; Hit description =F21O3.6 protein
  Pfam annotation: Domain name=DUF506; Domain location=1-134; Score =61.0; E_value=4.4e-15; Accession=PF04720.4; Description=Protein of unknown function (DUF506)
MMHMVTSVIGHHQPRLIHQGPYFFSVTSDADLSGCAGEHSYVDVVVPTRSGKAVRVVIEPGFRGEFEMARGGAEYRALVAALPEVFVGRSEKLRAVVRVMCDAARRCARESGMHMAPWRKHRYMEAKWLGTPERVAPGGGGGVPVAVGSPEKPPRFRASMLTLDLGGRTVVEVV

SEQ ID NO: 110069 - protein, 99 aa, Setaria italica
  Transcript Sequence Number=SeqID_44095
  Homolog annotation: Hit_ID=Q10GJ4; Match level="QueryCoverage=57%, HitCoverage=6%, E-value=4e-19, Identity=82%"; Hit description =Roothairless 1, putative, expressed
LVHICCFRSHKLLFQLGLSKTDLRRVLKSSLSGIDRSIGAMYRRLQKTLTSDERLPSLWDKRKVSRLTNRISMDVFVQYWHTTCHRFEMKIDAPEADFT

SEQ ID NO: 110070 - protein, 403 aa, Setaria italica
  Transcript Sequence Number=SeqID_44096
  Gene Ontology: Cellular component=exocyst; Biological process=protein transport
  Homolog annotation: Hit_ID=Q10GJ5; Match level="QueryCoverage=99%, HitCoverage=45%, E-value=0.0, Identity=92%"; Hit description =Roothairless 1, putative, expressed
RRQGRGIFEKLGRLAKPRVLALTVKQSSRGEANKAFLRVLKYSSGAVLEPAKLYKLKHLTKVEVISNDPSGCTFVLGFDNLRSQSVAPPQWTMRNIDDRNRLLFCILNMCKEILSYLPKVVGIDIVELALWAKENTLTIDNQVSTQDGHETSVATQTERKVTVTVENDLVSQAKEEEEDMEALLDTYVMGIGEADAFSERLKQELVALEAANVYQLLESEPLIEEVLQGLDAASATVDDMDEWLRIFNLKLRHMREDIASIESRNNGLEMQSVNNKSLMEELDKLLERLRIPQEFAASLTGGSFEESRMLKNVEACEWLTGAIRSLEVPNLDPCYVNMRAVREKKAELEKLKTTFVRRASEFLRNYFSSLVDFMISDKSYFSQRGQLKRPDHADLRYKCRTYA

SEQ ID NO: 110071 - protein, 102 aa, Setaria italica
  misc_feature (11)..(11): Xaa can be any naturally occurring amino acid
  Transcript Sequence Number=SeqID_44097
  Gene Ontology: Mol. function=translation elongation factor activity; Cellular component=cytoplasm; Biological process=translational elongation
  Homolog annotation: Hit_ID=B9FBM7; Match level="QueryCoverage=98%, HitCoverage=23%, E-value=3e-53, Identity=97%"; Hit description =Elongation factor 1-alpha
  Pfam annotation: Domain name=GTP_EFTU; Domain location=3-102; Score =28.4; E_value=5.3e-12; Accession=PF00009.19; Description=Elongation factor Tu GTP binding domain
VNRRAWVLDKXLKAERERGITIDIALWKFETTKYYCTVIDAPGHRDFIKNMITGTSQADCAVLIIDSTTGGFEAGISKDGQTREHALLAFTLGVKQMICCCN

SEQ ID NO: 110072 - protein, 367 aa, Setaria italica
  misc_feature (163)..(163): Xaa can be any naturally occurring amino acid
  Transcript Sequence Number=SeqID_44098
QNKRKWKGQFVHQGKENMLPEKEIHVTLEKARHSICISDLSQASNIYTEKYPDDDIRTEDQQKSDSVVQHDKKNLEGHMGWAYQTLATSFSETKEVLSIQNQDIIALEEGRSPSVEIDIAQVDTRATQSSASIASGGSCECSSPSASSPRSSGEETSYSGIIXRFNLGIQELRAQLKMLKMEGQDDICGDYSDTLSTGECNNINIATYQATEELPIFKNEEDRDLCYVQDMLASVCDLPDYLEGWQVDSDVFLLLENKYCKLLLWSQSDRKLLFDLVNSILADMTTPDNSLHSKIMMKCWPEINREQLAESVWQLVQKQSNYEQFALEDVQPLPLDHRSELEVIGMKIARMIHDDLIKGSIIEFLSQ

SEQ ID NO: 110073 - protein, 79 aa, Setaria italica
  Transcript Sequence Number=SeqID_44099
  Subcellular localization annotation: CTP_CleavageSite=9; ConfidenceScore=5.08e-01
HKTVFWQRLGSHPSGVRLPQKIMKTTGFFLLVTWSQKTFSYFRICHLRLLFSCGIFHSRYLKWHWKSMLKVIFWFIHRV

SEQ ID NO: 110074 - protein, 183 aa, Setaria italica
  Transcript Sequence Number=SeqID_44100
  Gene Ontology: Biological process=protein modification process
  Homolog annotation: Hit_ID=B9S6T7; Match level="QueryCoverage=91%, HitCoverage=32%, E-value=5e-33, Identity=47%"; Hit description=Plant ubiquilin, putative
SFLNATTMGGEGDRNPNPFAALLGNQGSNQARDPAANAPTTASDPAAGSPAPNINPLPNPWGTNARPPPASNTNTRSATAGGLGGLGSADLGSVLGGGSDASFLSQVLQNPTMMQMMQNIMSNPQSMNQLLNINPNVRNMMESNTQLREMFQNPEFLRQLTSPETLQVINHTSLITCASCNYV

SEQ ID NO: 110075 - protein, 476 aa, Setaria italica
  Transcript Sequence Number=SeqID_44101
  Gene Ontology: Mol. function=kinase binding; Cellular component =perinuclear region of cytoplasm; Biological process=protein modification process
  Homolog annotation: Hit_ID=B9S6T7; Match level="QueryCoverage=82%, HitCoverage=72%, E-value=1e-111, Identity=57%"; Hit description =Plant ubiquilin, putative
  Pfam annotation: Domain name=UBA; Domain location=433-470; Score =36.6; E_value=9.9e-08; Accession=PF00627.23; Description=UBATS-N domain
NTNKGRILKDEETLASYGVETDHTIHMVRGAAPPPASTAPAANQETSSTAPASSPAAGLSGLLQGLGGTGAANSGGLGLFGSGLPELDQMQQQLAENPNLMREMMNMPLMQNLMNNPDLMRNIIMNNPQMRELIDRNPDLAHVLNDPSILRQTVEAARNPELMREMMRNTDRAMSNIESSPEGFNMLRRMYETVQEPFLNATTMGGEGDRNPNPFAALLGNQGSNQARDPAANAPTTASDPAAGSPAPNINPLPNPWGTNAGSAQGAARPPPASNTNTRSATAGGLGGLGSADLGSVLGGGSDASFLSQVLQNPTMMQMMQNIMSNPQSMNQLLNINPNVRNMMESNTQLREMFQNPEFLRQLTSPETLQQLISFQQSLVSQLGQQQAGQERTQSGTGAGNVNLNTLMNMFSGLGAGGGLGVPNAPNVAPEELYATQLAQLQEMGFFDTQENLRALIATAGNVHAAVERLLGNLGQ

SEQ ID NO: 110076 - protein, 536 aa, Setaria italica
  misc_feature (339)..(339): Xaa can be any naturally occurring amino acid
  Transcript Sequence Number=SeqID_44102
VAKFCEHAGGTPEKAGEIVHVENGMTIAQWFKFCIGVAGSIANTRWDWPDWACMKSSPEEYMLKSLASRNSGTGKVRLLGGYGKINGLINNPAYSSDLYIEGGGCTNVDKQMNGSVGTNYKKSVDVHEGLTKDSALLQNSTTMNVGLARNHTVHALNLNPLSTPSGSLHSEASMGRHYKGNHLAHNYGICLEKNLDASFRNPEPRSSRVVNHDSRACRPDFPPTILQDTVCNTSNTELNLGQSSYHQSMTTLFPLVQSAVIEFQKPQSHRPLINQNPCPKQATKVNNNLAEPEHNGPSISTGNKQPLLVTNGTKHSEVGELTDDTSKNSFISLFLSHLXERNSTPEPIDDILNSNEHYHPKALDVACGSDHPKNASRHIETRVNDNHPKLAPTIIHMKRRSEGISLSASYSGYNPQDASHGNSQEHLIHGDCPSHLLPNQPNAGISNCARVSCPANCMCCTHMGNKSHQVAHGEIGVPCFYDKMARGHGTFERVDDLCTHRSLRAFAKISCENGKSCCSSQEFLPSFCQNDPSTLR

SEQ ID NO: 110077 - protein, 88 aa, Setaria italica
  Transcript Sequence Number=SeqID_44103
  Gene Ontology: Mol. function=phospholipase D activity; Cellular component=membrane; Biological process=phosphatidylcholine metabolic process
  Homolog annotation: Hit_ID=Q43007; Match level="QueryCoverage=100%, HitCoverage=10%, E-value=7e-40, Identity=85%"; Hit description =Phospholipase D alpha 1
GRYDTPCHPLFGTLGAAHHDDFHQPNFATAAIAKGGPREPWHDIHCRLEGPVAWDVLYNFEQRWRKQGGKDLLLQLRDLADEIIPPSP

SEQ ID NO: 110078 - protein, 86 aa, Setaria italica
  Transcript Sequence Number=SeqID_44104
  Subcellular localization annotation: CTP_CleavageSite=46; ConfidenceScore=5.08e-01
SSWSQGQAKSQIPRALFLDLKLLVTIHGDQSFRLQLCSWRASTSKRGTADQAFSDDMRPLRSQVSFSSGIGSLMSGSSTVYLSSDM

SEQ ID NO: 110079 - protein, 101 aa, Setaria italica
  Transcript Sequence Number=SeqID_44105
WSRAWEELGSTPESRHLCGWVVPHFHGNGGSNRQRLRFTGSYHLHPCMVGPKRNGNVGGGILGFCKCGLQSVVEDWKSGSRTFVVGCGVTCVVYRYLVYKM

SEQ ID NO: 110080 - protein, 159 aa, Setaria italica
  misc_feature (84)..(84): Xaa can be any naturally occurring amino acid
  misc_feature (111)..(111): Xaa can be any naturally occurring amino acid
  misc_feature (151)..(151): Xaa can be any naturally occurring amino acid
  Transcript Sequence Number=SeqID_44106
  Gene Ontology: Mol. function=RNA binding
  Homolog annotation: Hit_ID=Q6H4E2; Match level="QueryCoverage=100%, HitCoverage=32%, E-value=2e-31, Identity=45%"; Hit description =Pumilio/Puf RNA-binding domain-containing protein-like
  Pfam annotation: Domain name=PUF; Domain location=110-144; Score=3.9; E_value=4.7; Accession=PF00806.11; Description=Pumilio-family RNA binding repeat
  Pfam annotation: Domain name=PUF; Domain location=72-106; Score=21.8; E_value=0.0028; Accession=PF00806.11; Description=Pumilio-family RNA binding repeat
  Pfam module annotation: Pfam domain module=PUF::PUF; Domain location =110-144::72-106
VAKECTRLARQSNGLSLLQNCLERVSWMEMDNILIKLSYQSLHLALNSCGNWILQDILKKGDSFHIAVIASCLRNHYVTLAKNXYGSNVVEWCLKVFNEGERSVIVNELIXHAHFRDLVTHEFANFTLSTALEVCKYPLRNILANAILSQXNIMVRNQH

SEQ ID NO: 110081 - protein, 173 aa, Setaria italica
  misc_feature (122)..(122): Xaa can be any naturally occurring amino acid
  misc_feature (159)..(159): Xaa can be any naturally occurring amino acid
  Transcript Sequence Number=SeqID_44107
GFCFLFGILLFMVLISATRDFRERTKSKLVKIMIWAGIVVITFAIAVRIYPIFIFLLKERIKPLVEALYDKLPWIWEVSLSRYWDRLIDFLDRYLWACAQRIQTGIRKQKGEFVVTFSCRVXKKRLYGRSRVIGMVLVLLSNLFWILKTTLAVGYRLLXFFIISFEGFRYRSG

SEQ ID NO: 110082 - protein, 51 aa, Setaria italica
  Transcript Sequence Number=SeqID_44108
  Gene Ontology: Mol. function=transferase activity, transferring glycosyl groups; Biological process=metabolic process
  Homolog annotation: Hit_ID=C5HUX9; Match level="QueryCoverage=82%, HitCoverage=8%, E-value=9e-14, Identity=83%"; Hit description=UDP -glucosyl transferase
MASVGQALTDSRNASERAHFVLIPLMAQGHTIPMTDMARLLAEHGAQVSFI

SEQ ID NO: 110083 - protein, 70 aa, Setaria italica
  Transcript Sequence Number=SeqID_44109
FTSRPVSFVTWSMNRIMFLLLLLSSHNLDTRLKNDPCVQTTIHDTSDSIPHLSPQYPIPVRTTTYKTMNA

SEQ ID NO: 110084 - protein, 181 aa, Setaria italica
  misc_feature (99)..(99): Xaa can be any naturally occurring amino acid
  misc_feature (148)..(148): Xaa can be any naturally occurring amino acid
  Transcript Sequence Number=SeqID_44110
  Homolog annotation: Hit_ID=Q942E9; Match level="QueryCoverage=74%, HitCoverage=39%, E-value=1e-30, Identity=60%"; Hit description=6b -interacting protein 1-like
  Subcellular localization annotation: CTP_CleavageSite=74; ConfidenceScore=5.07e-01
MGDDAAHELEALAAAMVDDAAAAASPSPSPASSSGGSPSPSSPRAKRRRTDQYALGFEFAPRLAPYEVEVLAPRAAPKWTERSTFALLDAWGDRFVHRXAGRSGIRADEWLEVARLTSAAAGQPAGYYSETHCRNRVDTLRKQFLSKXMDKARLAARRDLPSPFGPVKWVYYDKMVSILRP

SEQ ID NO: 110085 - protein, 74 aa, Setaria italica
  Transcript Sequence Number=SeqID_44111
  Gene Ontology: Mol. function=protein tyrosine/serine/threonine phosphatase activity; Biological process=protein amino acid dephosphorylation
  Homolog annotation: Hit_ID=B4FLX8; Match level="QueryCoverage=100%, HitCoverage=26%, E-value=2e-35, Identity=94%"; Hit description=IBR5
MRKRERENPCGICGHYHKYEEGEVCGVCGHRPPVAPAAGARQQDSAFPSEILKEFLFLGSYDNASRSELLKTIG

SEQ ID NO: 110086 - protein, 272 aa, Setaria italica
  Transcript Sequence Number=SeqID_44112
  Gene Ontology: Mol. function=protein tyrosine/serine/threonine phosphatase activity; Cellular component=intracellular; Biological process=protein amino acid dephosphorylation
  Homolog annotation: Hit_ID=B4FLX8; Match level="QueryCoverage=95%, HitCoverage=96%, E-value=1e-136, Identity=89%"; Hit description=IBR5
  Pfam annotation: Domain name=DSPc; Domain location=47-180; Score =111.5; E_value=2.8e-30; Accession=PF00782.12; Description=Dual specificity phosphatase, catalytic domain
MRKRERENPCGICGHYHKYEEGEVCGVCGHRPPVAPAAGARQQDSAFPSEILKEFLFLGSYDNASRSELLKTIGVSHILNTVPLCQNLYRNSFTYHCLQEDKTLQFDDAIHFLEQCEREKARVLVHCMSGKSRSAAFVIAFLMKSRGWRLAQSFQWVKERRPQVQLSDGAQQQLIEYETKLFGSNVSMPAPSFVPADSFPSLGFGFPKPAGDIQVPTFNQQAPASIFERVSPNNFPTNFTFGAERAGEVKLPDSNNFGVINSSGGDSMMDST

SEQ ID NO: 110087 - protein, 41 aa, Setaria italica
  Transcript Sequence Number=SeqID_44113
GPPLALQNMTFDEYRLYIRRKGPRGKSQVESLKAAAVGAAT

SEQ ID NO: 110088 - protein, 207 aa, Setaria italica
  Transcript Sequence Number=SeqID_44114
  Gene Ontology: Mol. function=transferase activity, transferring phosphorus-containing groups; Cellular component=membrane; Biological process=two-component signal transduction system (phosphorelay)
  Homolog annotation: Hit_ID=Q76GZ9; Match level="QueryCoverage=95%, HitCoverage=16%, E-value=2e-70, Identity=66%"; Hit description =Histidine kinase 3
RGQLSWRYWRPSSGRVAEEEGMLGQFNLSTTQLQALVSLLSSTERECMGKSGLIHGGNQVNGMSCIPDSLCIRDKIYDGKQNWLKDAILQQFCTVQDKYGVNSHAPAVLEAKFLQNVIQEDISSTTQGNPHECELCAGMNGVNVVQNIVSSSNHTVMLFLSALFGSIVVSIVKTIHKRRIQSNKLCESDKVLQIPSAKISRKWSKRA

SEQ ID NO: 110089 - protein, 73 aa, Setaria italica
  Transcript Sequence Number=SeqID_44115
  Subcellular localization annotation: CTP_CleavageSite=42; ConfidenceScore=5.18e-01
APHHLGQNQPGDTNNNHHPSTDDSFTCNASWHRNGGMSRNPSASSVDNHSVKSGDDSDGAESTKGSDTEISRL

SEQ ID NO: 110090 - protein, 162 aa, Setaria italica
  Transcript Sequence Number=SeqID_44116
  Gene Ontology: Mol. function=ligase activity; Biological process =response to auxin stimulus
  Homolog annotation: Hit_ID=Q0D4Z6; Match level="QueryCoverage=99%, HitCoverage=25%, E-value=1e-58, Identity=73%"; Hit description =Probable indole-3-acetic acid-amido synthetase GH3.8
  Pfam annotation: Domain name=GH3; Domain location=1-162; Score= -280.2; E_value=0.00015; Accession=PF03321.5; Description=GH3 auxin -responsive promoter
ANMGYFELLPHDPDARPLSKDDPPPRLVDLADAEVGKEYELVITTYAGLCRYRVGDILLVTGFHNAAPQFRFVRRKNVLLSIESDKTDEAELQRAVDRASALLRERRGAAVVEYTSHACTRSIPGHYVVYWELLATAAEQGEDAVDGETLERCCLEMEEALN

SEQ ID NO: 110091 - protein, 524 aa, Setaria italica
  Transcript Sequence Number=SeqID_44117
  Gene Ontology: Mol. function=ligase activity; Cellular component =chloroplast envelope; Biological process=response to auxin stimulus
  Homolog annotation: Hit_ID=B6EBQ1; Match level="QueryCoverage=95%, HitCoverage=81%, E-value=0.0, Identity=94%"; Hit description=Indole -3-acetic acid amido synthetase
  Pfam annotation: Domain name=GH3; Domain location=1-481; Score=962.1; E_value=2.4e-286; Accession=PF03321.5; Description=GH3 auxin -responsive promoter
PILSGHPVSEFLTSSGTSAGERKLMPTIEDELNRRQLLYSLQMPVMNLYVPGMDKGKALHFLFVKSETKTPGGLAARPVLTSYYKSNHFKNRPFDAYNNYTSPTAAILCADAFQSMYAQMVCGLCQRHDVLRVGAVFASGLLRAIRFLQLNWEQLAADIEAGALTPRVTDPSVREAVAGILRPDPELAAVIRAECSSGDWAGIITRIWPNTKYLDVIVTGAMAQYIPTLKYYSGGLPMACTMYASSECYFGLNLRPMCDPSEVSYTLMPNMCYFEFLPMDAAASGGDVSQLVDLARVELGREYELVITTYAGLNRYRVGDVLQVTGFHNSAPQFRFVRRKNVLLSIESDKTDEAELQRAVERASALLRPHGATVVEYTSQAYTKSIPGHYVIYWELLAKSPDAGAAVDRETLDRCCLEMEEALNSVYRQSRVADGSIGPLEIRVVRPGTFEELMDYAISRGASINQYKVPRCVTFPPIIELLDSRVVSTHFSPALPHWTPASATTTRPAGRRRDEELDCPASLN

SEQ ID NO: 110092 - protein, 105 aa, Setaria italica
  Transcript Sequence Number=SeqID_44118
  Homolog annotation: Hit_ID=B6U4H5; Match level="QueryCoverage=86%, HitCoverage=15%, E-value=8e-13, Identity=55%"; Hit description=ATP binding protein
MVKLMEFFLRGPAEAGEDERLLKDLPGSSDKEAHTSAGEDQENTKRDSEGTTTEECGSGGSVIKATVSSEDQNDRHGNDSNIQCAESDGACKPMPEMDSKSINGE

SEQ ID NO: 110093 - protein, 135 aa, Setaria italica
  Transcript Sequence Number=SeqID_44119
  Gene Ontology: Mol. function=nucleoside-triphosphatase activity
  Homolog annotation: Hit_ID=B9T8B4; Match level="QueryCoverage=100%, HitCoverage=25%, E-value=5e-42, Identity=63%"; Hit description=ATP binding protein, putative
GAGAGRSITLSGLLNFTAGLWSCCGAERIFVFTTNHVEKLDPALLRSGRMDMHIFMSYCSFPALRILLRNYLGFESDEDLDRLGDEDAGAAAALRGLEEWVDAAEITPADVSEVLIKNRRSGKAEAMRELLDVLK

SEQ ID NO: 110094 - protein, 132 aa, Setaria italica
  Transcript Sequence Number=SeqID_44120
  Homolog annotation: Hit_ID=B9SI17; Match level="QueryCoverage=98%, HitCoverage=23%, E-value=2e-44, Identity=57%"; Hit description=DNA damage-binding protein, putative
  Pfam annotation: Domain name=WD40; Domain location=1-39; Score=16.8; E_value=0.094; Accession=PF00400.24; Description=WD domain, G-beta repeat
  Pfam annotation: Domain name=WD40; Domain location=44-83; Score=10.5; E_value=2.3; Accession=PF00400.24; Description=WD domain, G-beta repeat
  Pfam module annotation: Pfam domain module=WD40::WD40; Domain location=1-39::44-83
LECGNIKFHQRRVTCLEFHPTKNNVLLSGDKKGLLGIWDYVKLHEKITYDSVHSCILNSMKIDTSNDGILYTASSDGTISCTDLDTGIGSSLLNLNPNGWNGPSSWRMIYGMDLNTDKGLLLVADNFGFLYL

SEQ ID NO: 110095 - protein, 215 aa, Setaria italica
  Transcript Sequence Number=SeqID_44121
  Gene Ontology: Mol. function=ER retention sequence binding; Cellular component=endoplasmic reticulum; Biological process=protein retention in ER lumen
  Homolog annotation: Hit_ID=Q2R4I7; Match level="QueryCoverage=100%, HitCoverage=100%, E-value=1e-106, Identity=91%"; Hit description=ER lumen protein retaining receptor
  Pfam annotation: Domain name=ER_lumen_recept; Domain location=28-172; Score=314.1; E_value=2.9e-91; Accession=PF00810.10; Description=ER lumen protein retaining receptor
MNVFRLAGDMTHLLSVVVLLLKIHTIKSCAGISLKTQELYALVFAARYLDLFVHFVSLYNTVMKLVFLASSFSIVWYMRRHKIVRRTYDKDHDTFRHYFLVLPCLLLALLINEKFTFREVMWAFSIYLEAVAIFPQLVLLQRTRNIDNLTGQYVFFLGAYRVLYIFNWIYRYFTEPHFVHWISWVAGIVQTLLYADFFYYYTMSWKNNVKLELPA

SEQ ID NO: 110096 - protein, 128 aa, Setaria italica
  Transcript Sequence Number=SeqID_44122
TSREPLLSPSPSILRRRVVLHFSDSQFSIAEGRCVDPCAPRRQEGGREDGGGRRREKWANSSVPLLPCGACVWAALFHCATSRLPAWSGPSCVSWSEHHSQWKKQCLGESMPLMLTQMMLSREKQKIK

SEQ ID NO: 110097 - protein, 139 aa, Setaria italica
  misc_feature (126)..(126): Xaa can be any naturally occurring amino acid
  Transcript Sequence Number=SeqID_44123
  Homolog annotation: Hit_ID=B9SYA4; Match level="QueryCoverage=92%, HitCoverage=15%, E-value=1e-09, Identity=33%"; Hit description =Phosphatidylinositol n-acetylglucosaminyltransferase subunit p, putative
NLQELRMQLRLLKRETTDGGDDTELFILSDNETACQPLPEMEESHAFRDEEEGDFSYVLDMLTGLAIHAANQDELLENCYLLECPAGADLYDELENKYSSLILWPPAERKLLFDITSAVLRDIITXLMQSCSKGLVEGC

SEQ ID NO: 110098 - protein, 173 aa, Setaria italica
  Transcript Sequence Number=SeqID_44124
  Homolog annotation: Hit_ID=B9R9B3; Match level="QueryCoverage=99%, HitCoverage=32%, E-value=5e-74, Identity=73%"; Hit description=KDEL motif-containing protein 1, putative
  Pfam annotation: Domain name=DUF821; Domain location=1-173; Score =156.5; E_value=8e-44; Accession=PF05686.4; Description=Arabidopsis thaliana protein of unknown function (DUF821)
EPYAYWKGNPSVSATRQELVKCNVSSTINWNARIYAQDWFKESKAGYKDSDLGSQCSHRYKIYIEGSAWSISQKYILACDSMALLVTPKYYDFFSRSLMPIQHYWPVRDDNKCASIKYAVDWGNSHKQLAQRIGKQASNFIQEELSMDHVYDYMLHLLTEYAKLLKFKPTKPT

SEQ ID NO: 110099 - protein, 147 aa, Setaria italica
  Transcript Sequence Number=SeqID_44125
  Subcellular localization annotation: CTP_CleavageSite=47; ConfidenceScore=5.30e-01
GFAERPPAAGDPAGFISVRADLNSLLPPTFRREPPPRQCRGSPSRACASSSPPGDAAPRRLGPPGLCGLDPSPWHLVPPSSYVPLVPGAAPSPAEPGRPPAQGKLVLSAWSDEQMIICGNNLESNLLMCPFYLIFWWRVTMVIDIIE

SEQ ID NO: 110100 - protein, 313 aa, Setaria italica
  Transcript Sequence Number=SeqID_44126
AADGEGSPDDAAWVEEGEFEDADDLHLTSGEAVAAWAATAAGPVLREVEIADYWPQACWRKAEALLLISHYCHSLIKLGLKNAWLSVDGLKKMPNLTHLTLEFIRLDDEDLDQLNECFPCLRSLNLIGVGGLKDPKIHLLQLNTCHWEVSNVPRSLVVHAPNLYSLELKCVRPDRLILDTPSLSTLKLTIEKLGATAQVDGLVSLTDLRIESLDLSSLFSAFVDSRAIRTLELELPESASQYDLLESVNPDYLLRMLASIREVKLAPRFSCQLTLCLALCTDSQFQSCLKKLLIHVPQSVVLFSAVTYCFRYA

SEQ ID NO: 110101 - protein, 50 aa, Setaria italica
  Transcript Sequence Number=SeqID_44127
KLTIAALVGSSIITISGLNHPYLAISSQKFGHTNIAKGINLYQPLISLHL

SEQ ID NO: 110102 - protein, 88 aa, Setaria italica
  Transcript Sequence Number=SeqID_44128
  Gene Ontology: Mol. function=hydrolase activity, acting on ester bonds; Biological process=lipid metabolic process
  Homolog annotation: Hit_ID=B6TLI6; Match level="QueryCoverage=93%, HitCoverage=23%, E-value=2e-20, Identity=46%"; Hit description =Anther-specific proline-rich protein APG
CRTVGCYSDMYSLVSSIIANPLKYGFENVAQGCCGTGIIEALFLCALEEPLTCEDTDKYVFFDSVHPTERIYKMEASEMLNTSLAVFL

SEQ ID NO: 110103 - protein, 61 aa, Setaria italica
  Transcript Sequence Number=SeqID_44129
PVIGCMYCVELLKSWLIHQNSEEVHTERQRATRKLYQCSEYTEHHFSVRKFTIQMVRVAKT

SEQ ID NO: 110104 - protein, 108 aa, Setaria italica
  Transcript Sequence Number=SeqID_44130
  Subcellular localization annotation: CTP_CleavageSite=57; ConfidenceScore=5.66e-01
PQVVPNHLPLFLSLPPIPPSLSLRSPARSPPFPFTLLSQTVPPIAIGAANPELQISRASPQGPNPCPHYPHSAATLLHCYKIRCISALAHLIHRGAMAGAPKSTGIAL

SEQ ID NO: 110105 - protein, 49 aa, Setaria italica
  Transcript Sequence Number=SeqID_44131
SSVVCLLRFVILHSLVDVCHLLSASLKNELIWLPFIYCSVPTRWRLYLY

SEQ ID NO: 110106 - protein, 88 aa, Setaria italica
  misc_feature (39)..(39): Xaa can be any naturally occurring amino acid
  Transcript Sequence Number=SeqID_44132
  Gene Ontology: Mol. function=metallopeptidase activity
  Homolog annotation: Hit_ID=B9SD61; Match level="QueryCoverage=98%, HitCoverage=19%, E-value=2e-14, Identity=39%"; Hit description =Leukotriene A-4 hydrolase, putative
  Subcellular localization annotation: CTP_CleavageSite=22; ConfidenceScore=5.18e-01
ALAFYLDFAASTIHASALLTLSAPHSGDLLLDTLTLTLXPDTTSFRLTFSTSPDASALQWLAPPQTASGQPFVFSQCQSIHARSIFPS

SEQ ID NO: 110107 - protein, 89 aa, Setaria italica
  Transcript Sequence Number=SeqID_44133
LISVPFPPPSFPGGGDDWASAAGAIRQVFAGPFSIDEYPPAIDVLRTGAVVAPGRQEPKQHGGGDSRGRLHERWPSEGGGSWPCYRSGR

SEQ ID NO: 110108 - protein, 61 aa, Setaria italica
  Transcript Sequence Number=SeqID_44134
  Gene Ontology: Mol. function=metallopeptidase activity
QGQEPPPSEGHRSCRRHHLPDTTSFRLTFSTSPDASALQWLAPPQTASGQPFVFSQCQSIH

SEQ ID NO: 110109 - protein, 471 aa, Setaria italica
  Transcript Sequence Number=SeqID_44135
  Gene Ontology: Mol. function=metallopeptidase activity; Cellular component=cytoplasm; Biological process=leukotriene biosynthetic process
  Homolog annotation: Hit_ID=B9SD61; Match level="QueryCoverage=98%, HitCoverage=76%, E-value=0.0, Identity=71%"; Hit description =Leukotriene A-4 hydrolase, putative
  Pfam annotation: Domain name=Leuk-A4-hydro_C; Domain location=329 -467; Score=199.0; E_value=1.3e-56; Accession=PF09127.3; Description =Leukotriene A4 hydrolase, C-terminal
  Pfam annotation: Domain name=Peptidase_M1; Domain location=1-256; Score=-63.9; E_value=6.9e-09; Accession=PF01433.12; Description =Peptidase family M1
  Pfam annotation: Domain name=Peptidase_M61; Domain location=156-261; Score=-46.3; E_value=0.07; Accession=PF05299.4; Description=M61 glycyl aminopeptidase
  Pfam module annotation: Pfam domain module=Leuk-A4-hydro_C::Peptidase_ M1::Peptidase_M61; Domain location=329-467::1-256::156-261
ATTPPPARITFSLLLKVPSQLSAVAAARHVGRRDPLPSDHRGACDDELWCASGRIVEEFQMEQSVPPYLFAFAAGGIGFRDLGPRTRVYAEGGDKVLDEAAREFAGVEEMVKVGESLFGPYEWERFDLLVLPPSFPYGGMENPRMVFLTPTVIKGDAAGAQVVAHELAHSWTGNLITNKTNEDFWLNEGFTTYAERRIVEVVQGEERAALNMGIGWRGLNRMMERFKDNMEFTKLKPKMAGIDPDDVYSEVPYEKGFQFLWRIERQIGRPAFDEFLKKYIATFKFKSIDTETFLEFLKTNVPGIENQIDLQLWVEGTGIPPDAMEPDSATYKKICDLAAEFKSGKLPSEDEVADWSGQEWELYLENLPTDVEASQVTALDERYKLSESRDYEVKVAFLQLAIPTGCKCYFNEVEKCLKQVGRMKYLRPLYSSLAKCSGEEKMLAQRIFSEAQEFYHPIARSVAESILSKHS

SEQ ID NO: 110110 - protein, 187 aa, Setaria italica
  Transcript Sequence Number=SeqID_44136
  Gene Ontology: Mol. function=metallopeptidase activity; Biological process=leukotriene biosynthetic process
  Homolog annotation: Hit_ID=B9SD61; Match level="QueryCoverage=99%, HitCoverage=29%, E-value=4e-53, Identity=56%"; Hit description =Leukotriene A-4 hydrolase, putative
MAPVDPHSYTDGAHPVVSHAALAFYLDFAASTIHASALLTLSAPHSGDLLLDTRALAVHSVSTAADPPEPIPFSLAASPDPVLGSALTLTLPPDTTSFRLTFSTSPDASALQWLAPPQTASGQPFVFSQCQSIHARSIFPSHDTPAARITFSLLLNVPSQLSAVAAARHVGRRDPLPSDHRGACDER

SEQ ID NO: 110111 - protein, 273 aa, Setaria italica
  misc_feature (10)..(10): Xaa can be any naturally occurring amino acid
  misc_feature (56)..(56): Xaa can be any naturally occurring amino acid
  Transcript Sequence Number=SeqID_44137
ALPDRETSVXIKYENRNAEERSGECNYSMEKAVTVDLLLGTDNSIPNDHIGDLCKXNTDDILIDNQVANEECQQLDKAKHLPSGTSSKGQNISGPAEMEDISAPAEVKNTCAPVETDSTSAPAVEPVSPQIKQELKPKKRRKKCSFFTKKQKKKKETSKTPAKEKAEGTPSAAKNKTGGTPSAAAVEKTESAPSGSMGLGTMTARSARKKRKTGNEPADAKKRESVPSKKQETGKPSSAAKEETGKPSSAAKKQETGKPSSAAKSRNWNPFQE

SEQ ID NO: 110112 - protein, 549 aa, Setaria italica
  Transcript Sequence Number=SeqID_44138
DTSFFGANFVIWIAFRRKKVTAEWRDSVLPILWRCQWLELRVKELSSQVSKYDRELALIKKEKELQLAVSKANVSRLESRQIHKGHGDSIMKRRKRKRHEENVDGPLYINKHQILSYYNDKQNKGAETGGILIDDDCGSTVDGCIRGGLDTITLLNSENYDMIFEQLILKHTLMTIDGLQSRVHLLQDCLSKAHSGGENLALSEDGTHVMVPQERQHTQKHSFSYMECRYSKPRKRKNLNILLKDDVSALAVRPALPDMEIDAHLKDENRNAEERSGECNRLREKYVTMDQLLGTDNSIPNGHIGDLCKENTYDILIDNQVANVVYRQFGKAKHLPSGTSNKGPAETKNISAPAEVKNTCAPVDSTSAPAVEPVSPQSKELKPKKKRKKCSFFTKKKKKDASKTPAAKEKTEGTPSAAKNKTGSTPSAAAAVKTESTPSAGTGLGTMTFRSAGKMRKAGNEPADMKKRESGSESAAPKKHKTGRPSSAAKKQKTENPSSATKNQETENKPSTIKEAESAPLNMKIEKAVLVAVNSRRSQRVRKPKVFDE

SEQ ID NO: 110113 - protein, 152 aa, Setaria italica
  Transcript Sequence Number=SeqID_44139
  Gene Ontology: Cellular component=extracellular region
  Homolog annotation: Hit_ID=B9SI67; Match level="QueryCoverage=64%, HitCoverage=23%, E-value=7e-27, Identity=71%"; Hit description =Microfibril-associated protein, putative
MSVAAGVSDAAIAVRDKLRGKIGQTKVKRYWPGKAPEWADDAEEEIDLRTARVSLDKAFPKDEDGDIPAKDDRRLRRLAETRENKEELRADHRRIRQAEIVSTVEEQNERQEADIDEEDEEAQEERRRRIREKQLLREQEEEELLPQEDEEL

SEQ ID NO: 110114 - protein, 89 aa, Setaria italica
  Transcript Sequence Number=SeqID_44140
  Gene Ontology: Mol. function=metal ion binding
  Homolog annotation: Hit_ID=B6T446; Match level="QueryCoverage=65%, HitCoverage=20%, E-value=5e-24, Identity=89%"; Hit description=RING finger and CHY zinc finger domain-containing protein 1
  Pfam annotation: Domain name=zf-C3HC4; Domain location=3-39; Score =1.9; E_value=0.061; Accession=PF00097.17; Description=Zinc finger, C3HC4 type (RING finger)
LRTTNERNNTRRRLQCGHTIHLECMNEMRAHHHFSCPVCSRSACDMTDTWRKLDEEVAATPMPEIYLTKMVSSRSLTPHTRPCRSDADC

SEQ ID NO: 110115 - protein, 46 aa, Setaria italica
  Transcript Sequence Number=SeqID_44141
MILLTVPQQGFHQLSRCLCCNLTGCCYSNVLKDSHRCVERAMHHNC

SEQ ID NO: 110116 - protein, 108 aa, Setaria italica
  Transcript Sequence Number=SeqID_44142
  Gene Ontology: Mol. function=metal ion binding; Cellular component =cytoplasm
  Homolog annotation: Hit_ID=B6T446; Match level="QueryCoverage=91%, HitCoverage=34%, E-value=5e-47, Identity=89%"; Hit description=RING finger and CHY zinc finger domain-containing protein 1
  Pfam annotation: Domain name=zf-C3HC4; Domain location=1-31; Score =3.9; E_value=0.037; Accession=PF00097.17; Description=Zinc finger, C3HC4 type (RING finger)
KDISVLQCGHTIHLECMNEMRAHHHFSCPVCSRSACDMTDTWRKLDEEVAATPMPEIYLTKMVWILCNDCSATSSVRFHVLGQKCPGCSSYNTRETRAGPALAARSRV

SEQ ID NO: 110117 - protein, 79 aa, Setaria italica
  Transcript Sequence Number=SeqID_44143
  Gene Ontology: Mol. function=metal ion binding
  Homolog annotation: Hit_ID=Q10RT9; Match level="QueryCoverage=79%, HitCoverage=23%, E-value=2e-18, Identity=68%"; Hit description=CHY zinc finger family protein, expressed
  Pfam annotation: Domain name=zf-CHY; Domain location=10-71; Score =39.3; E_value=1.5e-08; Accession=PF05495.4; Description=CHY zinc finger
MDFATEQHGCEHYRRGCRVVAPCCGEVFGCRHCHNDAKNSLEVDPRDRHEIPRHEINKVGASWLILCLSFHRLLLSFLF

SEQ ID NO: 110118 - protein, 379 aa, Setaria italica
  Transcript Sequence Number=SeqID_44144
  Gene Ontology: Mol. function=GTP binding; Cellular component =intracellular
  Homolog annotation: Hit_ID=B6SV10; Match level="QueryCoverage=99%, HitCoverage=74%, E-value=0.0, Identity=88%"; Hit description=Small GTP-binding protein domain
  Pfam annotation: Domain name=Arf; Domain location=147-368; Score= -101.3; E_value=0.083; Accession=PF00025.13; Description=ADP -ribosylation factor family
  Pfam annotation: Domain name=GTP1_OBG; Domain location=12-148; Score=- 16.0; E_value=2.7e-09; Accession=PF01018.14; Description=GTP1OBG family
  Pfam annotation: Domain name=MMR_HSR1; Domain location=152-282; Score= 147.1; E_value=5.5e-41; Accession=PF01926.15; Description=GTPase of unknown function
  Pfam module annotation: Pfam domain module=Arf::GTP1_OBG::MMR_HSR1; Domain location=147-368::12-148::152-282
LTYGFGWSLPTGGHGGDVVVYADEAEETLLRFHEKARYCAKRGGNVGAAGGTLSSRMHSGFAGETLRIPVPVGTVVKRKKGTVLADLAHPGDEVLVARGGQGGISLIDVPEYRRRKAMTLSPNIMRDASDKVLTHGQPGEEVSLELILRVVADVGLVGLPNAGKSTLLSAITLARPDIADYPFTTLMPNLGRLGGDPALGALQFSSEATLADLPGLIEGAHLGKGLGRNFLRHLRRTRVIVHVVDAGADDPVNDYKIVREELRMYNPQYLERPYVVVLNKIDLPKAHDRLSSLALEISSIGCEERQDISGSKDNLNGHVSKHQVSSEATVEGGEKQLGDYPRPQAVVAASVLRHIGIDEMLKEIRAALRKCFDHKLPEQ

SEQ ID NO: 110119 - protein, 86 aa, Setaria italica
  Transcript Sequence Number=SeqID_44145
  Gene Ontology: Mol. function=magnesium protoporphyrin IX methyltransferase activity; Cellular component=chloroplast; Biological process=chlorophyll biosynthetic process
  Homolog annotation: Hit_ID=Q5NKT1; Match level="QueryCoverage=83%, HitCoverage=21%, E-value=9e-35, Identity=95%"; Hit description =Putative magnesium-protoporphyrin IX methyltransferase
ERRRRAQAEAAGGGDKEAVRAYFNSTGFERWRKIYGSATEGVNRVQLDIREGHAQTVAATLSMLRDSPLQLAGATVCDAGCGTGSL

SEQ ID NO: 110120 - protein, 104 aa, Setaria italica
  Transcript Sequence Number=SeqID_44146
  Gene Ontology: Mol. function=phosphoprotein binding
  Homolog annotation: Hit_ID=Q3LFF8; Match level="QueryCoverage=100%, HitCoverage=35%, E-value=9e-28, Identity=73%"; Hit description=Rid2 protein (Fragment)
LDAAQAASGEMEAELRRLRVQSDQWRKAAEAAAAALSVPCGGDNNGVGRTVERMGSLEPEYNNSIGGKLMSSPFSDEVDEGSPKRRNSGSVLRRMSGLWKKSPK

SEQ ID NO: 110121 - protein, 49 aa, Setaria italica
  Transcript Sequence Number=SeqID_44147
  Gene Ontology: Mol. function=protein serine/threonine kinase activity; Biological process=protein amino acid phosphorylation
  Homolog annotation: Hit_ID=Q6F2P9; Match level="QueryCoverage=100%, HitCoverage=5%, E-value=7e-13, Identity=75%"; Hit description =Putative receptor-like serine/threonine kinase (RFK1)
LYTDSSGLSGPFPSTFSKLKKLRILRASDNDFTGKMPDYLGSLTNLEDM

SEQ ID NO: 110122 - protein, 272 aa, Setaria italica
  misc_feature (18)..(18): Xaa can be any naturally occurring amino acid
  misc_feature (251)..(251): Xaa can be any naturally occurring amino acid
  Transcript Sequence Number=SeqID_44148
  Gene Ontology: Mol. function=protein serine/threonine kinase activity; Biological process=protein amino acid phosphorylation
  Homolog annotation: Hit_ID=Q4PLL4; Match level="QueryCoverage=100%, HitCoverage=26%, E-value=1e-127, Identity=80%"; Hit description=SHR5- receptor-like kinase (Fragment)
  Pfam annotation: Domain name=Pkinase; Domain location=1-248; Score =81.2; E_value=3.7e-21; Accession=PF00069.17; Description=Protein kinase domain
  Pfam annotation: Domain name=Pkinase_Tyr; Domain location=1-248; Score=41.7; E_value=1.7e-16; Accession=PF07714.9; Description =Protein tyrosine kinase
  Pfam module annotation: Pfam domain module=Pkinase::Pkinase_Tyr; Domain location=1-248::1-248
GRVIAVKQLSQSSHQGKXQFVAEVATISAVQHRNLVKLHGCCIDSNTHLLVYEYLENGSLDRALFGDSSMKLDWSTRFEIILGIARGLTYLHEESSIRIVHRDIKASNVLLDTNLSPKVSDFGLAKLYEENKSHVSTTRIAGTFGYLAPEYAMRGQLTEKVDVFAFGVVALEAVSGRSNTDSSLKESSIYLLEWAWELYEGKQPLRILDPRLKEFDAEEALRVIHVALICTQGSPHQRPPMSRVVAMLTGXLEVADEVAKPSYVVTDWQLEG

SEQ ID NO: 110123 - protein, 929 aa, Setaria italica
  misc_feature (750)..(750): Xaa can be any naturally occurring amino acid
  Transcript Sequence Number=SeqID_44149
  Gene Ontology: Mol. function=protein serine/threonine kinase activity; Biological process=protein amino acid phosphorylation
  Homolog annotation: Hit_ID=Q4PLL4; Match level="QueryCoverage=98%, HitCoverage=89%, E-value=0.0, Identity=70%"; Hit description=SHR5 -receptor-like kinase (Fragment)
  Pfam annotation: Domain name=LRR_1; Domain location=117-139; Score =10.8; E_value=2.6; Accession=PF00560.25; Description=Leucine Rich Repeat
  Pfam annotation: Domain name=LRR_1; Domain location=141-163; Score =9.0; E_value=5.7; Accession=PF00560.25; Description=Leucine Rich Repeat
  Pfam annotation: Domain name=LRR_1; Domain location=189-212; Score =9.5; E_value=4.5; Accession=PF00560.25; Description=Leucine Rich Repeat
  Pfam annotation: Domain name=LRR_1; Domain location=21-43; Score =12.0; E_value=1.5; Accession=PF00560.25; Description=Leucine Rich Repeat
  Pfam annotation: Domain name=LRR_1; Domain location=214-236; Score =15.6; E_value=0.21; Accession=PF00560.25; Description=Leucine Rich Repeat
  Pfam annotation: Domain name=LRR_1; Domain location=238-259; Score =12.7; E_value=1.1; Accession=PF00560.25; Description=Leucine Rich Repeat
  Pfam annotation: Domain name=LRR_1; Domain location=260-283; Score =13.7; E_value=0.73; Accession=PF00560.25; Description=Leucine Rich Repeat
  Pfam annotation: Domain name=LRR_1; Domain location=45-67; Score =12.4; E_value=1.3; Accession=PF00560.25; Description=Leucine Rich Repeat
  Pfam annotation: Domain name=LRR_1; Domain location=69-91; Score=3.5; E_value=66; Accession=PF00560.25; Description=Leucine Rich Repeat
  Pfam annotation: Domain name=Pkinase; Domain location=593-859; Score =113.7; E_value=6e-31; Accession=PF00069.17; Description=Protein kinase domain
  Pfam annotation: Domain name=Pkinase_Tyr; Domain location=593-859; Score=83.1; E_value=1e-21; Accession=PF07714.9; Description=Protein tyrosine kinase
  Pfam module annotation: Pfam domain module=LRR_1::LRR_1::LRR_1::LRR _1::LRR_1::LRR_1::LRR_1::LRR_1::LRR_1::Pkinase::Pkinase_Tyr; Domain location=117-139::141-163::189-212::21-43::214-236::238-259::260 -283::45-67::69-91::593-859::593-859
EGYYALNVVGQIPSELQNLTYLTYLNLDQNYLTGPIPSFIGQFSGMQHLSLGFNPFSGPLPKELGNLTNLNLLGISLDNFSGGLPEELGNLSKLEQLYTDSSGLSGPFPSTFSKLKKLRILRASDNDFTGKMPDYLGSLTNLEDMAFQGNSFEGPIPASLSNLTRLTNLAVGDILSGSSSLAFISNLSSLSTLILRNCKVSGNLGEVNISKLANLILLDLSFNNITGQVPPSILTLDKLEFLFLGNNSLTGSLPDVKSPSLKNLDFSYNQLTGSFPSWATESNLRLNLVANNFVLGSTNNSILPAGLNCLQQGTPCFLGFPEYYSFAVDCGSNSSMTGSDNTFYDVDFTDLGAASYYVTGQTRWGVSNVGKFNQAPNGSNIIYSSNQQFQNAEDTELFQTARMSASSLRYYGLGLENGNYTVVLQFAETAYPDTQTWQSLGRRVFDIYVQGSLREKNFNIRKTAGGKSFTAVSKSYTATVSKNFLEIHLFWAGKGTCCIPTQGYYGPMISALSVTPNFTPTVRNGVPKKKSKAGAIVGVMIGASVLGLAALFGICLFTKRRRRLAQQRQELYDMIGQPNVFSYDELKLATNNFNPQNILGEGGYGPVYKGTLTDGRVIAVKQLSQSSHQGKRQFVAEVATISAVQHRNLVKLHGCCIDSNTHLLVYEYLENGSLDRALFGDSSMKLDWSTRFEIILGIARGLTYLHEESSIRIVHRDIKASNVLLDTNLSPKVSDFGLAKLYEENKSLVXADMGLGYLAPEYAMRGQLTEKVDVFAFGVVALEAVSGRSNTDSSLKESSIYLLEWAWELYEGKQPLRILDPRLKEFDAEEALRVIHVALICTQGSPHQRPPMSRVVAMLTGKAEVADEVAKPSYVVTDWQLRGGGSSSCTTTSSYWGSTTTPELSRMKEADPPTQSPTITGASHQIEGR

SEQ ID NO: 110124 - protein, 121 aa, Setaria italica
  Transcript Sequence Number=SeqID_44150
  Gene Ontology: Mol. function=nucleotidyltransferase activity; Cellular component=cytoplasm; Biological process=mRNA processing
  Homolog annotation: Hit_ID=B9RDG6; Match level="QueryCoverage=85%, HitCoverage=14%, E-value=9e-46, Identity=75%"; Hit description =Poly(A) polymerase cid, putative
  Pfam annotation: Domain name=PAP_assoc; Domain location=4-63; Score =81.9; E_value=2.3e-21; Accession=PF03828.11; Description=PAP25A associated domain
SRDTVSRLLWAFFHYWAYEHDYTRDVISIRTGRIISKERKDWTRRVGNDRHLICIEDPFETSHDLGRVVDKFTIKILREEFERAANILQFDPNPSVTLFEPYVAPSLPTLMQEETVNGAVS

SEQ ID NO: 110125 - protein, 752 aa, Setaria italica
  Transcript Sequence Number=SeqID_44151
  Gene Ontology: Mol. function=nucleotidyltransferase activity; Cellular component=cytoplasm; Biological process=mRNA processing
  Homolog annotation: Hit_ID=B9RDG6; Match level="QueryCoverage=50%, HitCoverage=48%, E-value=1e-127, Identity=57%"; Hit description =Poly(A) polymerase cid, putative
  Pfam annotation: Domain name=NTP_transf_2; Domain location=439-553; Score=22.1; E_value=0.00069; Accession=PF01909.15; Description =Nucleotidyltransferase domain
  Pfam annotation: Domain name=PAP_assoc; Domain location=633-692; Score=81.9; E_value=2.3e-21; Accession=PF03828.11; Description =PAP25A associated domain
  Pfam module annotation: Pfam domain module=NTP_transf_2::PAP_assoc; Domain location=439-553::633-692
  Subcellular localization annotation: CTP_CleavageSite=54; ConfidenceScore=5.13e-01
HFFVDPAVAAVGPLFAAPTQMQGGCFPWSSASAPQPQQHLLRFPGPQFAPGEPYAALGGSGGGGRGFGSGDAVKAERPRPGAPPPGFGKPSHPPAAARDASNTFGGAPSRELNHHRPRGFGRTSNKELKTVPPFAAGREAVGRMPHGEPRAMPITGGRDVPAGMMYREQQQDCFLSRTPPDMNTNRSFGRMPLREQHTLPTTCGRALHGDQYTHATQAGRMQRSDWGQQEPHLTYTSQREQTWQGPSKEKGLRKLPNANAHDAFGKVPVKEVHHVTVPAGSSVAVGPKEDQVNGLEDGRIREVVLEHGIDGEVVAEAEAEARKFEVSYQKGKVRFAGQDEEYDDDGREEGSIIEQMTESLMIDGNVEAKGVVLQKTITRSKDFRSDFSRGHHVSSQRIRFQRRNRPCRYDIDRFAPSFLSIFESLVPSQDEIAKQKQLLTSLSRIINKEWPNSKLYLYGSCANSFGFSNSDIDLCLSIDDKEMSKVDIILKLADILHAGNLQNIQPLTRARVPIVKLMDPETGLSCDICVNNLLAVINTKLLRDYAQIDIRLRQLAFIVKHWAKSRRVNEAYQGTLSSYAYVIMCIHLLQLRRILPCLQEMEATYFVTVDESNCAYFDQVDKLNNYGAHSRDTVSRLLWAFFHYWAYEHDYTRDVISIRTGRIISKERKDWTRRVGNDRHLICIEDPFETSHDLGRVVDKFTIKILREEFERAANILQFDPNPSVTLFEPYVPPPLPTLMQEETVNGAEVEL

SEQ ID NO: 110126 - protein, 135 aa, Setaria italica
  misc_feature (38)..(38): Xaa can be any naturally occurring amino acid
  Transcript Sequence Number=SeqID_44152
  Gene Ontology: Mol. function=ion channel activity; Cellular component= spliceosome; Biological process=RNA splicing
  Homolog annotation: Hit_ID=B6U5W5; Match level="QueryCoverage=100%, HitCoverage=31%, E-value=7e-24, Identity=51%"; Hit description=Prp18 domain containing protein
  Pfam annotation: Domain name=PRP4; Domain location=64-93; Score=39.4; E_value=1.5e-08; Accession=PF08799.3; Description=pre-mRNA processing factor 4 (PRP4) like
FVRRSELEQNRLQKRRDEHPKAGALAASLESAAASDPXSSNPYAAARNHNPTSCSEPSLPRNEVIRRLRVLREPFTLFGEDDAARVERLRLALKSSVIDDIDDLDMARGQTNDFLGDMIEMGKRQKFGRDAYAKS

SEQ ID NO: 110127 - protein, 125 aa, Setaria italica
  Transcript Sequence Number=SeqID_44153
MPELMMIGITLLVYEIKHSRWRESSAQHAKELQKERENIQHKATSIAKPQGLNRRPFLHNQKSNDAPGKSADYIEYGGWRASRNRHGSSAEDISFNMPGHGWEDHPTVDSLPFMTNTHQDQSFPG

SEQ ID NO: 110128 - protein, 193 aa, Setaria italica
  Transcript Sequence Number=SeqID_44154
  Pfam annotation: Domain name=LEA_4; Domain location=139-182; Score =34.2; E_value=5.4e-07; Accession=PF02987.8; Description=Late embryogenesis abundant protein
  Pfam annotation: Domain name=LEA_4; Domain location=51-94; Score =28.0; E_value=3.9e-05; Accession=PF02987.8; Description=Late embryogenesis abundant protein
  Pfam annotation: Domain name=LEA_4; Domain location=7-50; Score=43.9; E_value=6.4e-10; Accession=PF02987.8; Description=Late embryogenesis abundant protein
  Pfam annotation: Domain name=LEA_4; Domain location=95-138; Score =28.3; E_value=3.2e-05; Accession=PF02987.8; Description=Late embryogenesis abundant protein
  Pfam module annotation: Pfam domain module=LEA_4::LEA_4::LEA_4::LEA _4; Domain location=139-182::51-94::7-50::95-138
GKLGEYKDYAADRATGMKDTAAQKAGETAEVTKDKAAAMKDAAAQKAGETAKVTKDKAVAVKDATAQKAGETAEATKDKAAAMKDAAAQKASDSAEAAKNRVGEYKESAAQAAMETKDSATEKASQTADAGKNKLGEYRDAAAEKAKNAKDTTMDKAREYGEGAVGKARETTEAASSKAKPSTEEFGEAGGGR

SEQ ID NO: 110129 - protein, 94 aa, Setaria italica
  Transcript Sequence Number=SeqID_44155
DDPDYEGRKASNPQPPVGIAAAAAPSGSSTSAEGRMEEREENARVVERRFNVSLPWPFSGLGGQASQQDGNNGGSGSNSQGSGSQGGGTPSSKN

SEQ ID NO: 110130 - protein, 135 aa, Setaria italica
  misc_feature (50)..(50): Xaa can be any naturally occurring amino acid
  Transcript Sequence Number=SeqID_44156
  Subcellular localization annotation: CTP_CleavageSite=23; ConfidenceScore=5.60e-01
TLSIARPNSRLSPPKALPTSPVLLSLRRNSPAPPAYRSRLPPPDPPPLPXTTLTEPQRDTPTVIFHRPRPPASSPPRRVARRPPLWLTDHQRRHVTPPPTSPSFRLPPSPDQPVIPSFLLIRQPPERPHPPEPKT

SEQ ID NO: 110131 - protein, 569 aa, Setaria italica
  Transcript Sequence Number=SeqID_44157
  Gene Ontology: Mol. function=binding
  Homolog annotation: Hit_ID=B9R8W2; Match level="QueryCoverage=98%, HitCoverage=45%, E-value=1e-123, Identity=43%"; Hit description=O -linked n-acetylglucosamine transferase, ogt, putative
LVLVLQIYALALWKTGRSEEALSVSRNLAENLSGMKPESATEALGFICTLTYAISGKDTAAAVIHKLPGQLNYSSQLKFIISALDALHPNKRFQLPQLSMPPRLTSYEVMSEVHSNIALGKAIGGELDKPLRVDASLSYLKKVLHMYPNCSLVRNQLGSLLLWSGDWMASHKAVRVTSLTHGHTSSMGLRSAHQIQACAMVCCYATCTSYPKFSFPTCEHQYLSEHDEIHHLQRLVHREPWNQDARYLLVLAIFQKAREEKYPKHICIILKRLILQVLSNISNSRENKVVQHEVFLLLLLSSEICLQYLDYENCIGQAKEALRMTASSCVDTFFAHLQLCRAYAVQGDLLNSRNEYMNCLKNHTNIEMGWVILKHLESACSLEASSDEIDINLRECIKRNGSDPSKWMSLFNLVCAQCFVWDENFASAEKALAQACAEGDPDSCILFFNGATCMEIARRFAAPQFISRASSSLRKAQQKSHASLPLVSLLLAQAEGSLGSKTKWEKNLRLEWFSWPPELRPAEVYFQMHLLARQSAAAAFQQNQLVETMQNPESWLLRAIHLNPSCLPV

SEQ ID NO: 110132 - protein, 56 aa, Setaria italica
  Transcript Sequence Number=SeqID_44158
  Gene Ontology: Mol. function=phosphotransferase activity, alcohol group as acceptor
KFCRWFSRIKLIDCISSFICLFPDVAQDLIGCLLDMLHDTDYRVRLYLARELLCYY

SEQ ID NO: 110133 - protein, 458 aa, Setaria italica
  misc_feature (9)..(9): Xaa can be any naturally occurring amino acid
  misc_feature (182)..(182): Xaa can be any naturally occurring amino acid
  Transcript Sequence Number=SeqID_44159
  Gene Ontology: Mol. function=phosphotransferase activity, alcohol group as acceptor; Cellular component=chromosome
  Homolog annotation: Hit_ID=Q9M3G7; Match level="QueryCoverage=85%, HitCoverage=9%, E-value=2e-34, Identity=29%"; Hit description =Serine/threonine-protein kinase ATM
TIQQPMLLXELMDFIKGFVASNEQFEKLDLSNLVFICSLLCNLVHRALLSRAMGDKSSLMQEVLNYITNILKHIVSFVMKRNNELSHGLTNLSLPLDTTGSALSSFKSFLSSPLFNLSRVDNRVSSVVIKGVTELLDELLVAISQLFSQLSSLVNSFDGENAGKVLPISCVNSQDLNPIVDXKVSVADMDLDVMDSGEVDSVTTSGSGNMGSFLRPLEWKLELVSIISTFFSVSSLHTWEILYNLVEKESDVKVCQVILLNLCRNISASSKTVSSMVHLINDTRDRCTSSFLNSTGCLAYVHALLRTLVALRNSGQNTDGKQQGCKGIFSENEDVLLDLVNKATEISSADWFSRIKLIDCISSFICLFPDVAQDLIGCLLDMLHDTDYRVRLYLAREIVVLFQTWEGHNELFYDVRMFSLQPVDLIIRLLETKGKQRERDSREWDGKRDNRVYENEQI

SEQ ID NO: 110134 - protein, 201 aa, Setaria italica
  Transcript Sequence Number=SeqID_44160
  Gene Ontology: Mol. function=oxidoreductase activity; Cellular component=cytoplasm; Biological process=oxidation reduction
  Homolog annotation: Hit_ID=A8QKF0; Match level="QueryCoverage=99%, HitCoverage=59%, E-value=2e-63, Identity=57%"; Hit description =Flavonol synthase
  Pfam annotation: Domain name=2OG-FeII_Oxy; Domain location=63-162; Score=145.6; E_value=1.6e-40; Accession=PF03171.12; Description=2OG -Fe(II) oxygenase superfamily
HVVAPPEKVDHGAWPRSLAGYREANEAYCLHMQRLARELFGHLSLGLGLEEGAMAEAFGGGGTVFLQKINYYPPCPQPELTLGVAPHTDMSTLTVLVPNDVQGLQVFRNGHWYDVEYVPDALIVHIGDQIEIFSNGAYKAVLHRTTVNKEKTRMSWPVFVEPPGELAVGPHPRLVTGENPARYKAKKFKEYQHCKINKLPM

SEQ ID NO: 110135 - protein, 129 aa, Setaria italica
  Transcript Sequence Number=SeqID_44161
  Gene Ontology: Mol. function=protein serine/threonine kinase activity; Biological process=protein amino acid phosphorylation
  Homolog annotation: Hit_ID=Q84ZH4; Match level="QueryCoverage=100%, HitCoverage=19%, E-value=3e-58, Identity=78%"; Hit description =Putative receptor kinase Lecrk
  Pfam annotation: Domain name=Pkinase_Tyr; Domain location=24-128; Score=-136.4; E_value=0.00012; Accession=PF07714.9; Description =Protein tyrosine kinase
EDWEVEFGPHRFPYKDLHRATEGFRNKNLLGVGGFGRVYKGVLPISDLDIAVKRVSHNSSQGMKEFIAEVVSLGRLQHRNLVQLLGYCRRKGELFLVYDYMSNGSLDKYLYDHERRPTLSWPQRFKIIK

SEQ ID NO: 110136 - protein, 70 aa, Setaria italica
  Transcript Sequence Number=SeqID_44162
  Gene Ontology: Mol. function=metal ion binding; Biological process =metal ion transport
  Homolog annotation: Hit_ID=B6TF33; Match level="QueryCoverage=74%, HitCoverage=20%, E-value=1e-15, Identity=80%"; Hit description =Circumsporozoite protein
MPTIKVSVDLECCRCYTKIQKVLTRIQEKGEFCIDDITYDEKNNVVIVTGPFDADKLADKLCCKACKIIK

SEQ ID NO: 110137 - protein, 118 aa, Setaria italica
  misc_feature (85)..(85): Xaa can be any naturally occurring amino acid
  misc_feature (108)..(108): Xaa can be any naturally occurring amino acid
  Transcript Sequence Number=SeqID_44163
  Gene Ontology: Mol. function=metal ion binding; Biological process =metal ion transport
  Homolog annotation: Hit_ID=B6TF33; Match level="QueryCoverage=63%, HitCoverage=30%, E-value=9e-16, Identity=62%"; Hit description =Circumsporozoite protein
MPTIKVSVDLECCRCYTKIQKVLTRIQEKGEFCIDDITYDEKNNVVIVTGPFDADKLADKLCCKACKIIKQIEIVEPPPPNKEEXSPPPPEQKEEPAPPPPAKVRPPXPPPPKEEPPP

SEQ ID NO: 110138 - protein, 95 aa, Setaria italica
  Transcript Sequence Number=SeqID_44164
  Gene Ontology: Mol. function=protein serine/threonine kinase activity; Cellular component=plasma membrane; Biological process =protein amino acid phosphorylation
  Homolog annotation: Hit_ID=Q2RBQ5; Match level="QueryCoverage=68%, HitCoverage=7%, E-value=3e-20, Identity=70%"; Hit description =Leucine-rich repeat family protein, putative, expressed
  Subcellular localization annotation: CTP_CleavageSite=28; ConfidenceScore=5.07e-01
MQDQMTTILQGKTKALPAQKNLQNPSTRSREIATETAHPYRLSELEVATNNFASRIGSGGFGIVYYGKLSDGKEIAVKVPTNDSYQGKKQFTNEV

SEQ ID NO: 110139 - protein, 132 aa, Setaria italica
  Transcript Sequence Number=SeqID_44165
  Gene Ontology: Mol. function=protein histidine kinase activity; Biological process=peptidyl-histidine phosphorylation
  Homolog annotation: Hit_ID=Q6A8A3; Match level="QueryCoverage=90%, HitCoverage=24%, E-value=2e-61, Identity=100%"; Hit description =Sensory transduction histidine kinase
SFRALTEDDLDYRKVTDGVIRVAATGMITFASPNALSAFRRLGLAGDLDGEYLIPTVRELCPRLREVGQSLTLDLEGRWLTETDIENSDATVRARVIPLQTWLDDVEVSAGTLILIRDLTELRDRDRQLVTK

SEQ ID NO: 110140 - protein, 54 aa, Setaria italica
  Transcript Sequence Number=SeqID_44166
SIIQQDLCAGGSEQGCHYKEIPEPGVMKAFSPLHNRQTLLYSLHCVYYFMLRFV

SEQ ID NO: 110141 - protein, 50 aa, Setaria italica
  Transcript Sequence Number=SeqID_44167
EILVKFVSIIFMLHVFVLYFRNLCQPIYHDILFFKKGIFSFLYTKSVMLM

SEQ ID NO: 110142 - protein, 254 aa, Setaria italica
  misc_feature (6)..(6): Xaa can be any naturally occurring amino acid
  Transcript Sequence Number=SeqID_44168
  Gene Ontology: Mol. function=zinc ion binding; Cellular component =intracellular; Biological process=regulation of transcription, DNA -dependent
  Homolog annotation: Hit_ID=B6T3C9; Match level="QueryCoverage=94%, HitCoverage=80%, E-value=1e-117, Identity=84%"; Hit description=Zinc finger protein 511
  Pfam annotation: Domain name=zf-C2H2; Domain location=134-159; Score =9.5; E_value=1.1; Accession=PF00096.18; Description=Zinc finger, C2H2 type
  Pfam annotation: Domain name=zf-C2H2; Domain location=69-94; Score =0.6; E_value=10; Accession=PF00096.18; Description=Zinc finger, C2H2 type
  Pfam annotation: Domain name=zf-C2H2; Domain location=96-119; Score =13.6; E_value=0.41; Accession=PF00096.18; Description=Zinc finger, C2H2 type
  Pfam module annotation: Pfam domain module=zf-C2H2::zf-C2H2::zf-C2H2; Domain location=134-159::69-94::96-119
VEAEAXPKAAAGPELGFWLAARRRLTPDDPFFAAGDLERELLAKHVALDLSEDDRNQLEKMEVASTCTVFCPIAGCGAHLDCLEDFEDHYVTRHTASCSVCSRVYPTSRLLSIHVSEAHDSYFQAKVARGFPMYECLVEGCGVKLKSYKSRQQHLIDKHQFPKSFEFFKKARPSQRHRQKSQRRQTAHKGEETRDNLMDVDGKGTSQTNWRYRPKQHDHKESKGNERQHQEVKENEMEVEQKIDELISAVSKLS

SEQ ID NO: 110143 - protein, 216 aa, Setaria italica
  Transcript Sequence Number=SeqID_44169
  Gene Ontology: Mol. function=nickel ion binding; Cellular component =cytosol; Biological process=nitrogen compound metabolic process
  Homolog annotation: Hit_ID=B9A9C9; Match level="QueryCoverage=90%, HitCoverage=70%, E-value=3e-99, Identity=89%"; Hit description =Urease accessory protein ureG
  Pfam annotation: Domain name=cobW; Domain location=73-216; Score =142.4; E_value=1.4e-39; Accession=PF02492.11; Description=Cobalamin synthesis proteinP47K
MASHDHHHHHHHHHSHGEGDGQAAGGSWVGEDGRVWHSHDGLAPHSHEPIYSPGDFTKRAPPLASRTFTERAFTVGIGGPVGTGKTALMLALCRFLRDKYSLAAVTNDIFTKEDGEFLIKHGALPEERIRAVETGGCPHAAIREDISINLGPLEELSSLCKADLLLCESGGDNLAANFSRELADYIIYIIDVSGGDKIPRKGGPGITQADLLVINK

SEQ ID NO: 110144 - protein, 133 aa, Setaria italica
  Transcript Sequence Number=SeqID_44170
  Gene Ontology: Mol. function=nickel ion binding; Cellular component =cytosol; Biological process=nitrogen compound metabolic process
  Homolog annotation: Hit_ID=B9A9C9; Match level="QueryCoverage=81%, HitCoverage=38%, E-value=7e-52, Identity=92%"; Hit description =Urease accessory protein ureG
  Pfam annotation: Domain name=cobW; Domain location=1-104; Score=-5.4; E_value=8.3e-08; Accession=PF02492.11; Description=Cobalamin synthesis proteinP47K
MGILSFGQYIFFSTTQQSSIKGCHLCISHADNLAANFSRELADYIIYIIDVSGGDKIPRKGGPGITQADLLVINKTDLAPAVGADLAVMERDALRMREGGPFVFAQVKHGVGVEEIVNHVLQAWEIATGNKRR

SEQ ID NO: 110145 - protein, 271 aa, Setaria italica
  Transcript Sequence Number=SeqID_44171
  Gene Ontology: Cellular component=integral to membrane
  Homolog annotation: Hit_ID=B7KHF6; Match level="QueryCoverage=72%, HitCoverage=74%, E-value=2e-32, Identity=40%"; Hit description=SNARE associated Golgi protein
  Pfam annotation: Domain name=SNARE_assoc; Domain location=65-184; Score=165.0; E_value=2.2e-46; Accession=PF09335.3; Description=SNARE associated Golgi protein
MALSWPSAVRLAVATVLLVAVGVALFTLPVEKILKDFLVWIKGNLGPWGPLVLALAYIPLTVLAVPASILTLGGGYLFGLPVGFVADSLGATIGATAAFLLGRTIGRPYVLSKCKDYPKFQAVAIAIQRSGFKIVLLLRLVPLLPFNMLNYLLSVTPVGIGEYMLASWLGMMPITLALVYVGTTLKDLSDVTHGWSEISTTRWILIISGFVLSAVLIICVTKVAKSSLEKALAENGELDAGTSQLPVVASPSDLQQPLVIKIDTSNEDHEK

SEQ ID NO: 110146 - protein, 73 aa, Setaria italica
  Transcript Sequence Number=SeqID_44172
MEGLIKGLAHVAIDAVRDRGRGGGGDEDDEAPRRGAPQRADPDADGEEGRDERSRSTWAEVVSEQKDGGPDDG

SEQ ID NO: 110147 - protein, 95 aa, Setaria italica
  Transcript Sequence Number=SeqID_44173
  Subcellular localization annotation: CTP_CleavageSite=62; ConfidenceScore=5.54e-01
TTSLAIPVSLPALPPGRRRFLPASPTPSTASIGPWFCPPTWVCLSPTAILYPWSAALPRRPSSSSPRSPSVLTAPCRPARHCLARDPLLAKSTAD

SEQ ID NO: 110148 - protein, 200 aa, Setaria italica
  Transcript Sequence Number=SeqID_44174
  Gene Ontology: Mol. function=electron carrier activity; Cellular component=integral to membrane; Biological process=oxidation reduction
  Homolog annotation: Hit_ID=B6TDZ7; Match level="QueryCoverage=98%, HitCoverage=37%, E-value=9e-63, Identity=65%"; Hit description =Cytochrome P450 CYP709H1
FARVQSMSAVTAEVTKQMMQQWREQLGQSGGKEEAEIDMILAFNDLTAKINGRVAFGTSHEDVEEVIVLMHEMQKHATAATLDAPILWYLPTRRNLKVRRLDKLLRTKIMAMMEARVAAAKDEDNCSSVHGGGGGYGDDLLGLMLEAWSPERQGSDATSTLTTEEVIDECKTFFGAGHETTATLLVWTMFLLSTHPQWQE

SEQ ID NO: 110149 - protein, 277 aa, Setaria italica
  Transcript Sequence Number=SeqID_44175
  Gene Ontology: Mol. function=electron carrier activity; Biological process=oxidation reduction
  Homolog annotation: Hit_ID=B6TDZ7; Match level="QueryCoverage=100%, HitCoverage=55%, E-value=4e-94, Identity=63%"; Hit description =Cytochrome P450 CYP709H1
  Pfam annotation: Domain name=p450; Domain location=1-277; Score= -131.8; E_value=2.7e-05; Accession=PF00067.14; Description=Cytochrome P450
GDEWKRHLKLVLPAFNHEKLKSMSEVTTRVTEQMIQAWRTQIQQSSGHRAAEIDMTNAFSQVTEEVIGRLAFGTSHRKSREVIVAAMREMQKIATVAFRDPPILWYLPTRGNLRVRRLDRVLRTEIMAMVQERVAAAKDGGAYGDDLVGILLEQRGSGETLTADEVIDECKTFFAAGQETTATLLVWAMFLLAVHPQWQDRVREEVLREFRGGDGEAPNADVLGQLKLLHMVLIETSRLYPPIVYIQRRAAMDVVLGGIKVPQGTVISIPIAMLHRD

SEQ ID NO: 110150 - protein, 419 aa, Setaria italica
  Transcript Sequence Number=SeqID_44176
  Gene Ontology: Mol. function=electron carrier activity; Biological process=oxidation reduction
  Homolog annotation: Hit_ID=B6TDZ7; Match level="QueryCoverage=99%, HitCoverage=79%, E-value=0.0, Identity=82%"; Hit description =Cytochrome P450 CYP709H1
  Pfam annotation: Domain name=p450; Domain location=1-413; Score =121.4; E_value=3e-33; Accession=PF00067.14; Description=Cytochrome P450
NTNQLIKQVLTDRTGLYQKDFMIPVLKFLFGNGVILINGDDWKRHRKVVLPAFNHEKIKSMSAVTAEVTKQMMQQWREQLGQSGGKEEAEIDMILAFNDLTAKINGRVAFGTSHEDVEEVIVLMREMQKHATAATLDAPILWYLPTRRNLHVRRLNKQLRSKIMSIMQARLAAKGAKSGAGDAAGCGDDLLGLLLEAWTPQRRGSAETLTADEVIDECKTFFAAGQETTATLLVWAMFLLAVHPQWQDRVREEVLREFRGGDGEAPSADVLGQLKLLHMVLLETSRLYPPIVYIQRRAAMDVELAGIKVPQGTVISIPIAMLHRDKEVWGPDADEFNPMRFEHGATKAAKDPKALLSFSLGPRVCTGQNFGIVEVQVAMAMILRKFSFSLSSKYVHKPKYLLSLTPKLGMPLIVKNIDG

SEQ ID NO: 110151 - protein, 69 aa, Setaria italica
  Transcript Sequence Number=SeqID_44177
KIMDNIPASTSSKKRTSPLLLQIVARCYTHKFFLKKDTKTTQKPIRKLKDHPFKLKKRKATISNVRHAK

SEQ ID NO: 110152 - protein, 121 aa, Setaria italica
  misc_feature (87)..(87): Xaa can be any naturally occurring amino acid
  Transcript Sequence Number=SeqID_44178
FNHRRPEEPHCWVQNGASETALRKRLALGQQGTKRDWCAAESSDSPQQDNTKMRPESADRLPGQEYNEGSEEVTHKLHALKQGGAKXDGCEAEAPRLPSKSTPESADQPNGTMWDAVLVPF

SEQ ID NO: 110153 - protein, 91 aa, Setaria italica
  misc_feature (17)..(17): Xaa can be any naturally occurring amino acid
  Transcript Sequence Number=SeqID_44179
  Gene Ontology: Mol. function=protein serine/threonine kinase activity; Biological process=protein amino acid phosphorylation
  Pfam annotation: Domain name=DUF26; Domain location=6-59; Score=60.0; E_value=8.7e-15; Accession=PF01657.9; Description=Domain of unknown function DUF26
GAPDTAYGLALCRGDVXDPRVCSACLADAFSRLRRLCRADRDATFYADLCTARYSGADFLARPGDNSPLINALDVNASTYYGWDARNATSR

SEQ ID NO: 110154 - protein, 63 aa, Setaria italica
  Transcript Sequence Number=SeqID_44180
CIYIRPGQIDHSLILKLIFIRKTRMMLDLNPSQIKSVYNKQPKIGGFTYLGNSKIGQAYHKHV

SEQ ID NO: 110155 - protein, 62 aa, Setaria italica
  Transcript Sequence Number=SeqID_44181
LIFSSISFITTIPHNFIFNFLIYFIFTTIPHYFIFLGCSGSCPILADSIFLLAEFTYSTLLQ

SEQ ID NO: 110156 - protein, 101 aa, Setaria italica
  Transcript Sequence Number=SeqID_44182
ISSYLKRHLPQCLISFRACGSEKSHIAAYDKPYNYILTNIEELGQHISNPNITNITDQELFTTFIHETYHVDLNEVPRDVSNIYELEVSTTFQNPMLFKNM

SEQ ID NO: 110157 - protein, 99 aa, Setaria italica
  Transcript Sequence Number=SeqID_44183
  Gene Ontology: Biological process=DNA repair
KSDVLICSPQGPGSSSEANKAEEHNVSGQAADRSNINSGGEPSGSNPWLFNVEDIDPAVVEELPLEIQREIQGWIRPSKEPSTKRRGSTISSYFPPARS

SEQ ID NO: 110158 - protein, 245 aa, Setaria italica
  Transcript Sequence Number=SeqID_44184
  Gene Ontology: Mol. function=nucleic acid binding; Cellular component= chloroplast; Biological process=mRNA processing
  Homolog annotation: Hit_ID=B6TAI9; Match level="QueryCoverage=76%, HitCoverage=65%, E-value=1e-100, Identity=94%"; Hit description =Ribonucleoprotein
  Pfam annotation: Domain name=RRM_1; Domain location=163-233; Score =106.1; E_value=1.2e-28; Accession=PF00076.14; Description=RNA recognition motif. (a.k.a. RRM, RBD, o
  Pfam annotation: Domain name=RRM_1; Domain location=69-139; Score =90.9; E_value=4.4e-24; Accession=PF00076.14; Description=RNA recognition motif. (a.k.a. RRM, RBD, o
  Pfam module annotation: Pfam domain module=RRM_1::RRM_1; Domain location=163-233::69-139
RRLPLAPLVASSDAVEAGVEWADEEEEEEAGEAFDEAEEEVVASGDEEEDGGDVEGGYTAVEPPEEAKVYVGNLPYDLDSEGLAQLFDQAGVVEVAEVIYNRETGQSRGFGFVTMSTIEEADKAIEMFNRYDISGRLLNVNRASPRGTRMERPPRQFASAFRAYVGNLPWQVDDSRLVQVFSEHGEVVNASVVYDRETGRSRGFGFVTMASKEELDDAISALDGQELDGRPLRVNVAAERPQRGF

SEQ ID NO: 110159 - protein, 339 aa, Setaria italica
  Transcript Sequence Number=SeqID_44185
  Gene Ontology: Mol. function=transcription regulator activity; Cellular component=cytoplasm; Biological process=regulation of transcription, DNA-dependent
  Homolog annotation: Hit_ID=Q9QXN3; Match level="QueryCoverage=44%, HitCoverage=24%, E-value=3e-30, Identity=42%"; Hit description =Activating signal cointegrator 1
  Pfam annotation: Domain name=ASCH; Domain location=32-153; Score =52.3; E_value=1.8e-12; Accession=PF04266.6; Description=ASCH domain
MRGGYSGRGGFGAGRHSSSSNDGRGYHGNPCLTMHQPWASLLVHGIKRVEGRSWPSPITGRLWIHAASKVPDPDTIKAMEDFYREIYAVDGITDIKFPDHFPVSRLLGCVEVVGCLRSEELVCWEDVPQSVRLEGLTDFCWLCENPQKLVVPFEMRGYQGVYNLERRIYDGAVRGLTPVQGPLPIKFPLPDPRDRFSLKPGSLTFDASKSEVQKSSSVTAAIAGARAAATQFSKKDPNAATSSETRVREQSWGNHADSNSGNGNLPSVVQGSPAYLQNQNQPSIFRSTTAYSQNPDTEPRRSPRLEFGASNRLVAVALRELKQLSVSERGGQPAGSGRS

SEQ ID NO: 110160 - protein, 56 aa, Setaria italica
  misc_feature (52)..(52): Xaa can be any naturally occurring amino acid
  Transcript Sequence Number=SeqID_44186
LSSPLHHSHLVCFVPLPWSILTPNFTGYNTQTDMVYELLRTSTDAPLTSVPXWARD

SEQ ID NO: 110161 - protein, 142 aa, Setaria italica
  Transcript Sequence Number=SeqID_44187
  Homolog annotation: Hit_ID=Q9FII8; Match level="QueryCoverage=88%, HitCoverage=28%, E-value=1e-61, Identity=88%"; Hit description =Similarity to ATP/GTP nucleotide-binding protein
DSLELKKLLVDNSLLDVSQSDLEANLFKLMEKRGYGEDYINRYKMMTRFHHQRVPLVILVCGTACTGKSTIATQLAQRLNLPNVLQTDMVYELLRTSTDAPLTSVPVWARDFDSPEELITGFCRESRGQKSVGWAHLLNGSC

SEQ ID NO: 110162 - protein, 90 aa, Setaria italica
  misc_feature (46)..(46): Xaa can be any naturally occurring amino acid
  misc_feature (56)..(56): Xaa can be any naturally occurring amino acid
  Transcript Sequence Number=SeqID_44188
  Homolog annotation: Hit_ID=C3SAC6; Match level="QueryCoverage=73%, HitCoverage=14%, E-value=2e-17, Identity=71%"; Hit description=2 -phosphoglycerate kinase
YSTRKKSKDESDGHKDLGQPKNNTAKKDKPAAEPIVVPIVLRKTTXYYNLDFDQLXVKALLEEWIATRAFRDNCLPQVSTPLWKLWYTCN

SEQ ID NO: 110163 - protein, 367 aa, Setaria italica
  Transcript Sequence Number=SeqID_44189
  Gene Ontology: Mol. function=phosphotransferase activity, carboxyl group as acceptor
  Homolog annotation: Hit_ID=Q10T35; Match level="QueryCoverage=89%, HitCoverage=94%, E-value=1e-154, Identity=82%"; Hit description=2 -phosphoglycerate kinase, putative, expressed
  Subcellular localization annotation: CTP_CleavageSite=32; ConfidenceScore=5.11e-01
CLCFWYIRARPSTLANSSSLLLQWHSNNVFLLCSSLTACRFHHQRVPLVILVCGTACTGKSTIATQLAQRLNLPNVLQTDMVYELLRTSTDAPLTSVPVWARDFDSPEELITEFCRECRVVRKGLAGDLKKAMKDGKPIIIEGIHLDPSIYLMDEEKRDDNSRTEKTVPDSENSGISAARKTEHQSKNGLAENRMSPTTENENFVKSKECILEEGRISEGVSYAESHKTSTHDSVYSQEKNPKDESDGHKDLGQPKNNTAKKDKPAAEPIVVPIVLRMSDFDHKALLEEWIATRAFRDNCLPQDHRKLINNLKLIQDYLCSFESQGLTIVDISANSFPQTLDWLHSYLLQCIERGLLAACSESCNQG

SEQ ID NO: 110164 - protein, 203 aa, Setaria italica
  misc_feature (21)..(21): Xaa can be any naturally occurring amino acid
  Transcript Sequence Number=SeqID_44190
  Gene Ontology: Mol. function=nucleotide binding; Biological process =defense response
  Homolog annotation: Hit_ID=Q8LL82; Match level="QueryCoverage=100%, HitCoverage=18%, E-value=4e-30, Identity=38%"; Hit description=NBS -LRR-like protein
ILPALQLSYLYLPEAVKRCLXCSMFPKDYSFERDEIVDIWVAQGFVAPGGSIRPEDVGITYLDELRNRFLFQTDPMFPNETRYVMHDLIHDMAVSFSMDECLVMHDLRNQNKSRMHNTVRHMSIEVDGESLTRMGDIQHLNKLHSLRFGIRFNVEITWFNQLSNILFLSLKGCKLVKLPDSICELNSLRYLDISHSNVQELPG

SEQ ID NO: 110165 - protein, 169 aa, Setaria italica
  Transcript Sequence Number=SeqID_44191
  Gene Ontology: Mol. function=transferase activity, transferring glycosyl groups; Cellular component=integral to membrane; Biological process=cell wall organization and biogenesis
  Homolog annotation: Hit_ID=Q7XHV0; Match level="QueryCoverage=92%, HitCoverage=17%, E-value=3e-65, Identity=79%"; Hit description =Probable mixed-linked glucan synthase 9
AFRGTAPINLTERLYQILRWSGGSLDMFFSRNCPLLAGRRLHPMQRVAYTNMTAYPISAAFIFAYDLLPLMWLSGCGEFYIQKPFATYAAYLFAGIAMMEVSGVVEITWAGLTLLDWIRNEQFYMIGATGVYPAAVLHSLLRLVGLRGLPFKLTSKPPPPMPAAASPCA

SEQ ID NO: 110166 - protein, 77 aa, Setaria italica
  misc_feature (19)..(19): Xaa can be any naturally occurring amino acid
  misc_feature (33)..(33): Xaa can be any naturally occurring amino acid
  Transcript Sequence Number=SeqID_44192
  Gene Ontology: Mol. function=sugar:hydrogen symporter activity; Cellular component=integral to membrane; Biological process =carbohydrate transport
  Homolog annotation: Hit_ID=B4G1R1; Match level="QueryCoverage=70%, HitCoverage=15%, E-value=3e-16, Identity=87%"; Hit description =Organic anion transporter
CCLKECVINWFYYYYDSIXPALIIILGSGVLAXFCLNFSIFYVIHSTTAVTFNVAGNLKVRHDYILGCCSLPAPSAR

SEQ ID NO: 110167 - protein, 339 aa, Setaria italica
  Transcript Sequence Number=SeqID_44193
  Gene Ontology: Mol. function=sugar:hydrogen symporter activity; Cellular component=integral to membrane; Biological process =carbohydrate transport
  Homolog annotation: Hit_ID=B4G1R1; Match level="QueryCoverage=100%, HitCoverage=100%, E-value=0.0, Identity=94%"; Hit description =Organic anion transporter
  Pfam annotation: Domain name=DUF6; Domain location=172-305; Score =26.0; E_value=0.00016; Accession=PF00892.12; Description=Integral membrane protein DUF6
  Pfam annotation: Domain name=DUF6; Domain location=30-154; Score =30.7; E_value=5.8e-06; Accession=PF00892.12; Description=Integral membrane protein DUF6
  Pfam annotation: Domain name=TPT; Domain location=163-305; Score =121.8; E_value=2.2e-33; Accession=PF03151.8; Description=Triose -phosphate Transporter family
  Pfam annotation: Domain name=UAA; Domain location=16-311; Score= -86.5; E_value=4.9e-06; Accession=PF08449.3; Description=UAA transporter family
  Pfam module annotation: Pfam domain module=DUF6::DUF6::TPT::UAA; Domain location=172-305::30-154::163-305::16-311
MEDGGNAAAGLGTLRAVLAILQWWGFNVTVIIMNKWIFQKLDFKFPLTVSCVHFICSSIGAYVAIHVLKAKPLIEVEPEDRWRRIFPMSFVFCINIVLGNVSLRYIPVSFMQTIKSFTPATTVILQWLVWSKHFEWRIWASLVPIVGGILLTSVTELSFNIFGFCAAMVGCLATSTKTILAESLLHGYKFDSINTVYYMAPFATMILALPAMLLEGGGVINWFYTHDSIVPALIIILGSGVLAFCLNFSIFYVIHSTTAVTFNVAGNLKVAVAVLVSWLIFRNPISGMNAIGCGITLVGCTFYGYVRHLISQRQAVAPGNLPRNQMEMLPLVDDKQEKV

SEQ ID NO: 110168 - protein, 77 aa, Setaria italica
  Transcript Sequence Number=SeqID_44194
GDAGKRKYLAAAEGTISTFPGFGRPLDQHARLLHDLISYNEIFSSQIVLTTSSSKIIWSNKKDEVHIGTDDSSVCLS

SEQ ID NO: 110169 - protein, 86 aa, Setaria italica
  Transcript Sequence Number=SeqID_44195
FESFLYLTIHSISYSCPPIIKMNSPQVVGKEPAGCGERACRPTFCSKLNHICRVKTHDTCLIISFLFYNLCSPMDMNMHRIHELVL

SEQ ID NO: 110170 - protein, 176 aa, Setaria italica
  Transcript Sequence Number=SeqID_44196
  Gene Ontology: Mol. function=hydrolase activity, acting on ester bonds; Biological process=DNA catabolic process
  Homolog annotation: Hit_ID=Q25A98; Match level="QueryCoverage=100%, HitCoverage=57%, E-value=8e-87, Identity=84%"; Hit description =H0410G08.16 protein
  Pfam annotation: Domain name=S1-P1_nuclease; Domain location=1-166; Score=237.7; E_value=2.9e-68; Accession=PF02265.8; Description=S1P1 Nuclease
HYKHGSADRKYNLTEALLFLSHFMGDVHQPMHVGFTSDQGGNSIDLRWFRHKSNLHHVWDREIIQTALAEFYDKDMGTFRKQLEHNLTKGTWSDDVSSWGDCEDLLSCPTKYATESINLACKWAYSGVHGGETLSNDYFDSRLPIVSRRIAQGGVRLAMFLNRIFSQHNRDVAAPS

SEQ ID NO: 110171 - protein, 193 aa, Setaria italica
  misc_feature (102)..(102): Xaa can be any naturally occurring amino acid
  Transcript Sequence Number=SeqID_44197
  Gene Ontology: Mol. function=metal ion binding; Cellular component =nucleus; Biological process=multicellular organismal development
  Homolog annotation: Hit_ID=B6T6E1; Match level="QueryCoverage=100%, HitCoverage=100%, E-value=2e-88, Identity=82%"; Hit description =Protein DROOPING LEAF
  Pfam annotation: Domain name=YABBY; Domain location=1-146; Score =141.7; E_value=2.3e-39; Accession=PF04690.5; Description=YABBY protein
MDLVSQSEHLCYVRCTYCNTVLAVGVPCKRLMDTVTVKCGHCNNLSYLSPRPPMVQPLSPTDHHPLGPFQGPCNDCRRNQPMPLASPTSDASPRMPFVVKPXEKKHRLPSAYNRFMREEIQRIKAAKPDIPHREAFSMAAKNWAKCDPRCSTTVSTATSNSAPEPRVVPAPQERAKEQVIESFDIFKQIERSI

SEQ ID NO: 110172 - protein, 178 aa, Setaria italica
  misc_feature (121)..(121): Xaa can be any naturally occurring amino acid
  misc_feature (136)..(136): Xaa can be any naturally occurring amino acid
  Transcript Sequence Number=SeqID_44198
  Gene Ontology: Mol. function=serine-type endopeptidase inhibitor activity; Cellular component=extracellular region
  Homolog annotation: Hit_ID=B6UE14; Match level="QueryCoverage=75%, HitCoverage=78%, E-value=1e-50, Identity=71%"; Hit description =Bowman-Birk type bran trypsin inhibitor
  Pfam annotation: Domain name=Bowman-Birk_leg; Domain location=140 -165; Score=25.8; E_value=0.00018; Accession=PF00228.12; Description =Bowman-Birk serine protease inhibitor family
  Pfam annotation: Domain name=Bowman-Birk_leg; Domain location=50-75; Score=3.3; E_value=2.3; Accession=PF00228.12; Description=Bowman -Birk serine protease inhibitor family
  Pfam annotation: Domain name=Bowman-Birk_leg; Domain location=77-101; Score=0.8; E_value=5.6; Accession=PF00228.12; Description=Bowman-Birk serine protease inhibitor family
  Pfam module annotation: Pfam domain module=Bowman-Birk_leg::Bowman -Birk_leg::Bowman-Birk_leg; Domain location=140-165::50-75::77-101
MKISSGTMGTSPIVVLATLVVAGLAATAAARPSAHANPIRLPTSGRPWECCDYVVRDPNFRSGRWQCNDVADACSPNCHECEASPAGDGGYVCRDWIVSLLEPPVCTPRPWDCCDVAVCTXGVHPVLLVRRQGGGXCPGNCKECELVESDPAPRYRCVDQFHGYPGPKCTPWMISKGN

SEQ ID NO: 110173 - protein, 110 aa, Setaria italica
  Transcript Sequence Number=SeqID_44199
  Gene Ontology: Mol. function=zinc ion binding; Cellular component =intracellular
  Homolog annotation: Hit_ID=B6TH99; Match level="QueryCoverage=93%, HitCoverage=37%, E-value=2e-18, Identity=43%"; Hit description=B-box zinc finger family protein
  Pfam annotation: Domain name=zf-B_box; Domain location=3-46; Score =31.2; E_value=4.2e-06; Accession=PF00643.16; Description=B-box zinc finger
DSPARRVQESDAYFFCLEDRALLCRSCDVAVHTANTFVSAHRRFLLTGVQVGQELDDPAPEPPETSPPPPTKSDPAPPLFGESDFSWAAGVTGTLADWSVVNEQFGGSLL

SEQ ID NO: 110174 - protein, 438 aa, Setaria italica
  Transcript Sequence Number=SeqID_44200
MEECRTEDDSTTNRVNGNAHIVVEDDIVEVSHENGRDQQFTDAESAHPFEGSVSSVDDGNEKLNQSFQRDDLIADVTEKMEEGCMEDDNVNSYVHDIENLLFSNEDISDRPCGNEGLMADCRAGENEESHMDDDNMPNTVDADENVAVADDHIAERADNDEAPLHSGDMANADGKDWQSLEAEGTHLGEEVLSSLNTGHIKSEQGLQQNELIYDGTKEKEEADMDDGNASATVASFSSLSYKRTQHKVPSFNKNKEEISYGYLASQLRQGLSLDSEDFKSIQNFIESQVDGTSSSRSSGSPSQGVLGPRTSNKFNNIVRHEHLKKMDELRDQLSRLSSQRVSEKSFQKRDPEYQQQSNSCDVEQLLQSVDGDSIPSSCALESYYGHGRPPPRYQPSNPFSPAHAYTHCHFGHAQTRIPHNYDPWEFNSYYQSSYAEST

SEQ ID NO: 110175 - protein, 85 aa, Setaria italica
  Transcript Sequence Number=SeqID_44201
RLSSIIFKDFGTKHIPDTEVHIFNETTNMSKVWIRFFLVNCKRIPMCCFLCFYIHSVRCICTLCIFPHCIRSYASKHIGHSLPTQ

SEQ ID NO: 110176 - protein, 71 aa, Setaria italica
  Transcript Sequence Number=SeqID_44202
  Gene Ontology: Mol. function=ribonucleoside-diphosphate reductase activity; Cellular component=cytoplasm; Biological process =deoxyribonucleoside diphosphate metabolic process
  Homolog annotation: Hit_ID=P49730; Match level="QueryCoverage=81%, HitCoverage=17%, E-value=2e-21, Identity=79%"; Hit description =Ribonucleoside-diphosphate reductase small chain
MPSAPALVPACDAEEPLLAESSDRFSMFPIRYPQIWEFYKKAVASFWTAEEVDLSADARHWDALSPDERHF

SEQ ID NO: 110177 - protein, 104 aa, Setaria italica
  Transcript Sequence Number=SeqID_44203
  Gene Ontology: Mol. function=ribonucleoside-diphosphate reductase activity; Cellular component=cytoplasm; Biological process =deoxyribonucleoside diphosphate metabolic process
  Homolog annotation: Hit_ID=P49730; Match level="QueryCoverage=99%, HitCoverage=31%, E-value=3e-43, Identity=84%"; Hit description =Ribonucleoside-diphosphate reductase small chain
EIVADAVDIEREFVCDALPVALVGMNGALMSQYIEFVADRLLMALGCKKMYNAANPFDWMELISLQGKTNFFEKRVGDYQKASVMSSLNGGGAANHVFSIDEDF

SEQ ID NO: 110178 - protein, 378 aa, Setaria italica
  Transcript Sequence Number=SeqID_44204
  Gene Ontology: Mol. function=ribonucleoside-diphosphate reductase activity; Cellular component=cytoplasm; Biological process =deoxyribonucleoside diphosphate metabolic process
  Homolog annotation: Hit_ID=P49730; Match level="QueryCoverage=86%, HitCoverage=98%, E-value=1e-158, Identity=83%"; Hit description =Ribonucleoside-diphosphate reductase small chain
  Pfam annotation: Domain name=Ribonuc_red_sm; Domain location=54-335; Score=533.5; E_value=2.5e-157; Accession=PF00268.13; Description =Ribonucleotide reductase, small chain
  Subcellular localization annotation: CTP_CleavageSite=49; ConfidenceScore=5.52e-01
PQPYKSRASPLHSVTHPSHQKSSPQIPHCPKPNQFLRPTMPAAPTLVPACDAEEPLLAESSDRFSMFPIRFPQIWEFYKKAVASFWTAEEVDLSADARHWDEALSPDERHFISHVLAFFAASDGIVLENLASRFMSDVQVAEARAFYGFQIAIENIHSEMYSLLLETYIRDGAEKDRLFRAIDTVPAVRRKADWAMRWIDGGERFAERLVAFACVEGIFFSGSFCAIFWLKKRGLMPGLTFSNELISRDEGLHCDFACLLYDLLRSKLDEPRVREIVADAVDIEREFVCDALPVALVGMNGALMSQYIEFVADRLLMALGYKKMYNAANPFDWMELISLQGKTNFFEKRVGDYQKASVMSSLNGGGAANHVFSVDEDF

SEQ ID NO: 110179 - protein, 79 aa, Setaria italica
  Transcript Sequence Number=SeqID_44205
KFEDSSSNRESAGSFILGHLLHCGRWRRTRLKQRWSATVTGTGCSCNGLMCHFIFFSGVPGQELGCKSTVSIKIQHKFP

SEQ ID NO: 110180 - protein, 117 aa, Setaria italica
  misc_feature (1)..(1): Xaa can be any naturally occurring amino acid
  Transcript Sequence Number=SeqID_44206
XTRYLLVCLQAAACAPAGFSPDPDSDSDRQRAPPVRGPPLRKEESQGSLVLSKFHQANTVRRIHANTVAVAEVGQALAVEGGSGGERGRNPRAALQRRAAPRTDRFPLSVPGDEPAA

SEQ ID NO: 110181 - protein, 94 aa, Setaria italica
  Transcript Sequence Number=SeqID_44207
TGKEVNQKSGSPRLRLRLLQLQSQRPPKPYQMSPYDPLPMSFTYITSRVVVNWTTIGWHLELVRHNKNHKYMSSTTIFGTKLCITPSQPLITHP

SEQ ID NO: 110182 - protein, 57 aa, Setaria italica
  Transcript Sequence Number=SeqID_44208
TYFFTLFFRRTTFHSLQNIVEVKFLGLVIGFFYDCWIWHCNPRLKFCQTTNSLCAAY

SEQ ID NO: 110183 - protein, 402 aa, Setaria italica
  Transcript Sequence Number=SeqID_44209
  Gene Ontology: Mol. function=hydrolase activity
  Homolog annotation: Hit_ID=B4FGF9; Match level="QueryCoverage=85%, HitCoverage=82%, E-value=0.0, Identity=92%"; Hit description=Kelch motif family protein
  Pfam annotation: Domain name=Kelch_1; Domain location=148-196; Score =30.3; E_value=7.8e-06; Accession=PF01344.17; Description=Kelch motif
  Pfam annotation: Domain name=Kelch_1; Domain location=252-313; Score =17.1; E_value=0.03; Accession=PF01344.17; Description=Kelch motif
  Pfam annotation: Domain name=Kelch_1; Domain location=317-369; Score =10.9; E_value=0.17; Accession=PF01344.17; Description=Kelch motif
  Pfam annotation: Domain name=Kelch_1; Domain location=98-144; Score =19.8; E_value=0.011; Accession=PF01344.17; Description=Kelch motif
  Pfam annotation: Domain name=Kelch_2; Domain location=148-196; Score =5.9; E_value=7; Accession=PF07646.7; Description=Kelch motif
  Pfam annotation: Domain name=Kelch_2; Domain location=198-250; Score =30.6; E_value=6.4e-06; Accession=PF07646.7; Description=Kelch motif
  Pfam annotation: Domain name=Kelch_2; Domain location=251-313; Score =8.0; E_value=3.8; Accession=PF07646.7; Description=Kelch motif
  Pfam annotation: Domain name=Kelch_2; Domain location=317-369; Score =8.0; E_value=3.7; Accession=PF07646.7; Description=Kelch motif
  Pfam annotation: Domain name=Kelch_2; Domain location=98-144; Score =10.6; E_value=1.7; Accession=PF07646.7; Description=Kelch motif
  Pfam module annotation: Pfam domain module=Kelch_1::Kelch_1::Kelch _1::Kelch_1::Kelch_2::Kelch_2::Kelch_2::Kelch_2::Kelch_2; Domain location=148-196::252-313::317-369::98-144::148-196::198-250::251 -313::317-369::98-144
  Subcellular localization annotation: CTP_CleavageSite=59; ConfidenceScore=5.15e-01
MARPAAKARPPKHLVALAVVAVLGLVLVADYLWASSSSSAVWSSRLTLPTSPAVQAPPVAKENTKDKKPVGSMDINATFADLPAPELEWEGMAEAPVARLDGAAIQIKNLLYVFAGYGTINHVHSHVDIYNFSDNTWGGRFDMPKDMAHSHLGMVTDGRFIYVVTGQYGPQCRGPTARNFVLDTETKEWHDLPPLPVPRYAPATQLWRGRLHVMGGSKEDRHEPGLEHWSLAVKDGKALEKEWRSEIPIPRGGPHRACVVANDKLFVIGGQEGDFMAKPGSPIFKCVRRSEVVYSNVYMLDDGMTWKELPHMPKPDSHIEFAWVNVNNSLIIAGGTTDKHPITKKMVLVGEVFRFNLDTLEWSVIGRLPFRIKTTLVGYWDGWLYFTSGYFLGFVLFYFSLF

SEQ ID NO: 110184 - protein, 127 aa, Setaria italica
  Transcript Sequence Number=SeqID_44210
  Gene Ontology: Mol. function=transferase activity, transferring glycosyl groups; Cellular component=integral to Golgi membrane; Biological process=protein amino acid glycosylation
  Homolog annotation: Hit_ID=Q4JEY6; Match level="QueryCoverage=86%, HitCoverage=28%, E-value=7e-55, Identity=90%"; Hit description =Sialyltransferase-like protein
NGSARLSEADLAALAALQGRFSKCVDANGLGLKAVSGKDYCRVVIQYPSDTVSKWMDPSTGEVEGLSFEFNLCEAVASWEQVRNSTTVLTKEYIDALPNGWEEYAWRRINKGIHLNKCQNRTLCMEK

SEQ ID NO: 110185 - protein, 68 aa, Setaria italica
  Transcript Sequence Number=SeqID_44211
  Pfam annotation: Domain name=Ribosomal_L31; Domain location=1-61; Score=-16.9; E_value=0.096; Accession=PF01197.10; Description =Ribosomal protein L31
MRKGLHPQMQWISYVTQSGRLINIMMTKVNHTGKVYHMRAKRQMAQSLGQIAKFKRRYEQEAEENKDK

SEQ ID NO: 110186 - protein, 248 aa, Setaria italica
  misc_feature (15)..(15): Xaa can be any naturally occurring amino acid
  misc_feature (227)..(227): Xaa can be any naturally occurring amino acid
  misc_feature (231)..(231): Xaa can be any naturally occurring amino acid
  Transcript Sequence Number=SeqID_44212
  Gene Ontology: Mol. function=phosphotransferase activity, alcohol group as acceptor; Cellular component=chromosome; Biological process= response to DNA damage stimulus
  Homolog annotation: Hit_ID=Q5Z987; Match level="QueryCoverage=98%, HitCoverage=8%, E-value=1e-83, Identity=63%"; Hit description =Serine/threonine-protein kinase ATR
HQVYADLISMLKLMXTDGHAVTQTTSDYKIKCLLMQVIAKLGNRLNAGCDLEVLDLAIHNGIAEIQNEAIMSLPIIVLYSGPTMLGAMFKKLDSMVALGLEKVGKSIAVSLGFLSCLNGTTDYTKNVGNHCKLFLDKHSEQHTSTLDLLLRGFWCPQCDIRSRIVCNEEQISILDSALLQVENVDFNVNISKAHTLFFKLLYADTFEESIISSVEVLPRILRHSSKXVVTXLEMRTQWVQCFEFLLLH

SEQ ID NO: 110187 - protein, 185 aa, Setaria italica
  misc_feature (34)..(34): Xaa can be any naturally occurring amino acid
  Transcript Sequence Number=SeqID_44213
  Gene Ontology: Cellular component=chloroplast
  Subcellular localization annotation: CTP_CleavageSite=33; ConfidenceScore=5.24e-01
MKHLLLPSPLPFLLHRPSKPLLLHPRRRLGFISXAASGGSSGEPASSEPATDTVTQPSPPAAAAPSSAKPTGIKNRLKARNQARRFQLDAPPEEVTPKKKATVAAPRREKQRERKEWEEMSLPEKAVELYVGEKGLLFWLNKFAYASIFIMVGAWILFRFVGPSLGFYQLDAPPLPPTAVFGGSP

SEQ ID NO: 110188 - protein, 73 aa, Setaria italica
  Transcript Sequence Number=SeqID_44214
EATPMATPNPTTKSQPDPPPPTPRPPIPTRDPVAPLDDLHPHCSPYLEDPTLKEIKSSHGAAPAGHDCYLVSP

SEQ ID NO: 110189 - protein, 76 aa, Setaria italica
  Transcript Sequence Number=SeqID_44215
ELLRMKDQNRKFLPGLRLCISYFAMPMRLVVTTKLMMLHLLKHCYNCSCPSLDNLNNIVVFLIFFGETHYFCLYMN

SEQ ID NO: 110190 - protein, 131 aa, Setaria italica
  Transcript Sequence Number=SeqID_44216
  Gene Ontology: Mol. function=dihydrolipoyl dehydrogenase activity; Cellular component=cytoplasm; Biological process=cell redox homeostasis
  Homolog annotation: Hit_ID=A8E4J7; Match level="QueryCoverage=97%, HitCoverage=22%, E-value=2e-62, Identity=91%"; Hit description =Dihydrolipoyl dehydrogenase
  Pfam annotation: Domain name=Pyr_redox_dim; Domain location=7-112; Score=111.1; E_value=3.8e-30; Accession=PF02852.14; Description =Pyridine nucleotide-disulphide oxidored
VYNYNTTEISMVGLTEPQAREKADKEGFEVDVVKTSFKANTKALAENEGDGIAKLIYRPDTGEILGVHILGLHAADLIHEASNAIALGTRVQDIKLAVHAHPTLSEVLDELFKAAKVNSGVSHSVNEPVAA

SEQ ID NO: 110191 - protein, 471 aa, Setaria italica
  Transcript Sequence Number=SeqID_44217
  Gene Ontology: Mol. function=dihydrolipoyl dehydrogenase activity; Cellular component=cytoplasm; Biological process=cell redox homeostasis
  Homolog annotation: Hit_ID=Q75M05; Match level="QueryCoverage=97%, HitCoverage=77%, E-value=0.0, Identity=85%"; Hit description =Dihydrolipoyl dehydrogenase
  Pfam annotation: Domain name=DAO; Domain location=42-261; Score= -32.4; E_value=0.0015; Accession=PF01266.16; Description=FAD dependent oxidoreductase
  Pfam annotation: Domain name=FAD_binding_2; Domain location=42-379; Score=-124.2; E_value=0.0027; Accession=PF00890.16; Description=FAD binding domain
  Pfam annotation: Domain name=GIDA; Domain location=42-387; Score= -214.6; E_value=0.0011; Accession=PF01134.14; Description=Glucose inhibited division protein A
  Pfam annotation: Domain name=HI0933_like; Domain location=41-372; Score=-264.2; E_value=0.021; Accession=PF03486.6; Description=HI0933- like protein
  Pfam annotation: Domain name=Pyr_redox; Domain location=214-315; Score=85.9; E_value=1.4e-22; Accession=PF00070.19; Description =Pyridine nucleotide-disulphide oxidore
  Pfam annotation: Domain name=Pyr_redox_2; Domain location=42-366; Score=167.8; E_value=3.1e-47; Accession=PF07992.6; Description =Pyridine nucleotide-disulphide oxidore
  Pfam annotation: Domain name=Pyr_redox_dim; Domain location=395-466; Score=2.7; E_value=5.1e-05; Accession=PF02852.14; Description =Pyridine nucleotide-disulphide oxidored
  Pfam module annotation: Pfam domain module=DAO::FAD_binding _2::GIDA::HI0933_like::Pyr_redox::Pyr_redox_2::Pyr_redox_dim; Domain location=42-261::42-379::42-387::41-372::214-315::42-366::395-466
LRGEALACPSLRISQAPARLAVGRAAAATNGAVAGSGGFDYDLVIIGAGVGGHGAALHAVEEGLKTAIIEGDVVGGTCVNRGCVPSKALLAVSGRMRELHDEHHMKSLGLQVSSTGYDRQAVADHANNLASKIRSNLTNSMKALGVDILTGVGTIVGKQKVRYGKVGFPDKEITARNIIIATGSTPFVPKGIEIDGKTVFTSDHALKLESVPDWIAIVGSGYIGLEFSDVYTALGSEVTFVEALDQLMPGFDPEIAKLAQRVLINPRKIDYHTSVFASKITPAKDGKPVLIELIDAKTKEHKETLEVDAALIATGRAPFTKGLGLENINVVTQRGFVPVDERMRVMDADGNVVPNLYCIGDANGKLMLAHAASAQGISVVEQISGRDHILNHLSIPAACFTHPEISMVGLTEPQAREKADKEGFEVDVVKTSFKANTKALAENEGDGIAMLIYRQVTGPEQRVENYFRGYN

SEQ ID NO: 110192 - protein, 51 aa, Setaria italica
  Transcript Sequence Number=SeqID_44218
YVVLLSGVFRNSSQLSSIKNLLAMVERLVQWNLRHHGVQRCWLCAISWHVH

SEQ ID NO: 110193 - protein, 174 aa, Setaria italica
  misc_feature (23)..(23): Xaa can be any naturally occurring amino acid
  misc_feature (92)..(92): Xaa can be any naturally occurring amino acid
  misc_feature (105)..(105): Xaa can be any naturally occurring amino acid
  misc_feature (146)..(146): Xaa can be any naturally occurring amino acid
  Transcript Sequence Number=SeqID_44219
  Gene Ontology: Mol. function=nucleic acid binding
  Homolog annotation: Hit_ID=B6T781; Match level="QueryCoverage=98%, HitCoverage=55%, E-value=2e-72, Identity=71%"; Hit description =Nucleic acid binding protein
KGPKLFQNGAADAGNKNGAPKTXVEERIEEYNKARARIFNGSISADTDAASVLGALSTGRDEPVNVEPPADEIKVSTMNSRSRVAVFKDTEXDRSDPDYDRNYKXYGVGYVQSPGMSTNQPTVYFGQPDLSMGSSSGAAVYPHWPXPAMMYPHCYDNTGPMMSQVPLYQSFNHG

SEQ ID NO: 110194 - protein, 194 aa, Setaria italica
  misc_feature (117)..(117): Xaa can be any naturally occurring amino acid
  misc_feature (133)..(133): Xaa can be any naturally occurring amino acid
  misc_feature (172)..(172): Xaa can be any naturally occurring amino acid
  Transcript Sequence Number=SeqID_44220
  Gene Ontology: Mol. function=nucleic acid binding
  Homolog annotation: Hit_ID=B6T781; Match level="QueryCoverage=98%, HitCoverage=53%, E-value=4e-92, Identity=86%"; Hit description =Nucleic acid binding protein
KLVAADAGNKNGAPKTVEERIEEYNKARARIFNGSISADTDAASVLGALSTGRDEPVNVEPPADEIKVSTMNSRSRVAVFKDTEKDRSDPDYDRNYKRYVRSPVPDFSLNPGAFNFXVVPQFMQYGVGYVQSXGMSTNQPTVYFGQPDLSMGSSSGAAVYPHWPPPAMMYPXHCYDNTGPMMSQVPLYQSFNHG

SEQ ID NO: 110195 - protein, 235 aa, Setaria italica
  Transcript Sequence Number=SeqID_44221
  Gene Ontology: Mol. function=nucleic acid binding
  Homolog annotation: Hit_ID=B6T781; Match level="QueryCoverage=90%, HitCoverage=60%, E-value=2e-90, Identity=78%"; Hit description =Nucleic acid binding protein
AAVAADEGARAAEAVVAVDERVASNVDPFLVEALDNPRHRLMVLRMELDIQKFMQNPQLQEFEFQNFPTSYLRCAAHRVAQHYGLETTVADSLVDGSVSRIVARKTPESRYPPIALSEVSSKQARNDHEAAEKLKFVIYQRPKVFQNGAADAGNKNGAPKTVEERIEEYNKARARIFNGSISADTDAASVLGALSTGRDEPVNVEPPADEIKVIMLNSRSRITTIFFSILENCDP

SEQ ID NO: 110196 - protein, 266 aa, Setaria italica
  misc_feature (6)..(6): Xaa can be any naturally occurring amino acid
  Transcript Sequence Number=SeqID_44222
  Gene Ontology: Mol. function=nucleic acid binding
  Homolog annotation: Hit_ID=B6T781; Match level="QueryCoverage=100%, HitCoverage=75%, E-value=1e-128, Identity=84%"; Hit description =Nucleic acid binding protein
LRCAAXRVAQHYGLETTVADSLVDGSVSRIVARKTPESRYPPIALSEVSSKQARNDHEAAEKLKFVIYQRPKVFQNGAADAGNKNGAPKTVEERIEEYNKARARIFNGSISADTDAASVLGALSTGRDEPVNVEPPADEIKVSTMNSRSRVAVFKDTEKDRSDPDYDRNYKRYVRSPVPDFSLNPGAFNFVVPQFMQYGVGYVQSPGMSTNQPTVYFGQPDLSMGSSSGAAVYPHWPPPAMMYPHCYDNTGPMMSQVPLYQSFNHG

SEQ ID NO: 110197 - protein, 63 aa, Setaria italica
  Transcript Sequence Number=SeqID_44223
SFLRRHSVLPFSLPLIPNSSLDSLPPLSAANNWYQRHRFLVKFAINRVLHPLIRTGNEFGSSI

SEQ ID NO: 110198 - protein, 203 aa, Setaria italica
  misc_feature (83)..(83): Xaa can be any naturally occurring amino acid
  misc_feature (155)..(155): Xaa can be any naturally occurring amino acid
  misc_feature (174)..(174): Xaa can be any naturally occurring amino acid
  Transcript Sequence Number=SeqID_44224
  Gene Ontology: Mol. function=cysteine-type peptidase activity; Cellular component=nucleus; Biological process=biosynthetic process
  Homolog annotation: Hit_ID=Q2QMI5; Match level="QueryCoverage=98%, HitCoverage=8%, E-value=8e-86, Identity=72%"; Hit description =Transposon protein, putative, CACTA, En/Spm sub-class
  Pfam annotation: Domain name=Transposase_21; Domain location=8-201; Score=318.0; E_value=1.9e-92; Accession=PF02992.6; Description =Transposase family tnp2
FRNKAHAKLMRWRKEERKQDEKLRHPADGSQWRNVDREFPCFENDASKIRFGLSTDGMNLFGEFGSAHSTWLVTLYIFNLPYXLCMKRKFIMMSIIIQGPKQPGNDIDVYLRPLVDELLLFWKEESVPVWDNDKQETFILKALLLVTINDWPTLXNLSGQTNKGYRAFTHCLDXYLKHCRKVVYMGHRRFLPTNHPLRKKESF

SEQ ID NO: 110199 - protein, 140 aa, Setaria italica
  Transcript Sequence Number=SeqID_44225
  Gene Ontology: Mol. function=iron ion binding; Cellular component =integral to membrane; Biological process=transport
  Homolog annotation: Hit_ID=Q7X660; Match level="QueryCoverage=100%, HitCoverage=19%, E-value=2e-60, Identity=80%"; Hit description =Probable metal-nicotianamine transporter YSL11
AWAGASHGGVLVGLAACGVMMSIVGTASDLMQDFKTGYLTLASPRSMFISQVIGTAMGCVIAPCVFWLFYKSFDIGASDGAYPAPYTIMYRNMAILGVDGLSLLPKHCLTLCYIFFAISFAINLIKDQVPEKVAKFIPIP

SEQ ID NO: 110200 - protein, 353 aa, Setaria italica
  Transcript Sequence Number=SeqID_44226
  Gene Ontology: Mol. function=transporter activity; Cellular component= intracellular; Biological process=transport
  Homolog annotation: Hit_ID=Q1EPB6; Match level="QueryCoverage=98%, HitCoverage=59%, E-value=1e-82, Identity=47%"; Hit description =Phosphatidylinositol transfer protein, putative
NDNYPETLYQLYIINAGQGFKMLWGTIKSFLDPETASKIHVLGSKYQAKLLEIVDSSELPDFLGGKCRCEEHGGCSKSDKGPWKDPEIIKRVLNGEANYGRRVLAVSNINQKEVGCTEPQHTTGKGNDASAESSSEVEDVSSPTASVNPIIIPNLTHVHESKFPGHASTSDAPPIVEDNIPVVDKVVDACSDPRNSSMASTSGSFSLRNTPATLGGLKTQIVAWLTVLIVSLLAFLRSVPSIMTKRLTNQVITCDHYSAEYPPQGNTGNGTLTSVLRRLGELEEKVQTLEVKPHQVPFEEELLNAAIRRVDALEAELISMKKALYEALIRQDELLAYIDRQQQVKFCRKKLCF

SEQ ID NO: 110201 - protein, 62 aa, Setaria italica
  Transcript Sequence Number=SeqID_44227
KNILSHIFKTLYLLTFNSNIQNFVIRYQKLRNCIHSTFYLHSFQFTYLELHTQILKTFKSHT

SEQ ID NO: 110202 - protein, 560 aa, Setaria italica
  misc_feature (385)..(385): Xaa can be any naturally occurring amino acid
  Transcript Sequence Number=SeqID_44228
  Pfam annotation: Domain name=zf-LSD1; Domain location=346-377; Score =10.6; E_value=0.094; Accession=PF06943.4; Description=LSD1 zinc finger
MDSSCIADAPSTEHGRNGTGSNESGDVVPPEKNDLEVENKESKDHHDFEGQDTNSRMEDPADLENSNGKSTCGDSGEVENHIMEQPAENSETCRVREDDGTECHLNASENNMLSSEMSKAAVNMQDAEQKESSQEQKESGQAEHAANKKSYLVRVLSRSCDLRATVNSLDFHSARTSLQSKSFRASEPLQSKIMNTVDELKDDLSELFHKPSESKPKAYPPRPSKQDGHMTRAALTSSAPLAAYHPAAKHSGYAARISRSGQVAPRGLPSLRYRRHRVYPCHHNVQMEMRPCRHECCHSCQPPCYRSCKQEPAAMHKPPPAKEIKRRPVPRNHCRPVLRGAPFVICSNCVRLVQLPTDFAVPSRGTRRLQCGSCSEVLSYSYRDXSRKKPQSPFGGDEYSTDDYEAHVHHQAAADDHHYAAAGFEQADPVSYSEEYGLSFGVSQSTSTEDGQPLYVSRNSSFNTVDERAGGRDGKLHRLMGYSSASELLRHSPDLFESFDGRAPNNARAHHVVDRKGKGVCHGGEPDDAGKRSMARSGGLPLQGILKKGIHSLESLKLRS

SEQ ID NO: 110203 - protein, 127 aa, Setaria italica
  Transcript Sequence Number=SeqID_44229
  Gene Ontology: Mol. function=protein disulfide oxidoreductase activity; Cellular component=chloroplast; Biological process =glycerol ether metabolic process
  Homolog annotation: Hit_ID=B6SHQ3; Match level="QueryCoverage=99%, HitCoverage=72%, E-value=6e-58, Identity=85%"; Hit description =Thioredoxin M-type
  Pfam annotation: Domain name=Redoxin; Domain location=11-124; Score= -16.9; E_value=0.086; Accession=PF08534.2; Description=Redoxin
  Pfam annotation: Domain name=Thioredoxin; Domain location=20-123; Score=142.2; E_value=1.6e-39; Accession=PF00085.12; Description =Thioredoxin
  Pfam module annotation: Pfam domain module=Redoxin::Thioredoxin; Domain location=11-124::20-123
SSRGAAVVCQAQGGQDTAIQVPDVSKSTWQSLVVESELPVLVQFWASWCGPCKMIDPIVGKLSKEYEGKLKCYKLNTDDNPDIATQLGIRSIPTMMIFKNGEKKEAVIGAVPESTLITCIEKYVDGR

SEQ ID NO: 110204 - protein, 78 aa, Setaria italica
  Transcript Sequence Number=SeqID_44230
PIYYGSYPKDELIICDSYMTRNYHKNESIQRIVGNARRTVPSLVFANYPNPDLNISTRVQLPFKATDNPRNKEQIRAR

SEQ ID NO: 110205 - protein, 136 aa, Setaria italica
  misc_feature (113)..(113): Xaa can be any naturally occurring amino acid
  Transcript Sequence Number=SeqID_44231
VRRLGAEQRRRLPAMASSVVDAACATTARRPDLRITPSSSRRSCQHTLIHVELLHVLAVRCQVPPPAAAMAANLARSCALPSSPVTALDTVPSAGSVPVLIRAQQGAQQTQNXRQGRGTMAGPSWPSQSYARLLVR

SEQ ID NO: 110206 - protein, 119 aa, Setaria italica
  Transcript Sequence Number=SeqID_44232
  Gene Ontology: Mol. function=protein serine/threonine kinase activity; Cellular component=extracellular region; Biological process=protein amino acid phosphorylation
  Pfam annotation: Domain name=LRR_1; Domain location=26-48; Score=0.6; E_value=2.4e+02; Accession=PF00560.25; Description=Leucine Rich Repeat
  Pfam annotation: Domain name=LRR_1; Domain location=50-72; Score=7.7; E_value=10; Accession=PF00560.25; Description=Leucine Rich Repeat
  Pfam annotation: Domain name=LRR_1; Domain location=74-95; Score=8.5; E_value=7.2; Accession=PF00560.25; Description=Leucine Rich Repeat
  Pfam annotation: Domain name=LRR_1; Domain location=99-118; Score =1.3; E_value=1.7e+02; Accession=PF00560.25; Description=Leucine Rich Repeat
  Pfam module annotation: Pfam domain module=LRR_1::LRR_1::LRR_1::LRR _1; Domain location=26-48::50-72::74-95::99-118
DGLTRSWDNTTDCCKWEGITCSSDNTVTGIFLASRSLQGHISPSLGNLAGLLHLNMSHNLLSGVLPMELVSSNSIIVLDVSFNQLSGNLQELQSSTLQPLQVLNISSNLFKGRFPSTTW

SEQ ID NO: 110207 - protein, 129 aa, Setaria italica
  Transcript Sequence Number=SeqID_44233
  Subcellular localization annotation: CTP_CleavageSite=49; ConfidenceScore=5.30e-01
TGPINLNEGTEAPTPTAHHNPSPVVSSPPSPAASELRTEQSRPRVLRPRASRHEPPRPPQPASVHGPRSPTAAACRPSPAPVKPPASLPILWRSPAGARALPPPPSPAPASSCSCSSSSPPPPSSPPLP

SEQ ID NO: 110208 - protein, 473 aa, Setaria italica
  Transcript Sequence Number=SeqID_44234
  Gene Ontology: Mol. function=ferrochelatase activity; Cellular component=chloroplast; Biological process=porphyrin biosynthetic process
  Homolog annotation: Hit_ID=B4FK03; Match level="QueryCoverage=100%, HitCoverage=100%, E-value=0.0, Identity=86%"; Hit description =Ferrochelatase
  Pfam annotation: Domain name=Ferrochelatase; Domain location=97-421; Score=596.6; E_value=2.6e-176; Accession=PF00762.11; Description =Ferrochelatase
  Subcellular localization annotation: CTP_CleavageSite=73; ConfidenceScore=5.16e-01
MERGVLGSRCAAGAGQILGIKSAAATSCGKTTSTSFAGSTKHDVKPLQLAANGSSCLANASPVLKKQRNLSVRCSSANVVNTFDDAKGVSSSVVEEKIGVLLLNLGGPETLDDVQPFLFNLFADPDIIRLPRLFRFLQRPLAKLISTFRAPKSKEGYASIGGGSPLRKITDEQANALKIALEKKNLQANIYVGMRYWYPFTEEAIEQIKKDKITKLVVLPLYPQYSISTSGSSIRVLQNIVKEDSFFAGLPISIIESWYQRDGYVKSMADLIEKEISAFSNPEEVMIFFSAHGVPLTYVEDAGDPYRDQMEDCIALIMGELRSRGILNSHTLAYQSRVGPVQWLKPYTDEVLVELGQKGVKSLLAVPVSFVSEHIETLEEIDMEYKELALESGIENWGRVPALGCTSSFISDLADAVVEALPSASALVTRKPDDTDSDIDLMHYLTKMFFGSILAFILLLSPRLISAFRNTML

SEQ ID NO: 110209 - protein, 346 aa, Setaria italica
  misc_feature (211)..(211): Xaa can be any naturally occurring amino acid
  Transcript Sequence Number=SeqID_44235
  Gene Ontology: Mol. function=transferase activity; Cellular component= CAAX-protein geranylgeranyltransferase complex; Biological process =protein amino acid geranylgeranylation
  Homolog annotation: Hit_ID=B9T226; Match level="QueryCoverage=90%, HitCoverage=84%, E-value=1e-117, Identity=65%"; Hit description =Geranylgeranyl transferase type I beta subunit, putative
  Pfam annotation: Domain name=Prenyltrans; Domain location=127-171; Score=20.7; E_value=0.0062; Accession=PF00432.13; Description =Prenyltransferase and squalene oxidase re
  Pfam annotation: Domain name=Prenyltrans; Domain location=176-220; Score=55.9; E_value=1.5e-13; Accession=PF00432.13; Description =Prenyltransferase and squalene oxidase re
  Pfam annotation: Domain name=Prenyltrans; Domain location=236-279; Score=51.1; E_value=4.2e-12; Accession=PF00432.13; Description =Prenyltransferase and squalene oxidase re
  Pfam annotation: Domain name=Prenyltrans; Domain location=284-328; Score=40.4; E_value=7.4e-09; Accession=PF00432.13; Description =Prenyltransferase and squalene oxidase re
  Pfam annotation: Domain name=Prenyltrans; Domain location=53-120; Score=8.5; E_value=0.53; Accession=PF00432.13; Description =Prenyltransferase and squalene oxidase re
  Pfam module annotation: Pfam domain module=Prenyltrans::Prenyltrans::P renyltrans::Prenyltrans::Prenyltrans; Domain location=127-171::176 -220::236-279::284-328::53-120
MGMRDFARAHHVAFFDAMATELPDDYASQEVNHLTLGYFAVGGLSLLRELDRVNKDEIAKWVLSFQVHPEAHGDEDNGLFYGFCGSGSTKFPLPNVKEPCHSGSHLASTYSALSILKIVGYDLANIDSKALLGQSMKKLQQPDGSFMPIHIGAETDLRFVYCAAAICSMLGDWTGMDKLKAKEYILNCQSYDGGFGMVPDSESHGGGTFCXAVAALHLMGFLQEDLACNLRDSASIDIRMLLEWCLQRQVTDGGFQGRRNKPSDTCYAFWVGGVLKIIGAYHLIDRCALREFLLTCQSPYGGFTKFPHIRIPDIYHSYYGLAALALLEEEGLEPLCVELGILSAAL

SEQ ID NO: 110210 - protein, 93 aa, Setaria italica
  Transcript Sequence Number=SeqID_44236
  Subcellular localization annotation: CTP_CleavageSite=42; ConfidenceScore=5.07e-01
MDRIRDSRRGGVSVAGGPQPRRRLRSNGGGSGGGGAPRDSPRSERRRGERLMLNGGGGGAGRDDADDTSDESLGDDDDDAEEELAPRYQPSQR

SEQ ID NO: 110211 - protein, 333 aa, Setaria italica
  Transcript Sequence Number=SeqID_44237
  Gene Ontology: Mol. function=protein binding
  Homolog annotation: Hit_ID=B9SBN8; Match level="QueryCoverage=72%, HitCoverage=71%, E-value=1e-107, Identity=76%"; Hit description =Protein binding protein, putative
  Subcellular localization annotation: CTP_CleavageSite=58; ConfidenceScore=5.74e-01
MAALAHQVGANQPPLLSSPARLPRSSNARLLVLPAAAASLGGRGVRLGARRAAAVVVRASSEAKAEAETKTEGGGGEEEEERPYEEYEITIEKPYGLKFAKGRDGGTYIQAIFPGGAAEKTGQFTVGDKVLATSAVFGDEIWPAAGYGQTMYSIRQRSGPLYMKMERRFGKWDGAGELSEKEIIRAERNSGVVSGRVREIQLQNYQRKMEQKMQREEDLRTGLRLYKDGKYEEALEKFESVLGSKPESNEASIASYNVACCYSKLDRIQAGLSALEDALKAGYEDYKRIRTDPDLENLRKSEQFDPLMKNYDESFINENALNAIKSLFRFGKN

SEQ ID NO: 110212 - protein, 60 aa, Setaria italica
  Transcript Sequence Number=SeqID_44238
MAAKCAAAAADLATGRPRKRPRLGWDVAPAAEVNAPFYRLPCSPMCSLGYVLPRYGIPRR

SEQ ID NO: 110213 - protein, 92 aa, Setaria italica
  Transcript Sequence Number=SeqID_44239
EEYTTEALVLVILNSALLVPRRPMGSFPSDALLQHQNKTLATSKIYFCNIETDKQNRSIYFERKIPTATLVLVSCNIFMQIMQDWLSLNTYK

SEQ ID NO: 110214 - protein, 174 aa, Setaria italica
  misc_feature (82)..(82): Xaa can be any naturally occurring amino acid
  Transcript Sequence Number=SeqID_44240
MKIIRAKTDVRNAEVQENVKKEQTEDKVEENKNNTNNEDDDVKTARGNNEDGHDAEFAEGDEIRMEEMEDKVEEKKNNNNNXKDDDVENFDKEVACQKEDEDSHDAKVAEGDEIKMVVAKTDAGNAEVEGNGKEEKAEKTEQGKNNANIETEELIVLDKDDACMKEDKKVMNVD

SEQ ID NO: 110215 - protein, 93 aa, Setaria italica
  Transcript Sequence Number=SeqID_44241
AHVKINVYVSYEINSNSDIMTCIARMQRWYLCPTNICLCLSRSHQNKYAYTFSEPCYLPFSKAFIDAFQINQKCLSVQEIVYKVAVSLFAKRE

SEQ ID NO: 110216 - protein, 244 aa, Setaria italica
  misc_feature (21)..(21): Xaa can be any naturally occurring amino acid
  misc_feature (97)..(97): Xaa can be any naturally occurring amino acid
  Transcript Sequence Number=SeqID_44242
DDDDYFATTAPPPRPVWGAGXRGDAKDQRHDAPALEEDFESEDDGLDDEVEDDADEEHEHEAENAVPAEPTVNNAPPPPAPSKDTERQLSKKELKKXELAELDAVLAELGLGTSTNSTQDESNGKKGADQVTNGEKKEDAPAPPESKSSKKKKSKKDKSSKESKEAQDQANGSEEAAGAEPDEDTASVDVKERIKKVASMKKKKSSKEMDAAAKIAASEAAARSARFAAAKKKEKSHYNQQPLR

SEQ ID NO: 110217 - protein, 133 aa, Setaria italica
  misc_feature (15)..(15): Xaa can be any naturally occurring amino acid
  Transcript Sequence Number=SeqID_44243
SEAEFLEKYFDSARXKLPETMASLRLIGREVGDLAADLSDLSQELTKGVKSSMSIVHTADAQLPQRMPPTLPGTARRMSNQKNLAEESLLASTVRDLRELIADIRSGFGVAAGIAGLFMWASNFGSKRRKNRS

SEQ ID NO: 110218 - protein, 66 aa, Setaria italica
  Transcript Sequence Number=SeqID_44244
RRIGTHLRIGCIVRSHFRFGKSLVNICVVEACILVASYLHWIDLFSISVAYDRVVCPVFWCMTHLR

SEQ ID NO: 110219 - protein, 69 aa, Setaria italica
  Transcript Sequence Number=SeqID_44245
SGGFCWFCAKELVGVYPVYQLTLCFAPPMLLEILKVASSFFVIFWGWVWISDRDCVTCCKGFSRGWAKA

SEQ ID NO: 110220 - protein, 197 aa, Setaria italica
  misc_feature (17)..(17): Xaa can be any naturally occurring amino acid
  Transcript Sequence Number=SeqID_44246
  Gene Ontology: Mol. function=transferase activity; Cellular component= membrane
  Homolog annotation: Hit_ID=B6UFM1; Match level="QueryCoverage=100%, HitCoverage=46%, E-value=1e-94, Identity=85%"; Hit description =Exostosin-like
  Pfam annotation: Domain name=Exostosin; Domain location=1-135; Score=- 2.8; E_value=1.7e-06; Accession=PF03016.7; Description=Exostosin family
FIDDDAPDPFEARHTLXFFRVHTVRKDEGKIRAKLANILKGKDGVRFENSFATGDGIKISTEGMRSSKFCLHPAGDTPSSCRLFDAIVSHCVPVIVSSRIELPFEDEIDYSEFSLFFSVEEALRPDYLLNQLRQIPKKKWMEMWLKLKNVSRHYEFQHPPREGDAVNMIWRQVRHKIPAVNLAIHRNRRLKIPDWWG

SEQ ID NO: 110221 - protein, 96 aa, Setaria italica
  Transcript Sequence Number=SeqID_44247
  Gene Ontology: Mol. function=two-component sensor activity; Cellular component=membrane
  Homolog annotation: Hit_ID=B6SY20; Match level="QueryCoverage=94%, HitCoverage=14%, E-value=6e-38, Identity=84%"; Hit description=ATP binding protein
PHHSLQKAYLVQQTSWQNNVRMSGLVEQIRGPLSNIQTLAKMLSVHMKRTEIPYDIIEDILIQGDHLKDALQQIQEAVYLTKANIVRSSEETLKKI

SEQ ID NO: 110222 - protein, 166 aa, Setaria italica
  misc_feature (76)..(76): Xaa can be any naturally occurring amino acid
  misc_feature (156)..(156): Xaa can be any naturally occurring amino acid
  Transcript Sequence Number=SeqID_44248
  Gene Ontology: Mol. function=ATP binding; Cellular component=membrane
  Homolog annotation: Hit_ID=B6SY20; Match level="QueryCoverage=92%, HitCoverage=23%, E-value=2e-66, Identity=84%"; Hit description=ATP binding protein
YVSVIIIFLLSGRPCDLCDVLKDLVAGALPLAYKQQRTLDITGISNPLHVAVEESALRQALSNLIEGSLLRTQHGXRVQIYAGEAPAGGTLVVIDDDGPDMQYMENVRFNFQTQMRSLAPFGSDLLADDMLEDNMTWNFIAGLTVAREILENYGCXLRVISPRRPD

SEQ ID NO: 110223 - protein, 432 aa, Setaria italica
  Transcript Sequence Number=SeqID_44249
  Gene Ontology: Mol. function=ATP binding; Cellular component=membrane
  Homolog annotation: Hit_ID=B6SY20; Match level="QueryCoverage=99%, HitCoverage=68%, E-value=0.0, Identity=80%"; Hit description=ATP binding protein
  Pfam annotation: Domain name=HATPase_c; Domain location=298-421; Score=6.1; E_value=0.021; Accession=PF02518.18; Description =Histidine kinase-, DNA gyrase B-, and HSP90-like ATPase
AEAFLVKQQMEVVTEFGAIVLPMVKHPFVVGFLVAELPELHGGRAINFHTADIQLPSSTSMDKSSEITPHTKFKAWDVQTSGDQANNYSQLVNEWKNTALMISRTLAMAYVMDQKAYLVQQTSWQNNVRMSGLVEQIRGHLTDILPLAKMLSVHMKRTEIPYDIIEDILIQGDHLKDALQQIQEAVYLTKANIVRSSEETLKKIQGSPHPSRALSDYGSVHGNDSQNVDPVLALNSDKDDMVMPMPPLWLVPLQHQDARPCDLCDVLKDLVAGALPLAYKQQRTLDITGISNPLHVAVEESALRQALSNLIEGSLLRTQHGGRVQIYAGEAPAGGTLVVIDDDGPDMQYMTQMRSLAPFGSDLLADDMLEDNMTWNFIAGLTVAREILENYGCVLRVISPRRPDAVIGTGGSRIEIWLPSFQTEVADITEEA

SEQ ID NO: 110224 - protein, 100 aa, Setaria italica
  Transcript Sequence Number=SeqID_44250
  Gene Ontology: Mol. function=calcium-dependent phospholipid binding
  Homolog annotation: Hit_ID=B4FJC1; Match level="QueryCoverage=100%, HitCoverage=31%, E-value=3e-33, Identity=77%"; Hit description=Fiber annexin
  Pfam annotation: Domain name=Annexin; Domain location=5-76; Score =6.0; E_value=0.0044; Accession=PF00191.12; Description=Annexin
MASAGFEEACREIRGARGHPRRLGQLLATRSPAERQQIRAAYRASFGEDLVAALQGILVAGAGGQEDELRKLLYLWALDPAERDAVVAREAMEGGVTVAG

SEQ ID NO: 110225 - protein, 67 aa, Setaria italica
  Transcript Sequence Number=SeqID_44251
IYLGQICMYHKKKNPCHVNLGNISACYPCPVLELGEGSLMLLGFLFPTVKFINLVSPRLFWPPIILV

SEQ ID NO: 110226 - protein, 416 aa, Setaria italica
  Transcript Sequence Number=SeqID_44252
  Gene Ontology: Mol. function=protein binding; Cellular component=cell wall
  Homolog annotation: Hit_ID=B9RL73; Match level="QueryCoverage=81%, HitCoverage=43%, E-value=1e-115, Identity=61%"; Hit description=LRX2, putative
  Pfam annotation: Domain name=LRRNT_2; Domain location=59-99; Score =9.3; E_value=0.1; Accession=PF08263.4; Description=Leucine rich repeat N-terminal domain
  Pfam annotation: Domain name=LRR_1; Domain location=148-170; Score =4.5; E_value=42; Accession=PF00560.25; Description=Leucine Rich Repeat
  Pfam annotation: Domain name=LRR_1; Domain location=172-194; Score =7.8; E_value=9.8; Accession=PF00560.25; Description=Leucine Rich Repeat
  Pfam annotation: Domain name=LRR_1; Domain location=196-219; Score =16.2; E_value=0.14; Accession=PF00560.25; Description=Leucine Rich Repeat
  Pfam annotation: Domain name=LRR_1; Domain location=242-264; Score =0.7; E_value=2.2e+02; Accession=PF00560.25; Description=Leucine Rich Repeat
  Pfam annotation: Domain name=LRR_1; Domain location=291-313; Score =10.3; E_value=3.3; Accession=PF00560.25; Description=Leucine Rich Repeat
  Pfam annotation: Domain name=LRR_1; Domain location=315-337; Score =7.0; E_value=14; Accession=PF00560.25; Description=Leucine Rich Repeat
  Pfam module annotation: Pfam domain module=LRRNT_2::LRR_1::LRR_1::LRR_ 1::LRR_1::LRR_1::LRR_1; Domain location=59-99::148-170::172-194::196 -219::242-264::291-313::315-337
MIPRSAPACAALLLPLLLGLLSPHPAASQQEGDVPESYAASFASRFAAPPSWSFPNPRLRAAYAALQAWKRTAIFSDPTNFTANWSGPNVCAYNGVFCAPLPTTTATTGYSHGHGGDGGGDLVVAGIDLNHADIAGYLPASLPLGVPDLALFHINSNRFCGVVPETFHHLRLLHELDLSNNRFVGGFPEVVLSLPSLRYLDLRFNEFEGSIPPALFDRPFDAIFINSNRLRNPIPANLGNSPASVVVLAHNRLGGCIPPSIGKMAETLNEIVLIADELTGCVPPQVGLLKRVTVFDVSDNHLQGQLPASIAGMAAVEELDVARNRFEGAVPAGVCALAGLKNFTYTDNFITSRPPCAKATADGAWNCIPGAPAQRPPSQCAAAAAHPFDCSKAQCQAPAYTPTPGGGGGGGGGHGR

SEQ ID NO: 110227 - protein, 195 aa, Setaria italica
  Transcript Sequence Number=SeqID_44253
  Gene Ontology: Mol. function=phosphoribulokinase activity; Cellular component=chloroplast; Biological process=reductive pentose -phosphate cycle
  Homolog annotation: Hit_ID=B6TYM1; Match level="QueryCoverage=100%, HitCoverage=46%, E-value=6e-96, Identity=84%"; Hit description =Phosphoribulokinase
IQRDMAERGHSLESIKASIDARKPDFDAYIDPQKQYADAVIEVLPTQLIPNDEEGKVLRVRLIMKEGVRHFAPVYLFDEGSVVTWIPCGRKLSCSYPGIKFAYGFGTYFGHEVSVLEMDGQFDKLDELIYVETHLSNLSTKFYGEVAQQMLKHADLPGSSNGTGLFQTIVGLKVRDLYEQIAAERADVTTDPLRV

SEQ ID NO: 110228 - protein, 65 aa, Setaria italica
  Transcript Sequence Number=SeqID_44254
  Gene Ontology: Mol. function=phosphoribulokinase activity; Cellular component=chloroplast; Biological process=reductive pentose -phosphate cycle
  Homolog annotation: Hit_ID=B6TYM1; Match level="QueryCoverage=89%, HitCoverage=13%, E-value=2e-26, Identity=94%"; Hit description =Phosphoribulokinase
  Pfam annotation: Domain name=PRK; Domain location=1-65; Score=-60.6; E_value=0.0088; Accession=PF00485.10; Description=Phosphoribulokinase Uridine kinase family
PMYDERVRDLLDFSIYLDISEEVKFAWKIQRDMAERGHSLESIKASIDARKPDFDAYIGKASLLA

SEQ ID NO: 110229 - protein, 78 aa, Setaria italica
  misc_feature (27)..(27): Xaa can be any naturally occurring amino acid
  misc_feature (50)..(50): Xaa can be any naturally occurring amino acid
  misc_feature (64)..(64): Xaa can be any naturally occurring amino acid
  Transcript Sequence Number=SeqID_44255
  Subcellular localization annotation: CTP_CleavageSite=36; ConfidenceScore=5.21e-01
MSKSLEKSSSGGTTPTSSASPPESKKXEKTLPNYLRASRGSCHDFCKYGXKNPSEEETSLSGGXEEKKLPAHLKNLTL

SEQ ID NO: 110230 - protein, 97 aa, Setaria italica
  Transcript Sequence Number=SeqID_44256
FVDDSMYLTKIEKIDCKRQRTSRDISSARASSSKEYKNGSGCDKEAKNSQKLFLDAKVCLYSLKRTVEDLQKKGLFPYNPKPLLRSLARFEELCEQG

SEQ ID NO: 110231 - protein, 72 aa, Setaria italica
  Transcript Sequence Number=SeqID_44257
  Homolog annotation: Hit_ID=Q9MAL7; Match level="QueryCoverage=83%, HitCoverage=12%, E-value=4e-18, Identity=68%"; Hit description =T25K16.17
DFHSAWADINLAWAVLRPGGVMFGHDYFTSADDRGVRRAVTLFAKVKGLTIRPHGQHWVLSPKPRGHGSNAR

SEQ ID NO: 110232 - protein, 131 aa, Setaria italica
  Transcript Sequence Number=SeqID_44258
  Homolog annotation: Hit_ID=Q9MAL7; Match level="QueryCoverage=87%, HitCoverage=23%, E-value=4e-35, Identity=60%"; Hit description =T25K16.17
PPPRHGDALLLPQFMANVAAAGADAAARVLPLPFSTASALAALCGWGVYADLIEVDAGHDFHSAWADINLAWAVLRPGGVMFGHDYFTSADDRGVRRAVTLFAKVKGLTIRPHGQHWVLSPKPRGHGSNAR

SEQ ID NO: 110233 - protein, 76 aa, Setaria italica
  misc_feature (40)..(40): Xaa can be any naturally occurring amino acid
  Transcript Sequence Number=SeqID_44259
  Homolog annotation: Hit_ID=Q2S3T2; Match level="QueryCoverage=82%, HitCoverage=59%, E-value=4e-09, Identity=46%"; Hit description =UPF0161 protein SRU_1017
  Pfam annotation: Domain name=DUF37; Domain location=1-65; Score=33.4; E_value=6.2e-10; Accession=PF01809.10; Description=Domain of unknown function DUF37
AKVLIKREISPLLPSSCRYVPTCSEYSMQAYKRYGVVKGXIISYLWDFSPVLSDVHAGGYGYDPPRWFGEEDLPLE

SEQ ID NO: 110234 - protein, 82 aa, Setaria italica
  Transcript Sequence Number=SeqID_44260
  Homolog annotation: Hit_ID=Q2S3T2; Match level="QueryCoverage=82%, HitCoverage=68%, E-value=2e-16, Identity=51%"; Hit description =UPF0161 protein SRU_1017
  Pfam annotation: Domain name=DUF37; Domain location=10-77; Score =135.2; E_value=2e-37; Accession=PF01809.10; Description=Domain of unknown function DUF37
LSAEEVKDLGVNVALSMLKFYKREISPLLPSSCRYVPTCSEYSMQAYKRYGVVKGTILTAWRLCRCNPLGGYGYDPPRWFGE

SEQ ID NO: 110235 - protein, 135 aa, Setaria italica
  misc_feature (7)..(7): Xaa can be any naturally occurring amino acid
  Transcript Sequence Number=SeqID_44261
  Homolog annotation: Hit_ID=Q2S3T2; Match level="QueryCoverage=51%, HitCoverage=70%, E-value=2e-17, Identity=51%"; Hit description =UPF0161 protein SRU_1017
  Pfam annotation: Domain name=DUF37; Domain location=57-124; Score =135.2; E_value=2e-37; Accession=PF01809.10; Description=Domain of unknown function DUF37
  Subcellular localization annotation: CTP_CleavageSite=44; ConfidenceScore=5.33e-01
MAAAAPXTSASFLPVRAAQPLAGITVSFGASYQKRRKIPARRVRCAADDEEEFKDLGVNVALSMLKFYKREISPLLPSSCRYVPTCSEYSMQAYKRYGVVKGTILTAWRLCRCNPLGGYGYDPPRWFGEEDLPLE

SEQ ID NO: 110236 - protein, 116 aa, Setaria italica
  Transcript Sequence Number=SeqID_44262
  Homolog annotation: Hit_ID=Q2S3T2; Match level="QueryCoverage=51%, HitCoverage=60%, E-value=6e-16, Identity=58%"; Hit description =UPF0161 protein SRU_1017
  Pfam annotation: Domain name=DUF37; Domain location=53-105; Score =94.7; E_value=3.3e-25; Accession=PF01809.10; Description=Domain of unknown function DUF37
  Subcellular localization annotation: CTP_CleavageSite=44; ConfidenceScore=5.47e-01
MAAAAPSTSASFLPVRAAQPLAGITVSFGASYQKRRKIPARRVRCAADDEGEISPLLPSSCRYVPTCSEYSMQAYKRYGVVKGTILTAWRLCRCNPLGGYGYDPPRWFGEEDLPLE

SEQ ID NO: 110237 - protein, 84 aa, Setaria italica
  Transcript Sequence Number=SeqID_44263
LENNTASVFLEVPGCQQHSRMKLSRCRLGIVVGQGQPRGFGNATTISVNPNILQQPRGEGAAKDQMIARLLTTSIGTLRRSDQR

SEQ ID NO: 110238 - protein, 235 aa, Setaria italica
  Transcript Sequence Number=SeqID_44264
  Homolog annotation: Hit_ID=Q9LPG1; Match level="QueryCoverage=97%, HitCoverage=52%, E-value=1e-78, Identity=54%"; Hit description =T3F20.23 protein
RVLRPRHAALLFPVHLSKRHLIWYGFERKNGVHSVCPAYWSAHKRWFFMSMLCLNPFACSFMDMQFPNGQLRYVAGDGFTTRAFLPVGGGVLQAHGKFPGEKRISFSFKNRSGSSVVPMVQWPDKSLSLGFVQPLSWRRSGLMLQPATQISICPTIGGRHPGVCTELIHSVNENVGVIYGYSHTASPSAHASLSIGRSKLNGGVARSGIVFRVDAPLHGFDRPWFSVQMSSGIEF

SEQ ID NO: 110239 - protein, 72 aa, Setaria italica
  Transcript Sequence Number=SeqID_44265
  Subcellular localization annotation: CTP_CleavageSite=30; ConfidenceScore=5.38e-01
TIQMLWTWVASAQPTQYCLATQSGGCAHCRSSGSTSFILSRRVHRSIWKLERALVCSRKILSITIRFHLQVC

SEQ ID NO: 110240 - protein, 78 aa, Setaria italica
  Transcript Sequence Number=SeqID_44266
VAELTWKRSLLWWRPGLPHVCQVGCLQRTAAASAAGQLSVQRGTASVDGACGSDIVGRLGLQRTATGCSALLGYSSAV

SEQ ID NO: 110241 - protein, 95 aa, Setaria italica
  Transcript Sequence Number=SeqID_44267
WADGVSIRARRHPEDGGEGRAYEPHDGVPRRPRRLPVKLRRRRRSRHAGQEHRRPIVVQERRGLVIVADDDTGCHRWHWHAFLSLVYEVITPGVL

SEQ ID NO: 110242 - protein, 93 aa, Setaria italica
  Transcript Sequence Number=SeqID_44268
SYHAAQPSASVSYFAPQPHAAAYSMQQPQPQAAYSTHQPPQQQMRQWSPSYLYLPYPHAAPEPYHHQDYYSPPGMHGSVPARGAGAVPPPGLL

SEQ ID NO: 110243 - protein, 73 aa, Setaria italica
  Transcript Sequence Number=SeqID_44269
  Gene Ontology: Mol. function=nucleic acid binding; Cellular component= nucleus; Biological process=response to stress
  Homolog annotation: Hit_ID=Q99069; Match level="QueryCoverage=79%, HitCoverage=40%, E-value=4e-22, Identity=86%"; Hit description =Glycine-rich RNA-binding protein 1 (Fragment)
  Pfam annotation: Domain name=RRM_1; Domain location=1-53; Score=47.8; E_value=4.3e-11; Accession=PF00076.14; Description=RNA recognition motif. (a.k.a. RRM, RBD, o
FSPFGEVLESKIILDRDTQRSRGFGFVTFASEQAMRDAIEGMNGKELDGRSITVNEAQSRGGPRSAGRRAVGN

SEQ ID NO: 110244 - protein, 256 aa, Setaria italica
  Transcript Sequence Number=SeqID_44270
  Gene Ontology: Mol. function=metal ion binding; Biological process =metal ion transport
  Homolog annotation: Hit_ID=Q10LJ9; Match level="QueryCoverage=41%, HitCoverage=30%, E-value=6e-12, Identity=46%"; Hit description=Heavy metal-associated domain containing protein, expressed
AAAADKKPEEAVKEPKAESPEKKKPEEAVKEPKAESPEKKKPEQEGAGAEKKPEAESKAEKKVEAKKEGGDDEAAEPKAKGAEPAKEEAKEAVAAATKDEDEAKKVKDEKPKDAGKAEPAAVTERSLSSPPPPAPKHAYYEEEYRRPYYPTPQPVLSYHAAQPSASVSYFAPQPHAAAYSMQQPQPQAAYSTHQPPQQQMRQWSPSYLYLPYPHAAPEPYHHQDYYSPPGMHASPPPMQDSYRIFDDENPNSCSVM

SEQ ID NO: 110245 - protein, 123 aa, Setaria italica
  Transcript Sequence Number=SeqID_44271
  Gene Ontology: Mol. function=nuclease activity; Cellular component =membrane; Biological process=proteolysis
  Homolog annotation: Hit_ID=Q6K4Y8; Match level="QueryCoverage=99%, HitCoverage=42%, E-value=4e-54, Identity=84%"; Hit description =Putative extracellular ribonuclease
  Pfam annotation: Domain name=Endonuclease_1; Domain location=5-123; Score=-49.7; E_value=7.2e-06; Accession=PF04231.5; Description =Endonuclease I
AAVVSPHAALRYKDVWEALKILDAADAEHPEASSEVIEIYSQRAAPKILAGKPDGWNREHLWPRSYGLTYGPSLTDLHNIRPADVNVNSSRGNKYFGECTATSINCVRPANHEAASDTETDTE

SEQ ID NO: 110246 - protein, 115 aa, Setaria italica
  Transcript Sequence Number=SeqID_44272
RWSGLLGVFELCLDVIFVVWVWILGCRLSLYFCFSCALWHLGSGGLLPSWRQEGVSPDRRDQRLMVFYRGSLAAFQCCSPFFGLDRREGRFDALVCTSANWWAATAAQSKEEEEQ

SEQ ID NO: 110247 - protein, 62 aa, Setaria italica
  Transcript Sequence Number=SeqID_44273
MGSVDGEVDGIHAANRRAELVRWLNALLPELSLPSDASDEELRELLGDGEVLCRIANTLIPG

SEQ ID NO: 110248 - protein, 106 aa, Setaria italica
  misc_feature (7)..(7): Xaa can be any naturally occurring amino acid
  Transcript Sequence Number=SeqID_44274
  Gene Ontology: Mol. function=hydrolase activity; Cellular component =chloroplast
  Homolog annotation: Hit_ID=B6SZF6; Match level="QueryCoverage=33%, HitCoverage=14%, E-value=9e-14, Identity=100%"; Hit description =HDDC2 protein
  Subcellular localization annotation: CTP_CleavageSite=67; ConfidenceScore=5.71e-01
MGGGSRXLSLSSLCATTLAAARAPRAPFLSPAHRAPPLRLAAAAMSSSSSSSPNPAASGDAAAPAPSASSAIDFLTLCYRLKTTKRAGWVKRGVQAPESVADHMYR

SEQ ID NO: 110249 - protein, 119 aa, Setaria italica
  misc_feature (106)..(106): Xaa can be any naturally occurring amino acid
  Transcript Sequence Number=SeqID_44275
  Gene Ontology: Mol. function=isomerase activity; Cellular component =ribonucleoprotein complex; Biological process=rRNA processing
  Homolog annotation: Hit_ID=Q2RAU6; Match level="QueryCoverage=73%, HitCoverage=16%, E-value=8e-28, Identity=74%"; Hit description=Mpp10 protein, expressed
PPHRHPHLCPPHPHHHCPPSSFSSPSSSLLDWRDGSTKKVQFKDDVHEMELDGSENDDGNEDQGLSTHEKERLKMRAKIEQMEKANLEPSTWTMQGEVTASSRPKXNSALEVDLDFEHN

SEQ ID NO: 110250 - protein, 381 aa, Setaria italica
  Transcript Sequence Number=SeqID_44276
  Gene Ontology: Mol. function=RNA splicing factor activity, transesterification mechanism; Cellular component=ribonucleoprotein complex; Biological process=rRNA processing
  Homolog annotation: Hit_ID=Q2RAU6; Match level="QueryCoverage=99%, HitCoverage=70%, E-value=1e-129, Identity=67%"; Hit description =Mpp10 protein, expressed
  Pfam annotation: Domain name=Mpp10; Domain location=2-379; Score =220.7; E_value=3.9e-63; Accession=PF04006.4; Description=Mpp10 protein
RGGKGLEDRFLKIGEMAEFLDRGDEEEYGGGANRGEKKKVTKNWMEDSDDEGEEDRDEDDDEGEDDDDEGQLDLEDFEDDDEEDEGDGGGGIMYKDFFEKKHNQPVKKRDGSTKKVQFKDDVHEMELDGSENDDGNEDQGLSTHEKERLKMRAKIEQMEKANLEPSTWTMQGEVTASSRPKNSALEVDLDFEHNVRPAPVITEEVTASLEEMIKKRIAEGHFDDVEKPSLLPSKAPREHKELDESKSKKGLAELYEDDYAQKSGIAPAPLSISDELKKEANTLFKRVCLKLDALSHFHFAPKPVIEDMSVQANVPALAMEEIAPVAVSDAAMLAPEEIFEGKGDVKEEGELTQAERKRRRANKKRRYAGSHKERPVKLQKD

SEQ ID NO: 110251 - protein, 59 aa, Setaria italica
  Transcript Sequence Number=SeqID_44277
MVTNLSNMMQDLVATSDEGRCKGKIKTLIMSTSKDFPSAPSVFVLLAIASIMVVLLKRA

SEQ ID NO: 110252 - protein, 317 aa, Setaria italica
  misc_feature (214)..(214): Xaa can be any naturally occurring amino acid
  Transcript Sequence Number=SeqID_44278
  Gene Ontology: Mol. function=transposase activity; Biological process= transposition, DNA-mediated
  Homolog annotation: Hit_ID=B6TI38; Match level="QueryCoverage=80%, HitCoverage=94%, E-value=2e-86, Identity=59%"; Hit description =Regulatory protein
PTTRRQDLRTGVAPADRQELVALGNGTAAHADPCTTKPGNMQDATSPDDNLPELLRRAAMEDNTVIMTFTNGAFASPNSLLDLFLHSFRVGVRTAPLLRHLIIVAVDDKAYGRCRHVHPHCYALAMGATNFTGEQRFMARDYLDMMWRRNRFQARVLRLGYSFVFTDVDIVWFRNPLLRIPVGADLAMSCDKFYGDNPYDLDKWANGGFVLTSXRASARTVAFYESWYQARGAHPGKNEQDLFDMLKRELSARHGVAAQFVDTAYLGGFCDRRKGRDFNKLCTYHANCLVGMKLKLRRLTQVFAEWNKFRASAALTD

SEQ ID NO: 110253 - protein, 121 aa, Setaria italica
  Transcript Sequence Number=SeqID_44279
  Gene Ontology: Mol. function=nucleoside-triphosphatase activity; Biological process=small GTPase mediated signal transduction
  Homolog annotation: Hit_ID=Q0WVW9; Match level="QueryCoverage=98%, HitCoverage=20%, E-value=7e-35, Identity=57%"; Hit description=DNA repair protein-like
MVPQSLQEVNKGVNQASWRIPLSGSFGMEISRVLGGGIVPGSLILVGGDPGVGKSSLMLQLASNILEGFKSDDSSPVVYVSGEESIEQIGNRADRMSIMSSKLYLYSGTDIEDILDKIQPL

SEQ ID NO: 110254 - protein, 85 aa, Setaria italica
  Transcript Sequence Number=SeqID_44280
ISGQSVNLMIFWDRGSTFFFGVVFIHLACFLVFLSFFYVSFIMIFLLASSILHNLGHLISSPKRLSVLYSTLNMCDSILLNVKCW

SEQ ID NO: 110255 - protein, 63 aa, Setaria italica
  Transcript Sequence Number=SeqID_44281
THPACKFIRHVVRKNILFSTSCVVLPLFIHVQGTNLTIRDFEIPESNIIHIHNKKSELNQAKE

SEQ ID NO: 110256 - protein, 125 aa, Setaria italica
  Transcript Sequence Number=SeqID_44282
ELPDADQRICWCLVERQEQLLTSSFSDLVSSFRPTAQDYRSGNKDELLTCRHGSWIGTVLLWLPVSYVIHVGRWIRNHMESARACMQRPWRRVNIFNLPQVGCDCECDGHTAHADCSVERLIGSD

SEQ ID NO: 110257 - protein, 99 aa, Setaria italica
  Transcript Sequence Number=SeqID_44283
  Gene Ontology: Mol. function=substrate-specific transmembrane transporter activity; Cellular component=integral to membrane; Biological process=transmembrane transport
  Homolog annotation: Hit_ID=Q2R0P9; Match level="QueryCoverage=100%, HitCoverage=20%, E-value=1e-26, Identity=65%"; Hit description=Sugar transporter family protein
  Subcellular localization annotation: CTP_CleavageSite=62; ConfidenceScore=5.05e-01
DAQIEVLAGSINVFMLASILAAGWAADVLGRRGTLVLANVSLMAGALAMALGGSFPALMFARCVTSVGSGFSIVVTSVYNAEISPPSMRGFLSSFLDLF

SEQ ID NO: 110258 - protein, 137 aa, Setaria italica
  misc_feature (15)..(15): Xaa can be any naturally occurring amino acid
  Transcript Sequence Number=SeqID_44284
  Gene Ontology: Mol. function=nucleoside transmembrane transporter activity; Cellular component=membrane; Biological process=transport
  Homolog annotation: Hit_ID=B6U145; Match level="QueryCoverage=100%, HitCoverage=32%, E-value=2e-51, Identity=72%"; Hit description =Nucleoside transporter
SSQDGLRKGAMLFFXIACFFELLCVLLYTSVFPTLPIVKYYRSKAASEGSKTVAGDLAAAGVPTEQDEIVEEEPERYERLSTKQLLLQNMDYALDIFLVYVLTLSIFPGFLSEDTGSHSLGAWYALVLIAMFNVWDL

SEQ ID NO: 110259 - protein, 65 aa, Setaria italica
  Transcript Sequence Number=SeqID_44285
NYGEGRSVVLCLQVPARFQFWTEAEWMRSRTMCISTVSCRLFKCGSSIHTPEEVHACGESRWTRP

SEQ ID NO: 110260 - protein, 180 aa, Setaria italica
  misc_feature (125)..(125): Xaa can be any naturally occurring amino acid
  Transcript Sequence Number=SeqID_44286
LDQVIQVGLDELDTYMEKSAKFSKYAMGSTPSVVQYSNCSYRLSKEDWIHAEKICKMSQDFHKHMDFMRNFPSPTNFFNKLWVVKKEVHEADRYRHSREEEAFSKVREKMKRKFMECWTVCFMHXMPMVMDPNYRLKHIMSHLDFNAFDDDRKDYLQQVHDTLASLFNRSKLNKNKTKRK

SEQ ID NO: 110261 - protein, 148 aa, Setaria italica
  Transcript Sequence Number=SeqID_44287
  Gene Ontology: Cellular component=integral to membrane
  Homolog annotation: Hit_ID=B6TE56; Match level="QueryCoverage=100%, HitCoverage=41%, E-value=9e-68, Identity=79%"; Hit description =Rhomboid family protein
VSLLGHLCGQYLSGFAYTYGLFNYLLPGPSFYSKIEGLSASICVRRPGFILCTGGTTYGQLPTYSNTSAAPSALINGNFLRNISSWMPNRQTSTVQEGEDPRFPGRAQTLGSAGAEPTAREANANLHARHTVANTVRADATVTADQVD

SEQ ID NO: 110262 - protein, 349 aa, Setaria italica
  misc_feature (268)..(268): Xaa can be any naturally occurring amino acid
  Transcript Sequence Number=SeqID_44288
  Gene Ontology: Mol. function=serine-type endopeptidase activity; Cellular component=integral to membrane
  Homolog annotation: Hit_ID=B6TE56; Match level="QueryCoverage=99%, HitCoverage=83%, E-value=1e-171, Identity=88%"; Hit description =Rhomboid family protein
  Pfam annotation: Domain name=Rhomboid; Domain location=1-153; Score =97.0; E_value=6.4e-26; Accession=PF01694.14; Description=Rhomboid family
VYRFYTSVLFHGSVLHVLFNMLALVPLGTELERIMGSVRLLFLMFLLATTNAILHLTIAFLVAYNPLSPVPNLADECSIGFSGVIFSMIVIETSLSGVQSRSVFGLFNVPAKWYAWILLVLFQFLASNVSLLGHLCGILSGFAYTYGLFNYLLPGPSFYSKIEGLSASICVRRPGFILCTGGTTYGQLPTYSNTSAAPSALINGNFLRNISSWMPNRQTSTVQEGEDPRFPGRAQTLGSAGAEPTAREANANLHARLLDNTTPSDPLXNSQHTVANTVRADATVTADQVDTFDEELKKLVGMGFEKVIETHSMSVIAHISAIHTQAEVALAAADGDPNVAIEILMSQQV

SEQ ID NO: 110263 - protein, 233 aa, Setaria italica
  Transcript Sequence Number=SeqID_44289
  Subcellular localization annotation: CTP_CleavageSite=48; ConfidenceScore=5.73e-01
NVKGEGLRQNPNLPTKRTASPPPTGTVRARFAAAAPPLHRATRRRFTRATALPLPPVSAPPRRRRSALLPMVIQSLCDIFSDPEIDLTNMTPEVKKAIANHRMKKYKMICFFGAAFVVWTDKAALLNRIYQHNHTSAQLCTFYFIIALVSVLLGIIASSFPDTAPWAMVVAWNGSLQAFLFLNACFHLRMIELYPELLHLTISFMVTSVIFSIYWSFWARDPTVRLVEAARHE

SEQ ID NO: 110264 - protein, 155 aa, Setaria italica
  misc_feature (146)..(146): Xaa can be any naturally occurring amino acid
  Transcript Sequence Number=SeqID_44290
  Gene Ontology: Mol. function=DNA binding; Cellular component=nucleus; Biological process=regulation of transcription
  Homolog annotation: Hit_ID=B6TN66; Match level="QueryCoverage=100%, HitCoverage=50%, E-value=1e-67, Identity=79%"; Hit description=NAC domain-containing protein 21/22
  Pfam annotation: Domain name=NAM; Domain location=9-141; Score=266.8; E_value=5.1e-77; Accession=PF02365.7; Description=No apical meristem (NAM) protein
GLRDIELTLPPGFRFYPSDEELVCHYLHGKVANERLAGAGGAMVEVDLHTHEPWELPDVAKLSTNEWYFFSFRDRKYATGLRTNRATKSGYWKATGKDRVIRNPKAAGRAVVGMRKTLVFYRGRAPNGIKTSWVMHEFRMENPHTXPPKEDWVLC

SEQ ID NO: 110265 - protein, 102 aa, Setaria italica
  Transcript Sequence Number=SeqID_44291
  Gene Ontology: Mol. function=catalytic activity; Cellular component =intracellular; Biological process=RNA metabolic process
  Homolog annotation: Hit_ID=B9RUD3; Match level="QueryCoverage=93%, HitCoverage=50%, E-value=2e-25, Identity=61%"; Hit description =Calmodulin binding protein, putative
LFLAPTPSAALLGLHAQLCELLRKDAGVEVPDAFRPDHWVPRCAVAVDVPRGRMAEAFCVLRELKLLPVSGYGMDIALVEVRAAVRELVSYPLGGSGGAGAD

SEQ ID NO: 110266 - protein, 266 aa, Setaria italica
  Transcript Sequence Number=SeqID_44292
PAFSLLFKPRIGDFGLASSVRSPPSPPPAPAQAPLAIKMADLTTNGDDHDRDAHAQANGFSFAGNGFAANVAAAAGRGGGGVGALLSGMQLTTRSVLPLWSKASLRFHWGLRVPPELKAALADDGYGRKAGSLAISKLPLLVMNKITIEHTPKASSQSETDKKRKKDAPPAGEGEEFSLMKRQLEALSTESTLLQRAVADLRAELGAGKGEGRRLPAALPAPQQPFMSKPDRHYHSSGKELVDSGLKPASDEASEELKKALEARRK

SEQ ID NO: 110267 - protein, 84 aa, Setaria italica
  misc_feature (1)..(15): Xaa can be any naturally occurring amino acid
  Transcript Sequence Number=SeqID_44293
XXXXXXXXXXXXXXXVKISSDRYHCSAVELRPSQLSAANLFKIIWSTRATCRYRDTNLIRIHYICDQYSYEKGDETEQARQATC

SEQ ID NO: 110268 - protein, 164 aa, Setaria italica
  Transcript Sequence Number=SeqID_44294
  Subcellular localization annotation: CTP_CleavageSite=8; ConfidenceScore=5.28e-01
GRTRLTPRCKAPPRPTPRRKAQPRPTPGARARTHPGPQDRASPRPRADADQRTGARISWAPTDLAINANHGGRTRNAALTRKEAPALLDVTRHSCRAVHCSHNRTGLQLHRPASAVIFGIGHSSPTPPNKGGCAARSPARPGGRGVQLRLPVSALAEADRPPRC

SEQ ID NO: 110269 - protein, 134 aa, Setaria italica
  misc_feature (23)..(23): Xaa can be any naturally occurring amino acid
  Transcript Sequence Number=SeqID_44295
  Gene Ontology: Cellular component=cell wall
  Homolog annotation: Hit_ID=B9RSW6; Match level="QueryCoverage=96%, HitCoverage=14%, E-value=2e-56, Identity=74%"; Hit description =Inosine-uridine preferring nucleoside hydrolase, putative
VEHMYIMGGGVRSKNPTGCCPKXNATTSCTPEQCGDHGNLFTSYSTNPNAEFNIFGDPFAAYQVFHSGIPITLVPLDATNTIPINEKFFYEFKRHQSTYEAQYCFKSLKIARDTWFNDKFYTSYFYCWDFLYFL

SEQ ID NO: 110270 - protein, 60 aa, Setaria italica
  Transcript Sequence Number=SeqID_44296
LIFLGFDIVSYASRVNTGHPYRSIAMHLLGSRQRGIGLFGPRYFPIPMYVLTNSPNILTP

SEQ ID NO: 110271 - protein, 91 aa, Setaria italica
  Transcript Sequence Number=SeqID_44297
  Gene Ontology: Mol. function=sulfotransferase activity; Cellular component=integral to membrane
  Homolog annotation: Hit_ID=B6TRN9; Match level="QueryCoverage=76%, HitCoverage=20%, E-value=8e-18, Identity=58%"; Hit description =Flavonol 4-sulfotransferase
PVTPNEVIPTIDVEIPLNGDLNFIEKLPPPRILATHLPLSLLPESIRIQGCRIVYICRDPKDAFVSRWHFVSVFFWKKKLILMLHSTLFCE

SEQ ID NO: 110272 - protein, 48 aa, Setaria italica
  Transcript Sequence Number=SeqID_44298
CLSYSPVGEEPSVVVPVQVWANLQISWRAEPLALMKETAHVSPPLQHA

SEQ ID NO: 110273 - protein, 174 aa, Setaria italica
  misc_feature (23)..(23): Xaa can be any naturally occurring amino acid
  Transcript Sequence Number=SeqID_44299
  Homolog annotation: Hit_ID=B6U8T6; Match level="QueryCoverage=100%, HitCoverage=40%, E-value=6e-92, Identity=90%"; Hit description =Carboxyl-terminal peptidase
  Pfam annotation: Domain name=DUF239; Domain location=13-174; Score =289.6; E_value=6.8e-84; Accession=PF03080.7; Description=Arabidopsis proteins of unknown function
HQHAIAYVEGDKYYGAKATINVXELQVQQANEFSLSQLWILGGSFGEDLNSIEAGWQVSPDLYGDNNTRLFTYWTSDAYQATGCYNILCSGFIQINSEIAMGASIFPISNYAGSQYDISILIWKDPKEGNWWMQFGKEYVLGYWPSFLFSYLADSASMIEWGGEVVNSEPDGAH

SEQ ID NO: 110274 - protein, 77 aa, Setaria italica
  misc_feature (1)..(25): Xaa can be any naturally occurring amino acid
  Transcript Sequence Number=SeqID_44300
XXXXXXXXXXXXXXXXXXXXXXXXXCLYFIITLLILSQVDMRLPIQRLEYTRVSDIDIVLNIPLFDRFISNLSSLLT

SEQ ID NO: 110275 - protein, 197 aa, Setaria italica
  Transcript Sequence Number=SeqID_44301
  Homolog annotation: Hit_ID=B6U8T6; Match level="QueryCoverage=97%, HitCoverage=45%, E-value=1e-102, Identity=88%"; Hit description =Carboxyl-terminal peptidase
  Pfam annotation: Domain name=DUF239; Domain location=3-150; Score =255.8; E_value=1e-73; Accession=PF03080.7; Description=Arabidopsis proteins of unknown function
CLVHQVSPDLYGDNNTRLFTYWTSDAYQATGCYNILCSGFIQINSEIAMGASIFPISNYAGSQYDISILIWKDPKEGNWWMQFGKEYVLGYWPSFLFSYLADSASMIEWGGEVVNSEPDGAHTTTQMGSGHFPEEGFSKASYFKNIQVVDSSNQLSAPKGVGTFTEQSNCYDVQNGNNGDWGTYFYYGGPGKNSNCP

SEQ ID NO: 110276 - protein, 76 aa, Setaria italica
  Transcript Sequence Number=SeqID_44302
MKYSKEDKPERAAGAGAGSRAVPVALVVIVLCAFSFYLGGVYSTGRSLLDAIQPAPTLLTLGTTAAARHSSDQPHP

SEQ ID NO: 110277 - protein, 306 aa, Setaria italica
  Transcript Sequence Number=SeqID_44303
  Homolog annotation: Hit_ID=B6U8T6; Match level="QueryCoverage=81%, HitCoverage=58%, E-value=1e-120, Identity=80%"; Hit description =Carboxyl-terminal peptidase
  Pfam annotation: Domain name=DUF239; Domain location=176-304; Score =149.9; E_value=7.7e-42; Accession=PF03080.7; Description=Arabidopsis proteins of unknown function
RARGGPASWVVAVAAAWVLWMATAAEARSPAGRVHRHLKRLNKPAVKSIESPDGDIIDCVPISHQPAFDHPLLKNHTIQFRPAYHPEGLYDDVKSSIGSNNAREKPMLQMWHRNGRCPEGTVPIRRTKKDDLLRASSMKRYGRKRHTAPNPLSVDPNMLSEGGHQHAIAYVEGDKYYGAKATINVWEPKIQQANEFSLSQLWILGGSFGEDLNSIEAGWQVSPDLYGDNNTRLFTYWTSDAYQATGCYNILCSGFIQINSEIAMGASIFPISNYAGSQYDISILIWWKLRAKHYKTLLPALGTDKT

SEQ ID NO: 110278 - protein, 150 aa, Setaria italica
  misc_feature (41)..(41): Xaa can be any naturally occurring amino acid
  misc_feature (53)..(53): Xaa can be any naturally occurring amino acid
  Transcript Sequence Number=SeqID_44304
  Homolog annotation: Hit_ID=B6U8T6; Match level="QueryCoverage=53%, HitCoverage=18%, E-value=4e-15, Identity=54%"; Hit description =Carboxyl-terminal peptidase
MARPRGGGSVAWAEAKTPAGRVHQHLKRLNKLAIRNIEIDXIIDCVHISHQPXDHPLLKNHTIQFRPAYHPEGLYDDAKSSIYRLQQCRRKVDAVTQGCADGGRGRPLCCSTSLAAPASPSVWPRPMEPRELQINATAAPSKSSYSAVMG

SEQ ID NO: 110279 - protein, 506 aa, Setaria italica
  Transcript Sequence Number=SeqID_44305
  Gene Ontology: Mol. function=hydrolase activity, acting on carbon -nitrogen (but not peptide) bonds; Biological process=allantoin catabolic process
  Homolog annotation: Hit_ID=Q259B7; Match level="QueryCoverage=99%, HitCoverage=99%, E-value=0.0, Identity=70%"; Hit description =H0901F07.3 protein
  Pfam annotation: Domain name=Amidohydro_1; Domain location=95-446; Score=62.6; E_value=1.5e-15; Accession=PF01979.12; Description =Amidohydrolase family
  Pfam annotation: Domain name=Amidohydro_3; Domain location=95-444; Score=-53.0; E_value=0.00047; Accession=PF07969.3; Description =Amidohydrolase family
  Pfam annotation: Domain name=TatD_DNase; Domain location=101-388; Score=-85.4; E_value=0.05; Accession=PF01026.13; Description=TatD related DNase
  Pfam module annotation: Pfam domain module=Amidohydro_1::Amidohydro _3::TatD_DNase; Domain location=95-446::95-444::101-388
MAASAKGRLVPVLAVVAALAAALLYRAPFSKSLGGEGCSLLPHDHFWIASERVVTLGRVGPAAVEVKGGLINAIAVGDYRSFVLRRPLLDYGDAVIMPGLIDVHAHLDEPGREEWEGFSTGTKAAAAGGITTLVDMPLNNFPSTVSEETLKLKLEAARDKLYVDVGFWGGLVPENAFNPSALESLLNAGVLGLKSFMCPSGINDFPMTNSTHIEEGLVTLAKYQRPLLVHAERIPDVEDEDGLDGELDPRSYATYLKSRPPAWEESAIRDLQRAMKDTEAGGRSEGAHIHIVHLSDAKTSLELMKDAKRTGASVTVETCPHYLAFSADEVPDGDTRFKCAPPIRDGMNRENLWKALLDGHIDMLSSDHSPSAPDLKLMEEGNFLKAWGGISSLQFVLPVTWSYGKKYGITLNQLAAWWSENPAKLAGQKNKGAILPGYHADIVVWKPEAQFELDDSHSVYHKHRNISAYLGKELSGKVLSTFVRGNLVFAEDKHAKAACGVQILAK

SEQ ID NO: 110280 - protein, 389 aa, Setaria italica
  Transcript Sequence Number=SeqID_44306
  Homolog annotation: Hit_ID=B6U8T6; Match level="QueryCoverage=96%, HitCoverage=87%, E-value=0.0, Identity=93%"; Hit description =Carboxyl-terminal peptidase
  Pfam annotation: Domain name=DUF239; Domain location=153-342; Score =429.2; E_value=6.7e-126; Accession=PF03080.7; Description =Arabidopsis proteins of unknown function
GNGGGQLLRQRQVRSHLKRLNKAPLATIESPDGDIIDCVPISNQPAFDHPFLKNHTIQMRPAYHPEGLYDESKVASQQQTQTITQMWHQNGKCPEDTIPIRRTKKEDVLRASSVRRYGKKRHRSTPNPMSVDPDMLNESGHQHAIAYVEGDKYYGAKATINVWQPKIEQANEFSLSQLWILGGSFGQDLNSIEAGWQVSPDLYGDNNTRLFTYWTSDAYQATGCYNLLCSGFIQINNQIAMGASISPISNYGGSQYDINILVWKDPKEGNWWLQFGNNYVLGYWPSFLFSYLADSASMIEWGGEVVNSEPDGSHTSTQMGSGHFPEEGFGKASYFRNIQLVDSSNNLKVPRGVGSFTEQSNCYDVQNGNNGDWGAYFYYGGPGKNSNCP

SEQ ID NO: 110281 - protein, 410 aa, Setaria italica
  Transcript Sequence Number=SeqID_44307
  Homolog annotation: Hit_ID=B6U8T6; Match level="QueryCoverage=91%, HitCoverage=87%, E-value=0.0, Identity=82%"; Hit description =Carboxyl-terminal peptidase
  Pfam annotation: Domain name=DUF239; Domain location=174-363; Score =419.4; E_value=5.6e-123; Accession=PF03080.7; Description =Arabidopsis proteins of unknown function
MDTARGVACLLVAVICLSCAAAAAARTPAARMHRHLKRLNKPAVKSIESPDGDIIDCVHISHQPAFDHPYLKNHTVQMRPNYHPEGLYDESKTNVASTSNGERPMVQLWHQNGRCPVGTVPIRRTKKDDLLRASSMRRYGRKRHTTANPMSVNPTMLNEGGHQHAIAYVQGDKYYGAKATINVWEPKIEQPNEFSLSQLWILGGSFGEDLNSIEAGWQVSPDLYGDNNTRLFTYWTSDAYQATGCYNILCSGFVQINSEIAMGASIFPTSSYSGSQYDISILIWKDPKEGNWWMQFGKDYVLGYWPSFLFSYLADSASMIEWGGEVVNSQPDGVHTSTQMGSGHFPEEGFSKSSYFKNIQVVDSTNNLKAPKGLGTFTEQSNCYDVQNGNNGDWGTYFYYGGPGRSSNCQ

SEQ ID NO: 110282 - protein, 610 aa, Setaria italica
  Transcript Sequence Number=SeqID_44308
  Gene Ontology: Cellular component=plasma membrane
  Homolog annotation: Hit_ID=B6UBQ9; Match level="QueryCoverage=100%, HitCoverage=100%, E-value=0.0, Identity=89%"; Hit description =Ankyrin protein kinase-like
  Pfam annotation: Domain name=DUF248; Domain location=96-603; Score =1035.0; E_value=0; Accession=PF03141.8; Description=Putative methyltransferase
  Pfam annotation: Domain name=Methyltransf_11; Domain location=225 -309; Score=27.8; E_value=4.4e-05; Accession=PF08241.4; Description =Methyltransferase domain
  Pfam module annotation: Pfam domain module=DUF248::Methyltransf_11; Domain location=96-603::225-309
MKYSKEDKPERAAGAGAGSRAVPVALVVIVLCAFSFYLGGVYSTGRSLLDAIQPAPTLLTLGTTAAARHSSDQPHPASPTTATAVAFPECPADFQDYTPCTDPKRWRRYGNYRLSFMERHCPPPPDRQQCLVPPPKGYKPPIRWPKSKDQCWYRNVPYDWINSQKSNQHWLAKEGDRFRFPGGGTMFPNGVSAYVDLMAALIPGMRDGTVRTALDTGCGVASWGGDLLGRGILTVSLAPRDNHEAQVQFALERGIPAILGIISTQRLPFPSAAFDMAHCSRCLIPWTEFGGLYLLEIHRILRPGGFWVLSGPPINYENRWHGWNTTAQAQKADFDRLKKMLAAMCFKLYNMKGDIAVWQKSPDATACYDKLTPITTPAKCDDSVDPDAAWYVPMRSCVTAPSAKYKKLGLNATPKWPQRLSVAPERINVVPGSSAGAFKHDDARWKLRAKHYKTLLPALGTDKIRNVMDMNTVYGGFAASLIKDPIWVMNVVSSYGPNSLGVVYDRGLIGVNHDWCEAFSTYPRTYDLLHLDGLFTAESHRCEMKFVLLEMDRILRPTGYAIIRESTYFLDSVAAIAKGMRWSCEKRNPENKTDKDKILICQKKLWVGKQ

SEQ ID NO: 110283 - protein, 91 aa, Setaria italica
  Transcript Sequence Number=SeqID_44309
RSNPSSEHKGGSGQRWLSTTSRPLGDRMGRQIVSSRMFEDIGRNYGYFPDPTNLYVVKCKMCVKDARSIALQAARIRRPYDNYLLSDGIPF

SEQ ID NO: 110284 - protein, 110 aa, Setaria italica
  misc_feature (93)..(93): Xaa can be any naturally occurring amino acid
  Transcript Sequence Number=SeqID_44310
  Gene Ontology: Mol. function=oxidoreductase activity, acting on NADH or NADPH, quinone or similar compound as acceptor; Cellular component=integral to membrane; Biological process=ATP synthesis coupled electron transport
  Homolog annotation: Hit_ID=P0C325; Match level="QueryCoverage=100%, HitCoverage=22%, E-value=3e-41, Identity=79%"; Hit description =NAD(P)H-quinone oxidoreductase chain 4, chloroplastic
  Pfam annotation: Domain name=Oxidored_q1; Domain location=1-108; Score=-89.6; E_value=0.005; Accession=PF00361.12; Description=NADH -Ubiquinoneplastoquinone (complex I)
IIYAASTSLGQRNFKKRIAYSSVSHMGFIIIGIGSITNIGLNGALLQILSHGFIGATLFFLAGTACDRVRLVYLEELGGISIPMPKIFTMFSXFSMASLALPGMSGFVQN

SEQ ID NO: 110285 - protein, 82 aa, Setaria italica
  Transcript Sequence Number=SeqID_44311
MIIDNIFIHCDCALLLLISYQCCLVLNWFKTCYFQIRHAVSSDYLIIMNKSSLELIFLVILIHFTSALWHLLSDHSCLVLLK

SEQ ID NO: 110286 - protein, 83 aa, Setaria italica
  Transcript Sequence Number=SeqID_44312
MDPKFPTPPPLNKTEPTTATTTTTTSTTAQQQQQLDPKDYQHQQPAQHQEQQQHHHLQIQIHQPQQQDGGGGGKEQQQLLQVA

SEQ ID NO: 110287 - protein, 59 aa, Setaria italica
  Transcript Sequence Number=SeqID_44313
TNDCHCQMPIVTNQVEARQIISARKSNGSTLTILAPITQHLSCSIQDLYAQSPISASSA

SEQ ID NO: 110288 - protein, 47 aa, Setaria italica
  Transcript Sequence Number=SeqID_44314
TSSRNVGNYSFLTMLYGVLSSFITLEIIPELCTALLFFWQQLRRRWA

SEQ ID NO: 110289 - protein, 110 aa, Setaria italica
  Transcript Sequence Number=SeqID_44315
QNERKLKNRLATIGNQIKAVAGTYLRSWKCCKMVLELMICTGSEPAVGFTPNNCCHPLVTSSTLVRMAIGSRIDLVICHPSRDNRKETQHRDSTSNPPVSNPDFRNIQKN

SEQ ID NO: 110290 - protein, 217 aa, Setaria italica
  Transcript Sequence Number=SeqID_44316
  Gene Ontology: Mol. function=DNA binding
  Homolog annotation: Hit_ID=B6TEC6; Match level="QueryCoverage=100%, HitCoverage=66%, E-value=1e-51, Identity=55%"; Hit description=DNA binding protein
  Pfam annotation: Domain name=Myb_DNA-binding; Domain location=69-114; Score=49.8; E_value=1e-11; Accession=PF00249.23; Description=Myb-like DNA-binding domain
MVSMSTTPHPLDSSVPGVGGGGGGGGEGKEAARRVRLVQAAAPTAVPLGDEDDEGPRRVRKPYTITKSRESWTEPEHDKFLEALQLFDRDWKKIEAYVGSKTVIQIRSHAQKYFLKVQKNGTGEHLPPPRPKRKAAHPYPHKASKKALQVVLPQQASHIMEQGCGTSMDTATVATDLSANDAFLSWENDPVQQFSPRHTQGSGATNNCSSSIGSQSG

SEQ ID NO: 110291 - protein, 233 aa, Setaria italica
  misc_feature (104)..(104): Xaa can be any naturally occurring amino acid
  misc_feature (127)..(127): Xaa can be any naturally occurring amino acid
  Transcript Sequence Number=SeqID_44317
  Homolog annotation: Hit_ID=Q259H7; Match level="QueryCoverage=97%, HitCoverage=19%, E-value=1e-106, Identity=83%"; Hit description =H0103C06.10 protein
TNDPRITKPYVHDILLAMALAECSIAKASFEKSKVSLGFEALARAQYLLRRKPSLEKMPLLEQIEESLEELAPACTLELLSLPQTPENSERRRGAIAALCELLXQGLDVESSCRVHDWPCFLGQAIXKLLATEIVDLLSWDTLATTRKNKRSLESQSQRVVVDFNCFYVAMLAHLAFGFSTRQTELIKKAKTICECLVASESTDLKFEESFCSYLLGEETSAAVFEKLQQLQS

SEQ ID NO: 110292 - protein, 68 aa, Setaria italica
  Transcript Sequence Number=SeqID_44318
  Subcellular localization annotation: CTP_CleavageSite=18; ConfidenceScore=5.47e-01
RSSSFCLLVAAPFSFPPRLSNPLKLRPSCGRTLLISPSPLQPLEWVVHLLLSLLVPSASLLRDQNLLP

SEQ ID NO: 110293 - protein, 43 aa, Setaria italica
  Transcript Sequence Number=SeqID_44319
LHACKLMYRILLILCNGFKITRLNVKLQNTLLKNENYVKSEHR

SEQ ID NO: 110294 - protein, 157 aa, Setaria italica
  misc_feature (130)..(130): Xaa can be any naturally occurring amino acid
  Transcript Sequence Number=SeqID_44320
MEKASPVRSSHTSTAGLLAWPHPDGAGPLPARRPNQPTEELRKVVFGGQGTEDADGLNKMRTGSAPKWKEMTGSSIFKAESAAAPAASRDRQASQITFAQEGSIAHRKPTTVAEVARQRELSHTVQSEGXRKMKRQVSTVKSKELSGHDIFADQDGS

SEQ ID NO: 110295 - protein, 271 aa, Setaria italica
  Transcript Sequence Number=SeqID_44321
MEKASPVRSSHTSTAGLLAWPHPDGAGPLPARRPNQPTEELRKVVFGGQGTEDADGLNKMRTGSAPKWKEMTGSSIFKAESAAAPAASRDRQASQITFAQEGSIAHRKPTTVAEVARQRELSHTVQSEGGGKMKRQVSTVKSKELSGHDIFADQEDPKPNRSRRSNYGSSALLSAVKNANVSTFSFGEADTDSTAKTAKKKGTSNKPADLNGKVISEKDSAPAVKQPLNRAKLEETTGSSVFADGKAPATGEQSGRRTRPPPGGESSISLA

SEQ ID NO: 110296 - protein, 126 aa, Setaria italica
  Transcript Sequence Number=SeqID_44322
  Subcellular localization annotation: CTP_CleavageSite=50; ConfidenceScore=5.10e-01
SGRPAAAKLEQQLTNHHGGSLRRTRHASVGAVVATSGGGATAAGVPAAVVAAAAAAGPVLDDLLLNRAPLGVRVPVGLRLLLAVAVLPVHGDRARAHRTRRWRGREAEPPEAGSGFAWSESDGARR

SEQ ID NO: 110297 - protein, 93 aa, Setaria italica
  Transcript Sequence Number=SeqID_44323
  Subcellular localization annotation: CTP_CleavageSite=51; ConfidenceScore=5.52e-01
NSYRLSSNVIPTIHRSGHPSGRHGRPPHLPAASLSPLLPASAATRAAPRKPGERRGGWRRGQLSLPPPFFLPKSPLPFPSFLLAPANFVLGGQ

SEQ ID NO: 110298 - protein, 114 aa, Setaria italica
  misc_feature (101)..(114): Xaa can be any naturally occurring amino acid
  Transcript Sequence Number=SeqID_44324
  Subcellular localization annotation: CTP_CleavageSite=54; ConfidenceScore=5.43e-01
AVVDGKKVCMHACMRHAQWTSFSFQTSVCAALVTTWLNYRWFRRLGVCSVTSPSSKKKSSILSVSSACDNSCKKKSQVNNNTADFFAIHHSVDLDRQIKPXXXXXXXXXXXXXX

SEQ ID NO: 110299 - protein, 265 aa, Setaria italica
  Transcript Sequence Number=SeqID_44325
  Homolog annotation: Hit_ID=B6SWF3; Match level="QueryCoverage=100%, HitCoverage=100%, E-value=4e-97, Identity=71%"; Hit description=MARD1
  Pfam annotation: Domain name=DUF581; Domain location=187-244; Score =51.3; E_value=3.9e-12; Accession=PF04570.6; Description=Protein of unknown function (DUF581)
  Pfam annotation: Domain name=zf-FCS; Domain location=198-237; Score =10.6; E_value=0.046; Accession=PF06467.6; Description=MYM-type Zinc finger with FCS sequence mot
  Pfam module annotation: Pfam domain module=DUF581::zf-FCS; Domain location=187-244::198-237
MATDSSALQASPESIAQKMGFFKVPDILIKLSTSLSELDVVRSPTSPLDLKFFTGLGTKSPRSSSLDACQNQKILLGDRVGLGLVDSLADENPTPLGSRKVLLGSEMRITDNPSLKNSSTAPVQAGEVEQKNDNMSDGLEGSIMSLDDIVNSEDYTCVVSRGPNPKTTHIFGDRVFELQVEHLMPAESKDEENMSPLVKEGAMSFCRFCSEKLKEGKDIYIYQGDKAFCSSECRENFMEDEMEEYYPAPPSSSPLDNGPIFQLIR

SEQ ID NO: 110300 - protein, 49 aa, Setaria italica
  Transcript Sequence Number=SeqID_44326
TLDLLLAIRTMCSIPLFRALIVIIKYHSFRTNLLSSYLKSIDTCFKYRA

SEQ ID NO: 110301 - protein, 117 aa, Setaria italica
  Transcript Sequence Number=SeqID_44327
  Gene Ontology: Mol. function=sequence-specific DNA binding; Cellular component=nucleus; Biological process=regulation of transcription, DNA-dependent
  Homolog annotation: Hit_ID=B6SUI2; Match level="QueryCoverage=80%, HitCoverage=30%, E-value=1e-34, Identity=80%"; Hit description =WRKY71-superfamily of TFs having WRKY and zinc finger domains
MDPWIGSQPSLSLDLHVGLPPLSRHQAPVAMAKPKVLVEENFLQPLKKEPEVAALETELQRMGEENRRLAEALTAVAAKYEALRSQYTGMVAAGVTNNPSSTSEGGSVSPSRKRKTS

SEQ ID NO: 110302 - protein, 241 aa, Setaria italica
  Transcript Sequence Number=SeqID_44328
  Gene Ontology: Mol. function=sequence-specific DNA binding; Cellular component=nucleus; Biological process=regulation of transcription, DNA-dependent
  Homolog annotation: Hit_ID=Q38705; Match level="QueryCoverage=81%, HitCoverage=55%, E-value=7e-63, Identity=61%"; Hit description=DNA -binding protein
  Pfam annotation: Domain name=WRKY; Domain location=139-199; Score =132.8; E_value=1.1e-36; Accession=PF03106.7; Description=WRKY DNA -binding domain
NAQVAALETELQRMGEENRRLAEALTAVAAKYEALRSQYTGMVAAGVTNNPSSTSEGGSVSPSRKRKTSESLDTAAAPGAQAQHPPQHGLQHGGQQQPGLADQMECTSGEPCKRIREECKPKVSKLYVHADPSDLSLVVKDGYQWRKYGQKVTKDNPCPRAYFRCSFAPACPVKKKVQRSADDNTILVATYEGEHNHGQPPPAPSSQQQPHDAKNAAAKPPSPPRPAAPAAAPQSPDHPQQ

SEQ ID NO: 110303 - protein, 104 aa, Setaria italica
  Transcript Sequence Number=SeqID_44329
  Gene Ontology: Mol. function=inorganic anion exchanger activity; Cellular component=integral to membrane; Biological process=anion transport
  Homolog annotation: Hit_ID=B9RZX4; Match level="QueryCoverage=97%, HitCoverage=14%, E-value=1e-50, Identity=95%"; Hit description=Boron transporter, putative
GYFAFMAIESLPGNQFWERILLLFTAPSRRYKVLEEYHTTFVETVPFKTIAMFTLFQTAYLLVCFGITWIPIAGVLFPLMIMLLVPVRQYILPKLFKGAHLTRT

SEQ ID NO: 110304 - protein, 116 aa, Setaria italica
  Transcript Sequence Number=SeqID_44330
  Gene Ontology: Mol. function=inorganic anion exchanger activity; Cellular component=integral to membrane; Biological process=anion transport
  Homolog annotation: Hit_ID=B9RN85; Match level="QueryCoverage=87%, HitCoverage=14%, E-value=3e-25, Identity=58%"; Hit description=Boron transporter, putative
PFPELVTRQALNGRGSFSPLYLIMLLVPVRQYILPKLFKGAHLTDLDAAEYEESPAIPFSLAAQDIDVALGRAQSAEILDDMFTRSRGEIKRLNSPKITSSGGTPVAELKNIRSPF

SEQ ID NO: 110305 - protein, 146 aa, Setaria italica
  Transcript Sequence Number=SeqID_44331
  Gene Ontology: Mol. function=inorganic anion exchanger activity; Cellular component=integral to membrane; Biological process=anion transport
  Homolog annotation: Hit_ID=B9RN85; Match level="QueryCoverage=90%, HitCoverage=18%, E-value=1e-53, Identity=73%"; Hit description=Boron transporter, putative
TRLVTTRLPSRRYKVLEEYHTTFVETVPFKTIAMFTLFQTAYLLVCFGITWIPIAGVLFPLMIMLLVPVRQYILPKLFKGAHLTDLDAAEYEESPAIPFSLAAQDIDVALGRAQSAEILDDMFTRSRGEIKRLNSPKITSYRWTTT

SEQ ID NO: 110306 - protein, 752 aa, Setaria italica
  Transcript Sequence Number=SeqID_44332
  Gene Ontology: Mol. function=inorganic anion exchanger activity; Cellular component=integral to membrane; Biological process=anion transport
  Homolog annotation: Hit_ID=B9RN85; Match level="QueryCoverage=92%, HitCoverage=98%, E-value=0.0, Identity=78%"; Hit description=Boron transporter, putative
  Pfam annotation: Domain name=HCO3_cotransp; Domain location=46-595; Score=-91.2; E_value=1.7e-16; Accession=PF00955.13; Description=HCO3- transporter family
HFFLFHLPQDVSRVSLDTPSGHSEYTLRSSCLSKSDALFGPGNGGELRRPWRGIKNDLQGRLACYKQDWTGGFRAGIRILAPTTYIFFASAIPVISFGEQLERNTDGVLTAVQTLASTALCGIIHSIVGGQPLLILGVAEPTVLMYTFMFNFAKDRPDLGRNLFLAWTGWVCVWTAILLFLLAILGACSIINRFTRIAGELFGLLIAMLFMQQAIKGLVDEFRIPERENRKALEFVPSWCFANGMFAIVLSFGLLLTALRSRKARSWRYGAGWLRGFIADYGVPLMVLVWTGVSYIPYGSVPKGIPRRLFSPNPWSPGAYDNWTVVKDMTHVPLLYIIGAFIPATMIAVLYYFDHSVASQLAQQKEFNLRKPPSFHYDLLLLGFLTLLCGLIGIPPSNGVIPQSPMHTKSLATLKHQLLRNRLVATARKSMSQNASLSQLYGSMQDAYQQMQTPLVYQQQSVRRGLNELKDSTVQLASSMGNIDAPVDETIFDIEKEIDDLLPMEVKEQRLSNLLQAAMVGGCVAAMPLLKKIPTSVLWGYFAFMAIESLPGNQFWERILLLFTAPSRRYKVLEEYHTTFVETVPFKTIAMFTLFQTAYLLVCFGITWIPIAGVLFPLMIMLLVPVRQYILPKLFKGAHLTDLDAAEYEESPAIPFSLAAQDIDVALGRAQSAEILDDMFTRSRGEIKRLNSPKITSSGGTPVAELKNIRSPSISEKAYSPRLTELRHERSPLGGRSSPRTPSKLGEGSTPK

SEQ ID NO: 110307 - protein, 366 aa, Setaria italica
  misc_feature (176)..(176): Xaa can be any naturally occurring amino acid
  Transcript Sequence Number=SeqID_44333
  Gene Ontology: Mol. function=DNA binding; Cellular component=nucleus
  Homolog annotation: Hit_ID=Q5N909; Match level="QueryCoverage=78%, HitCoverage=23%, E-value=5e-27, Identity=34%"; Hit description=AT hook motif-containing protein-like
MCSRQLNGATASVESALLKMVSVTSGLRSASMLNFEDNVHRGALSGDSLQPIKISPKSRESSGRKGRGRPKKSLLSVGTSCLVASDANFPVTTSVLPSDNNLTSLVKSDGEFIASNLGSIGSSGLGVEKSGVHAGVVPSDAASPGHGLYNANFKEESSTKRGSGSRKKLVSTVHSXLQILVAKKQKTEPTQKSSDPVILVENCMNGPCPRKGGGQPQRIPASNESTSTSVGDETHTMERFLTPMTTGPPRSEDMADEAGLIQANNGIVNCEGMKLNERIAANVTSHCNENAQTNQVAPNFKNSDRLIDEVEATELVPLKEPREDVNMFCSVENSNSSPIPKDIALPRLVLCLAHNGKVAWDIKWKP

SEQ ID NO: 110308 - protein, 536 aa, Setaria italica
  misc_feature (165)..(165): Xaa can be any naturally occurring amino acid
  misc_feature (300)..(300): Xaa can be any naturally occurring amino acid
  Transcript Sequence Number=SeqID_44334
  Gene Ontology: Mol. function=DNA binding; Cellular component=nucleus; Biological process=tRNA transcription from RNA polymerase III promoter
  Homolog annotation: Hit_ID=Q5N909; Match level="QueryCoverage=97%, HitCoverage=46%, E-value=0.0, Identity=62%"; Hit description=AT hook motif-containing protein-like
  Pfam annotation: Domain name=WD40; Domain location=152-189; Score =13.8; E_value=0.74; Accession=PF00400.24; Description=WD domain, G -beta repeat
  Pfam annotation: Domain name=WD40; Domain location=199-241; Score =14.2; E_value=0.57; Accession=PF00400.24; Description=WD domain, G -beta repeat
  Pfam annotation: Domain name=WD40; Domain location=246-284; Score =6.7; E_value=6.4; Accession=PF00400.24; Description=WD domain, G -beta repeat
  Pfam module annotation: Pfam domain module=WD40::WD40::WD40; Domain location=152-189::199-241::246-284
MKLNERIAANVTSHCNENAQTNQVAPNFKNSDRLIDEVEATELVPLKEPREDVNMFCSVENSNSSPIPKDIALPRLVLCLAHNGKVAWDIKWKPPVVSQPEQKSRLGFLAVLLGNGSLEVWEVPSPCMIQKIYSPSKVEGSDPRFLKLQPVFRCVKVKCGNRQSXDWSPSPPHDMILAGCHDGTVALWNFSMNLSSQDSKPFMCVIAESVPIRALSWAPYISDENINTFVTAGADGLKFWDLRDPYRPLWELTTAPRAVLSLQWLKDGRGIVISMEDGTLKFLSLPRIANDVPATGRPFXVGTKNQGVATYQLSEYLIWSVHASDTTGCAAYCGADGTAVCFQLTPRFWEKEPGRNRVPYFLCGSLSEDGENIKIGSRPQTSPLPNVPVANKKGPKPCQNIVQALPAGNVIGNPALGDDQNDGHNEEQGAGAENPEPGDNFDDGQNEGGAGVVNPELGDQDGHSEEQEAGAIVLVGPTEQEDDGTLNSKGSESPKDFEVFPPKSVALHRVRWNMNKGSERWLCYGGAAGIVRCQRI

SEQ ID NO: 110309 - protein, 66 aa, Setaria italica
  Transcript Sequence Number=SeqID_44335
HWLTRQQLRPLRVSVEQRSTIATAYRYTRLYTCSILKMLSKRHRLSLRNLTFNNLLELSTGVPCCI

SEQ ID NO: 110310 - protein, 87 aa, Setaria italica
  Transcript Sequence Number=SeqID_44336
RSMIHGGRSFPYMSNLTFDGLWWWEFPVHVQSTVHGGESFQVCTYFHYIFTHFDEHAVLYTDGPEPKKLGLLKKTNLAEAPWIIVYG

SEQ ID NO: 110311 - protein, 281 aa, Setaria italica
  Transcript Sequence Number=SeqID_44337
  Gene Ontology: Mol. function=Rho guanyl-nucleotide exchange factor activity
  Homolog annotation: Hit_ID=B6U1X9; Match level="QueryCoverage=98%, HitCoverage=47%, E-value=1e-135, Identity=86%"; Hit description =Pollen-specific kinase partner protein
  Pfam annotation: Domain name=PRONE; Domain location=1-278; Score =287.2; E_value=3.7e-83; Accession=PF03759.5; Description=PRONE (Plant-specific Rop nucleotide
MTSRPRSDLYINLPALRKLDNMLLEILEGFRDAEFWYVDQGICAPDCDGSASFRRTFHRRDDKWWLPVPRVPHGGLCEATRRQVEHRRDCANQILKAAMAINSNALAEMDVPDSYLDSLPKNGRATLGDVIYRYITSDQFSPDCLLDCLDLSSEYQALEIANRVEASVYVWRRRGGAAGKPASRAGTKLSWGIVKDMIMDTEKRDLLAERAEGLLISLKQRFPGLTQTSLDMSKIQYNKDVGKSILESYSRVLESLASNIIARIDDLLNVDELSKQSDHPP

SEQ ID NO: 110312 - protein, 158 aa, Setaria italica
  misc_feature (98)..(98): Xaa can be any naturally occurring amino acid
  misc_feature (133)..(133): Xaa can be any naturally occurring amino acid
  Transcript Sequence Number=SeqID_44338
  Gene Ontology: Mol. function=binding; Cellular component=cellular _component; Biological process=interspecies interaction between organisms
  Homolog annotation: Hit_ID=Q5ZIW5; Match level="QueryCoverage=100%, HitCoverage=17%, E-value=7e-29, Identity=44%"; Hit description =Protein VAC14 homolog
DANVQSAAHLLDRLVKDIVTESDQFSIEEFIPLLRERMNVLNPYVRQFLVGWITVLDSVPDIDMLGFLPDFLDGNPSFFSSALLMLAVQQPFYRYPCXLFNMLSDSSHEIRQQADAALSEFLQEIKNSPNVDXYWSLLAEILVRRAGSTDEFTRLTSI

SEQ ID NO: 110313 - protein, 140 aa, Setaria italica
  Transcript Sequence Number=SeqID_44339
  Gene Ontology: Mol. function=binding; Cellular component=cellular _component; Biological process=interspecies interaction between organisms
  Homolog annotation: Hit_ID=Q68F38; Match level="QueryCoverage=82%, HitCoverage=14%, E-value=3e-23, Identity=52%"; Hit description =Protein VAC14 homolog
ERNKKITLYVPYARIAEEPHHFHHLVSYLIRTFHNNHVLLEKRGALIVRRLCVLLGAEKVYREFSAILESEIDLDFASVMVQALNLILLTSTELGELRSLLKRSLVDSCGKDLFQSLYASWRHSPMATISLCLLAQVMID

SEQ ID NO: 110314 - protein, 81 aa, Setaria italica
  Transcript Sequence Number=SeqID_44340
  Subcellular localization annotation: CTP_CleavageSite=63; ConfidenceScore=5.62e-01
LPFHDKSQSIIQETNQTKSQQPSTPTTDSVSLVLLCHTSLPTSSAIMPRPACAPLLLLAAAVLAVAAASPANSNAASASDF

SEQ ID NO: 110315 - protein, 62 aa, Setaria italica
  Transcript Sequence Number=SeqID_44341
  Gene Ontology: Mol. function=binding
QVQYASCVIQSLGEEDINVKFLVQLDKLIRLLETPVFAYLRLQVLVLTTPSCKFLFLFLMHL

SEQ ID NO: 110316 - protein, 260 aa, Setaria italica
  Transcript Sequence Number=SeqID_44342
  Gene Ontology: Mol. function=binding; Cellular component=cellular _component; Biological process=interspecies interaction between organisms
  Homolog annotation: Hit_ID=Q08AM6; Match level="QueryCoverage=81%, HitCoverage=25%, E-value=2e-32, Identity=41%"; Hit description =Protein VAC14 homolog
VYREFSAILESEIDLDFASVMVQALNLILLTSTELGELRSLLKRSLVDSCGKDLFQSLYASWRHSPMATISLCLLAQAYSHASCVIQSLGEEDINVKFLVQLDKLIRLLETPVFAYLRLQLLEPGKHTWLLKTLYGLMMLLPQQSAAFKILRTRLKTVPFSENLKRTSSANPYSQILQVTEDGNRNQDTQNYSAINFPSLLQQFENMQQQHRNHLKGQLQSRKSASAATLLQEIQRYEEAHSSSLSEISRPPSRTSKGVS

SEQ ID NO: 110317 - protein, 66 aa, Setaria italica
  Transcript Sequence Number=SeqID_44343
  Homolog annotation: Hit_ID=Q2R928; Match level="QueryCoverage=80%, HitCoverage=12%, E-value=6e-13, Identity=67%"; Hit description=F-box domain containing protein, expressed
MKNDGSYKPLEQSIAASHLQIVEIKCKDVDEIVLEILKVLNATGIPQEKIRIRYSAGYNFVRTDST

SEQ ID NO: 110318 - protein, 66 aa, Setaria italica
  Transcript Sequence Number=SeqID_44344
  Homolog annotation: Hit_ID=Q2R928; Match level="QueryCoverage=80%, HitCoverage=12%, E-value=6e-13, Identity=67%"; Hit description=F-box domain containing protein, expressed
NENDGSYKPLEQSIAASHLQIVEIKCKDVDEIVLEILKVLNATGIPQEKIRIRYSAGYNFVRTDST

SEQ ID NO: 110319 - protein, 243 aa, Setaria italica
  Transcript Sequence Number=SeqID_44345
  Homolog annotation: Hit_ID=Q2R928; Match level="QueryCoverage=95%, HitCoverage=54%, E-value=2e-79, Identity=63%"; Hit description=F-box domain containing protein, expressed
DCDVGSLEIHSPSLRHLRIRYCLFYCNYRTRMSFPNLVTFQFITNAGRVPLLESMPSLETATVRYDHFYDDRCENGRLDDCGDTGCDGCFFYYGPHDYNCVFLEGLTEATDLKLSAYPDLYVFNRDLEWCPAFSKLKTLVLSKWFVSADLSAVIWFLCHAPLLEKLTLKPSKVRDNLMKNDGSYKPLEQSIAASHLQIVEIKCKDVDEIVLEILKVLNATGIPQEKIRIRYSAGYNFVRTDST

SEQ ID NO: 110320 - protein, 555 aa, Setaria italica
  Transcript Sequence Number=SeqID_44346
  Gene Ontology: Mol. function=binding; Cellular component=cellular _component; Biological process=interspecies interaction between organisms
  Homolog annotation: Hit_ID=Q68F38; Match level="QueryCoverage=99%, HitCoverage=84%, E-value=1e-116, Identity=38%"; Hit description =Protein VAC14 homolog
  Pfam annotation: Domain name=HEAT; Domain location=128-163; Score =8.2; E_value=4.9; Accession=PF02985.14; Description=HEAT repeat
  Pfam annotation: Domain name=HEAT; Domain location=169-205; Score =3.4; E_value=19; Accession=PF02985.14; Description=HEAT repeat
  Pfam annotation: Domain name=HEAT; Domain location=210-246; Score =22.8; E_value=0.0014; Accession=PF02985.14; Description=HEAT repeat
  Pfam annotation: Domain name=HEAT; Domain location=251-287; Score =1.8; E_value=29; Accession=PF02985.14; Description=HEAT repeat
  Pfam annotation: Domain name=HEAT; Domain location=3-39; Score=3.3; E_ value=19; Accession=PF02985.14; Description=HEAT repeat
  Pfam annotation: Domain name=HEAT; Domain location=375-411; Score =12.2; E_value=1.6; Accession=PF02985.14; Description=HEAT repeat
  Pfam annotation: Domain name=HEAT; Domain location=87-123; Score =37.0; E_value=7.7e-08; Accession=PF02985.14; Description=HEAT repeat
  Pfam module annotation: Pfam domain module=HEAT::HEAT::HEAT::HEAT::HEA T::HEAT::HEAT; Domain location=128-163::169-205::210-246::251-287::3 -39::375-411::87-123
MAADALSIIPGAVLRNLSDKLYEKRKNAALEIEGIVKQLATAGEHEKISAVISLLTNDFTYSPQANHRKGGLIGLAAVTVGLTSEAAQHLEQIVPPVLSSFLDQDSRVRYYACEALYNIAKVVRGDFIIYFNKIFDSLCKLSADSDANVQSAAHLLDRLVKDIVTESDQFSIEEFIPLLRERMNVLNPYVRQFLVGWITVLDSVPDIDMLGFLPDFLDGLFNMLSDSSHEIRQQADAALSEFLQEIKNSPNVDYGRMAEILVRRAGSTDEFTRLTSITWINEFVKLGGEQLVPYYADILGAILPCISDEEEKIRVVARETNEELRGIKADPTEGFDIGAILSIAKRELNSEHEATRIEALHWFSTLLVRYRVEFLAYLNDIFNPLLNALSDPSDAVVLLVLEVHARIAEEPHHFHHLVSYLIRTFHNNHVLLEKRGALIVRRLCVLLGAEKVYREFSAILESEIDLDFASVMVQALNLILLTSTELGELRSLLKRSLVDSCGKDLFQSLYASWRHSPMATISLCLLAQAYSHASCVIQSLGEEDINVKILVQIDK

SEQ ID NO: 110321 - protein, 92 aa, Setaria italica
  Transcript Sequence Number=SeqID_44347
  Subcellular localization annotation: CTP_CleavageSite=46; ConfidenceScore=5.69e-01
PTSPSPGAAPKRSPSPSPSPGAARSTGTGHRGGRRRSAHERLYEARRAEAEEMRRRTNLPYRQGFLLFGCIGLGHRNYGAVHGLARGLQTPT

SEQ ID NO: 110322 - protein, 72 aa, Setaria italica
  misc_feature (25)..(25): Xaa can be any naturally occurring amino acid
  misc_feature (44)..(44): Xaa can be any naturally occurring amino acid
  misc_feature (55)..(55): Xaa can be any naturally occurring amino acid
  misc_feature (58)..(58): Xaa can be any naturally occurring amino acid
  misc_feature (66)..(66): Xaa can be any naturally occurring amino acid
  Transcript Sequence Number=SeqID_44348
MASQQQFPPQQQGSQPGKEHAMDPXPGGQEAIIKSYKAAGKLKXKVALVTGGDSXIGXAVCLCFAXEGATVA

SEQ ID NO: 110323 - protein, 99 aa, Setaria italica
  misc_feature (12)..(12): Xaa can be any naturally occurring amino acid
  Transcript Sequence Number=SeqID_44349
  Homolog annotation: Hit_ID=Q9SYP8; Match level="QueryCoverage=96%, HitCoverage=43%, E-value=3e-12, Identity=42%"; Hit description =F9H16.13 protein
ESTRVLSVGEEXLVGETMPLRNGRRVYRINGLRPSAWYEVKISYPASIPSSFSIRLVDDPDGADWSSKNRRLLNTEKIIFKAEGSNPVYVLVTVEPEGV

SEQ ID NO: 110324 - protein, 215 aa, Setaria italica
  misc_feature (56)..(56): Xaa can be any naturally occurring amino acid
  misc_feature (62)..(62): Xaa can be any naturally occurring amino acid
  misc_feature (85)..(85): Xaa can be any naturally occurring amino acid
  Transcript Sequence Number=SeqID_44350
  Homolog annotation: Hit_ID=Q9SYP8; Match level="QueryCoverage=61%, HitCoverage=61%, E-value=2e-18, Identity=42%"; Hit description =F9H16.13 protein
MPSPRRPLASPCRGRIVVAVLLSALLLLSSAAHSAEESTRVLSVGEELVGETMPLXHGRRVXRNTNGLRPSAWYEVKISYPASVXICALPIPSSFSIRLVDDPDGADWSSKNRRLLNTEKIIFKAEGSNPVYVLVTVEPEGVVAKPNVPEREHALFNIVCDELMLGLPVFTWWVGIAALLCIVLASLAPLVLQLHKLLDNYEGSDLNQADAAKMS

SEQ ID NO: 110325 - protein, 42 aa, Setaria italica
  Transcript Sequence Number=SeqID_44351
  Gene Ontology: Biological process=intracellular transport
  Homolog annotation: Hit_ID=B6TKF2; Match level="QueryCoverage=100%, HitCoverage=8%, E-value=1e-13, Identity=88%"; Hit description=RanBP1 domain containing protein
MADDELAPSSKKRVAGTQINKDNPEPDDDGPEQEMGTFKKAT

SEQ ID NO: 110326 - protein, 183 aa, Setaria italica
  Transcript Sequence Number=SeqID_44352
  Gene Ontology: Biological process=intracellular transport
  Homolog annotation: Hit_ID=B6TKF2; Match level="QueryCoverage=82%, HitCoverage=28%, E-value=3e-45, Identity=68%"; Hit description =RanBP1 domain containing protein
  Pfam annotation: Domain name=NUP50; Domain location=1-183; Score= -43.1; E_value=8.6e-06; Accession=PF08911.3; Description=NUP50 (Nucleoporin 50 kDa)
  Subcellular localization annotation: CTP_CleavageSite=68; ConfidenceScore=5.10e-01
NDGPEQEMGTFKKATEEVMATRRIVKVRRQQPSSAPSSNPFSAIRFTPTDSSVQASAPVTEPQPSDVKADEGSNGSGKDTMSVPDKDAGSGEVTEIQKDESTVKTGSGATTEVPPQPVETIDKAEDAKDGSGADKVVVGEPKEGDSMPSEVEDKTKEGDAEEKEGADEVGDEDRNSKDGTEKK

SEQ ID NO: 110327 - protein, 81 aa, Setaria italica
  Transcript Sequence Number=SeqID_44353
  Gene Ontology: Biological process=intracellular transport
  Homolog annotation: Hit_ID=B6U2P1; Match level="QueryCoverage=100%, HitCoverage=18%, E-value=7e-33, Identity=86%"; Hit description =RanBP1 domain containing protein
LVLNASLYDDMSLKDMDKKGVTFACMNSIGESQSSLVTFALKFKDTATREEFKGAVETHKALKAPDVPLKTPENSPKAAEV

SEQ ID NO: 110328 - protein, 236 aa, Setaria italica
  Transcript Sequence Number=SeqID_44354
  Gene Ontology: Mol. function=zinc ion binding; Cellular component =intracellular; Biological process=intracellular transport
  Homolog annotation: Hit_ID=B6U2P1; Match level="QueryCoverage=99%, HitCoverage=59%, E-value=4e-86, Identity=67%"; Hit description =RanBP1 domain containing protein
  Pfam annotation: Domain name=Ran_BP1; Domain location=114-233; Score =18.1; E_value=2.3e-09; Accession=PF00638.10; Description=RanBP1 domain
  Subcellular localization annotation: CTP_CleavageSite=101; ConfidenceScore=5.08e-01
TEKKDGGESETKNGLSDEQKDADNKGQTSSAMPLFSFKNLSSSQNAFTGLSGTGFSSSSFSFGSVSKDGSSAGTLFGLKTDGSSVPSFNLGTNNNSALATSAETPKKFAMTEGPVETGEENEKAVFTADSALYEYLGGGWKERGKGELKLNVPVSGGERGRLVMRTKGNYRLVLNASLYDDMSLKDMDKKGATFACVNSIGESQSGLTTFALKFKDTATREEFKGTVEAHKTKKAN

SEQ ID NO: 110329 - protein, 457 aa, Setaria italica
  Transcript Sequence Number=SeqID_44355
  Gene Ontology: Mol. function=zinc ion binding; Cellular component =intracellular; Biological process=intracellular transport
  Homolog annotation: Hit_ID=B6TRM8; Match level="QueryCoverage=100%, HitCoverage=99%, E-value=1e-176, Identity=69%"; Hit description =RanBP1 domain containing protein
  Pfam annotation: Domain name=NUP50; Domain location=10-289; Score =212.4; E_value=1.2e-60; Accession=PF08911.3; Description=NUP50 (Nucleoporin 50 kDa)
  Pfam annotation: Domain name=Ran_BP1; Domain location=319-440; Score =27.9; E_value=2.5e-10; Accession=PF00638.10; Description=RanBP1 domain
  Pfam module annotation: Pfam domain module=NUP50::Ran_BP1; Domain location=10-289::319-440
MADDEQAPSSRKRVAGTQINKDNPEPDDDGPEQEMGTFKKATEEVMATRRIVKVRRQQPSSAPSSNPFSAIRFTPTDSSAQASAPVPEPQASNAKADEGSNGSGKDTLSVPDKNAGSGELPESAVNTDSGATTEAPHQPVETSDKAEDTKDGSGGGKVVVGEPNNGNNMSSEVEGKTKDRDAEEKGGADEVGDEDRNSKDGTEKKDGGNSETKDGLPDEQKDADNNGQSSSATPLFSFKNLSSGQNAFTGLAGTGFSSTSFSFGSASKDGSSPGPLFGLKTDGSSFPSFNLGATNNGNSSTALATSGEVPKKFAMAEGPVETGEENEKAVFTADSALYEYLDGGWKERGKGEVKLNVPVSGGERARLVMRTKGNYRLVLNASLYDDMSLKDMDKKGVTFACMNSIGESQSSLVTFALKFKDTATREEFKGAVETHKAQKAPDAPLKTPEGSPKAAEV

SEQ ID NO: 110330 - protein, 182 aa, Setaria italica
  Transcript Sequence Number=SeqID_44356
  Gene Ontology: Mol. function=calcium ion binding; Cellular component =spindle microtubule
  Homolog annotation: Hit_ID=P27164; Match level="QueryCoverage=100%, HitCoverage=100%, E-value=2e-76, Identity=76%"; Hit description =Calmodulin-related protein
  Pfam annotation: Domain name=efhand; Domain location=12-40; Score =41.4; E_value=3.7e-09; Accession=PF00036.24; Description=EF hand
  Pfam annotation: Domain name=efhand; Domain location=121-149; Score =36.3; E_value=1.2e-07; Accession=PF00036.24; Description=EF hand
  Pfam annotation: Domain name=efhand; Domain location=48-76; Score =33.8; E_value=7e-07; Accession=PF00036.24; Description=EF hand
  Pfam annotation: Domain name=efhand; Domain location=85-113; Score =41.3; E_value=3.7e-09; Accession=PF00036.24; Description=EF hand
  Pfam module annotation: Pfam domain module=efhand::efhand::efhand::efh and; Domain location=12-40::121-149::48-76::85-113
MADQLSDDQIAEFKEAFSLFDKDGDGCITTKELGAVMRSLGQNPTEAELQDMITEVDSDGNGTVDFPEFLGLMARKMRDSDSEEELREAFRVFDKDQNGFISAAELRHVMANLGERLADAEVDEMVREADGDGDGSINYDEFVKVMMAKRRSKRTEEKPVRGGKKKPGTSDAGKRPQKCVIL

SEQ ID NO: 110331 - protein, 53 aa, Setaria italica
  Transcript Sequence Number=SeqID_44357
FLVLLVNVAIVSITGTICADSQMVDDNCSGLTLNSTSVLLKVSTDENIVQHQL

SEQ ID NO: 110332 - protein, 465 aa, Setaria italica
  misc_feature (34)..(34): Xaa can be any naturally occurring amino acid
  Transcript Sequence Number=SeqID_44358
  Gene Ontology: Mol. function=transporter activity; Cellular component= membrane; Biological process=transport
  Homolog annotation: Hit_ID=Q84LR1; Match level="QueryCoverage=92%, HitCoverage=81%, E-value=1e-124, Identity=51%"; Hit description=Root- specific metal transporter
  Pfam annotation: Domain name=Acyl_transf_3; Domain location=170-436; Score=-91.5; E_value=0.066; Accession=PF01757.14; Description =Acyltransferase family
  Pfam annotation: Domain name=Nramp; Domain location=9-367; Score =372.8; E_value=6.3e-109; Accession=PF01566.10; Description=Natural resistance-associated macrophage protein
  Pfam module annotation: Pfam domain module=Acyl_transf_3::Nramp; Domain location=170-436::9-367
CGRQPPPAVQTDLQAGSSHRYELLWVLFFGFIFXLIIQSLAAKLGIITGKHLAELCMREYPKYVKYGLWLLVEVGVIAATVPGVLGTALAYKILLHIPFWAGVLICGASTFLILALQSCGVRKMEFIGVIFILIMAACFFVEVNSANPPMGEVIQGLFIPRLRGAYATSDAIALFSALIVPHNLFLHSSLVLSRKIPSSPKGVKDTSTFFLIENAFALFLVLLVNVAIVSITGTICADSQMVDDNCSGLTLNSTSVLLKNMFGKSSSKIYGLALLASGQSCTVATSYSGQYIMQGFSGMRKFIIYIIAPCFTIIPSLIICSIGGAAHVRQLIYISAIILAFVLPFALVPLLKFSSSCAMIGPYKNSTCIVRVAWILSMVIMGVNIYFFCTSFLSWLVHSELPRIANAVISTLVFPFMAAYIAALIYLVFKKVSVPLPFPSMPVSSETEVADARRQDDKVDDITVH

SEQ ID NO: 110333 - protein, 137 aa, Setaria italica
  Transcript Sequence Number=SeqID_44359
  Homolog annotation: Hit_ID=B6UCI9; Match level="QueryCoverage=100%, HitCoverage=20%, E-value=7e-57, Identity=78%"; Hit description =Heterogeneous nuclear ribonucleoprotein U-like protein 1
MASPDDEAAQPPPKRPRRDPEAEEDAAQPPRVALNPADCDLDFDVGGGGLQGSALHEGGFAYCWSGARATVGTRGGGRYCFGCRIVAEQPVEMDLTAPEERHLCRIGVSRGDDPIGALGESDHSFGFGGTGKLSHQR

SEQ ID NO: 110334 - protein, 111 aa, Setaria italica
  Transcript Sequence Number=SeqID_44360
  Subcellular localization annotation: CTP_CleavageSite=62; ConfidenceScore=5.12e-01
FGRLQGEHLRPNLFFPYSKIHYFFLFRLALAFSKSLSKSNCSISILLISTPVLPDLITNSTLLRTAKEFLGYRCLPSRFLFRVASLDLSAIFIAPSPCFFNLSLCFFVQGL

SEQ ID NO: 110335 - protein, 593 aa, Setaria italica
  misc_feature (27)..(27): Xaa can be any naturally occurring amino acid
  Transcript Sequence Number=SeqID_44361
  Gene Ontology: Mol. function=oxidoreductase activity; Cellular component=extracellular region; Biological process=metabolic process
  Homolog annotation: Hit_ID=A7LHM3; Match level="QueryCoverage=100%, HitCoverage=100%, E-value=0.0, Identity=90%"; Hit description=BADH -like protein
  Pfam annotation: Domain name=Aldedh; Domain location=53-521; Score =478.7; E_value=8.4e-141; Accession=PF00171.14; Description=Aldehyde dehydrogenase family
MAFWWPLLVLAAAYALCRLLLFLIPPXVPSIDVDASDVLAKEDSFIYIPRKGKAAQTDKVQCYEPATMKYLGYFPALTPDEVKEHVAQARKAQKIWAKSSFKQRRQFLRILLKYILENQDLICEVSSRDTGKTMVDASLGEIMTTCEKITWLLDEGEKWLKPEYRSTGRSMLHKRAKVEFYPLGVIGAIVSWNYPFHNVFNPMLAALFSGNAAVIKVSEHATWSGCFYFRIIQAALSAVGAPENLVHIITGFAETGQALVSSVDKIIFVGSPGVGKMIMQRASETLIPVTLELGGKDSFIVCEDVDLPNVVQVAVRAALQSSGQNCAGAERFYVHNDIYSAFVSQVVKIVKSICVGPPLSGRYDMGAICMMEHSEKLQNLVNDALDKGAEIAVRGSFGHLGEDAVDQFFPPTVLVNVNHTMKIMQEEAFGPILPIMKFSSDEEAIKLANDSKYGLGCAVFSGNQKRAIRIASQLHCGVAAINDFASSYMCQSLPFGGVKDSGFGRFAGIEGLRACCLVKAVVEDRFWPYIKTMIPKPIQYPVSKHGFEFQELLVQTLYGYSVWDRLRSLVNLVKMITEQNSAPAPSTTMKKRR

SEQ ID NO: 110336 - protein, 125 aa, Setaria italica
  Transcript Sequence Number=SeqID_44362
  Gene Ontology: Mol. function=serine-type endopeptidase activity; Cellular component=cell wall; Biological process=negative regulation of catalytic activity
  Homolog annotation: Hit_ID=B6SZ82; Match level="QueryCoverage=100%, HitCoverage=73%, E-value=8e-24, Identity=83%"; Hit description =Subtilisin-like protease
  Pfam annotation: Domain name=Inhibitor_I9; Domain location=47-125; Score=36.9; E_value=8.1e-08; Accession=PF05922.8; Description =Peptidase inhibitor I9
MSCPHISGLAAFVKAAHPNWSPSAIKSALMTTAYTVDNTDSPLLDAATYIVYLNPALKPSPYATHLHWHHAHLDALSLDPSRHLLYSYTTAAPSAFAARLLPSHVAALRGHPAVASVHEDVLLPL

SEQ ID NO: 110337 - protein, 173 aa, Setaria italica
  misc_feature (161)..(161): Xaa can be any naturally occurring amino acid
  Transcript Sequence Number=SeqID_44363
  Gene Ontology: Mol. function=serine-type endopeptidase activity; Cellular component=cell wall; Biological process=negative regulation of catalytic activity
  Homolog annotation: Hit_ID=B6SZ82; Match level="QueryCoverage=99%, HitCoverage=22%, E-value=3e-85, Identity=90%"; Hit description =Subtilisin-like protease
VPQLLKPDVIGPGVNILAGWTGSLGPTGLVADDRRSAFNILSGTSMSCPHISGLAAFVKAAHPNWSPSAIKSALMTTAYTVDNTDSPLLDAATNATATPWAFGAGHVDPVRALSPGLVYDATVDDYVAFLCTVGVSPRQVQAVAAAGPNVTCTRKLSSPGXDLNYPSFSVVFG

SEQ ID NO: 110338 - protein, 83 aa, Setaria italica
  misc_feature (27)..(27): Xaa can be any naturally occurring amino acid
  Transcript Sequence Number=SeqID_44364
  Gene Ontology: Mol. function=structural constituent of ribosome; Cellular component=ribonucleoprotein complex; Biological process =translation
  Homolog annotation: Hit_ID=Q2R1J8; Match level="QueryCoverage=98%, HitCoverage=42%, E-value=1e-36, Identity=92%"; Hit description=40S ribosomal protein S9, putative, expressed
  Pfam annotation: Domain name=Ribosomal_S4; Domain location=1-65; Score=14.2; E_value=0.0064; Accession=PF00163.11; Description =Ribosomal protein S4S9 N-terminal domain
LWRVQYALSRIRNAARHLLTLDEKNPXRIFEGEALLRRMNRYGLLAEGQNKLDYVLALTAENFLARRLQTLVFKAGMAKSCQP

SEQ ID NO: 110339 - protein, 172 aa, Setaria italica
  misc_feature (148)..(148): Xaa can be any naturally occurring amino acid
  Transcript Sequence Number=SeqID_44365
  Gene Ontology: Mol. function=structural constituent of ribosome; Cellular component=ribonucleoprotein complex; Biological process =translation
  Homolog annotation: Hit_ID=Q2R1J8; Match level="QueryCoverage=93%, HitCoverage=81%, E-value=2e-72, Identity=86%"; Hit description=40S ribosomal protein S9, putative, expressed
  Pfam annotation: Domain name=Ribosomal_S4; Domain location=1-84; Score=70.2; E_value=7.7e-18; Accession=PF00163.11; Description =Ribosomal protein S4S9 N-terminal domain
  Pfam annotation: Domain name=S4; Domain location=85-132; Score=49.9; E_value=9.7e-12; Accession=PF01479.17; Description=S4 domain
  Pfam module annotation: Pfam domain module=Ribosomal_S4::S4; Domain location=1-84::85-132
RLDAELKLVGEYGLRCKRELWRVQYALSRIRNAARHLLTLDEKNPRRIFEGEALLRRMNRYGLLAEGQNKLDYVLALTAENFLARRLQTLVFKAGMAKSIHHARVLIKQRHIRVGRQIVNVPSFMVRVESEKHIDFSLSSPFGGGPPXGRVKRKNQNKATGGGGDGGDEDEE

SEQ ID NO: 110340 - protein, 195 aa, Setaria italica
  misc_feature (165)..(165): Xaa can be any naturally occurring amino acid
  Transcript Sequence Number=SeqID_44366
  Gene Ontology: Mol. function=structural constituent of ribosome; Cellular component=ribonucleoprotein complex; Biological process =translation
  Homolog annotation: Hit_ID=Q2R1J8; Match level="QueryCoverage=94%, HitCoverage=93%, E-value=8e-94, Identity=92%"; Hit description=40S ribosomal protein S9, putative, expressed
  Pfam annotation: Domain name=Ribosomal_S4; Domain location=7-108; Score=126.9; E_value=6.3e-35; Accession=PF00163.11; Description =Ribosomal protein S4S9 N-terminal domain
  Pfam annotation: Domain name=S4; Domain location=109-156; Score=47.2; E_value=6.5e-11; Accession=PF01479.17; Description=S4 domain
  Pfam module annotation: Pfam domain module=Ribosomal_S4::S4; Domain location=7-108::109-156
MVHVSFYRNYGKTFKKPRRPYEKERLDAELKLVGEYGLRCKRELWRVQYALSRIRNAARELLTLDEKNPRRIFEGEALLRRMNRYGLLGEGQNKLDYVLALTVENFLQRRLQTIVFKNGMAKSIHHARVLIRQRHIRVGRQLVNIPSFMVRVDSEKHVDFSLTSXPLGGGEPGRVKRKNQNKASGGGGDGDEDEE

SEQ ID NO: 110341 - protein, 195 aa, Setaria italica
  misc_feature (139)..(139): Xaa can be any naturally occurring amino acid
  Transcript Sequence Number=SeqID_44367
  Gene Ontology: Mol. function=structural constituent of ribosome; Cellular component=ribonucleoprotein complex; Biological process =translation
  Homolog annotation: Hit_ID=Q2R1J8; Match level="QueryCoverage=94%, HitCoverage=93%, E-value=3e-94, Identity=92%"; Hit description=40S ribosomal protein S9, putative, expressed
  Pfam annotation: Domain name=Ribosomal_S4; Domain location=7-108; Score=126.9; E_value=6.3e-35; Accession=PF00163.11; Description =Ribosomal protein S4S9 N-terminal domain
  Pfam annotation: Domain name=S4; Domain location=109-157; Score=36.8; E_value=8.6e-08; Accession=PF01479.17; Description=S4 domain
  Pfam module annotation: Pfam domain module=Ribosomal_S4::S4; Domain location=7-108::109-157
MVHVSFYRNYGKTFKKPRRPYEKERLDAELKLVGEYGLRCKRELWRVQYALSRIRNAARELLTLDEKNPRRIFEGEALLRRMNRYGLLGEGQNKLDYVLALTVENFLQRRLQTIVFKNGMAKSIHHARVLIRQRHIRVXGRQLVNIPSFMVRVESEKHIDFSLTSPLGGGPAGRVKRKNQNKATGGGGDAEEDEE

SEQ ID NO: 110342 - protein, 330 aa, Setaria italica
  Transcript Sequence Number=SeqID_44368
  Gene Ontology: Mol. function=metal ion binding
  Homolog annotation: Hit_ID=B6SSJ0; Match level="QueryCoverage=26%, HitCoverage=18%, E-value=2e-31, Identity=61%"; Hit description=Zinc finger, C3HC4 type family protein
  Pfam annotation: Domain name=zf-C3HC4; Domain location=40-80; Score =29.9; E_value=1e-05; Accession=PF00097.17; Description=Zinc finger, C3HC4 type (RING finger)
  Subcellular localization annotation: CTP_CleavageSite=43; ConfidenceScore=5.24e-01
AQRTHSTSTTDKSSASGTAAPPSTREPDDKASRSAANFECNVCFDMAAEPVVTKCGHLFCWECLYQWLHVHSHHRECPVCKGQVAEDAIIPIYGRGGSAASVDNAPPRPTGARVESSRQQQLPSFPPTLRFDDDEEDPFDLPGMMNFGFGATATSLREAVMSFMPPSAEDMDDFDDYAYEYDTDDFDEVYAYNWLGFPVFASAGAEAGNPSSQAYADMINIRNNIVGTNAGIYHQQEVGYPGANPHNRGRHGRRSRPRPSADNSSTNGMVMGGSGAFYHDNGASSNFTAGASSRPNGGWVERRGRSSRNSNSVGGRGGMQDSRRQRTNYN

SEQ ID NO: 110343 - protein, 208 aa, Setaria italica
  misc_feature (178)..(178): Xaa can be any naturally occurring amino acid
  Transcript Sequence Number=SeqID_44369
MRHSHRQVLAAAREEVREEMVELAELKVSELEAKRKQEECRERAEEVARVANDARVSAEASARRLQKILDSRREILDLREVELLILQSAQVSARIERDVWAKAATEALQALLKMNALGDLGFKGITATSPGPVDSLGLTFHWLRKAAQATPKVAERYGSICARAAMNLALILLHSGGXTHLGSVARPDMSFLTDERFTAEVREASKGF

SEQ ID NO: 110344 - protein, 152 aa, Setaria italica
  misc_feature (79)..(79): Xaa can be any naturally occurring amino acid
  Transcript Sequence Number=SeqID_44370
  Gene Ontology: Mol. function=protein kinase activity; Cellular component=plasma membrane; Biological process=protein amino acid phosphorylation
  Homolog annotation: Hit_ID=B6U753; Match level="QueryCoverage=96%, HitCoverage=27%, E-value=2e-70, Identity=90%"; Hit description =Calcium-dependent protein kinase
  Pfam annotation: Domain name=efhand; Domain location=121-149; Score =37.2; E_value=6.6e-08; Accession=PF00036.24; Description=EF hand
  Pfam annotation: Domain name=efhand; Domain location=13-41; Score =37.4; E_value=5.7e-08; Accession=PF00036.24; Description=EF hand
  Pfam annotation: Domain name=efhand; Domain location=49-77; Score =33.7; E_value=7.3e-07; Accession=PF00036.24; Description=EF hand
  Pfam annotation: Domain name=efhand; Domain location=86-114; Score =32.7; E_value=1.5e-06; Accession=PF00036.24; Description=EF hand
  Pfam module annotation: Pfam domain module=efhand::efhand::efhand::efh and; Domain location=121-149::13-41::49-77::86-114
NSRRTLSPEEIKGLKQMFNNMDTDKSGTITVEELKEGLTKLGSKISEAEVQKLMEAVDVDKSGSIDYTEFLTAMMNKHXKLEKEEDLIRAFQYFDKDDSGYITRDELEQAMAEYGMGDEASIKQVLDEVDKDKDGNIDYEEFVEMMRKGSYT

SEQ ID NO: 110345 - protein, 152 aa, Setaria italica
  Transcript Sequence Number=SeqID_44371
  Gene Ontology: Mol. function=transcription regulator activity; Cellular component=nucleus; Biological process=regulation of transcription
  Homolog annotation: Hit_ID=B6T7Q8; Match level="QueryCoverage=43%, HitCoverage=25%, E-value=2e-21, Identity=74%"; Hit description=DNA binding like
  Pfam annotation: Domain name=HLH; Domain location=85-132; Score=35.7; E_value=1.8e-07; Accession=PF00010.18; Description=Helix-loop-helix DNA-binding domain
MEAADLLTLGFDFCFQSPPRFFDEPYEHDLAVVDSIVLHAPAEADSVTGLYPSNNREASSSSDGANSSCNTQVPPASSPAGGAANKSMVMERHRRRRLNEKLYALRSVVPNITKMDKASIVRDAIAYTQQLQEEERRVLAEVSALESSSDTA

SEQ ID NO: 110346 - protein, 186 aa, Setaria italica
  Transcript Sequence Number=SeqID_44372
  Gene Ontology: Mol. function=amino acid transmembrane transporter activity; Cellular component=integral to membrane; Biological process=amino acid transport
  Homolog annotation: Hit_ID=Q7F1E7; Match level="QueryCoverage=91%, HitCoverage=50%, E-value=5e-78, Identity=82%"; Hit description =Putative amino acid permease
GVLGPSPSTLEAIPEALITAELGTMFPENGGYVVWVASALGPYWGFQQGWMKWLSGVIDNALYPVLFLDYLKSAVPALGGGPPRAFAVLGLTAVLTLLNYRGLTVVGWVAICLGVFSVLPFFVMGLISLPKIRPARWLVVDLHDVDWNLYLNTLFWNLNYWDSISTLSGEVENPGKTLPKALFYAV

SEQ ID NO: 110347 - protein, 84 aa, Setaria italica
  Transcript Sequence Number=SeqID_44373
  Pfam annotation: Domain name=PsbI; Domain location=1-36; Score=15.6; E_value=0.061; Accession=PF02532.6; Description=Photosystem II reaction centre I protein (PSII 4.8 kDa protein)
VVFKLLLYLFLSLFVSVAAAFGFLSIDQKRNNKTERNSHIKKRSHRDGNALSSGSLGLGFEEMPHSCFIFRCLNMFCFIHFFTF

SEQ ID NO: 110348 - protein, 121 aa, Setaria italica
  Transcript Sequence Number=SeqID_44374
  Gene Ontology: Cellular component=exocyst; Biological process =exocytosis
  Homolog annotation: Hit_ID=B6SVR8; Match level="QueryCoverage=38%, HitCoverage=6%, E-value=1e-11, Identity=76%"; Hit description =Protein binding protein
MAAAPPDGQEKVIAAAQHIVKSLASSKNAADDMIRILSGFDNRLSLMSDLFPPPPGAAAAAAADSILEEDEGTSQGDGHEEDEPDPDDDAAARAEEEWDAAAEVIERWESPDAGDRMVFGS

SEQ ID NO: 110349 - protein, 44 aa, Setaria italica
  Transcript Sequence Number=SeqID_44375
MPKDRSSRVSSYESRRRSRASPYLSSSHGRSGCSRRSEESSAAA

SEQ ID NO: 110350 - protein, 319 aa, Setaria italica
  Transcript Sequence Number=SeqID_44376
  Gene Ontology: Mol. function=zinc ion binding; Cellular component =intracellular
  Homolog annotation: Hit_ID=Q2Z1Y7; Match level="QueryCoverage=46%, HitCoverage=45%, E-value=4e-34, Identity=43%"; Hit description=Pm27 protein
  Pfam annotation: Domain name=DUF1644; Domain location=56-205; Score =200.4; E_value=4.7e-57; Accession=PF07800.4; Description=Protein of unknown function (DUF1644)
  Subcellular localization annotation: CTP_CleavageSite=43; ConfidenceScore=5.18e-01
MPKDRSSRVSSYESRRRSRASPYLSSSHGRSGCSRRSEESSAAASAVAAKQAAEWEEVRCPVCMDHPHNAVLLVCSSHEKGCRPFMCDTSSRHSNCYDQYCKASKDSSKDSAAECSECQQQVQLSCPLCRGPVSDCIKDYDARMYMNSKVRSCTMESCEFRGAYQELRKHARVEHPTARPMEVDPERQRDWRRMEQQRDIGDLLSMLRSGFSSSIEDDSSGLGATEEGEEDTAERTPASITMVFIVPSGGSIMRYLTERSRALIVVSRWRASSSGGEAEATAPDSVEGNDPMPSADASAGSPHSSSSSSSEEADGDPAQ

SEQ ID NO: 110351 - protein, 51 aa, Setaria italica
  Transcript Sequence Number=SeqID_44377
SPRRHCTKAVARKAAVRTGALAVLAAAAPRRPPLVAAPRPDGVAGNVLVVS

SEQ ID NO: 110352 - protein, 72 aa, Setaria italica
  Transcript Sequence Number=SeqID_44378
THSHQEFKRKRVGQLNHLSSNEKRSEQKSKGPCIDKYMNPKAHVGPNTIIKHLQNEEPTFQADAKFPLGFQN

SEQ ID NO: 110353 - protein, 263 aa, Setaria italica
  Transcript Sequence Number=SeqID_44379
  Gene Ontology: Mol. function=oxidoreductase activity, acting on the CH-OH group of donors, NAD or NADP as acceptor; Biological process =metabolic process
  Homolog annotation: Hit_ID=B6THB0; Match level="QueryCoverage=94%, HitCoverage=75%, E-value=1e-102, Identity=74%"; Hit description =Glyoxylate reductase
  Pfam annotation: Domain name=2-Hacid_dh; Domain location=1-261; Score= 3.4; E_value=0.0019; Accession=PF00389.22; Description=D-isomer specific 2-hydroxyacid dehydr
  Pfam annotation: Domain name=2-Hacid_dh_C; Domain location=56-229; Score=252.7; E_value=8.7e-73; Accession=PF02826.11; Description=D -isomer specific 2-hydroxyacid dehydr
  Pfam annotation: Domain name=F420_oxidored; Domain location=94-255; Score=-54.4; E_value=0.037; Accession=PF03807.9; Description=NADP oxidoreductase coenzyme F420-dependent
  Pfam module annotation: Pfam domain module=2-Hacid_dh::2-Hacid_dh _C::F420_oxidored; Domain location=1-261::56-229::94-255
AVRVDAALLDAVPSLGFVFSTGAGVDHIDLCECARRSVAVANSGTVYSADVADHAVGMLIDVLRRVSAAERFVRSGLWPAQGDYPLGTKLGGKRVGIIGLGNIGSLIAKRLEAFGCIIHYNSRRSRDSVPYKYFFNVHDLASESDVLVVACALNKDTRHIVNKDVLEALGKDGIIINIGRGANVDEAELIMALKEGRIAGAGLDVFENEPKVPAELFSMDNVVMTSHVAVFTSESRSDLWDTTIGSLEAFFSGKPLLRQVLPW

SEQ ID NO: 110354 - protein, 65 aa, Setaria italica
  misc_feature (52)..(52): Xaa can be any naturally occurring amino acid
  Transcript Sequence Number=SeqID_44380
MLRQSSSKNHRSRGLKLKKALQITLLVLVSVWLIYQVKHSYEKKASYSEDEXDDLHKDDKGPGGR

SEQ ID NO: 110355 - protein, 82 aa, Setaria italica
  Transcript Sequence Number=SeqID_44381
VNEHLDFFGQSFCSNPPRGVRRINLSVGGWEEETRPTRTAVSRILSGELIPGPVLSKSWNHFSCTVALPCGFLSSLEPFGFP

SEQ ID NO: 110356 - protein, 414 aa, Setaria italica
  Transcript Sequence Number=SeqID_44382
  Homolog annotation: Hit_ID=B9T179; Match level="QueryCoverage=17%, HitCoverage=9%, E-value=6e-12, Identity=46%"; Hit description =Transcription factor, putative
MLRQSSSKNHRSRGLKLKKALQITLLVLVSVWLIYQVKHSYEKKASYSEDEGNDLHKDDKDQGEVIRLGRKDLPPKIEADSSTLDEKVEDEENDEMEQEMKHDENDEDPIDEQDLEKDDDLPEPGEHSADKDGDDVGVFEDEERKERSQEDQEKSFHGDNVSSAVTHDSPSSEQEELSHHAQEKVLFVDDASMAVPHENQEAGSKEEEVRKAREKSFRGDDVASSVDHDAKVKKPLPEEQLNTMDRIFEGTTNLSNGVSFRGPGVNGSNATREHAATPTNTSSHQNADIPIMDSESKTNPTPANLTRDHEQNNSTLNGQPEQQVNSTVVLQGQVQPLTDQTPSVELHSPPNGTLALVTDGQKSASRAGDDDNNTGSSSTLVDNKVEGEDAHKEDVDVSTKIMNRAMSEEEVVPE

SEQ ID NO: 110357 - protein, 159 aa, Setaria italica
  Transcript Sequence Number=SeqID_44383
MSESFLDRMVSQLRSTCKFYTGYPKDLGPSRIIPFTSERQFVQLLHEGRPVVVAFTIKCTYTQHLDKVLEEAAATFYPHIKFVRVECPKYPGFCLTRQKNEYPFVEVFYNPEQAAGHGKSVDPNITKYSVKVLPFNYDQSVYGFREYFKKHGFKYSETN

SEQ ID NO: 110358 - protein, 71 aa, Setaria italica
  Transcript Sequence Number=SeqID_44384
WTHSYASIRQIVLLIRTANQFFCSTRRALGSPQKQPLIKFIISKSTRLSPKITLANNFQFHIVKQTTDPQR

SEQ ID NO: 110359 - protein, 51 aa, Setaria italica
  Transcript Sequence Number=SeqID_44385
DTSYITLVRKAMSVCLISSVMSYPYFSYLFLAKHVLDWNCYILVSFLSFFC

SEQ ID NO: 110360 - protein, 58 aa, Setaria italica
  Transcript Sequence Number=SeqID_44386
NVLSYYIYTTFMTCNVQTTYNCNWRSWKLICWKIFSTTSMLLTLQLLNPNVLLQHTQN

SEQ ID NO: 110361 - protein, 184 aa, Setaria italica
  misc_feature (121)..(121): Xaa can be any naturally occurring amino acid
  Transcript Sequence Number=SeqID_44387
  Gene Ontology: Mol. function=shikimate kinase activity; Cellular component=nucleus
  Homolog annotation: Hit_ID=B9SK32; Match level="QueryCoverage=92%, HitCoverage=93%, E-value=7e-64, Identity=68%"; Hit description =Adenylate kinase isoenzyme, putative
  Subcellular localization annotation: CTP_CleavageSite=2; ConfidenceScore=5.00e-01
MAAANGGASRRSRPNVLVTGTPGTGKTTTCSLLSEAAGLRHVNIGDLVREKSLHDGWDDDLECHVINEDLVCDELEDMMEEGGILVDYHGCDFFPERWFDLVVVLQTDNSILHDRLTSRAXTSRGYTGSKLSNNIECEIFQVLLEEARESYKEDIVMPLRSDNVEDISRNVGTLTDWVNNWRPS

SEQ ID NO: 110362 - protein, 78 aa, Setaria italica
  Transcript Sequence Number=SeqID_44388
  Subcellular localization annotation: CTP_CleavageSite=58; ConfidenceScore=5.57e-01
LPPAEDGAAAGEEGRSGTTTTSSSKFRSSSCCSISSRISRRRRPAALSPSLSASLSSQAAEAAEQHHQQQQPATERDG

SEQ ID NO: 110363 - protein, 50 aa, Setaria italica
  Transcript Sequence Number=SeqID_44389
  Subcellular localization annotation: CTP_CleavageSite=17; ConfidenceScore=5.10e-01
FLSPPPPPHLGSSPTPRAQPAPLTPPRNPQIPPIEPDRSPPIPPDSSPRR

SEQ ID NO: 110364 - protein, 71 aa, Setaria italica
  Transcript Sequence Number=SeqID_44390
DNSKTEEGRYCESLRLILLFSNVNPPPPSVVLEVASITIFLHIRQLQKCLQQPTALPFTILEFANCWMVNS

SEQ ID NO: 110365 - protein, 296 aa, Setaria italica
  Transcript Sequence Number=SeqID_44391
  Gene Ontology: Mol. function=oxidoreductase activity; Biological process=oxidation reduction
  Homolog annotation: Hit_ID=B6TF99; Match level="QueryCoverage=99%, HitCoverage=84%, E-value=1e-159, Identity=91%"; Hit description =Gibberellin 20 oxidase 2
  Pfam annotation: Domain name=2OG-FeII_Oxy; Domain location=138-239; Score=145.9; E_value=1.2e-40; Accession=PF03171.12; Description=2OG -Fe(II) oxygenase superfamily
ASRDWGFFVVVGHGVPAETVARATEAQRAFFALPAERKAAVRRSEAEPLGYYESEHTKNVRDWKEVYDLVPGGLQPPIAVADGEVVFENKWPEDLPGFREALEEYMQAMEELAFKILELIARSLNLRPDRLHGFFKDQTTFIRLNHYPPCPSPDLALGVGRHKDAGALTILYQDDVGGLDVRRRSDGDWVRVKPVPDSFIINVGDLIQVWSNDRYESAEHRVTVNSAKERFSRPYFFNPAGYTMVEPVEELVSEEDPPRYDAYNWGNFFSTRKNSNFKKLSVENIQIAHFKRSVAA

SEQ ID NO: 110366 - protein, 105 aa, Setaria italica
  misc_feature (15)..(15): Xaa can be any naturally occurring amino acid
  Transcript Sequence Number=SeqID_44392
  Gene Ontology: Mol. function=transferase activity, transferring glycosyl groups; Cellular component=integral to membrane; Biological process=cell wall organization and biogenesis
  Homolog annotation: Hit_ID=Q7PC73; Match level="QueryCoverage=100%, HitCoverage=18%, E-value=2e-51, Identity=92%"; Hit description =Probable mannan synthase 5
QARWVFVNDRASLLXTRIQKTFLDYHFKVEQEAGSATFAFFSFNGTAGVWRREAINDAGGWKDRTTVEDMDLAVRATLKGWKFVYVGDVRVKSELPSTYEAYCRQ

SEQ ID NO: 110367 - protein, 364 aa, Setaria italica
  Transcript Sequence Number=SeqID_44393
  Gene Ontology: Mol. function=nucleic acid binding; Cellular component= endoplasmic reticulum; Biological process=regulation of transcription, DNA-dependent
  Homolog annotation: Hit_ID=Q2R2A2; Match level="QueryCoverage=64%, HitCoverage=100%, E-value=2e-80, Identity=66%"; Hit description=Zinc knuckle family protein, expressed
  Pfam annotation: Domain name=zf-CCHC; Domain location=119-136; Score =13.0; E_value=0.0046; Accession=PF00098.15; Description=Zinc knuckle
  Pfam annotation: Domain name=zf-CCHC; Domain location=170-187; Score =11.0; E_value=0.01; Accession=PF00098.15; Description=Zinc knuckle
  Pfam annotation: Domain name=zf-CCHC; Domain location=199-216; Score =31.4; E_value=3.1e-06; Accession=PF00098.15; Description=Zinc knuckle
  Pfam annotation: Domain name=zf-CCHC; Domain location=51-68; Score =30.4; E_value=4.6e-06; Accession=PF00098.15; Description=Zinc knuckle
  Pfam annotation: Domain name=zf-CCHC; Domain location=73-90; Score =20.3; E_value=0.00025; Accession=PF00098.15; Description=Zinc knuckle
  Pfam annotation: Domain name=zf-CCHC; Domain location=92-109; Score =28.3; E_value=1.1e-05; Accession=PF00098.15; Description=Zinc knuckle
  Pfam module annotation: Pfam domain module=zf-CCHC::zf-CCHC::zf -CCHC::zf-CCHC::zf-CCHC::zf-CCHC; Domain location=119-136::170 -187::199-216::51-68::73-90::92-109
KEVGGTQEGPIGTAESVLTEDGADVPVSDNMVLRKLLRIPRYFDPGETLLETCFNCSEEGHVAANCPMEKRKKPCFVCGMFGHNAKQCTQGQDCFICKKGGHMAKDCPDKHKRNDHQSTLCLRCGEIGHDMFGCTNDYLADDIKQIRCYMCNQNGHLCCFDFSDNSPKQISCYNCAKSGHSGLGCAKQRRETSAVITPTQCYKCGEEGHFARGCTKNAKSDRSKGKSSSHSQRKEKWKKDSSARSAPHDARKTSKRKSPHFEDRMDTPRHKSKARGGWTGGDDLEDLPFKKYKSKEWGSPSTPKKPYTNHQFSSGGDYFTPQSSRRHNHGFASPNSNYSPSAKKHGFSSSRFATSNTHLRFERS

SEQ ID NO: 110368 - protein, 135 aa, Setaria italica
  misc_feature (98)..(98): Xaa can be any naturally occurring amino acid
  Transcript Sequence Number=SeqID_44394
  Gene Ontology: Mol. function=DNA binding; Cellular component=nucleus
  Subcellular localization annotation: CTP_CleavageSite=56; ConfidenceScore=5.37e-01
QLRSGILQQKSFIQNQQQLHQQIQMLTPQQQQQLMLQAQQNMSSPTSSDVDNRRLRMMLNSRNAVLGRDGQTNSGTDIIPNVGSPSQSGGDIDILIKXKKLAQQQQLLQQQNNSQQQPQQHQLQQPAVSSQQSQS

SEQ ID NO: 110369 - protein, 345 aa, Setaria italica
  Transcript Sequence Number=SeqID_44395
  Gene Ontology: Mol. function=DNA binding; Cellular component=nucleus; Biological process=regulation of transcription, DNA-dependent
  Homolog annotation: Hit_ID=Q6H976; Match level="QueryCoverage=71%, HitCoverage=26%, E-value=1e-67, Identity=56%"; Hit description =STYLOSA protein
  Pfam annotation: Domain name=SSDP; Domain location=1-203; Score=44.0; E_value=3.3e-11; Accession=PF04503.5; Description=Single-stranded DNA binding protein, SSDP
  Subcellular localization annotation: CTP_CleavageSite=79; ConfidenceScore=5.51e-01
QQQQQQQQPQQQQHQQQQQQQQQLQQQRRDGSHLLNGSANGISGNNPLMRQNQSTANVMATKMYEERLKVPSQRDTLEDASMKQRYGENAGQLLDSNEASLLKAASSGQSSGQILHGTVGGLSGTLQQVQARSPQLPGPAQSIKTEINPILTPRAAGPEGSFIGVQGSNQAGNNLTLKGWPLTGLEQLRSGILQQKSFIQNQQQLHQQIQMLTPQQQQQLMLQAQQNMSSPTSSDVDNRRLRMMLNSRNAVLGRDGQTNSGTDIIPNVGSPSQSGGDIDILIKKKLAQQQQRISFDFCLVAFHLSELYDCTVGGKYSSSLLSFLYLWDKLKFLGKFDGSWAPGYA

SEQ ID NO: 110370 - protein, 155 aa, Setaria italica
  Transcript Sequence Number=SeqID_44396
GGFMVATPVRWAWLHRESIRWRAPPCHHPSREEPLTPEIQLEIASEVINRLAVAQERRMLSASELSLLKFLGDRIPDLEAAASGMHGGATPSPSKVVSSRSRARAKTCCHAAVLSSLLVDTLLEQVSTPAANVTAGRQVATRHLGEEDAHANSIV

SEQ ID NO: 110371 - protein, 97 aa, Setaria italica
  Transcript Sequence Number=SeqID_44397
  Subcellular localization annotation: CTP_CleavageSite=52; ConfidenceScore=5.84e-01
MASLVRTAAAAAAVVVRSAARASPLTGRVLGAPLPSLASTSAARSARILRRSAAAASAGLETLMPLHSAVAAARLRSCIAVDSSCWSSLSQGFAKRI

SEQ ID NO: 110372 - protein, 315 aa, Setaria italica
  misc_feature (140)..(140): Xaa can be any naturally occurring amino acid
  misc_feature (309)..(309): Xaa can be any naturally occurring amino acid
  Transcript Sequence Number=SeqID_44398
  Gene Ontology: Mol. function=structural constituent of ribosome; Cellular component=intracellular; Biological process=translation
  Homolog annotation: Hit_ID=B6TG27; Match level="QueryCoverage=73%, HitCoverage=72%, E-value=1e-102, Identity=84%"; Hit description=50S ribosomal protein L4
  Pfam annotation: Domain name=Ribosomal_L4; Domain location=72-267; Score=273.3; E_value=5.6e-79; Accession=PF00573.14; Description =Ribosomal protein L4L1 family
  Subcellular localization annotation: CTP_CleavageSite=40; ConfidenceScore=5.89e-01
MPGAAVASPLLLSLSSSSSPFLSSSSTSFLPPSSSAAPLPASRKAAVSVLRALRAEAATLPVLSFTGDKVGEVTLDLKSAPPSTARAVVHRAIITDRQNARRGTASTLTRGEVRGGGRKPYQQKKTGKARRGSQRTPLRXPGGGVVFGPKPRDWSIKINRKEKRLAISTALASAAVAEDAFVVEEFDEAFASGPKTRDFVAALQRWGLDPKQKAMFFATEFDDNVRLSGRNIGSLKMLTPRTLNLYDILDARKLFFTPAAVEYLNSRYGASASDDYDTDDEDDVGEELVEQEVEEGTTEEAAQDATEEXEADSSC

SEQ ID NO: 110373 - protein, 55 aa, Setaria italica
  Transcript Sequence Number=SeqID_44399
NIFLPSLSPKTRKLTKMVGGGGGAGQKATHMAKTDIINSLGWKCQKCFLPVTCVD

SEQ ID NO: 110374 - protein, 82 aa, Setaria italica
  Transcript Sequence Number=SeqID_44400
  Subcellular localization annotation: CTP_CleavageSite=73; ConfidenceScore=5.18e-01
AFQHPSWLGGGGEAAAAATAATKCGSLLTTLHGHAFSALSPSLTPLSSFLSLELSRGQKRLGYKGLELEMGAHCAAAQTTAQ

SEQ ID NO: 110375 - protein, 100 aa, Setaria italica
  Transcript Sequence Number=SeqID_44401
AFVICGCSLVDCLLLPAHATFPPVRTAPAILLSFSTSILARGKRGKPRRRPGAHGRMIPAVPRAYVIHRWQHLHIRLAHHLPFFLAAAQLRSLDRRSAPP

SEQ ID NO: 110376 - protein, 295 aa, Setaria italica
  Transcript Sequence Number=SeqID_44402
  Gene Ontology: Mol. function=DNA binding; Biological process =regulation of transcription
  Homolog annotation: Hit_ID=A5HJS5; Match level="QueryCoverage=100%, HitCoverage=100%, E-value=1e-114, Identity=69%"; Hit description=MYB_ Al protein
  Pfam annotation: Domain name=Myb_DNA-binding; Domain location=141 -188; Score=50.7; E_value=5.6e-12; Accession=PF00249.23; Description =Myb-like DNA-binding domain
  Pfam annotation: Domain name=Myb_DNA-binding; Domain location=27-75; Score=30.4; E_value=7.2e-06; Accession=PF00249.23; Description=Myb -like DNA-binding domain
  Pfam module annotation: Pfam domain module=Myb_DNA-binding::Myb_DNA -binding; Domain location=141-188::27-75
MMREAYMEVLPPMDHIGSRNGWYHPAVRTWTPQENKLFERALAGVDLRCPDWEQVARAIPGRTVREVVHHFKSLEVDVQQIESGMVPIPFYGGGGGGGLFTLQWDGNGGGGPGDFRHAYRFGGGCGKRHPGRTPEQERKKGVPWTEDEHKLFLLGLKKYGKGDWRNISRNFVQTRTPTQVASHAQKYFIRLNSGGKDKRRSSIHDITTVNLTDDQPPSPSQSSLITNQSNASAPATAVGQFSLSADTKQHGAANLPFNSPSRTPGMPTYGMGLQDQGLQCGPLHDQLVGNQSMLF

SEQ ID NO: 110377 - protein, 107 aa, Setaria italica
  Transcript Sequence Number=SeqID_44403
  Gene Ontology: Mol. function=DNA binding; Biological process =regulation of transcription
  Homolog annotation: Hit_ID=A5HJS5; Match level="QueryCoverage=99%, HitCoverage=36%, E-value=9e-37, Identity=71%"; Hit description=MYB _Al protein
  Subcellular localization annotation: CTP_CleavageSite=81; ConfidenceScore=5.18e-01
KVKINGGKDKRRSSIHDITTVNLTDDQPPSPSQSSLITNQSNASAPATAVGQFSLSADTKQHGAANLPFNSPSRTPGMPTYGMGLQDQGLQCGPLHDQLVGNQSMLF

SEQ ID NO: 110378 - protein, 204 aa, Setaria italica
  misc_feature (20)..(20): Xaa can be any naturally occurring amino acid
  misc_feature (27)..(27): Xaa can be any naturally occurring amino acid
  Transcript Sequence Number=SeqID_44404
  Gene Ontology: Mol. function=RNA polymerase II transcription factor activity; Cellular component=nucleus; Biological process =transcription from RNA polymerase II promoter
  Homolog annotation: Hit_ID=B6TMU1; Match level="QueryCoverage=75%, HitCoverage=88%, E-value=2e-60, Identity=77%"; Hit description =Transcription factor BTF3
  Pfam annotation: Domain name=NAC; Domain location=73-131; Score =111.8; E_value=2.4e-30; Accession=PF01849.10; Description=NAC domain
  Subcellular localization annotation: CTP_CleavageSite=37; ConfidenceScore=5.67e-01
FPPLPGASPPTSSPLSSPHXAPPPPPXPPPRLPLLPRAKMDVEKLKRMAGAVRTGGKGSMRRKKKAVHKTTTTDDKRLQSTLKRIGVNTIPGIEEVNIFKDDVVIQFVNPKVQASIGANTWVVSGTPQTKKLQDLLPSIINQLGPDNLDNLRRLAEQFQKQAPGASSAEAGASAGAAQDDDDDVPELVPGETFEEAAEEKKESS

SEQ ID NO: 110379 - protein, 154 aa, Setaria italica
  Transcript Sequence Number=SeqID_44405
  Gene Ontology: Cellular component=exocyst; Biological process =exocytosis
  Homolog annotation: Hit_ID=Q5N6V1; Match level="QueryCoverage=100%, HitCoverage=40%, E-value=3e-42, Identity=56%"; Hit description =Leucine zipper protein-like
TKLIEKALVVMQRQLMAQECGAFDRFKDAYFMAIAKQGILVLFKFADGFTSTRSPEKLIYVLELYEALSNSAPALLPLFTGQHAELISRQLPIVLAKLARALRAAIDDLITKIRTDCSQAVSETLGVGVHPLARHAMTCVELLAPHRAALDLIL

SEQ ID NO: 110380 - protein, 231 aa, Setaria italica
  Transcript Sequence Number=SeqID_44406
  Gene Ontology: Mol. function=binding; Cellular component =mitochondrial inner membrane; Biological process=transport
  Homolog annotation: Hit_ID=B6TZ46; Match level="QueryCoverage=90%, HitCoverage=63%, E-value=1e-102, Identity=85%"; Hit description =Mitochondrial RNA-splicing protein MRS3
  Pfam annotation: Domain name=Mito_carr; Domain location=132-226; Score=99.8; E_value=9.4e-27; Accession=PF00153.19; Description =Mitochondrial carrier protein
  Pfam annotation: Domain name=Mito_carr; Domain location=39-127; Score= 105.4; E_value=1.9e-28; Accession=PF00153.19; Description =Mitochondrial carrier protein
  Pfam module annotation: Pfam domain module=Mito_carr::Mito_carr; Domain location=132-226::39-127
PGAVAGGRPALGAGPAHAVYFSVYEFAKSALTDRLGPNNPAAHAASGVLATIASDAVFTPMDTVKQRLQLTSSPYTGVGHCIRTVLRDEGPGAFFVSYRTTVIMNAPYTAVHFATYEAAKRMLGDMAADEESLAVHATAGAAAGALAAAVTTPFDVVKTQLQCQGVCGCERFSSSSIGDVFRTIIKRDGYSGIMRGWKPRMLFHAPAAAICWSTYEASKSFFERLNEERRK

SEQ ID NO: 110381 - protein, 188 aa, Setaria italica
  misc_feature (71)..(71): Xaa can be any naturally occurring amino acid
  misc_feature (115)..(115): Xaa can be any naturally occurring amino acid
  Transcript Sequence Number=SeqID_44407
  Gene Ontology: Mol. function=zinc ion binding; Cellular component =membrane
  Homolog annotation: Hit_ID=Q9ST50; Match level="QueryCoverage=93%, HitCoverage=19%, E-value=1e-63, Identity=66%"; Hit description =Transposase related protein
  Pfam annotation: Domain name=MuDR; Domain location=10-87; Score=86.9; E_value=6.9e-23; Accession=PF03108.7; Description=MuDR family transposase
VFLVSLGSLVLVIEEGKVFKDLPALKRWLQAFAVIRKRPYKVLHSYAERRYTVVCDKERCPWRVCARKQNXTGKWKITKVVSPHNCADHELTVRHPQLTSTLIAKRLMGIRRTGXQPNMKVRTIIRTVEEIYGGYVITYGKAWRAKQRAWRMIYEDWESGYEQLPVLFNAIKAVNPGMHYEYIPKPNA

SEQ ID NO: 110382 - protein, 59 aa, Setaria italica
  Transcript Sequence Number=SeqID_44408
SIVVHLCETNVTWEYPYGIIVHTLTWPRTDMESEVSLYALLFFRPVTISSTMTPKHNVT

SEQ ID NO: 110383 - protein, 69 aa, Setaria italica
  Transcript Sequence Number=SeqID_44409
  Homolog annotation: Hit_ID=Q945P0; Match level="QueryCoverage=100%, HitCoverage=32%, E-value=4e-14, Identity=56%"; Hit description =Transcriptional activator FHA1
MAAPNSSVVLPAFAKLHGENSVYFMRKYSITLGRNTETSKVDLDLSELGGGRGPRVSRHHARIFYDFEK

SEQ ID NO: 110384 - protein, 140 aa, Setaria italica
  misc_feature (118)..(118): Xaa can be any naturally occurring amino acid
  Transcript Sequence Number=SeqID_44410
  Gene Ontology: Mol. function=transferase activity, transferring phosphorus-containing groups; Cellular component=membrane; Biological process=two-component signal transduction system (phosphorelay)
  Homolog annotation: Hit_ID=Q5SML4; Match level="QueryCoverage=99%, HitCoverage=12%, E-value=4e-25, Identity=48%"; Hit description =Histidine kinase
CCDLILQKPIHGSRLHALLKILMDLQMPHAQNSSHVSPDDNTDTGTPGGSSGAGKSAMITHTASEPRLEDDKPLTGTHVLLVEDTLTLQTIGKKILYQLGATVEVAEDGAKAVSMLKXALEQAAAGSEKDATSTPYDVIL

SEQ ID NO: 110385 - protein, 111 aa, Setaria italica
  Transcript Sequence Number=SeqID_44411
TEITRGHDEGLRRRMACFELLQHYSPPEIAKVAVPNLFCHQLNFCCSVSRMFCVCSADAVSVSRRSELFCRLHALHSMENCSSLHRHHLRYCWNCEYLLICSQKLLTERPI

SEQ ID NO: 110386 - protein, 145 aa, Setaria italica
  misc_feature (29)..(29): Xaa can be any naturally occurring amino acid
  Transcript Sequence Number=SeqID_44412
  Gene Ontology: Cellular component=plasma membrane
  Homolog annotation: Hit_ID=Q6Z3H8; Match level="QueryCoverage=97%, HitCoverage=15%, E-value=6e-28, Identity=42%"; Hit description =Putative bzip-related transcription factor
  Pfam annotation: Domain name=DUF632; Domain location=1-107; Score= -49.2; E_value=1e-05; Accession=PF04782.4; Description=Protein of unknown function (DUF632)
LDSVVPDGSSRDLALELELELMKWIVNFXSWVNEQRSFIKALNGWLSLCLNYKAEETVDGVPPYSPGRVGAPLVFVICNSWSQAMDRFSEKEVIISIQALVSSVRKLSEKQNVEQTEQIIATRERERWNKILERKTVEINKEAGL

SEQ ID NO: 110387 - protein, 83 aa, Setaria italica
  Transcript Sequence Number=SeqID_44413
  Gene Ontology: Mol. function=nucleic acid binding
  Pfam annotation: Domain name=zf-CCHC; Domain location=53-70; Score =11.7; E_value=0.0076; Accession=PF00098.15; Description=Zinc knuckle
  Subcellular localization annotation: CTP_CleavageSite=57; ConfidenceScore=5.08e-01
GRLTYSGTIFPIPDMDSFDFSAGANEIPPPKQRASDKPRRKRSNPNKTSTLVRLCSRCKQTGHNKATCEVEFVDRSNLFISTL

SEQ ID NO: 110388 - protein, 285 aa, Setaria italica
  Transcript Sequence Number=SeqID_44414
  Homolog annotation: Hit_ID=B6U7U6; Match level="QueryCoverage=96%, HitCoverage=59%, E-value=1e-151, Identity=92%"; Hit description =EMB2756
  Pfam annotation: Domain name=DUF616; Domain location=6-268; Score =411.1; E_value=1.8e-120; Accession=PF04765.5; Description=Protein of unknown function (DUF616)
YCCLLVGFLTSDNGGFKISDEDRRYMRACKVVVSTCAFGGGDDLYQPIGMANSSIGRVCYVAFWDEVTLSTQEAEGKVIGDDSMIGRWRIIVVKSLPFVDQRLNGKIPKMLSHRLFPEARYSIWVDSKYQFRRDPIAVLEALLWRTNSTFAISEHGARSNIYDEGKAIVQKHKATPEEVEVQLTQYRQDGMPDKQRLHGLKALAEASVIVRELTPAPNHFMCTWFNEVVRFTSRDQLSFPYVLWRLNMPGMSMFPVCTRRDLVNSLGHTRKVKPLTQTNPESSAS

SEQ ID NO: 110389 - protein, 541 aa, Setaria italica
  Transcript Sequence Number=SeqID_44415
  Gene Ontology: Mol. function=calcium ion binding; Cellular component =protein phosphatase type 2A complex; Biological process=protein amino acid dephosphorylation
  Homolog annotation: Hit_ID=Q8W5Q8; Match level="QueryCoverage=91%, HitCoverage=100%, E-value=0.0, Identity=78%"; Hit description =Putative phosphatase subunit, 3'-partial (Fragment)
  Pfam annotation: Domain name=efhand; Domain location=184-212; Score =2.4; E_value=11; Accession=PF00036.24; Description=EF hand
  Pfam annotation: Domain name=efhand; Domain location=397-425; Score =18.0; E_value=0.039; Accession=PF00036.24; Description=EF hand
  Pfam module annotation: Pfam domain module=efhand::efhand; Domain location=184-212::397-425
MEVEPARRDAAALDPELLQLPELAPGALRENSIIADALYSQWLVLPETAKLVKSLIEDAKAGATLNVAGTSASTNAASSSSLPSMFPAGSAPPLSPRSTSGSPRVMRRGSGAGPSSLGSPLKLVSEPVREVIPQFYFKHGRPPPKDLKEQCLSRIDHLFFGGEGLQIQEFRSVTKDICKLPSFFSSVLFKKIDVACTGTVSRDAFVEYWINDNKITMDMASQIFEILRKPGYNYLTQDDFKPVLKELLATHPGLEFLQGTPEFQERYAETVIYRIFYSINRSGNGHLTLRELKRGNLIAALQQLDEEEDINKVLRYFSYEHFYVIYCKFWELDTDHDFLIDKENLIRYGNHSLTYRIVDRIFTQIPRKFTSMTEGKMGYEDFVYFILSEEDKSSEPSLEYWFKCIDLDGNGILTSNEMQFFYEEQLHRMECMAQEPVLFEDILCQMIDMIGPENESYFTLRDLKRCKLSGNIFNILFNLNKFMAFETRDPFLIRQERENPTLTEWDRFAHREYIRLSMEEDGEDASNGSGDVWDESLEAPF

SEQ ID NO: 110390 - protein, 153 aa, Setaria italica
  Transcript Sequence Number=SeqID_44416
  Gene Ontology: Mol. function=kinase activity
  Homolog annotation: Hit_ID=B6TM85; Match level="QueryCoverage=85%, HitCoverage=85%, E-value=1e-65, Identity=94%"; Hit description =Tankyrase 2
  Pfam annotation: Domain name=Ank; Domain location=52-84; Score=48.7; E_value=2.2e-11; Accession=PF00023.22; Description=Ankyrin repeat
  Pfam annotation: Domain name=Ank; Domain location=85-117; Score=46.8; E_value=8.6e-11; Accession=PF00023.22; Description=Ankyrin repeat
  Pfam module annotation: Pfam domain module=Ank::Ank; Domain location =52-84::85-117
MGVEPAQPTPAAAAATTAEQAQDLIDAARYDDLEDVVTLFSAGVSLDSTDSQGRTALHMASANGHLAVVEYLIQNGANVNATNLEKNTPLHWACLNGHIEVIKALISAGASVSALNSHEKTPMDEAVTKGKMDVIDAIGAAVAQAELDGVTVS

SEQ ID NO: 110391 - protein, 44 aa, Setaria italica
  Transcript Sequence Number=SeqID_44417
VGNILGFASHTMSVTAEFCCHCSMKAVKQHSRNKHGFIHGKPQY

SEQ ID NO: 110392 - protein, 73 aa, Setaria italica
  Transcript Sequence Number=SeqID_44418
FLFFLSTVCELGNRQVCKIESWRYLLLEANVRLCNERLNLAKLRLGISEYLMQLVVNMLFYCCDALSTAGRVT

SEQ ID NO: 110393 - protein, 185 aa, Setaria italica
  Transcript Sequence Number=SeqID_44419
  Gene Ontology: Mol. function=hydrolase activity, hydrolyzing O -glycosyl compounds; Biological process=carbohydrate metabolic process
  Homolog annotation: Hit_ID=Q9FXT4; Match level="QueryCoverage=99%, HitCoverage=43%, E-value=3e-92, Identity=89%"; Hit description=Alpha- galactosidase
KTNAMKTYGKNIFFSLCEWGRENPATWAGSMGNSWRTTDDIVDNWGSMTSRADQNDRWASYAGPGGWNDPDMLEVGNGGMSEAEYRSHFSIWALAKAPLLIGCDVRSMSQQTKDILSNWEVIAVKKDSLGVQGKKVQSNNGLEVVWAGPLSNNRKAVVLWNRQGYQATITAQWSSIGLASSTAVT

SEQ ID NO: 110394 - protein, 422 aa, Setaria italica
  Transcript Sequence Number=SeqID_44420
  Gene Ontology: Mol. function=hydrolase activity, hydrolyzing O -glycosyl compounds; Biological process=carbohydrate metabolic process
  Homolog annotation: Hit_ID=Q9FXT4; Match level="QueryCoverage=85%, HitCoverage=86%, E-value=0.0, Identity=90%"; Hit description=Alpha -galactosidase
  Pfam annotation: Domain name=Melibiase; Domain location=46-367; Score= -29.7; E_value=4.4e-14; Accession=PF02065.10; Description=Melibiase
MARGPSSSSSILLALLVAAAAAATATEAARLPGNWTEELRGAARRARHGHGYVWRHRRRAFENGLGRTPQMGWNSWNHFGCGINENLIKQTADALVNTGLAKLGYEYVNIDDCWAESDRDYQGNFVANRQTFPSGIKALADYVHAKGLKLGIYSDAGTRTCSQKMPGSLDHEEQDVKTFSSWGIDYLKYDNCNDAGRSVMERYTKMSNAMKTYGKNIFFSLCEWGRENPATWAGSMGNSWRTTDDIVDNWGSMTSRADQNDRWASYAGPGGWNDPDMLEVGNGGMSEAEYRSHFSIWALAKAPLLIGCDVRSMSQQTKDILSNWEVIAVNQDSLGVQGKKVQSNNGLEVWAGPLSNNRKAVVLWNRQGYQATITAQWSSIGLASSTAVTARDLWAHSSFSAQGQLSASVAPHDCKMYVLTPK

SEQ ID NO: 110395 - protein, 194 aa, Setaria italica
  Transcript Sequence Number=SeqID_44421
  Gene Ontology: Mol. function=drug transporter activity; Cellular component=membrane; Biological process=multidrug transport
  Homolog annotation: Hit_ID=Q9LUH2; Match level="QueryCoverage=91%, HitCoverage=37%, E-value=2e-42, Identity=47%"; Hit description =Aberrant lateral root formation 5
  Pfam annotation: Domain name=MatE; Domain location=5-142; Score=49.6; E_value=1.2e-11; Accession=PF01554.10; Description=MatE
  Subcellular localization annotation: CTP_CleavageSite=35; ConfidenceScore=5.07e-01
PQLPPVSTSLIAMCTSTEAIGYMTTYGFSAAVSTRVSNEVGAGNVDKAKNAVLVTMKLAVLLCIAFVLLLAFGHDVWASLFSRSAVIVSAFGGITPLMIVSIAFETMQSVLSGVSRGCGWQHLAALTNLVAYYFVAMPLALLFAFKLKFYAKGLWVGLICGLACQTFSLLVITARTKWSKIAEAMQEKKASYVA

SEQ ID NO: 110396 - protein, 81 aa, Setaria italica
  Transcript Sequence Number=SeqID_44422
  Gene Ontology: Mol. function=drug transporter activity; Cellular component=membrane; Biological process=multidrug transport
  Homolog annotation: Hit_ID=Q9LUH2; Match level="QueryCoverage=87%, HitCoverage=14%, E-value=3e-09, Identity=39%"; Hit description =Aberrant lateral root formation 5
MSRGCGWQHLAALTNLVAYYFVAMPLALLFAFKLKFYAKGLWVGLICGLACQTFSLLVITARTKWSKIAEAMQEKKASYVA

SEQ ID NO: 110397 - protein, 89 aa, Setaria italica
  Transcript Sequence Number=SeqID_44423
  Homolog annotation: Hit_ID=B6SWJ1; Match level="QueryCoverage=100%, HitCoverage=11%, E-value=2e-38, Identity=87%"; Hit description=FHA domain containing protein
MGALSASTSSVNWLVEDDILLKNAVETGASLESLAKGAVCFSRKFTLQEIQDRWNSLLYDPEVSTQASFRMAEYENELSTSDPAKALKV

SEQ ID NO: 110398 - protein, 235 aa, Setaria italica
  Transcript Sequence Number=SeqID_44424
  Gene Ontology: Mol. function=protein binding; Cellular component =nucleoplasm; Biological process=protein modification process
  Homolog annotation: Hit_ID=B6SWJ1; Match level="QueryCoverage=100%, HitCoverage=29%, E-value=1e-123, Identity=88%"; Hit description=FHA domain containing protein
  Pfam annotation: Domain name=FHA; Domain location=137-210; Score =32.9; E_value=1.3e-06; Accession=PF00498.18; Description=FHA domain
PDQMQHSSFDGQPELGDEAALQNCMPSNALSDLGIQDPISTVPTPAQAEECPDNENDVPNYYDIEALILDQDLIPWDQDSDLMHPEVTRFHHPESRKALIRLEQGARSYMNRAIMSHGAFAVIYGLHLKYYIKDPEVTLGRETEDVKVDIDLGKEGRANKISRRQAVIKMDEAGSFHIKNIGKCPIFVNSKEIPSCKRINLSSDSLIEVKDMRFIFHVNQDAVRQYIDRELKPER

SEQ ID NO: 110399 - protein, 654 aa, Setaria italica
  misc_feature (40)..(40): Xaa can be any naturally occurring amino acid
  misc_feature (52)..(52): Xaa can be any naturally occurring amino acid
  misc_feature (83)..(83): Xaa can be any naturally occurring amino acid
  Transcript Sequence Number=SeqID_44425
  Homolog annotation: Hit_ID=B6SWJ1; Match level="QueryCoverage=98%, HitCoverage=76%, E-value=0.0, Identity=73%"; Hit description=FHA domain containing protein
IPTILYFLLYDPEVSTQASSRMAEYENELSTSDPAKAHKXFNSKAKDFSFQXRKIDSVKNLYYAMRKRVCNDPCYTADLGFLXAPCSCVANGSECVCGGLPNNIELGLSSVSRYRQVGASYNGGHTYPGMNGHSFHTKQAESMVRDGDDTNNVAYGYSDVGQMYEHHAYTANNHGSGGRNNVSLKSITDFQDSMQFQRLDSNQCGNGVVDSKALLIPNHFSGNVQEPIPLQVIGQPEGPEAPGGAIWSGVQRRGTLTLADDKNVKLENRDPHPFEANLDGGICTSGLEHEADFMDFPFFSNSEEFDILNGENFLNSPSEGNQEDLDDSAFKVVPGVRSTMQSLAHSNEANTSCDQIDPGHVESNVDVSGIMLAPTSLVVPCPGVYVECKLNTEDPEIPCNDDVATPPEYPLECCTLGQKSENTIYPVSPATSPASNAEHSKANDLALIKVEDMANAQPLQTVKIDPSTSEQKEDSVAHDKGGVLGAKLLEGPSTTGGLLTTANIVTNDANTCMLALPSFSAAGFGEGSPCSLGQHENFNNSHGLTVQNSVQAPDQMQHSSFDGQPELGDEAALQNCMPSNALSDLGIQDPISTVPTPAQAEECPDNENDVPNYYDIEALILDQDLIPWDQDSDLMHPEVTRFHHPEKTRKGQLE

SEQ ID NO: 110400 - protein, 119 aa, Setaria italica
  Transcript Sequence Number=SeqID_44426
  Gene Ontology: Mol. function=glycylpeptide N-tetradecanoyltransferase activity
  Homolog annotation: Hit_ID=B9SBF1; Match level="QueryCoverage=99%, HitCoverage=5%, E-value=5e-46, Identity=75%"; Hit description =Nucleotide binding protein, putative
TWPEMQKLGIGLWHTNVSQLRTRMVKLARLQYLKSKDPKDCALLYIALNRIKVLVGLFKISRDEKDKRLYEFLSRNFQEERHKAAALKNAYVLMGRHQWELAIAFFLLGDDFSSAVNVH

SEQ ID NO: 110401 - protein, 57 aa, Setaria italica
  Transcript Sequence Number=SeqID_44427
CFYYIGWHCKVEPKLNSTRFPYYLEHLGLHRRIEMYEVHVGFVSARQFRGIYSIVFF

SEQ ID NO: 110402 - protein, 137 aa, Setaria italica
  misc_feature (51)..(51): Xaa can be any naturally occurring amino acid
  Transcript Sequence Number=SeqID_44428
QGTQHMFNIALCWFAAYLLKYTKLDHQESLALAAEGLNYECNEELTRFFYXKLRLHKPGGRRNIIQTDRFSPHESSSANLRSDHIFPKHAIDCHDNFTNGTQESSSASEKMVSDGQELVSSPEADREWHLSSEEPPG

SEQ ID NO: 110403 - protein, 151 aa, Setaria italica
  misc_feature (141)..(141): Xaa can be any naturally occurring amino acid
  Transcript Sequence Number=SeqID_44429
  Homolog annotation: Hit_ID=B9SVM2; Match level="QueryCoverage=77%, HitCoverage=17%, E-value=2e-21, Identity=44%"; Hit description =Protein phosphatase 2c, putative
  Pfam annotation: Domain name=DUF868; Domain location=1-151; Score =47.5; E_value=6.2e-15; Accession=PF05910.4; Description=Plant protein of unknown function (DUF868)
RKEAYRKTAADRPAVDALLVARKEHVVSKKVFSAKAQFSHHGRCHDIVIECDTAGANDDPCLVIHIDRRPVMRVRRLAWKFRGNQTVLVDGLPVEVFWDVHGWLFGSAASSAVFMFQTCQAPEKSVPWAYLQIFREPQVQXTWFSLIIHAW

SEQ ID NO: 110404 - protein, 126 aa, Setaria italica
  Transcript Sequence Number=SeqID_44430
ILLHRACALVFLYPYCILGQHIQSEIDPSRPRSPGQISTRSMEGPKALRHVTYPDQELRTVEDAWVHKDETHQLTLGVILVTTKETTHNGNTNFQLHREIQWHTVEVYLMMPGFLCQGGHNMSFSL

SEQ ID NO: 110405 - protein, 156 aa, Setaria italica
  misc_feature (34)..(34): Xaa can be any naturally occurring amino acid
  Transcript Sequence Number=SeqID_44431
  Gene Ontology: Mol. function=copper ion binding; Cellular component =chloroplast; Biological process=response to metal ion
  Homolog annotation: Hit_ID=P93009; Match level="QueryCoverage=71%, HitCoverage=61%, E-value=8e-49, Identity=84%"; Hit description =Protein CutA, chloroplastic
  Pfam annotation: Domain name=CutA1; Domain location=53-154; Score =212.8; E_value=9.1e-61; Accession=PF03091.7; Description=CutA1 divalent ion tolerance protein
  Subcellular localization annotation: CTP_CleavageSite=41; ConfidenceScore=5.60e-01
RPHDRTATAPPPLAFHRRSPLTGALLFLSLGGVXGVRSFSSAQMESASTTVPSIVVYVTVPNREAGKKLAGSIISEKLAACVNIVPGVESVYWWEGKVQSDAEELLIIKTRESLLDALTEHVKANHEYDVPEVIALPIKGGNLKYLEWLKNSTREN

SEQ ID NO: 110406 - protein, 121 aa, Setaria italica
  Transcript Sequence Number=SeqID_44432
SAGDKVPDYQKRLEVNQEQGTAIEATLCTRVNKLIHPSTAISRVRRCCVAEVVARINNASPSAASDARAEQVLPLLLVAVAADTAEAAASCGDQEEANLAGGGAARLPITRRAHAASLLLG

SEQ ID NO: 110407 - protein, 176 aa, Setaria italica
  misc_feature (53)..(53): Xaa can be any naturally occurring amino acid
  misc_feature (135)..(135): Xaa can be any naturally occurring amino acid
  misc_feature (145)..(145): Xaa can be any naturally occurring amino acid
  Transcript Sequence Number=SeqID_44433
  Gene Ontology: Cellular component=vacuole
  Homolog annotation: Hit_ID=B9RUS0; Match level="QueryCoverage=98%, HitCoverage=4%, E-value=3e-57, Identity=59%"; Hit description =Vacuolar protein sorting-associated protein, putative
MTRVLKDQSIFALNWYIAAPKITVPTKFRPDDVHETKLLLDLGNLVLRTEEIXWDSYSSEEQDIYLNFNLVLSDVSAFLVDGDYHWNETSDGINLLPVIDKCGIALKLQQIQLESPLYPSTRMALRVTCLALHLXPARYHRLMEXLKIFQDSDSENSTSDLEHLWDQADFEGWSSL

SEQ ID NO: 110408 - protein, 114 aa, Setaria italica
  misc_feature (77)..(77): Xaa can be any naturally occurring amino acid
  misc_feature (82)..(82): Xaa can be any naturally occurring amino acid
  Transcript Sequence Number=SeqID_44434
  Subcellular localization annotation: CTP_CleavageSite=78; ConfidenceScore=5.42e-01
MGCFQKCASLVVVSSLLLLLITAAAAASSRGRDASSSSTLHARKLLNSTGSSSSSLGAERHYSTERMGPDDCSEEDXVVVYXSSANPLPSGIPAYTVQIVNVCGGCTVSDVHVS

SEQ ID NO: 110409 - protein, 87 aa, Setaria italica
  misc_feature (38)..(38): Xaa can be any naturally occurring amino acid
  Transcript Sequence Number=SeqID_44435
KHGIPLVESCATPTVAVCTTLKRVAEKVVSELVGSERXGSTNSAELLESMEKDVLAENVHFGGNGVAQGGLPEELEPNHRIEVGFLR

SEQ ID NO: 110410 - protein, 42 aa, Setaria italica
  Transcript Sequence Number=SeqID_44436
QRGLLLKEHSITTSSILGLKHGRGKVSPRIKQVVMLCSLRSS

SEQ ID NO: 110411 - protein, 61 aa, Setaria italica
  misc_feature (45)..(45): Xaa can be any naturally occurring amino acid
  Transcript Sequence Number=SeqID_44437
  Homolog annotation: Hit_ID=B9RQD8; Match level="QueryCoverage=67%, HitCoverage=5%, E-value=7e-12, Identity=78%"; Hit description =Nucleic acid binding protein, putative
MLCSIEEDELGFPVWDPRKNPVMLCSIEEDELGFPVWDPRKNPRXDKCHHMPIITHARVCR

SEQ ID NO: 110412 - protein, 136 aa, Setaria italica
  misc_feature (33)..(33): Xaa can be any naturally occurring amino acid
  misc_feature (105)..(105): Xaa can be any naturally occurring amino acid
  Transcript Sequence Number=SeqID_44438
  Gene Ontology: Mol. function=polynucleotide adenylyltransferase activity; Cellular component=nucleus; Biological process=RNA 3'-end processing
  Homolog annotation: Hit_ID=B9RQD8; Match level="QueryCoverage=100%, HitCoverage=19%, E-value=2e-57, Identity=73%"; Hit description =Nucleic acid binding protein, putative
  Pfam annotation: Domain name=PAP_RNA-bind; Domain location=30-136; Score=116.4; E_value=9.7e-32; Accession=PF04926.7; Description =Poly(A) polymerase predicted RNA binding domain
MQGQFQFGNKICQEIEMNKASWSALFEPFQFFXAYKNYLQVDIIAEDDEDLRLWKGWVESRLRQLTLKIERDTYGMLQCHPYPHEYADPSRQSAHCAFFMGLSRXEGVKIQEGQQFDIRGTVEEFRHEINSYMFWK

SEQ ID NO: 110413 - protein, 121 aa, Setaria italica
  misc_feature (29)..(29): Xaa can be any naturally occurring amino acid
  Transcript Sequence Number=SeqID_44439
  Gene Ontology: Mol. function=polynucleotide adenylyltransferase activity; Cellular component=nucleus; Biological process=RNA 3'-end processing
  Homolog annotation: Hit_ID=B9RS15; Match level="QueryCoverage=80%, HitCoverage=12%, E-value=4e-45, Identity=85%"; Hit description =Poly(A) polymerase beta, putative
  Pfam annotation: Domain name=NTP_transf_2; Domain location=8-106; Score=25.6; E_value=0.0002; Accession=PF01909.15; Description =Nucleotidyltransferase domain
VKDWVKQLTSQRGYTDQMVEEANAVLFTXFGSYRLGVHGPGADIDTLCVGPSYVNREEDFFIILHEILAQTEDVTELQPVPDAHVPVMKFKFHGISIDLLYASVSLLVVPAVSFLRHVFHI

SEQ ID NO: 110414 - protein, 123 aa, Setaria italica
  Transcript Sequence Number=SeqID_44440
  Subcellular localization annotation: CTP_CleavageSite=75; ConfidenceScore=5.88e-01
TFSARTSFSILSSNSALLVLPNLSLPTSSDTTFSATRFKVVHTATSKHGIPLVESCATPTVAVCTTLKRVAEKVVSELVGSERLGSTNSAELLESMEKDVLAENVHFGGNGVAQGGLPEELEV

SEQ ID NO: 110415 - protein, 157 aa, Setaria italica
  Transcript Sequence Number=SeqID_44441
  Subcellular localization annotation: CTP_CleavageSite=31; ConfidenceScore=5.39e-01
IRRASSDASGGSQASPQASERSPEPVASGPRCASMGAVCSGDATSKHGIPLVESCATPTVAVCTTLKRVAEKVVSELVGSERLGSTNSAELLESMEKDVLAENVHFGGNGVAQGGLPEELEVMMLVHLLPFFVPRYDLNILVYFLCIKPNHRIEVGF

SEQ ID NO: 110416 - protein, 216 aa, Setaria italica
  misc_feature (71)..(71): Xaa can be any naturally occurring amino acid
  misc_feature (144)..(144): Xaa can be any naturally occurring amino acid
  misc_feature (175)..(175): Xaa can be any naturally occurring amino acid
  Transcript Sequence Number=SeqID_44442
YLRPFVDIVNHQQQSNKNDSEDGTATRSPDSQLKRKHDSAGTDDAEPVRSAKRSSVSPVHPKTFPESGMLXETTCNNQIRRASSDASGGSQASPQASERSPEPVASGPRCASMGAVCSGDATSKHGIPLVESCATPTVAVCTTXKRVAEKVVSELVGSERLGSTNSAELLESMEXDVLAENVHFGGNGVAQGGLPEELEVMMLVHLLPFFCCLDMI

SEQ ID NO: 110417 - protein, 148 aa, Setaria italica
  Transcript Sequence Number=SeqID_44443
  Subcellular localization annotation: CTP_CleavageSite=57; ConfidenceScore=5.19e-01
MLTVASPEHTAPIDAHLGPDATCNNQIRRASSDASGGSQASPQASERSPEPVASGPRCASMGAVCSGDATSKHGIPLVESCATPTVAVCTTLKRVAEKVVSELVGSERLGSTNSAELLESMEKDVLAENVHFGGNGVAQGGLPEELEV

SEQ ID NO: 110418 - protein, 305 aa, Setaria italica
  Transcript Sequence Number=SeqID_44444
  Gene Ontology: Mol. function=polynucleotide adenylyltransferase activity; Cellular component=nucleus; Biological process=RNA 3'-end processing
  Homolog annotation: Hit_ID=B9RQD8; Match level="QueryCoverage=92%, HitCoverage=39%, E-value=1e-145, Identity=82%"; Hit description =Nucleic acid binding protein, putative
  Pfam annotation: Domain name=PAP_RNA-bind; Domain location=204-305; Score=97.9; E_value=3.6e-26; Accession=PF04926.7; Description =Poly(A) polymerase predicted RNA binding domain
  Pfam annotation: Domain name=PAP_central; Domain location=2-203; Score=413.6; E_value=3.2e-121; Accession=PF04928.9; Description =Poly(A) polymerase central domain
  Pfam module annotation: Pfam domain module=PAP_RNA-bind::PAP_central; Domain location=204-305::2-203
MLCHFIPRDAYLANMLLQDLDISQGSVLHDIDEATVRSLNGCRVADQILRLVPNIENFCTALRCLKYWAKRRGVYSNVTGFLGGVNWALLVARVCQLYPNAVPSMLVSRFFRVFTQWRWPNPVMLCSIEEDELGFPVWDPRKNPRDKCHHMPIITPAYPCMNSSYNVSTSTLRVMMEQFQFGNKICQEIEMNKASWSALFEPFQFFEAYKNYLQVDIIAEDDEDLRLWKGWVESRLRQLTLKIERDTYGMLQCHPYPHEYADPSRQSAHCAFFMGLSRKEGVKIQEGQQFDIRGTVEEFRMNWAD

SEQ ID NO: 110419 - protein, 320 aa, Setaria italica
  misc_feature (308)..(308): Xaa can be any naturally occurring amino acid
  Transcript Sequence Number=SeqID_44445
  Gene Ontology: Mol. function=polynucleotide adenylyltransferase activity; Cellular component=nucleus; Biological process=RNA 3'-end processing
  Homolog annotation: Hit_ID=B9RS15; Match level="QueryCoverage=97%, HitCoverage=41%, E-value=1e-161, Identity=83%"; Hit description =Poly(A) polymerase beta, putative
  Pfam annotation: Domain name=NTP_transf_2; Domain location=70-167; Score=33.9; E_value=6.3e-07; Accession=PF01909.15; Description =Nucleotidyltransferase domain
  Pfam annotation: Domain name=PAP_central; Domain location=8-320; Score=477.1; E_value=2.5e-140; Accession=PF04928.9; Description =Poly(A) polymerase central domain
  Pfam module annotation: Pfam domain module=NTP_transf_2::PAP_central; Domain location=70-167::8-320
MAGGSDAPKQYGITKPLSLLGPVEADLQRTAELEKFLVEAGLYESPEESAKREEVLGKLDQIVKDWVKQLTSQRGYTDQMVEEANAVLFTFGSYRLGVHGPGADIDTLCVGPSYVNREEDFFIILHEILAQTEDVTELQPVPDAHVPVMKFKFHGISIDLLYASVSLLVVPADLDISQGSVLHDIDEATVRSLNGCRVADQILRLVPNIENFCTALRCLKYWAKRRGVYSNVTGFLGGVNWALLVARVCQLYPNAVPSMLVSRFFRVFTQWRWPNPVMLCSIEEDELGFPVWDPRKNPRDKCHHMPIXTPAYPCMNSSYN

SEQ ID NO: 110420 - protein, 576 aa, Setaria italica
  misc_feature (157)..(157): Xaa can be any naturally occurring amino acid
  Transcript Sequence Number=SeqID_44446
  Gene Ontology: Mol. function=polynucleotide adenylyltransferase activity; Cellular component=nucleus; Biological process=RNA 3'-end processing
  Homolog annotation: Hit_ID=B9RQD8; Match level="QueryCoverage=89%, HitCoverage=70%, E-value=1e-168, Identity=59%"; Hit description =Nucleic acid binding protein, putative
  Pfam annotation: Domain name=PAP_RNA-bind; Domain location=245-381; Score=210.4; E_value=4.7e-60; Accession=PF04926.7; Description =Poly(A) polymerase predicted RNA binding domain
  Pfam annotation: Domain name=PAP_central; Domain location=1-244; Score=392.4; E_value=7.6e-115; Accession=PF04928.9; Description =Poly(A) polymerase central domain
  Pfam module annotation: Pfam domain module=PAP_RNA-bind::PAP_central; Domain location=245-381::1-244
MISLQAALQNFLCSLFHQIVSLFCFVALNYEQRIAVLSFCLMLCHFIPRDAYLANMLLQDLDISQGSVLHDIDEATVRSLNGCRVADQILRLVPNIENFCTALRCLKYWAKKRGVYSNVTGFLGGVNWALLVARVCQLYPNAVPSMLVSRFLGFYLXWRWPNPVMLCSIEEDELGFPVWDPRKNPRDKCHHMPIITPAYPCMNSSYNVSTSTLRVMMEQFQFGNKICQEIEMNKASWSALFEPFQFFEAYKNYLQVDIIAEDDEDLRLWKGWVESRLRQLTLKIERDTYGMLQCHPYPHEYADPSRQSAHCAFFMGLSRKEGVKIQEGQQFDIRGTVEEFRHEINSYMFWKPGMELAVSHVRRKQIPAYVFPEGYKRPRPSRHVNHQQQSNKNDSEDGTATRSPDSQLKRKHDSAGTDDAEPVRSAKRSSVSPVHPKTFPESGNAGFETTCNNQIRRASSDASGGSQASPQASERSPEPVASGPRCASMGAVCSGDATSKHGIPLVESCATPTVAVCTTLKRVAEKVVSELVGSERLGSTNSAELLESMEKDVLAENVHFGGNGVAQGGLPEELED

SEQ ID NO: 110421 - protein, 212 aa, Setaria italica
  Transcript Sequence Number=SeqID_44447
  Gene Ontology: Cellular component=integral to membrane
  Homolog annotation: Hit_ID=Q9LN61; Match level="QueryCoverage=99%, HitCoverage=34%, E-value=5e-46, Identity=46%"; Hit description =F18O14.9
ADGLTKYFAVGDSRGRVFVFSAAGDALLELEAAASGESRVTALLAYLSPRRTDCLLFTGHADGSIAAHRLIESSPHGDDWLTLAAASSRLLVRGIDAAPVAHLEAHHAGRARYVLSCDAGGRIRVFTENGTLYGTAISSSTPLAFVKQRLLFLTEDGAASLDLRSMSVRETPCEGLAEALNGTSVKAYSFDPSERFKAYGFTEAGDLVHVLL

SEQ ID NO: 110422 - protein, 278 aa, Setaria italica
  misc_feature (46)..(46): Xaa can be any naturally occurring amino acid
  misc_feature (64)..(64): Xaa can be any naturally occurring amino acid
  misc_feature (115)..(115): Xaa can be any naturally occurring amino acid
  Transcript Sequence Number=SeqID_44448
  Gene Ontology: Mol. function=zinc ion binding
  Homolog annotation: Hit_ID=Q10M31; Match level="QueryCoverage=64%, HitCoverage=21%, E-value=5e-71, Identity=70%"; Hit description =Transposon protein, putative, Mutator sub-class
  Pfam annotation: Domain name=SWIM; Domain location=84-116; Score =41.1; E_value=4.5e-09; Accession=PF04434.9; Description=SWIM zinc finger
MIQVMTTLMDSRFKPIIFMHEAIRCKVMVRIQENRDKTNRWQGTIXPNIFRKLKLNIVRSSNCXSVIWNGQDGFELTENNKWRYTVNLEQKACSCRYWQLSSLPCCHAISAIYKXASKHLDDFIAPCFSILEYKKTYQHCLHPVEGQHNWPISNMPRPLPPAYIRMPGRPKTQRTREPGEAPKGTKLSKVGIKMRCRMCQKTTHNSRTCQRNPEAGKKKNSYIKRDARKRKRSEELTSVAGTSNPGGGVGTQESSTTQLGRNNRARREPTQPGRRSTA

SEQ ID NO: 110423 - protein, 75 aa, Setaria italica
  Transcript Sequence Number=SeqID_44449
TEAGEDLAMRQRERMEEAALLAAMPDSFLTVKLRLKISSSAQRSAVEGDCVYQARQSKHSVALRFLLEGPIWLYY

SEQ ID NO: 110424 - protein, 75 aa, Setaria italica
  Transcript Sequence Number=SeqID_44450
PGNKPLGAIQPCRRLRSKQSRSKHSGVIVKPSGEDNVHIKSGGQCLHHIPYLSLYFRTMGLHFHTFFKKRDDKVQ

SEQ ID NO: 110425 - protein, 140 aa, Setaria italica
  Transcript Sequence Number=SeqID_44451
  Gene Ontology: Mol. function=ligase activity, forming aminoacyl-tRNA and related compounds; Cellular component=cytoplasm; Biological process=alanyl-tRNA aminoacylation
  Homolog annotation: Hit_ID=Q94GG9; Match level="QueryCoverage=99%, HitCoverage=39%, E-value=8e-27, Identity=46%"; Hit description =Putative cytosolic tRNA-Ala synthetase
MQKYKLPQCRIYATYFSGDMSSCLSSDSESKNTLQKYIGEERIVPSMSKADFWMTGETGPCGPCIGFFFDCSDSQDGVGSVMNITDDKFVEICRLVFVEFDRQANGVLGPLQAKHVVTGINLECLAAILQNKKSHYDLDV

SEQ ID NO: 110426 - protein, 197 aa, Setaria italica
  misc_feature (73)..(73): Xaa can be any naturally occurring amino acid
  misc_feature (121)..(121): Xaa can be any naturally occurring amino acid
  Transcript Sequence Number=SeqID_44452
QRKIWDVVQTLATGFDVDVVFTRTDGFTMTPECLLLDCLDLNLRHGWIAPTDLLPGPEVSFESLTLVANEPGXSTLLVLFFSYTLFAQPFPSLLLLFFNVFSGGDQEVSKGTSTYSHWLGXLQEDLVENVPYILYWNNHYNTIVKINGVLLSLVTDSNYLRTSAVWQMLHEVNGDGVYLDSNFTPIYTGLMLLLRVL

SEQ ID NO: 110427 - protein, 107 aa, Setaria italica
  Transcript Sequence Number=SeqID_44453
IFVFFLFSVCFTDFDTRIIAVKGGLGQEWQQEGKEPFNKLSELDLLTSHYLEDRLPIILEKLLCSDHLMTAKLWEWLKEVLEDYTRPEVLGRGTWNLRRRFFRTMVM

SEQ ID NO: 110428 - protein, 343 aa, Setaria italica
  Transcript Sequence Number=SeqID_44454
TGLKLGNGNFDLSTIFITDGVRAEIRAPYCSKFCEKARLNDYSSYIYTIVELFRIKGFGLPAFFTHLTGKLSNPPVRPSVCTPSQLEGFRHRLHGFWDCVLTTLALRSSLARAGLFSGIHKIRRFAPKKVRQALKVVLTSRQTLGEDWRQRIALEGHPVLKKVLRYIPGVLDGSNEKLQENEDDRRKFGIYQSDDVSLSVFPRQVNEHGKSKGGLGQEWQQEGKEPFNKLSELDLLTSHYLEDRLPSILEKLLCSDHLMTAKLWEWLKEVLEDYTRPEVLGRGTWDLRRRVFRNHGHETWNLHRRVRCRDFGRGRGRGRARGFGHRGRGRARGFGAAPVKYRL

SEQ ID NO: 110429 - protein, 896 aa, Setaria italica
  Transcript Sequence Number=SeqID_44455
  Gene Ontology: Cellular component=plasma membrane
  Homolog annotation: Hit_ID=A3KQS4; Match level="QueryCoverage=24%, HitCoverage=46%, E-value=4e-19, Identity=32%"; Hit description =Protein FAM63A
  Pfam annotation: Domain name=DUF544; Domain location=191-304; Score =23.6; E_value=3.2e-07; Accession=PF04424.5; Description=Protein of unknown function (DUF544)
MISTFLRGPQLTPYGFSSLHDDLKARQPTVLLWNEKLITISKFEEKIYVLLNDLSLLSTETNAVWERLTQENGDGLFVDCDFVPTDSKIQSILPLTKSERKKRNKKEKMGLKGLLVPKEKEEDRNEDREEDRNEDRDYEKTEEKDDWSIEEKANISGMHGNLNIRPIDFFGRSTHVIHQINDGPCALIAVCNVLLLKGSIFFEPHETVVSIEYLLNLVVSFLKESVKMQAHCSEIQRKIWDVVQTLATGFDVDVVFTRTDGFTMTPECLLLDCLDLNLRHGWIAPTDLLPGPEVSFESLTLVANEPGFPHSEAIKKFLRGPQLTLIGLVSLQEDLVENVPYILYWNNHYNTIVKINGVLLSLVTDSNYLRTSAVWQMLHEVNGDGVYLDSNFTPIYTGLDAAPSGSYFVPETSTSEASTSFMKPDSEGITSHGDGLYLDCSFTGLYSGPDAALLRENLHGSHFVPKTWTPRSCTYSMRPYTEEDISHEKSVPGCQIVPETREISLEEFVQIPGNEFSELKTIFAGGTSLDVADTTKIGRVIGLDLLEELVFSHDAGLSWNGNFDLSTIFITDGVCAEIRAPYCSKFCEKARLNDYGSYIYTIVELFRIKGFGLPAFFTHLTGKLSNPPVRPSVCTPSQLEGFRHRLHGFWDCVLTTLALRSSLARAGLFSGIHKIRRFAPKKVRQPLKVVLTSPPTLGEDWRQRIALEGHPVLKKVLRYIPGVLDGSNEKLQENEDDHRKFGIYQSDDVSLSVFPRQVNEHGKSKGGLGQEWQQEGKEPFNKLSELDLLTSHYLEDRLPIILEKLLCSDHLMTAKLWEWLKEVLEDYTRPEVLGRGTWNLRRRVFRNHGHETWNLHRRVRCRDFGRGRGRGRARGFGHRGRGRARGFGAAPVKYRL

SEQ ID NO: 110430 - protein, 428 aa, Setaria italica
  Transcript Sequence Number=SeqID_44456
  Gene Ontology: Mol. function=ligase activity, forming aminoacyl-tRNA and related compounds; Cellular component=cytoplasm; Biological process=alanyl-tRNA aminoacylation
  Homolog annotation: Hit_ID=B9SYR5; Match level="QueryCoverage=85%, HitCoverage=36%, E-value=1e-67, Identity=38%"; Hit description =Alanyl-tRNA synthetase, putative
  Pfam annotation: Domain name=tRNA-synt_2c; Domain location=4-425; Score=-53.5; E_value=4.9e-17; Accession=PF01411.11; Description=tRNA synthetases class II (A)
VGRTVRETFFSYFGENQHARLSSTPVIPVDDPKLPLIHMCLNRFKGTLNGRGRHRTCFSLRCIIASGDDDVIDHFRSDTTYHRFTEILGSWSFGDYFKEEAIGLSFSLLSKKYKLPQCRIYATYFSGDMSSCLSSDSESKNTLQKYIGEERIVPSMSKADFWMTGETGPCGPCIGFFFDCSDSQDGVGSVMNITDDKFVEICRLVFVEFDRQANGVLGPLQAKHVVTGINLECLAAILQNKKSHYDLDVYADVLSKIYYCAGQGIEDYSGKIGAADTDGVDTAYRLLADHIRMIAVTNAPGSQLGLGNEGREYFLKCADKQAVQYGHEVLKTKQENYDVILYGILQNEPDLCTELEGTIMERIVEDEVLIYKKTIAELQDQEQPYDMGKKKKKKKDVTAVVWYATRVIEFLGRSTPIILKNKDTRCST

SEQ ID NO: 110431 - protein, 335 aa, Setaria italica
  Transcript Sequence Number=SeqID_44457
  Gene Ontology: Cellular component=plasma membrane
  Homolog annotation: Hit_ID=UPI00006A0250; Match level="QueryCoverage =82%, HitCoverage=66%, E-value=3e-17, Identity=28%"; Hit description =family with sequence similarity 63, member B (FAM63B), transcript variant 1, mRNA
  Pfam annotation: Domain name=DUF544; Domain location=73-202; Score =51.8; E_value=2.7e-12; Accession=PF04424.5; Description=Protein of unknown function (DUF544)
MERIVEDEVLIYKKTIAELRDQEQPYDMGKKKKKKKDVTAVVWYATRVIEFLGRSTPIILKNKDTRCSLVALCNVLLLAEKITLNLDIKKVSEGHLIYLVQRYLLYGNTQMQLEQNLELSEFNKQVLGVLPKLPGSLYFDVTFASSCGFEQSSETALFGFLGVPLHHGWLVDPQDVELGSSIPRSSYSKLSYNLAMYESILSNTNSGLQKHGGCKDDMFYSALAFSLTESEELESTSCAMISTFLRGPQLTPYGFSSLHDDLKARQPTVLLWNEKLITISKFEEKLYVLLNDLSLLSTETNAVWERLTQENGDGLFVDCDFVPTDSKIQSMLSCI

SEQ ID NO: 110432 - protein, 288 aa, Setaria italica
  misc_feature (63)..(63): Xaa can be any naturally occurring amino acid
  Transcript Sequence Number=SeqID_44458
  Gene Ontology: Mol. function=iron ion transmembrane transporter activity; Cellular component=integral to membrane; Biological process=iron ion transport
  Homolog annotation: Hit_ID=B9N487; Match level="QueryCoverage=100%, HitCoverage=49%, E-value=1e-51, Identity=39%"; Hit description =Ferroportin protein family
  Pfam annotation: Domain name=FPN1; Domain location=151-246; Score =13.4; E_value=0.0047; Accession=PF06963.4; Description=Ferroportin1 (FPN1)
  Subcellular localization annotation: CTP_CleavageSite=82; ConfidenceScore=5.37e-01
QTAAHWVSAAMITYAFTLPRASTAPALLLQPWFAVLVASTAVDRLSCVSLGVIAERDFVVQGXGRPIALARANATLSRVDLLCETAGASIFAVLLSRSDPLTCIRLSCAISLCALPLLLFLGGAMNRLADGIFDHSASLGPLERSEHGSTHAASALSIRNKVEDAWATIRHGWTEYLRQPVLPASLAYVLVCFNVALAPGALMTTFLIHHGVSASVLGAFGGSSAVMGILATFMVPNLVKELGILKAGAAGLIAQSTLLGAAVLVFLTGPVSRQGTLFAFLGLIVASR

SEQ ID NO: 110433 - protein, 116 aa, Setaria italica
  Transcript Sequence Number=SeqID_44459
LTLGYIWELITGFATDCLNEQFCIGLLIVLTYPHHSTKVYWQIVAYRTRCAKSQLCNWSWVKLVALVDASCIRSVPRDNKCTLERKSCLPRSSTDQFHNFTDLFCSSYLVVFSTLS

SEQ ID NO: 110434 - protein, 58 aa, Setaria italica
  Transcript Sequence Number=SeqID_44460
HIYLKTIYLSRRPSHLVQICLRQRDALGKHMTTCWFITNSCKRNDNNTTNGDKPAQEA

SEQ ID NO: 110435 - protein, 100 aa, Setaria italica
  Transcript Sequence Number=SeqID_44461
RWIPLKLASLHRAILSELLYERPVVGIIRILKRSCKRVCVSVRCLQLLYLVVYFCGQGPFETTVQITKECRFVETVIYTASSHILYWFHWFCSQPYRNLP

SEQ ID NO: 110436 - protein, 98 aa, Setaria italica
  Transcript Sequence Number=SeqID_44462
MMMTVLKMRHENTGLDETDDDSSDVELVPEHELENRAVDAGGYTFDGDIGDDELYNLKKQQPAIQIKGKDDGKCKVSGRAKKVATSNSTKNNPGVSSI

SEQ ID NO: 110437 - protein, 73 aa, Setaria italica
  Transcript Sequence Number=SeqID_44463
KMVLLSLLLMQKDIMFAQLLCSYHCLEFCFWYEQIDYFSANFPKTLLCQLVLFFSFYLWESKFLGLAINSSFT

SEQ ID NO: 110438 - protein, 107 aa, Setaria italica
  misc_feature (42)..(42): Xaa can be any naturally occurring amino acid
  misc_feature (77)..(77): Xaa can be any naturally occurring amino acid
  misc_feature (79)..(79): Xaa can be any naturally occurring amino acid
  Transcript Sequence Number=SeqID_44464
  Gene Ontology: Mol. function=protein binding
  Homolog annotation: Hit_ID=Q2R2H1; Match level="QueryCoverage=98%, HitCoverage=7%, E-value=7e-20, Identity=45%"; Hit description =Leucine Rich Repeat family protein
GNLSTNNLDGTLHEGHLSGLVNLERLSLSDNSIAIRLNSTWXPPFSLTEVELRSCILGPKFPMWLKWQTNIYNLDIXNXSIYDMVPDWFWTMASSVNTLNIRSNQIS

SEQ ID NO: 110439 - protein, 54 aa, Setaria italica
  Transcript Sequence Number=SeqID_44465
  Gene Ontology: Mol. function=oxidoreductase activity, acting on single donors with incorporation of molecular oxygen, incorporation of two atoms of oxygen; Cellular component=cytoplasm; Biological process=oxidation reduction
  Homolog annotation: Hit_ID=Q45VT7; Match level="QueryCoverage=90%, HitCoverage=8%, E-value=4e-18, Identity=87%"; Hit description=9,10 -9',10' carotenoid cleavage dioxygenase 1
MEYGMLHAMRIKDGKATYVSRYVKTARLKQGEYFGGAKFMKIGDLKGFLDCYGQ

SEQ ID NO: 110440 - protein, 91 aa, Setaria italica
  Transcript Sequence Number=SeqID_44466
  Gene Ontology: Mol. function=oxidoreductase activity, acting on single donors with incorporation of molecular oxygen, incorporation of two atoms of oxygen; Cellular component=cytoplasm; Biological process=oxidation reduction
  Homolog annotation: Hit_ID=Q45VT7; Match level="QueryCoverage=72%, HitCoverage=12%, E-value=2e-25, Identity=86%"; Hit description=9,10 -9',10' carotenoid cleavage dioxygenase 1
GGRRRGESVWHAEPESGKKGVEVEGNIQGIYDLGPGRFGSEAIFVPKQPGVSGEEDDGYLIFFVHDENTGKSAVAIYYRPSAACCASCSSV

SEQ ID NO: 110441 - protein, 114 aa, Setaria italica
  Transcript Sequence Number=SeqID_44467
  Gene Ontology: Mol. function=oxidoreductase activity, acting on single donors with incorporation of molecular oxygen, incorporation of two atoms of oxygen; Cellular component=cytoplasm; Biological process=oxidation reduction
  Homolog annotation: Hit_ID=Q45VT7; Match level="QueryCoverage=96%, HitCoverage=20%, E-value=2e-53, Identity=88%"; Hit description=9,10 -9',10' carotenoid cleavage dioxygenase 1
MGAEEAEQHNGLVVVPAPRPSKGLASWALDLLESVAVRLGHDKTKPLHWLSGNFAPVVNETPPAPDLLVRGHLPECLNGEFVRVGPNPKFIPVAGYHWFDGDGMIHAMRIKDGK

SEQ ID NO: 110442 - protein, 131 aa, Setaria italica
  Transcript Sequence Number=SeqID_44468
  Gene Ontology: Mol. function=oxidoreductase activity, acting on single donors with incorporation of molecular oxygen, incorporation of two atoms of oxygen; Cellular component=cytoplasm; Biological process=oxidation reduction
  Homolog annotation: Hit_ID=Q45VT7; Match level="QueryCoverage=96%, HitCoverage=23%, E-value=2e-65, Identity=95%"; Hit description=9,10 -9',10' carotenoid cleavage dioxygenase 1
QRYVYCTILDSIAKVTGIIKFDLHAEPESGKKELEVGGNIQGIYDLGPGRFGSEAIFVPKQPGVSGEEDDGYLIFFVHDENTGKSEVNVIDAKTMSADPVAVVELPNRVPYGFHAFFVTEEQLAQQAAEGR

SEQ ID NO: 110443 - protein, 508 aa, Setaria italica
  Transcript Sequence Number=SeqID_44469
  Gene Ontology: Mol. function=oxidoreductase activity, acting on single donors with incorporation of molecular oxygen, incorporation of two atoms of oxygen; Cellular component=cytoplasm; Biological process=oxidation reduction
  Homolog annotation: Hit_ID=Q45VT7; Match level="QueryCoverage=98%, HitCoverage=91%, E-value=0.0, Identity=96%"; Hit description=9,10-9', 10' carotenoid cleavage dioxygenase 1
  Pfam annotation: Domain name=RPE65; Domain location=3-500; Score =872.4; E_value=2.6e-259; Accession=PF03055.7; Description=Retinal pigment epithelial membrane protein
LRTLRTNDKTKPLHWLSGNFAPVVNETPPAPDLLVRGHLPECLNGEFVRVGPNPKFVPVAGYHWFDGDGMIHAMRIKDGKATYVSRYVKTARLKQEEYFGGAKFMKIGDLKGFFGLFMVQMQLLRKKFKVLDFTYGYGTANTALIYHHGKLMALSEADKPYVVKVLEDGDLQTLGLLDYDKRLKHSFTAHPKVDPFTDEMFTFGYSHEPPYCTYRVITKDGAMLDPVPITIPESVMMHDFAITENYSIFMDLPLLFRPKEMVKNGEFIYKFDPTKKARFGILPRYAKDDKLIRWFELPNCFIFHNANAWEEGDEVVLITCRLENPDLDKVNGHQSDKLENFGNELYEMRFNMKTGAASQKKLSVSAVDFPRVNESYTGRKQRYVYCTILDSIAKVTGIIKFDLHAEPESGKKELEVGGNIQGIYDLGPGRFGSEAIFVPKQPGVSGEEDDGYLIFFVHDENTGKSEVNVIDAKTMSADPVAVVELPNRVPYGFHAFFVTEEQPAQQAN

SEQ ID NO: 110444 - protein, 179 aa, Setaria italica
  Transcript Sequence Number=SeqID_44470
  Gene Ontology: Mol. function=hydrolase activity; Cellular component =endoplasmic reticulum lumen; Biological process=G-protein coupled receptor protein signaling pathway
  Homolog annotation: Hit_ID=Q8S7F1; Match level="QueryCoverage=99%, HitCoverage=27%, E-value=3e-75, Identity=79%"; Hit description =Putative apyrase
GKKIGAAAAESEVRLMATAGLRLLEEHAQEAILASCREVLRASGFRFEDAWAKVIPGSDEGIYAWVAANYALGRLGGDPNKTVGIIELGGASAQLTFVSDEVLPPELSNNFIFGETTYTLYTNSFLNFGQNAAQDSFHEILRSRGSSKNNTLVDPCAPRGYSRNEEVMVRTSGSSRSTL

SEQ ID NO: 110445 - protein, 77 aa, Setaria italica
  Transcript Sequence Number=SeqID_44471
  Gene Ontology: Mol. function=hydrolase activity
  Homolog annotation: Hit_ID=Q8S7F1; Match level="QueryCoverage=88%, HitCoverage=10%, E-value=8e-22, Identity=67%"; Hit description =Putative apyrase
MYLVNAEKCQYEQCHLGSTFVPELRGYFLATENFYFTSKFFGLKKSSSLSDFVLAGEQVCNQDLSTLRKKYPNRSDE

SEQ ID NO: 110446 - protein, 266 aa, Setaria italica
  Transcript Sequence Number=SeqID_44472
  Gene Ontology: Mol. function=hydrolase activity; Cellular component =integral to membrane; Biological process=response to chemical stimulus
  Homolog annotation: Hit_ID=Q8S7F1; Match level="QueryCoverage=97%, HitCoverage=36%, E-value=1e-76, Identity=59%"; Hit description =Putative apyrase
  Subcellular localization annotation: CTP_CleavageSite=21; ConfidenceScore=5.23e-01
SNHFLPQNAAQDSFHEILRSRGSSKNNTLVDPCAPRGYSRNEEVMVRTSGSSRSTLENQYVDSGNGNFTECRSSSLLLLQKGKEKCQYEQCHLGSTFVPELRGYFLATENFYFTSKFFGLKKSSSLSDFVLAGEQVCNQDLSTLRKKYPNRSDEDFSRYCFSSAYIVALLHDSLGVPLDDKRIEYSNQVGDIQVEWALGAFITLMQHLSLKPSHTAAASTHSNRPLFAVVGMFLLCGAFLVSRWRKPKTKIIYDLEKGRYIITRIS

SEQ ID NO: 110447 - protein, 81 aa, Setaria italica
  Transcript Sequence Number=SeqID_44473
  Pfam annotation: Domain name=Metallothio_2; Domain location=1-80; Score=69.9; E_value=9.3e-18; Accession=PF01439.10; Description =Metallothionein
  Subcellular localization annotation: CTP_CleavageSite=54; ConfidenceScore=5.03e-01
MSCCNGNCGCGSGCKCGNGCGGCNMFPDVEATSTTTTTMVIAAATNKASSGGFEAAMESGGCDCNTCNCGTSCGCSCCSCN

SEQ ID NO: 110448 - protein, 129 aa, Setaria italica
  Transcript Sequence Number=SeqID_44474
  Subcellular localization annotation: CTP_CleavageSite=76; ConfidenceScore=5.57e-01
AQLNLTRSNSSEHTGVPPATSRLHGDCSRRCTGSGWQGQRRNASSRSPQISAPASRAMPPVLRMGSELPPRRRRARARRRHGPATGTPKEGEVAAHGPFSTARVLPGEPVRAAALISPRLAAAAEPKLS

SEQ ID NO: 110449 - protein, 133 aa, Setaria italica
  Transcript Sequence Number=SeqID_44475
HVGLTTVVRCKPCSYEGFSTMPLSSSGHIHGRRSPSPWLIISRSQRRSTLHHTKKATALQDPTPKHRCHTVHTKQSKHSPDSSPSRQLETLGASPHPPPHTTPRTHHLKANGGIATSVAGLHTKDPDLFCRQG

SEQ ID NO: 110450 - protein, 147 aa, Setaria italica
  Transcript Sequence Number=SeqID_44476
  Homolog annotation: Hit_ID=Q9SGZ8; Match level="QueryCoverage=49%, HitCoverage=47%, E-value=2e-10, Identity=46%"; Hit description =F28K19.24
  Pfam annotation: Domain name=DUF581; Domain location=51-109; Score =89.0; E_value=1.6e-23; Accession=PF04570.6; Description=Protein of unknown function (DUF581)
NGRRARERERLVVGLQILVHHQHHHHHHNQHHSHGRHAHAANIVLKQVVRPRSAAASRHGAVSCSFLKACSLCRRDLSPSKDVYMYRGDQGFCSEECRWEQILVDEARERQAAGSKERQRRGQAHHHSPHRTPNRGRPPPRKTLAVA

SEQ ID NO: 110451 - protein, 56 aa, Setaria italica
  Transcript Sequence Number=SeqID_44477
LQVKHFVTWAVKVVTIVIQCGANSNSINLSWRYHITWGKGLPLNSMCHYQIPTRHR

SEQ ID NO: 110452 - protein, 124 aa, Setaria italica
  misc_feature (82)..(82): Xaa can be any naturally occurring amino acid
  misc_feature (113)..(113): Xaa can be any naturally occurring amino acid
  Transcript Sequence Number=SeqID_44478
  Gene Ontology: Mol. function=aspartic-type endopeptidase activity; Cellular component=nuclear pore; Biological process=DNA integration
  Homolog annotation: Hit_ID=Q94LQ7; Match level="QueryCoverage=88%, HitCoverage=10%, E-value=5e-46, Identity=78%"; Hit description =Putative gag-pol polyprotein
FLFVLGSSSEAEYKAVADATAEVMWIQTLLYELGVQAPKAAKLWCDNIGAKYLFANPVFHARTKHTEVGYHFVRERVARRFXLDIKYISTKDQVADGFTKPLTVRQLEMFKTXLNLEMFKTNLN

SEQ ID NO: 110453 - protein, 51 aa, Setaria italica
  Transcript Sequence Number=SeqID_44479
SRSGGGLAGDTSSSGQNGSALAGYSPDSSCTGDWTPPRLGVSTRPSRVAYT

SEQ ID NO: 110454 - protein, 93 aa, Setaria italica
  Transcript Sequence Number=SeqID_44480
  Subcellular localization annotation: CTP_CleavageSite=39; ConfidenceScore=5.07e-01
VSKSQINPLKPSRPHPPPPTNIRRGRQREHREIDCCKSRSDSGRTREVCLLDLSSRFCPLDLRQASASWISSATCPWSGSQTAGVGKSKPLMG

SEQ ID NO: 110455 - protein, 49 aa, Setaria italica
  Transcript Sequence Number=SeqID_44481
LGKTNQSLSHMLLHSHSETVIWQFSTIRTTSFLLSFFYKMEQVAGIEPA

SEQ ID NO: 110456 - protein, 146 aa, Setaria italica
  Transcript Sequence Number=SeqID_44482
  Gene Ontology: Mol. function=heat shock protein binding; Biological process=response to stress
  Homolog annotation: Hit_ID=Q1EPG9; Match level="QueryCoverage=97%, HitCoverage=47%, E-value=7e-34, Identity=37%"; Hit description=Heat shock protein DnaJ N-terminal domain-containing protein
SPTSFDYPDPEFCNFTSLRSFDKFKKGQVWALYSDTDKFPKYYGFIKGVDPDDHTIHIKWLEHCPCAQMEKCLVQDGLPIGCGAFRVSRQSDIYDCTSVFSHNMEVTLMRKGKKYEILPRVGQVWAIYKNWSHAWKFEDYCRCEYF

SEQ ID NO: 110457 - protein, 91 aa, Setaria italica
  Transcript Sequence Number=SeqID_44483
  Subcellular localization annotation: CTP_CleavageSite=40; ConfidenceScore=5.06e-01
LLLLFLSFIRSFLLEFGSIFCFSTLSIHLSFGPSSLSLVRSSYSVLQHQFHIVGKGHSMMFLHSNKSMVCNIGIAYNNVDEPNGKIRQGRR

SEQ ID NO: 110458 - protein, 74 aa, Setaria italica
  Transcript Sequence Number=SeqID_44484
  Gene Ontology: Mol. function=protein tyrosine kinase activity; Biological process=protein amino acid phosphorylation
  Homolog annotation: Hit_ID=Q10EC2; Match level="QueryCoverage=100%, HitCoverage=11%, E-value=4e-16, Identity=53%"; Hit description =Lectin receptor kinase 7, putative, expressed
LGLLCSHPSASSRPNMQNVLDYLDGHAPVPELASTQLSFNILALLQNKGLDPYIVSCPPSSMMSFGTISDLSGG

SEQ ID NO: 110459 - protein, 253 aa, Setaria italica
  misc_feature (43)..(43): Xaa can be any naturally occurring amino acid
  misc_feature (94)..(94): Xaa can be any naturally occurring amino acid
  Transcript Sequence Number=SeqID_44485
  Gene Ontology: Mol. function=hydrolase activity, acting on ester bonds; Biological process=lipid metabolic process
  Homolog annotation: Hit_ID=B6SUN1; Match level="QueryCoverage=99%, HitCoverage=64%, E-value=1e-77, Identity=56%"; Hit description =Anther-specific proline-rich protein APG
  Pfam annotation: Domain name=Lipase_GDSL; Domain location=3-234; Score=68.2; E_value=3e-17; Accession=PF00657.14; Description=GDSL -like LipaseAcylhydrolase
YASAAAGILDDSGGNFAGRIPFNQQIRNFESTVAQIAAAAGRXAAADRVARSHPCSWGMGSNDYLNNYLAPNYDTRRRYDPHQFAGLLARQFAXQLTRLYKAGARKFVVAGVGSMGCIPTVLAQSLAGRCSPEVDGLVLPFNANVRAMLDGLNADLPGARFTYLDNFRIFKAILANPAAFGFSVVDRGCCGIGRNGGQITCLPFMPPCADRERYLFWDAYHPTAAVNVMIAREAFHGGADVMAPINVGQLARL

SEQ ID NO: 110460 - protein, 72 aa, Setaria italica
  Transcript Sequence Number=SeqID_44486
  Gene Ontology: Mol. function=nucleic acid binding; Cellular component= spliceosome; Biological process=mRNA processing
  Homolog annotation: Hit_ID=Q6ZK48; Match level="QueryCoverage=100%, HitCoverage=13%, E-value=1e-32, Identity=90%"; Hit description=Pre -mRNA-splicing factor SLU7
GAMTHDKKSCMERPRTVGAKWTNMQIAPDEKVESFELDYDGKRDRWNGYDPSTYTRVIAEYEAREEKGKGYL

SEQ ID NO: 110461 - protein, 104 aa, Setaria italica
  Transcript Sequence Number=SeqID_44487
  Gene Ontology: Mol. function=cysteine protease inhibitor activity; Cellular component=extracellular region; Biological process=defense response
  Homolog annotation: Hit_ID=Q7Y0Q9; Match level="QueryCoverage=94%, HitCoverage=92%, E-value=4e-46, Identity=89%"; Hit description =Cystatin (Fragment)
  Pfam annotation: Domain name=Cystatin; Domain location=9-99; Score =61.9; E_value=2.4e-15; Accession=PF00031.13; Description=Cystatin domain
MASRVGMVGDVRDAPAGRENDLGAIELARFAVAEHNTKTNAMLEFERLVKVRQQVVAGTMHHFTVEVREAGGAKKMYEAKVWEKLWENFKQLQSFEPVGDAAAA

SEQ ID NO: 110462 - protein, 217 aa, Setaria italica
  misc_feature (55)..(55): Xaa can be any naturally occurring amino acid
  misc_feature (131)..(131): Xaa can be any naturally occurring amino acid
  Transcript Sequence Number=SeqID_44488
  Gene Ontology: Mol. function=electron carrier activity; Biological process=oxidation reduction
  Homolog annotation: Hit_ID=Q8L4I4; Match level="QueryCoverage=39%, HitCoverage=13%, E-value=2e-23, Identity=61%"; Hit description =Putative cytochrome P450
  Pfam annotation: Domain name=DUF247; Domain location=2-202; Score= -90.8; E_value=7.7e-07; Accession=PF03140.7; Description=Plant protein of unknown function
GSDPAAAGSGSGKSEEDAFDEWISKPMEERVPLTLPSASDLKNAGVTIRAKKSPXSLVDVTFDPRGGVLEIPAVESYTNHVVFANLLAYEQSRGRWELQRLVSYVLLMESVVSAAHDVEILQRAGVLVKGXEDTAAFYAHLAGELCPPPEFVNNCYADLFRDVREHCGRSWNRHRAVLVHDYFSNPWTSMSAAAAVFLLVLTVVQTVYTVLPYYNPQ

SEQ ID NO: 110463 - protein, 203 aa, Setaria italica
  misc_feature (34)..(34): Xaa can be any naturally occurring amino acid
  Transcript Sequence Number=SeqID_44489
DIISPLIVFSIQYIMVNHMNWKYKKYSRWKTTLXVELVKTCIHVKPFSSKLGGIIWEILLYDSSVHSVLWSILSLATQLLEHSYRRNYHGLKDIEDIELVLCNGLDIIYYILSKLPEDLLPYPPFVTMVLSSSLKPFTLITALTSLLSFRNSDIQVAAARALSVLCLIAYKAQPQLMENVSFTGDVSEIQRLQATISSILDEE

SEQ ID NO: 110464 - protein, 367 aa, Setaria italica
  Transcript Sequence Number=SeqID_44490
  Gene Ontology: Mol. function=hydrolase activity; Cellular component =cytosol
  Homolog annotation: Hit_ID=B6TVC1; Match level="QueryCoverage=87%, HitCoverage=87%, E-value=1e-170, Identity=90%"; Hit description =Nudix hydrolase 8
  Pfam annotation: Domain name=NUDIX; Domain location=194-324; Score =84.6; E_value=3.5e-22; Accession=PF00293.20; Description=NUDIX domain
  Subcellular localization annotation: CTP_CleavageSite=60; ConfidenceScore=5.75e-01
MESSLLDTAVAAASLYPAAARRRRAGSTASFLSCSSCSSRDCRVSASYSHSISRMLSGVRSAARKKLFRADPADLLGVANWPETGGGHQQHWWTALEHNFVLEATDDEYGGVVVDADRLPADKAAFARSLAASLSYWKSVGKKGVWLKLPVDLAEFVPLAVKEGFKYHHAEESYLMMTYWIPDEPNMLPANASHQVGVGGFVINDQMEVLVVQEKYHGSSLDGVWKLPTGFILASEEIYTGASREVKEETGVDTEFVDVVAFRHAHNVAFQKSDLFFICMLRPVSSEIKIDETEIQAAKWMPLEEFVKQPFIQEDHMFQKIMDICIQRLRKCYCGLTPHHVVSKFDDRTSTLYYNVAEPEDVNCSAA

SEQ ID NO: 110465 - protein, 140 aa, Setaria italica
  Transcript Sequence Number=SeqID_44491
VLNLSDYEKHQIMEENSGLKIQVQKIAGLQDELLKLQSSLDESKFEKGKLEELLRLLSEECDGLKVQKAMLTDKVAHMQDTSNNIGDEKQSKTAIQAKHESSIKQGNNDLATDSGGSSPVNEEPDLQTKIKSLESRLAEV

SEQ ID NO: 110466 - protein, 490 aa, Setaria italica
  misc_feature (23)..(23): Xaa can be any naturally occurring amino acid
  Transcript Sequence Number=SeqID_44492
  Gene Ontology: Mol. function=phosphatidylinositol phosphate kinase activity; Biological process=phosphatidylinositol metabolic process
  Homolog annotation: Hit_ID=Q6ZLF2; Match level="QueryCoverage=100%, HitCoverage=27%, E-value=0.0, Identity=74%"; Hit description=1 -phosphatidylinositol-3-phosphate 5-kinase-like
ARCTANSVPRSPGDAAREDGERXIRVCTYCFQRWLEEEAAARGDMAAQQPCSPSASVGSDKSSFTGTNGQMSSYANVSYADFASMPVHGEGNCGEDEGYPEKQLPGMEPAPTMEPAAYVDNSSDPFNFCVQRSDDEDDDYTVFRSDLEGQHLQNSDEYYGPMYFDGHQVDCSDGAKESTSPRKDVTSLVDSLGADKNEDHSVDECCNARSSSMYSMEVLDNEPVDFENNSSLWVPPEPEDEEDDLDGERDDDEGVDATGEWGYQRSTSFGSGHCRSRDKSAEEHKKAMKDIVDGHFRALVSQLLQAEKVPLIDKTGKESWLDIVTSLSWEAASLLKPDTTSKGGQMDPGGYVKVKCLACGHPSESFVVKGVVCKKNVAHRRMSSKKEKPQILILGGALEYQRVSNLLPRYDTLRQQETDYLKMAVAKIKAHQPSVVLVEKSVSRYAQDLFLEKNISLVLNIKRPLLERISRCTGAQIVPSIDYLSSQKLG

SEQ ID NO: 110467 - protein, 124 aa, Setaria italica
  misc_feature (91)..(91): Xaa can be any naturally occurring amino acid
  Transcript Sequence Number=SeqID_44493
  Gene Ontology: Mol. function=binding
  Homolog annotation: Hit_ID=UPI0001A7B028; Match level="QueryCoverage =100%, HitCoverage=7%, E-value=2e-31, Identity=56%"; Hit description =binding
NLLNASLLSESGPPLLDFEELTVILVTLLPLVSVNNSKDEHYVSKGLKTYNELQHCFLVIGLAYPEDLCMFLLNKCKSKDEASIVGALSTXKHLLPRLLESWHTKQAPLVEIMKSLLEHQSLAI

SEQ ID NO: 110468 - protein, 466 aa, Setaria italica
  misc_feature (122)..(122): Xaa can be any naturally occurring amino acid
  Transcript Sequence Number=SeqID_44494
  Gene Ontology: Mol. function=binding
  Homolog annotation: Hit_ID=UPI0001A7B028; Match level="QueryCoverage =92%, HitCoverage=25%, E-value=1e-161, Identity=64%"; Hit description= binding
WDDMIINFLSESLDVVNDSEWVISLGDAFARQYDLYGISDGHAALLHRCLGMLLQKVDDRIYVSEKIDWMCRHSSMSIPINRLGLSQGIGLVAASHLDTVLEKLKNILDNAGQSALQRFLSXFSFGAKVDDVDDTYAALALMYGYAARYAPSTVIEARINALVGTNMLGRLLHVQHPTAKQAVITAIDLLGRAVISAAEMGISFPLKRRDQLLEYVLTLMGRDQSDDLTDFNSELLHTQSVALSACTTLVSLEPRLPMETRNRVMKATLGFFALPTEPSSIVESLITNLIILLGAILLTSGEDGRSRAEQLLHILRQLDPYVSSSLEHQRRRGCVAVQEVLIKFRNLCSGGFGALGSYPTFTMNKQIDQGGTRSLSSLPSAFVLPSRDSLSLGERTMAYLPRCADTDAEVRKAAIQIIALFFNISLSLPKQKAYANDIDLESSYSALSSLEELVSVVRREASVDQT

SEQ ID NO: 110469 - protein, 202 aa, Setaria italica
  misc_feature (106)..(106): Xaa can be any naturally occurring amino acid
  misc_feature (129)..(129): Xaa can be any naturally occurring amino acid
  Transcript Sequence Number=SeqID_44495
  Homolog annotation: Hit_ID=Q10LE1; Match level="QueryCoverage=99%, HitCoverage=7%, E-value=1e-90, Identity=76%"; Hit description =Aberrant pollen transmission 1, putative, expressed
FFERPEPPRRERSLPWWDDMRNYIHGKFNLSFTETEWHLPASTNPYEKMDQMLITSDYMEICYVDGYVSLSSKYLKAYITSLESLAKKTSLEIPHHPAIPFLETPXFFMDISIQWGCDSGNPMDHFIFXALPAEGKPRDKVFDPFRSTSLSLKWSFSLKPSTTEPTEHQRKSDVYTNDSPTVNVGAHDLVWLARWWNLLFFL

SEQ ID NO: 110470 - protein, 63 aa, Setaria italica
  Transcript Sequence Number=SeqID_44496
TYVGTYYIWLWLTNLRKRRQIKLPHKGGAKFSRAVLQLSTQSLYGSHCLFQCHDGFYIYNFCI

SEQ ID NO: 110471 - protein, 93 aa, Setaria italica
  Transcript Sequence Number=SeqID_44497
  Gene Ontology: Mol. function=histone-lysine N-methyltransferase activity; Cellular component=nucleus; Biological process=chromatin modification
  Homolog annotation: Hit_ID=Q8L820; Match level="QueryCoverage=64%, HitCoverage=6%, E-value=3e-10, Identity=57%"; Hit description=SET domain-containing protein SET104
AAAVPPRAAGPRRYKVLVPWRFQRGFVREPLKHAAAAAPSDGGGETVGDPDAENCGSGGAPNAGGESVSVRDAENCGSGGAPSGGKSGGVGGG

SEQ ID NO: 110472 - protein, 93 aa, Setaria italica
  Transcript Sequence Number=SeqID_44498
  Gene Ontology: Mol. function=translation initiation factor activity
  Homolog annotation: Hit_ID=B6TE93; Match level="QueryCoverage=98%, HitCoverage=43%, E-value=6e-22, Identity=63%"; Hit description=GTP binding protein
  Pfam annotation: Domain name=DUF567; Domain location=1-91; Score= -32.8; E_value=0.041; Accession=PF04525.4; Description=Protein of unknown function (DUF567)
RRRAEVVLMDVAGKPLLTVRRKRLSLLGEHWVIYDGDAAEHKSSKPLLSVRRHVSLRASSKTLAHVTPVASSTSAFVVEGSYGRRACAVRDST

SEQ ID NO: 110473 - protein, 86 aa, Setaria italica
  Transcript Sequence Number=SeqID_44499
  Gene Ontology: Mol. function=metalloendopeptidase activity; Cellular component=extracellular space; Biological process=proteolysis
  Homolog annotation: Hit_ID=B9T1F5; Match level="QueryCoverage=84%, HitCoverage=7%, E-value=4e-21, Identity=65%"; Hit description =Insulin-degrading enzyme, putative
NYFELIFRILIDLGNWDTLEVKAKEKGLDTRHELIKFYDAHYSANLMQLVVYGKDSLDNLQNLVENKFCDIRDVGRKPFSFPGHPC

SEQ ID NO: 110474 - protein, 986 aa, Setaria italica
  misc_feature (876)..(876): Xaa can be any naturally occurring amino acid
  Transcript Sequence Number=SeqID_44500
  Gene Ontology: Mol. function=metalloendopeptidase activity; Cellular component=extracellular space; Biological process=proteolysis
  Homolog annotation: Hit_ID=B9T1F5; Match level="QueryCoverage=97%, HitCoverage=99%, E-value=0.0, Identity=67%"; Hit description=Insulin- degrading enzyme, putative
  Pfam annotation: Domain name=Peptidase_M16; Domain location=49-187; Score=152.1; E_value=1.7e-42; Accession=PF00675.12; Description =Insulinase (Peptidase family M16)
  Pfam annotation: Domain name=Peptidase_M16_C; Domain location=212 -393; Score=101.4; E_value=3.2e-27; Accession=PF05193.13; Description= Peptidase M16 inactive domain
  Pfam annotation: Domain name=Peptidase_M16_C; Domain location=680 -868; Score=37.2; E_value=6.7e-08; Accession=PF05193.13; Description =Peptidase M16 inactive domain
  Pfam module annotation: Pfam domain module=Peptidase_M16::Peptidase _M16_C::Peptidase_M16_C; Domain location=49-187::212-393::680-868
MDSRPRETDAPGDPANGAAPPPPTGDVEITKPRNDKRGYRRVVLPNALECLLISDPETDKAAASMNVSVGYFCDPDGLEGLAHFLEHMLFYASEKYPVEDSYSKYIAEHGGSTNAFTSSEHTNFYFDVNSDSLHDALDRFAQFFIKPLMSPDATLREIKAVDSENQKNLLSDPWRMSQLQKHLCADNHPYHKFSTGNWDTLEVKAKEKGLDTRHELIKFYDAHYSANLMQLVVYGKDSLDNLQNLVENKFCDIRDVGRKPFSFPGHPCTSEHLQILVKAVPIKQGHTLRILWPITPNVRHYKEGPCKYISHLIGHEGEGSLFYILKKLGWAISLEAGEGDWSYDFSFFSVVIQLTDEGQEHMEDTVGLLFRYITLLQTSGTPKWIFDELQAICETGFHYRDKSPPINYVVNISSNMQIFPPEDWLIASSVPSKFSPDAIQNILNELTPENVRIFWESKKFEGQTNLTEPWYGTSYSVEVIPPSIIQRWIEKAPEEDLHLPKHNIFIPSDLSLKSVEEKISFPSMLRKTPFSRLWFKPDTMFFTPKAYIKMDFHCPLSQSLPESAVLTDVFTRLLMDYLNDYAYDAQVAGLYYVVKPNDTGFQVTMVGYNDKMKTLLETVIGKIAQFEVKVDRFSVIKEAMTKEYENFKFRQPYQQVLYYCSLILDDQAWPWDEEFSALSHLEASDLEKFLPHLLAKTFIECYFAGNIEPNEAKGVIQHVEDVLFNAPISVCKPLSPSQHLAKRIVKLEKGLRYYYPAMCSNNQDENSALLHYIQTHQDNVKQNVLLQLLALVGKQPAFHQLRSVEQLGYIALLRQRNDSGVRGLQFIIQSTAKDPANLDARVENFLKMFEDILYQMSDAEFKSNVSALIDMKLEKXKNLREESAFFWGEIAEGTLKFDRKEAEVAALRELKKEELIDFFNDHVKVNAPQKKVLSIQVYGGLHTAEYQTIVQNAPPPQSCEITDIYSFKRSRPLYGSFRGGVGQMKL

SEQ ID NO: 110475 - protein, 174 aa, Setaria italica
  Transcript Sequence Number=SeqID_44501
DAAQMAAVEAMQEASAAESLLRCLSSYAEVSSSAEEQNPQPAVEQFLALHGALSRATVVTESLTKATATSSTATSPDRSAAGDASTADEETLAVAAERRRRAASWVGAGLATDLSAFSLYNLKPAPANVVSPLAVVLVDESAKPAVAAAKASPPAKSRLSPAKGKVRSASAAAA

SEQ ID NO: 110476 - protein, 248 aa, Setaria italica
  misc_feature (74)..(74): Xaa can be any naturally occurring amino acid
  Transcript Sequence Number=SeqID_44502
  Subcellular localization annotation: CTP_CleavageSite=92; ConfidenceScore=5.43e-01
AAPALEWSSFLPPVLQNKSSHHSKIINVSTHSGGLIRSSLSEFDRKLPSVLQSRAVPQGTPAFNMRSAGGIFPXSVGQNGESPFFRGAKDISSRKGEAGFRKGIKPVDDALSMFLNLSSDDTPMKDYRTSLLKTEVNKTTPFQGKDSVGKGEFRFGSRAEKPFILNGTGVSQNGLPKVSGSAGFREDYKLPTENILSNKKSSVDEAAASKGVSRWRSDESSEDEGERRTNRESGDSLVTRRRPRFSRR

SEQ ID NO: 110477 - protein, 253 aa, Setaria italica
  Transcript Sequence Number=SeqID_44503
  Gene Ontology: Mol. function=4-coumarate-CoA ligase activity; Biological process=phenylpropanoid metabolic process
  Homolog annotation: Hit_ID=Q9M7S3; Match level="QueryCoverage=94%, HitCoverage=41%, E-value=1e-109, Identity=82%"; Hit description=4 -coumarate--CoA ligase 4CL1
  Pfam annotation: Domain name=AMP-binding; Domain location=1-178; Score=-79.6; E_value=0.0005; Accession=PF00501.20; Description=AMP -binding enzyme
KNPALEKYDLSSIRIVLSGAAPLGKELVDALRARVPQAIFGQGYGMTEAGPVLSMCPAFAREPSPAKPGSCGTVVRNAELKVVDPDTGLSLGRNLPGEICIRGPQIMKGYLNDPEATARTVDVDGWLHTGDIGFVDDDDEVFIVDRVKELIKFKGFQVPPAELEALLLAHPSIADAAVVPQKNDAAGEVPVAFVVRAADSDIAEDAIKEFVSKQVVFYKRLHKVYFTHSIPKSASGKILRRELRAKLAAAETA

SEQ ID NO: 110478 - protein, 111 aa, Setaria italica
  Transcript Sequence Number=SeqID_44504
  Gene Ontology: Cellular component=integral to membrane; Biological process=vesicle-mediated transport
  Homolog annotation: Hit_ID=B6T464; Match level="QueryCoverage=100%, HitCoverage=79%, E-value=8e-46, Identity=92%"; Hit description=Golgi transport 1 protein B
  Pfam annotation: Domain name=Got1; Domain location=30-111; Score =143.6; E_value=6.1e-40; Accession=PF04178.4; Description=Got1-like family
MVSFEMNDRKKIGLGLTGFGVLFSFLGIIMLFDKGFLAMGNILFVSGVLLTIGLKPTVQFFTKPKNHKGSISFGFGFFLVLIGWPALGMMVESYGFIMLFSGFWPTAAVYL

SEQ ID NO: 110479 - protein, 67 aa, Setaria italica
  misc_feature (40)..(40): Xaa can be any naturally occurring amino acid
  Transcript Sequence Number=SeqID_44505
FTLILCIYLNSYYCCAAVLTHVGTYAHDWYVNSQRKAVYXLFLIICSWLMQVNAQRRRILIYAGNFL

SEQ ID NO: 110480 - protein, 104 aa, Setaria italica
  misc_feature (9)..(9): Xaa can be any naturally occurring amino acid
  misc_feature (17)..(17): Xaa can be any naturally occurring amino acid
  misc_feature (99)..(99): Xaa can be any naturally occurring amino acid
  Transcript Sequence Number=SeqID_44506
  Gene Ontology: Mol. function=nucleic acid binding; Cellular component= cytoplasm; Biological process=double-strand break repair via homologous recombination
  Homolog annotation: Hit_ID=A4PBL4; Match level="QueryCoverage=100%, HitCoverage=10%, E-value=7e-51, Identity=93%"; Hit description =OsRad54 protein
LICDEAHRXLKNDQTLXNKALAALPCKRRILLSGTPMQNDLEEFYSMVNFTNPGVLGDASYFRRYYEAPIICGREPTASAEEKKLGSERSAELSAKINXFILRR

SEQ ID NO: 110481 - protein, 586 aa, Setaria italica
  misc_feature (34)..(34): Xaa can be any naturally occurring amino acid
  misc_feature (430)..(430): Xaa can be any naturally occurring amino acid
  misc_feature (436)..(436): Xaa can be any naturally occurring amino acid
  Transcript Sequence Number=SeqID_44507
  Gene Ontology: Mol. function=metal ion binding; Cellular component =plasma membrane
  Homolog annotation: Hit_ID=Q6ZHD3; Match level="QueryCoverage=99%, HitCoverage=67%, E-value=0.0, Identity=50%"; Hit description =Putative ZR1 protein
  Pfam annotation: Domain name=FYVE; Domain location=300-368; Score =65.7; E_value=1.8e-16; Accession=PF01363.13; Description=FYVE zinc finger
  Pfam annotation: Domain name=RCC1; Domain location=144-193; Score =25.3; E_value=0.00025; Accession=PF00415.10; Description=Regulator of chromosome condensation (RCC1)
  Pfam annotation: Domain name=RCC1; Domain location=196-245; Score =1.4; E_value=0.58; Accession=PF00415.10; Description=Regulator of chromosome condensation (RCC1)
  Pfam annotation: Domain name=RCC1; Domain location=248-297; Score =35.4; E_value=2.3e-07; Accession=PF00415.10; Description=Regulator of chromosome condensation (RCC1)
  Pfam annotation: Domain name=RCC1; Domain location=26-79; Score=7.9; E_value=0.12; Accession=PF00415.10; Description=Regulator of chromosome condensation (RCC1)
  Pfam annotation: Domain name=RCC1; Domain location=82-131; Score =19.6; E_value=0.0062; Accession=PF00415.10; Description=Regulator of chromosome condensation (RCC1)
  Pfam module annotation: Pfam domain module=FYVE::RCC1::RCC1::RCC1::RCC 1::RCC1; Domain location=300-368::144-193::196-245::248-297::26 -79::82-131
IIDSLSSIPVKAIAFGAKHTCAVSVSGELYEWGXEGIHSLGLWNDQCRRSQWFPHKLISTSDGISVSKIACGQWHTAIISSTGQLFTYGDGTFGVLGHGDTCCVAQPKEVESLRGLRTKSVACGPWHTAAIVETSGTPKSNAPGGKLFTWGDAGEGKLGHTDKKSKLVPTRVETLVDCDFIQVSCGMSITVVLTITGVVFTIGSKKHGQSGNPRPEDTSICMVEGPLKTEFIKDISCGTSHVAVLAMNGKVFTWGKGTEGQLGLGDYVDRTSPTLVEALEDKQVESITCCSNFTVVICVHKAISCKEQSVCSGCRLAFRFTRKKHNCYNCGSMFCNSCSSNKVPRAALAPDKSKRCRVCDACFNELNNTAEHSKMSSGSKIQKEETSLTEIRTYTPKLSRMLKEANFIMEKMGTANNKTPNQRNQDLATXIKCKKXRWGQVDCPNQFKMCTRQHSIPVDIKEQTVDVCCIGRMIDPVSQKTATLLPQATNDRRKEQDLMEKILLEEVKQLQAQVTTLAEECRHKSLKVQLYKRELEETWLIVRDEATKCKAAKDIIKILTNQRNALSKKLLGGLELDNSSIIPDPP

SEQ ID NO: 110482 - protein, 493 aa, Setaria italica
  Transcript Sequence Number=SeqID_44508
  Gene Ontology: Mol. function=nucleic acid binding; Cellular component= spliceosome; Biological process=mRNA processing
  Homolog annotation: Hit_ID=Q6Z358; Match level="QueryCoverage=78%, HitCoverage=80%, E-value=0.0, Identity=87%"; Hit description=Zinc finger CCCH domain-containing protein 49
  Pfam annotation: Domain name=FYVE; Domain location=33-89; Score= -19.3; E_value=0.081; Accession=PF01363.13; Description=FYVE zinc finger
  Pfam annotation: Domain name=RRM_1; Domain location=230-295; Score =56.0; E_value=1.5e-13; Accession=PF00076.14; Description=RNA recognition motif. (a.k.a. RRM, RBD, o
  Pfam annotation: Domain name=zf-CCCH; Domain location=158-183; Score =16.4; E_value=0.01; Accession=PF00642.16; Description=Zinc finger C -x8-C-x5-C-x3-H type (and similar)
  Pfam module annotation: Pfam domain module=FYVE::RRM_1::zf-CCCH; Domain location=33-89::230-295::158-183
MAHRLLRDAQADGWERSDFPIICESCLGDNPYVRMLRAEYDKECKICARPFTVFRWRPGRDARYKKTEICQTCCKLKNVCQVCLLDLEYGLPVQVRDTALAINSNDAIPRSDVNREYFAEEHDRRARAGIDYDSSYGKAQPNDTILKLQRTAPYYKRNRAHVCSFYVRGECTRGAECPYRHEMPETGELSQQNIKDRYYGVNDPVAMKLLSKAGEMPSLTPPDDETIRTLYIGGLDSRVTEQDLRDQFYAHGEIESIRMVLQRACAFVTYTTREGAEKAAEELANKLVIKGVRLKLMWGKPQAPKPEEDESGRQGQVSHGGLLPRAVISQQQSGDQPQPPGMEGQQQPPASYYFNIPAPPAAERTLYPSMDPQRMGAVVKSQDGEGKPGLQPGHAQPSSSSAQGGYPAPPPYYHGQYPPYYAPPPYVGYMPPPRMPYPPLYPPYQPMLAPPAQAHASSSQQPAQAGQQPPHGPPAQQQQPAPGPSAQQQPTQN

SEQ ID NO: 110483 - protein, 39 aa, Setaria italica
  misc_feature (25)..(25): Xaa can be any naturally occurring amino acid
  Transcript Sequence Number=SeqID_44509
  Gene Ontology: Mol. function=protein kinase activity; Biological process=protein amino acid phosphorylation
SGQEIDDPTQFISCVCWRGSLQLFXSANSSGNIKILEMD

SEQ ID NO: 110484 - protein, 176 aa, Setaria italica
  Transcript Sequence Number=SeqID_44510
  Homolog annotation: Hit_ID=Q9LNA8; Match level="QueryCoverage=89%, HitCoverage=18%, E-value=5e-53, Identity=60%"; Hit description =F5O11.10
SSASPLRHQATANSSAALAMLDDVLTSARPLQFSVLEEPFKLLCIDDPAAREIVDMVHSAAFWAEVEAAHSLVKLITDMVKEMETERPLVGQCLPLWEDLRGKVRGWCRKFNVDEGIAMDVLERRFRKSYHPAWSAAFILDPLYLIKDASGRYLPPFKYLTPEQEKDMDRLITRLV

SEQ ID NO: 110485 - protein, 93 aa, Setaria italica
  Transcript Sequence Number=SeqID_44511
  Subcellular localization annotation: CTP_CleavageSite=41; ConfidenceScore=5.25e-01
DISAAPQPQSPPSSSSFPATGLAAAALQLRGEQEQMGRGIRGNHARGSRGIRQKRWRPLLGRRTWGRGLDSAADKHGGGWGILRLRGRGEARA

SEQ ID NO: 110486 - protein, 181 aa, Setaria italica
  misc_feature (166)..(166): Xaa can be any naturally occurring amino acid
  Transcript Sequence Number=SeqID_44512
  Gene Ontology: Mol. function=nucleic acid binding; Cellular component= spliceosome; Biological process=mRNA processing
  Homolog annotation: Hit_ID=Q6ZK48; Match level="QueryCoverage=84%, HitCoverage=28%, E-value=8e-66, Identity=77%"; Hit description=Pre -mRNA-splicing factor SLU7
LVTKKFTKLYKSFKIKKEKLKSETKEKIMDKYGNAASEEPLPRELLLGQSEREIEYDRTGRIIKGQDTSVPKSKYEEDVYINNHTSVWGSWWKDHQWGYKCCKQTIKNSYCTGLAGIEAAEASADLMKANMARKEAAEEEPVQHEERRLATWGTDVPDDLVLDKKXLAESLKKEDERRREE

SEQ ID NO: 110487 - protein, 81 aa, Setaria italica
  Transcript Sequence Number=SeqID_44513
TCPSLYFCKLTCISRCTIYMLATICFNDHMTSFQTSYDDAKMYVAISQYINLALHLFIFMYCYHFIINYSFLMHFHAIALQ

SEQ ID NO: 110488 - protein, 84 aa, Setaria italica
  Transcript Sequence Number=SeqID_44514
  Homolog annotation: Hit_ID=B6U8R7; Match level="QueryCoverage=82%, HitCoverage=37%, E-value=2e-29, Identity=91%"; Hit description =Membrane protein
LAVATGGGGCRRLSRGVACASFLLDKGCAYMVFATTVAALQACFVGLIGVEALQWSKLCNIYTRFCEQAAAGMLCSMLAAGGMA

SEQ ID NO: 110489 - protein, 132 aa, Setaria italica
  Transcript Sequence Number=SeqID_44515
  Gene Ontology: Cellular component=plasma membrane
  Homolog annotation: Hit_ID=Q2QWH8; Match level="QueryCoverage=100%, HitCoverage=37%, E-value=2e-46, Identity=69%"; Hit description=Amino acid permease I, putative, expressed
MDKSAAAADDVERGDYEQGHERTGTVWTATAHIVTAVIGSGVLALAWSVAQLGWVAGPLALAGFACVTYYTSTLLANAYRAPHPVTGDRNRTYMDAVRSYLSPREVFMCGIAQYVNLWGTMVGYTITATISM

SEQ ID NO: 110490 - protein, 50 aa, Setaria italica
  Transcript Sequence Number=SeqID_44516
VKPAFDYDHEESYPPGRGRGRGGGRRGRGRGMFFLVSFISSKVPVIVIVS

SEQ ID NO: 110491 - protein, 167 aa, Setaria italica
  Transcript Sequence Number=SeqID_44517
  Subcellular localization annotation: CTP_CleavageSite=33; ConfidenceScore=5.71e-01
SRSHLLGPTPVLPSAHFFTVSYSSRFPLPSTPLAKLPTPLRTEQWSRGLNSDSLLPLDPGSETSKGEGASRGSRVAGSRRSEGDAALHEPRFLIEASAHRSEEGSEEHRRGRGRWKKGGRLPRQRCRSCPSRTISPERRRLQQQAKVPGLSCCTPSSIPAIPDEWQV

SEQ ID NO: 110492 - protein, 165 aa, Setaria italica
  misc_feature (10)..(10): Xaa can be any naturally occurring amino acid
  Transcript Sequence Number=SeqID_44518
  Gene Ontology: Mol. function=hydrolase activity
  Homolog annotation: Hit_ID=B6SJE4; Match level="QueryCoverage=100%, HitCoverage=67%, E-value=3e-58, Identity=67%"; Hit description =Receptor protein kinase-like protein
  Pfam annotation: Domain name=DUF303; Domain location=10-112; Score =102.4; E_value=1.5e-27; Accession=PF03629.10; Description=Domain of unknown function (DUF303)
DIDTAKTCGXGPGMVFARTVLPCLQEDNPGKGARTGIGLVPCAVGGTAIREWARGEFLYEQMVCRARVAAGYGEIEAVLWYQGESDAESDAATAAYNGNIERLITNVRADLEMPQLPFIQMDLTSRHEPNIVGVRSAQFSVNLPNVVTVDAMGLALKEDNMHLTT

SEQ ID NO: 110493 - protein, 71 aa, Setaria italica
  Transcript Sequence Number=SeqID_44519
  Gene Ontology: Mol. function=hydrolase activity
  Homolog annotation: Hit_ID=B6SJE4; Match level="QueryCoverage=97%, HitCoverage=28%, E-value=3e-26, Identity=84%"; Hit description =Receptor protein kinase-like protein
CQQVALASGDKRNIDKVRSAQFSVNLPNVVTVDAMGLALKEDNMHLTTESQVKLGKMLAEAYIENFLTPTC

SEQ ID NO: 110494 - protein, 51 aa, Setaria italica
  Transcript Sequence Number=SeqID_44520
  Homolog annotation: Hit_ID=Q84KI5; Match level="QueryCoverage=100%, HitCoverage=12%, E-value=5e-09, Identity=60%"; Hit description =Phytochelatin synthetase-like protein 1
MAAGGRPVTCCCGAVLLAAALLLSAPDATEAYDSLDPNGNITIKWDVMQWT

SEQ ID NO: 110495 - protein, 39 aa, Setaria italica
  Transcript Sequence Number=SeqID_44521
MAAGGRSVAYCAAVLLAAALLLSAPTGTEAYDSLDPNGQ

SEQ ID NO: 110496 - protein, 173 aa, Setaria italica
  misc_feature (137)..(137): Xaa can be any naturally occurring amino acid
  misc_feature (142)..(142): Xaa can be any naturally occurring amino acid
  Transcript Sequence Number=SeqID_44522
  Gene Ontology: Cellular component=anchored to membrane
  Homolog annotation: Hit_ID=Q10CP1; Match level="QueryCoverage=58%, HitCoverage=47%, E-value=4e-52, Identity=94%"; Hit description=COBRA- like protein 4, putative, expressed
  Pfam annotation: Domain name=COBRA; Domain location=83-172; Score =47.7; E_value=4.6e-11; Accession=PF04833.7; Description=COBRA-like protein
VRDGGECGGGRRADIEGEREGCEGEEAGVLDAGGRRRRSRRRRPWLVGCEDEWGEWNFDADSLDPNGNITIKWDIMQWTPDGYVAVVTMFNYQQFRHIGAPGWQLGWTWAKKEVIWSMVGAQTTEQGDCSKFKGNTXHCCKXDPTIVDLLPGTPYNMQIAICRVLVKCIYNSC

SEQ ID NO: 110497 - protein, 213 aa, Setaria italica
  misc_feature (93)..(93): Xaa can be any naturally occurring amino acid
  Transcript Sequence Number=SeqID_44523
  Gene Ontology: Cellular component=anchored to membrane
  Homolog annotation: Hit_ID=Q84KI4; Match level="QueryCoverage=92%, HitCoverage=42%, E-value=1e-96, Identity=87%"; Hit description =Phytochelatin synthetase-like protein 2
  Pfam annotation: Domain name=COBRA; Domain location=34-198; Score =257.6; E_value=3e-74; Accession=PF04833.7; Description=COBRA-like protein
CGPFVAPAEAYDSLDPNGNITIKWDIMQWTPDGYVVSSTMFNYQQFRHIGAPGWQLGWTWAKKEVIWSMVGAQTTEQGDCSKFKGNTPHCCKXDPTIVDLLPGTPYNMQIANCCKAGVINTFNQDPANAAASFQISVGLAGTTNKTVKVPKNFTLKTPGPGYTCGRAIVGRPTKFFTSDGRRATQALSKLLIYWTLHFTCYQLLVYFVEMRYS

SEQ ID NO: 110498 - protein, 92 aa, Setaria italica
  misc_feature (31)..(31): Xaa can be any naturally occurring amino acid
  Transcript Sequence Number=SeqID_44524
  Gene Ontology: Cellular component=anchored to membrane
  Homolog annotation: Hit_ID=Q9SEC8; Match level="QueryCoverage=78%, HitCoverage=17%, E-value=1e-31, Identity=90%"; Hit description =Phytochelatin synthetase-like protein
  Pfam annotation: Domain name=COBRA; Domain location=2-83; Score= -40.7; E_value=0.0014; Accession=PF04833.7; Description=COBRA-like protein
  Subcellular localization annotation: CTP_CleavageSite=49; ConfidenceScore=5.54e-01
AGVINTFNQDPANAAASFQISVGLAGTTNKXLRVPRNFTLKTPGPGYTCGRAIVGRPTRFFTPDGRRATQALSKLLIYWTLHFACHQLLLKL

SEQ ID NO: 110499 - protein, 449 aa, Setaria italica
  Transcript Sequence Number=SeqID_44525
  Gene Ontology: Cellular component=anchored to membrane
  Homolog annotation: Hit_ID=Q84KI4; Match level="QueryCoverage=97%, HitCoverage=97%, E-value=0.0, Identity=91%"; Hit description =Phytochelatin synthetase-like protein 2
  Pfam annotation: Domain name=COBRA; Domain location=54-218; Score =320.6; E_value=3.3e-93; Accession=PF04833.7; Description=COBRA-like protein
MAAGGRSVAYCAAVLLAAALLLSAPTGTEAYDSLDPNGNITIKWDIMQWTPDGYVAVVTMFNYQQFRHIGAPGWQLGWTWAKKEVIWSMVGAQTTEQGDCSKFKGNTPHCCKKDPTIVDLLPGTPYNMQIANCCKAGVINTFNQDPANAAASFQISVGLAGTTNKTVKVPKNFTLKTPGPGYTCGRAIVGRPTKFFTSDGRRATQALMTWNVTCTYSQFLAQKTPSCCVSLSSFYNDTIVNCPTCSCGCQNPNGSNCVNEDSPNLQSAIDGPGKWTGQPLVQCTSHMCPIRIHWHVKLNYKEYWRVKITITNFNFRMNYTQWNLVAQHPNFDNITQLFSFNYKPLTPYGSGINDTAMFWGVKFYNDLLMQAGKLGNVQSELLLRKDSQTFTFEKGWAFPRRVYFNGDNCVMPSPENYPWLPNASPLTKQPLTLPLLVFWVVLATLLAYA

SEQ ID NO: 110500 - protein, 156 aa, Setaria italica
  misc_feature (93)..(93): Xaa can be any naturally occurring amino acid
  Transcript Sequence Number=SeqID_44526
  Gene Ontology: Cellular component=anchored to membrane
  Homolog annotation: Hit_ID=Q9SEC8; Match level="QueryCoverage=92%, HitCoverage=35%, E-value=3e-54, Identity=72%"; Hit description =Phytochelatin synthetase-like protein
CCLLVPFSDDTAMFWGVKFYNDLLMQAGKLGNVQSELLLRKDSQTFTFEKGWAFPRRVYFNGDNCVMPSPENYPWLPNASPLTKQPLTLPLLXILGCVGYSVGICMMSGIRRFSELQVDVRFHEVHCNGSFVHSITWLHRRDDTTQRKKVYVCVFL

SEQ ID NO: 110501 - protein, 45 aa, Setaria italica
  Transcript Sequence Number=SeqID_44527
SVCSESYLIYVSCVQAVPPVIHRDLKSDNILLDHSMRAKVAQFMM

SEQ ID NO: 110502 - protein, 418 aa, Setaria italica
  Transcript Sequence Number=SeqID_44528
  Gene Ontology: Mol. function=protein serine/threonine kinase activity; Biological process=protein amino acid phosphorylation
  Homolog annotation: Hit_ID=B6TZ54; Match level="QueryCoverage=97%, HitCoverage=92%, E-value=0.0, Identity=85%"; Hit description =Nodulation receptor kinase
  Pfam annotation: Domain name=Pkinase; Domain location=106-369; Score =169.7; E_value=8.5e-48; Accession=PF00069.17; Description=Protein kinase domain
  Pfam annotation: Domain name=Pkinase_Tyr; Domain location=106-369; Score=122.8; E_value=1.1e-33; Accession=PF07714.9; Description =Protein tyrosine kinase
  Pfam module annotation: Pfam domain module=Pkinase::Pkinase_Tyr; Domain location=106-369::106-369
  Subcellular localization annotation: CTP_CleavageSite=49; ConfidenceScore=5.12e-01
FGSFVRCLLAIWLYRRRASVAARTRSLESPSATLRADGSRCASLDSSVSVSVVSESVADWGHPPTAKRAAFWAWRGGAGHNGREPPQLTVSGIPKYHYKDLQKATSNFTTILGQGSFGPVYKAVMATGEVVAVKVLASDSRQGEREFQTEVALLSRLHHRNLVNLVGYCVEKGQRILIYEYMSNGSLARLLYGDNKRSLSWQERLQIAHDISHGIEYLHEGAVPPVIHRDLKSDNILLDHSMRAKVADFGLSKEEVYDGRKSGLKGTYGYMDPDYMSTNKLTKKSDVYSFGIILFELITAINPQQGLMDYINLAAIGGEGRVDWDEILDKDLLVGNIPEEVRMLADVAYRCVNKSPRKRPWISEVTQAISRLRQRQLTKHDALTLPRSETRTVLRRIEYQHVELSDITSMKELTPIRA

SEQ ID NO: 110503 - protein, 57 aa, Setaria italica
  Transcript Sequence Number=SeqID_44529
LWATIHMLVASSSGPQVMGGILFLYQTLKSDFVTSKKSLPRAFGLHNCREVEVCICS

SEQ ID NO: 110504 - protein, 240 aa, Setaria italica
  Transcript Sequence Number=SeqID_44530
  Gene Ontology: Mol. function=hydrolase activity, acting on ester bonds; Cellular component=nucleus; Biological process=mRNA processing
  Homolog annotation: Hit_ID=B6U6X4; Match level="QueryCoverage=92%, HitCoverage=54%, E-value=8e-97, Identity=81%"; Hit description =Lariat debranching enzyme
  Pfam annotation: Domain name=DBR1; Domain location=69-200; Score =29.2; E_value=6.3e-08; Accession=PF05011.5; Description=Lariat debranching enzyme, C-terminal domain
LDIFLSHDWPLGITEYGNWQELIRAKNHFEAEVNNRTLGSKPAAELLNKLKPPYWFSAHLHCRFPAIIQHGENGPTTKFLALDKCFRGRNFLQVIDIPSNPGPYEIHYDEEWLAITRRFNSVFPLTRRRFTMRDEQLDTQDDRQWVRSKLNTRGFKPFDFVQTAPAFNPSNPVSNSSVIGSCRNPQTESFLQLLELPYLLDSSNSEGVERNESSSQPGNTLGDEDIELPDEDEDAADDDE

SEQ ID NO: 110505 - protein, 51 aa, Setaria italica
  Transcript Sequence Number=SeqID_44531
YRIRLCLNLNLFYFVAFMASLYTHELGIRPQMTSSPLGRWRRPAVPSLLGG

SEQ ID NO: 110506 - protein, 137 aa, Setaria italica
  Transcript Sequence Number=SeqID_44532
  Gene Ontology: Mol. function=racemase and epimerase activity, acting on carbohydrates and derivatives; Biological process=carbohydrate metabolic process
  Homolog annotation: Hit_ID=Q1XG32; Match level="QueryCoverage=82%, HitCoverage=31%, E-value=2e-52, Identity=88%"; Hit description=UDP -galactose epimerase
MAIGGAEAGNGGGGGAGGGAVGDKRSVLVTGGAGFIGTHTVLRLLERGYGVTVVDNFHNSVPEALDRVRLIAGPALSARLDFVLGDLRNIDDLEKVFAARRYDAVIHFAGLKAVGESVAHPDMYYDNNLVGTINLYK

SEQ ID NO: 110507 - protein, 115 aa, Setaria italica
  misc_feature (23)..(23): Xaa can be any naturally occurring amino acid
  Transcript Sequence Number=SeqID_44533
  Homolog annotation: Hit_ID=B6T1S6; Match level="QueryCoverage=46%, HitCoverage=23%, E-value=8e-13, Identity=73%"; Hit description =HMG1/2-like protein
LPWSVLCFADLLCDVHQEKKPYXDKAAELKAHAENGEGSGENNVAAEKPKADDTEGGQEVDQPAKRLRRKVDDEDEACDEEDLDGRAHFFSVNGRCVRLASLSLVWRGGDWDCSQ

SEQ ID NO: 110508 - protein, 219 aa, Setaria italica
  Transcript Sequence Number=SeqID_44534
  Gene Ontology: Mol. function=DNA binding; Cellular component =chromatin; Biological process=regulation of transcription, DNA -dependent
  Homolog annotation: Hit_ID=B6T1S6; Match level="QueryCoverage=87%, HitCoverage=87%, E-value=3e-83, Identity=83%"; Hit description =HMG1/2-like protein
  Pfam annotation: Domain name=HMG_box; Domain location=95-158; Score =70.2; E_value=7.7e-18; Accession=PF00505.11; Description=HMG (high mobility group) box
MAGGNKSTGNAARSRKRVEATILKRSRDGSAFTRCEACNKDVPVVLIDMHSCSLDAKIRETLEAQVVERTVEVTKPADRKKPAKAGAANKDGKRKRTPTAFFLFMDDFRKEFKAANPDNKNVATVAKEGGERWKSMTDEEKKPYHDKAAELKAHAENGEGSGENNVAAEKPKADDTEGGQEVDQPAKRLRRKVDDEDEACDEEDEDEKNVLDDDLDDDM

SEQ ID NO: 110509 - protein, 85 aa, Setaria italica
  misc_feature (29)..(29): Xaa can be any naturally occurring amino acid
  misc_feature (84)..(84): Xaa can be any naturally occurring amino acid
  Transcript Sequence Number=SeqID_44535
PNHSEVLTRKRKRGTEGRLSAKRRSYQEXKSLPAYCQENVPSKEPKKAIHKKTGKDPSIVVKHKVGHERSTIDENINEPSGTKXE

SEQ ID NO: 110510 - protein, 303 aa, Setaria italica
  Transcript Sequence Number=SeqID_44536
  Gene Ontology: Mol. function=DNA binding; Cellular component=nucleus; Biological process=regulation of transcription
  Homolog annotation: Hit_ID=Q1EPH1; Match level="QueryCoverage=74%, HitCoverage=77%, E-value=1e-77, Identity=63%"; Hit description=No apical meristem (NAM) protein, putative
  Pfam annotation: Domain name=NAM; Domain location=13-148; Score =244.3; E_value=3e-70; Accession=PF02365.7; Description=No apical meristem (NAM) protein
MAMNSLSMVEARLPPGFRFHPRDDELVLDYLAKKLGGGGDGGAAVVSIYGCPTMVDVDLNKCEPWDLPDIACIGGKEWYFYSLRDRKYATGQRTNRATDSGYWKATGKDRPISRKGLLVGMRKTLVFYQGRAPKGKKTEWVMHEFRMEGQGDPMKLPFKEDWVLCRVFYKSRATIAKPPTESSSYNIDAATTSLPPLIDNYNISFDQPGSVQNLEGYEQVPCFSNNPSHQPSSSMNAPLSSSAMADQAEQHMAGKSIKDVLMSQFSRFEGNVVKRETPQSNFSQDGFEYLAESGFTQMWNSFS

SEQ ID NO: 110511 - protein, 56 aa, Setaria italica
  misc_feature (49)..(56): Xaa can be any naturally occurring amino acid
  Transcript Sequence Number=SeqID_44537
  Subcellular localization annotation: CTP_CleavageSite=24; ConfidenceScore=5.14e-01
RCQFLFPSVVNSHENPSLLGQSLLQSSKKDCNRGFVLSNVRLFFRLLSXXXXXXXX

SEQ ID NO: 110512 - protein, 66 aa, Setaria italica
  Transcript Sequence Number=SeqID_44538
  Subcellular localization annotation: CTP_CleavageSite=38; ConfidenceScore=5.18e-01
ISIPSAGPTKLSAPFYNHNHFREFFINPKEMPSCQLSRATRGVYHSAAKERSPATQSTGIVSWCPL

SEQ ID NO: 110513 - protein, 638 aa, Setaria italica
  misc_feature (13)..(13): Xaa can be any naturally occurring amino acid
  Transcript Sequence Number=SeqID_44539
  Gene Ontology: Mol. function=protein dimerization activity; Cellular component=nucleus; Biological process=regulation of transcription, DNA-dependent
  Homolog annotation: Hit_ID=Q5NB85; Match level="QueryCoverage=100%, HitCoverage=92%, E-value=0.0, Identity=76%"; Hit description=Auxin response factor 1
  Pfam annotation: Domain name=AUX_IAA; Domain location=425-630; Score=- 99.5; E_value=0.027; Accession=PF02309.8; Description=AUXIAA family
  Pfam annotation: Domain name=Auxin_resp; Domain location=193-274; Score=135.8; E_value=1.4e-37; Accession=PF06507.5; Description=Auxin response factor
  Pfam annotation: Domain name=B3; Domain location=66-171; Score=107.1; E_value=5.9e-29; Accession=PF02362.13; Description=B3 DNA binding domain
  Pfam module annotation: Pfam domain module=AUX_IAA::Auxin_resp::B3; Domain location=425-630::193-274::66-171
LLAEQIKMFQVPXKILCKVVNVELKAETETDEMFAQITLQPDPDQVNLPTLPDPPLPETPRPVVHSFCKILTPSDTSTHGGFSVLRRHANECLPPLDMSMPTPTQELITKDLHGSEWRFKHIYRGQPRRHLLTTGWSTFVTSKKLIAGDAFVYLRSETGQQRVGVRRLVQKQSAMPASVISSQSMHLGVLASASHAIKTNSIFLVYYRPRLSQSQYIVSLNKYLEASKIGFNVGMRFKMSFEGEDVPVKKFSGTVVDKGDLSPQWQGSEWKTLKVQWDEATNLNGPERVSSWEIEPFDASTPTINIPVQQSTKNKRPRETAESLDIQAMEPTQEFWLSGMPEQHEKAGIGSSEPNCISGHQVVWTSERAGYSAMSSSVCQNSVVLGNWFKDFNSSSKGASPSLSEISQKLFQVTSNDARVPPWPGLSAYQAEEPSSKLSSNTALCSYQTEEVAPNFSNAVEEKKEPGMFRLFGVNLINHTRNAATSEKMTVGVREISTRTAGSLEDSGQLSALSKVTKDHTQNVNESPREIQSHQNCTGRTRIKVQMQGNAVGRAIDLVNLHGYPQLISELDEMFEIKDLSSKEKWKVAFTNDEGDTMEVGDVPWLKFCQTVRKIVIHPIEDESDMDPFLEQDVKTDF

SEQ ID NO: 110514 - protein, 62 aa, Setaria italica
  Transcript Sequence Number=SeqID_44540
  Gene Ontology: Mol. function=unfolded protein binding; Cellular component=prefoldin complex
  Homolog annotation: Hit_ID=B6TVU2; Match level="QueryCoverage=96%, HitCoverage=40%, E-value=2e-23, Identity=95%"; Hit description =Prefoldin subunit 5
MASPGRIELDKLSVEQLKGLKEQTDLEVNLLQDSLTKIRTAITRLENASAALQDLSLRPKEE

SEQ ID NO: 110515 - protein, 153 aa, Setaria italica
  misc_feature (83)..(83): Xaa can be any naturally occurring amino acid
  Transcript Sequence Number=SeqID_44541
  Gene Ontology: Mol. function=protein serine/threonine kinase activity; Biological process=protein amino acid phosphorylation
  Homolog annotation: Hit_ID=Q8S606; Match level="QueryCoverage=97%, HitCoverage=49%, E-value=3e-24, Identity=40%"; Hit description =Protein kinase domain containing protein
RFPLDLRMKIAVETAGALEYLHSSAMGITAHDSVEPRNLLVDDNFMPKLTSFSWVWRLAQQTGLPVNDRQFDNVYLSCQKPNXDVYEFGFLLLKLIGRKKRYGEENLDIILQFANAYKEDNSGKAMFHKDITVEGDITVLEDIGRLALKCADS

SEQ ID NO: 110516 - protein, 119 aa, Setaria italica
  Transcript Sequence Number=SeqID_44542
  Homolog annotation: Hit_ID=B6UAR1; Match level="QueryCoverage=54%, HitCoverage=38%, E-value=9e-25, Identity=86%"; Hit description=HIT zinc finger family protein
MELYSIFNQINLKWLSKVQYIMLLLLHYVFTIIIAPCFSAAPNTTCPAKSPNTVCPTKALEVEDPSWLVDNNRLRSLAELKEIKDALRDPELQKMILKIDGSSEPEKVSLHSSFTCKNC

SEQ ID NO: 110517 - protein, 173 aa, Setaria italica
  Transcript Sequence Number=SeqID_44543
  Gene Ontology: Mol. function=thyroid hormone receptor binding; Cellular component=intracellular; Biological process=regulation of transcription, DNA-dependent
  Homolog annotation: Hit_ID=B6UAR1; Match level="QueryCoverage=100%, HitCoverage=100%, E-value=1e-77, Identity=85%"; Hit description=HIT zinc finger family protein
  Pfam annotation: Domain name=zf-HIT; Domain location=2-32; Score =37.4; E_value=5.7e-08; Accession=PF04438.8; Description=HIT zinc finger
MGGGSCSVCKEAPSKYKCPSCRTPYCSVTCFKKHKEESCQKILLQEDVSKSPLQEEVTRSSGLVGDGTKCPNDKDQHPSLSPNTTCPAKSPNTVCPTKALEVEDPSWLVDNNRLRSLAELKEIKDALRDPELQKMILKIDGSSEPEKELEKVMEGQAFRQFTDKILDIVSPQE

SEQ ID NO: 110518 - protein, 85 aa, Setaria italica
  misc_feature (32)..(32): Xaa can be any naturally occurring amino acid
  Transcript Sequence Number=SeqID_44544
  Gene Ontology: Mol. function=ATP binding; Biological process=defense response
  Homolog annotation: Hit_ID=Q2QU63; Match level="QueryCoverage=97%, HitCoverage=22%, E-value=4e-22, Identity=66%"; Hit description =Leucine Rich Repeat family protein
LCIACREVTELPEGIGDLRYLQTLDIGGSGIXKLPPSIGRLQKLVRLLVSNTVKLPDEVGDLQALQELTTIYQYSIKLVEALRHF

SEQ ID NO: 110519 - protein, 116 aa, Setaria italica
  Transcript Sequence Number=SeqID_44545
  Gene Ontology: Mol. function=helicase activity; Cellular component =chloroplast
  Homolog annotation: Hit_ID=B9SMY0; Match level="QueryCoverage=88%, HitCoverage=53%, E-value=2e-34, Identity=44%"; Hit description =Pentatricopeptide repeat-containing protein, putative
  Pfam annotation: Domain name=PPR; Domain location=41-75; Score=39.0; E_value=1.9e-08; Accession=PF01535.12; Description=PPR repeat
  Pfam annotation: Domain name=PPR; Domain location=6-40; Score=36.2; E_ value=1.3e-07; Accession=PF01535.12; Description=PPR repeat
  Pfam annotation: Domain name=PPR; Domain location=76-110; Score=0.3; E_value=8.3; Accession=PF01535.12; Description=PPR repeat
  Pfam module annotation: Pfam domain module=PPR::PPR::PPR; Domain location=41-75::6-40::76-110
CPPNVVTFNMLISFLCRRGLVEPAMEVLEQIPKYGCTPNSLSYNPLLHVFCKQKKMDKAMAFVDLMVSRGCYPDIVSYNTLLTALCRKAEGEVAIDLSFYSNFLRLLKGSLLVPFV

SEQ ID NO: 110520 - protein, 124 aa, Setaria italica
  Transcript Sequence Number=SeqID_44546
  Gene Ontology: Mol. function=P-P-bond-hydrolysis-driven protein transmembrane transporter activity; Cellular component=outer membrane; Biological process=intracellular protein transport
  Homolog annotation: Hit_ID=B4VY37; Match level="QueryCoverage=95%, HitCoverage=13%, E-value=1e-18, Identity=41%"; Hit description=Outer membrane protein, OMP85 family, putative
QVGPLWGDMAPYQAFAIGGLGSVRGYGEGAVGSGRLCLVANCEYTIPLAKHLEGSIFMDCGSDLGSARHVPGNPALRQGKPGFGAGFGYGLHFNTDLGQIRVDYAMNAFNRKTIYFGINTSGGS

SEQ ID NO: 110521 - protein, 52 aa, Setaria italica
  Transcript Sequence Number=SeqID_44547
MELLPLLLACSLLFTVATPARDIPSVCASQISGTYKSPLRLIVMVITVTLCK

SEQ ID NO: 110522 - protein, 148 aa, Setaria italica
  Transcript Sequence Number=SeqID_44548
  Gene Ontology: Mol. function=aspartic-type endopeptidase activity; Biological process=proteolysis
  Homolog annotation: Hit_ID=B6TBA8; Match level="QueryCoverage=86%, HitCoverage=28%, E-value=6e-52, Identity=81%"; Hit description =Aspartic proteinase nepenthesin-2
MELLPLLLACSLLFTVATPARDIPSVCASQISDFPHRNSSGLHLTLHHPQSACSPAPLPSDLPFSTVLTHDDARAAHLASRLDTNNDAPPRRPTSLRSKKKAAGHLDDSLASVPLSPGASIGVGNYVTQLGLGTPATSYAMVRTNNGV

SEQ ID NO: 110523 - protein, 490 aa, Setaria italica
  Transcript Sequence Number=SeqID_44549
  Gene Ontology: Cellular component=spliceosome; Biological process =cell division
  Homolog annotation: Hit_ID=B6UAA0; Match level="QueryCoverage=99%, HitCoverage=85%, E-value=0.0, Identity=90%"; Hit description=Pre -mRNA-splicing factor PRP17
  Pfam annotation: Domain name=WD40; Domain location=189-228; Score =50.3; E_value=7.6e-12; Accession=PF00400.24; Description=WD domain, G-beta repeat
  Pfam annotation: Domain name=WD40; Domain location=233-271; Score =42.2; E_value=2.1e-09; Accession=PF00400.24; Description=WD domain, G-beta repeat
  Pfam annotation: Domain name=WD40; Domain location=275-315; Score =9.6; E_value=2.9; Accession=PF00400.24; Description=WD domain, G -beta repeat
  Pfam annotation: Domain name=WD40; Domain location=319-357; Score =34.5; E_value=4.3e-07; Accession=PF00400.24; Description=WD domain, G-beta repeat
  Pfam annotation: Domain name=WD40; Domain location=362-400; Score =13.2; E_value=1.1; Accession=PF00400.24; Description=WD domain, G -beta repeat
  Pfam annotation: Domain name=WD40; Domain location=407-447; Score =12.3; E_value=1.4; Accession=PF00400.24; Description=WD domain, G -beta repeat
  Pfam annotation: Domain name=WD40; Domain location=451-490; Score =30.1; E_value=8.8e-06; Accession=PF00400.24; Description=WD domain, G-beta repeat
  Pfam module annotation: Pfam domain module=WD40::WD40::WD40::WD40::WD4 0::WD40::WD40; Domain location=189-228::233-271::275-315::319 -357::362-400::407-447::451-490
TPTAPISSASGNRNHKLGHVEDAAVLPFLFDEQYNTFHRFGYASDPSGLHIVGDAQSQAPEPDTVYNLAPSEHKRRRLLAKADNQEEPLPPDARNPASEEWILHNKQSPWAGKKEAPPAELTEEQKQYAEAHAAKKAEKEARGEGKGERAEVVVKSTFHGKEERDYQGRSWITPPKDAKASNDHCYIPKRCVHEWVGHTKGVSAIRFFPKYGHLLLSASMDCKIKIWDVLGSRTCMRTYMGHSKAVRDISFSNDGTKFLSAGYDRNIQYWDTETGQVISTFSTGKVPYVVKLNPDEDKQHILLAGMSDKKIVQWDMKSGQITQEYDQHLGAVNTITFVDNNRRFVTSSDDKSLRVWEFGIPVVIKYISEPHMHSMPSIALHPNSNWLAAQSLDNQILIYSTKERFQLNKKKRFAGHIVAGYACQVNFSPDGRFVMSGDGEGSCWFWDWKSCRRFKTLKCHNGVCIGCEWHPLETSKVATCGWDGVIKYWD

SEQ ID NO: 110524 - protein, 80 aa, Setaria italica
  misc_feature (18)..(18): Xaa can be any naturally occurring amino acid
  misc_feature (23)..(23): Xaa can be any naturally occurring amino acid
  Transcript Sequence Number=SeqID_44550
  Gene Ontology: Cellular component=chloroplast
MVAYRMLVVEELYKEAVXGTNRXLIIFNGELDRIRSGYYPSFFYPKLAELSKTFLPNLDTVYYIHNFKGVKGGTLFRFAF

SEQ ID NO: 110525 - protein, 155 aa, Setaria italica
  misc_feature (146)..(146): Xaa can be any naturally occurring amino acid
  Transcript Sequence Number=SeqID_44551
  Gene Ontology: Cellular component=chloroplast
NEGGNEMTGSMLLIREFCDRFVPAEKATRTRVFFPEANEVSFARQSAFEGCLLKLDYLTKPSLFEDFGFTTKVKMADRVKPEDETFLVAYPYFNVNEMLVVEELYKEAVVGTNRKLIIFNGELDRIRSGYYPSFFYPEALLSFPKXFLPNLDTVY

SEQ ID NO: 110526 - protein, 52 aa, Setaria italica
  Transcript Sequence Number=SeqID_44552
LSPVCLVSPVACLRMMFSVVFNLPKQSTVIHGHLLNSGNNQLVCTKRMDGAD

SEQ ID NO: 110527 - protein, 233 aa, Setaria italica
  Transcript Sequence Number=SeqID_44553
  Gene Ontology: Cellular component=chloroplast
  Pfam annotation: Domain name=DUF1995; Domain location=21-228; Score= -37.6; E_value=0.00011; Accession=PF09353.2; Description=Domain of unknown function (DUF1995)
FGGSTLVYFRWKCSSLFLFLLLGDDEGGNEMTGSMLLIREFCDRFVPAEKATRTRVFFPEANEVSFARQSAFEGCLLKLDYLTKPSLFEDFGFTTKVKMADRVKPEDETFLVAYPYFNVNEMLVVEELYKEAVVGTNRKLIIFNGELDRIRSGYYPSFFYPKLAELSKTFLPNLDTVYYIHNFKGVKGGTLFRCYPGPWTVLRKATSGSYICLHQQEEMPSLKEVALDILPSV

SEQ ID NO: 110528 - protein, 51 aa, Setaria italica
  Transcript Sequence Number=SeqID_44554
IFACVSSDLAAHNLLEIYASLTIRSMITEAAQCTMPHSDRNLRLQWSSPAA

SEQ ID NO: 110529 - protein, 113 aa, Setaria italica
  Transcript Sequence Number=SeqID_44555
HKHPIDVAVHGGQGRRTRLVHLQPGPRAPGPERWRAGGATSAPGLGRKSESPPPDLVEDRLRPAGGRVGSGAQHADSRMGHGTEGRGACTVLLGKGGDTAVGLGGEEVVDPWI

SEQ ID NO: 110530 - protein, 80 aa, Setaria italica
  Transcript Sequence Number=SeqID_44556
HLITICPAFANELKSNHLVQILPFLFLSRQAQAPLFLSCSLADLLVGSSLIQKAEPWRSRCVPPRPSCRLSTPIPSSSTS

SEQ ID NO: 110531 - protein, 154 aa, Setaria italica
  Transcript Sequence Number=SeqID_44557
  Gene Ontology: Mol. function=cysteine-type peptidase activity; Cellular component=plasma membrane; Biological process=proteolysis
  Homolog annotation: Hit_ID=B5KVP9; Match level="QueryCoverage=100%, HitCoverage=42%, E-value=2e-47, Identity=67%"; Hit description =Cysteine protease
  Pfam annotation: Domain name=Inhibitor_I29; Domain location=54-111; Score=100.0; E_value=8e-27; Accession=PF08246.4; Description =Cathepsin propeptide inhibitor domain (
MASSSGATSSVFALILFTCCLALLAASSAAAAAAGRGVDDEVDAGGDKLMMGRFLRWQAAYNRSYPTAEERERRFQVYRRNMEHIEATNRAGNLTYTLGENQFADLTEEEFLGLYTMKGMPSGRGGVRRDAGRKQANISAVDGPTSVDWRSKGA

SEQ ID NO: 110532 - protein, 110 aa, Setaria italica
  Transcript Sequence Number=SeqID_44558
  Gene Ontology: Mol. function=protein serine/threonine kinase activity; Cellular component=plasma membrane; Biological process =protein amino acid phosphorylation
  Homolog annotation: Hit_ID=B9RS14; Match level="QueryCoverage=100%, HitCoverage=10%, E-value=2e-35, Identity=63%"; Hit description =Serine-threonine protein kinase, plant-type, putative
YMHHESAQPIMHRDVKSSNILLDPGFRAKIADFGLARILVKSGEPESVSIAGGTFGYMAPECGRGAKVNEKVDVYSFGVVLLELVTGLAANDGAAEWCLVEWAWRRYKGG

SEQ ID NO: 110533 - protein, 299 aa, Setaria italica
  Transcript Sequence Number=SeqID_44559
  Gene Ontology: Mol. function=protein serine/threonine kinase activity; Cellular component=plasma membrane; Biological process =protein amino acid phosphorylation
  Homolog annotation: Hit_ID=B9RS14; Match level="QueryCoverage=94%, HitCoverage=27%, E-value=1e-92, Identity=55%"; Hit description =Serine-threonine protein kinase, plant-type, putative
  Pfam annotation: Domain name=Pkinase; Domain location=3-282; Score =121.2; E_value=3.4e-33; Accession=PF00069.17; Description=Protein kinase domain
  Pfam annotation: Domain name=Pkinase_Tyr; Domain location=1-282; Score=41.3; E_value=1.8e-16; Accession=PF07714.9; Description =Protein tyrosine kinase
  Pfam module annotation: Pfam domain module=Pkinase::Pkinase_Tyr; Domain location=3-282::1-282
SVGSGKVYRIHLGAAGGRDEEAGGMGGAGRMVAVKKIWNSRKVDEKLDKEFESEVKVLGSIRHNNIVKLLCCISSQEAKLLVYEYMENGSLDRWLHHRDREGAPAPLDWPIRLAIAIDAAKGLSYMHHDCAQSIVHRDVKSSNILLDPDFQAKIADFGLARILAKSGEPESVSAIGGTFGYMAPEYGYRPKVNEKVDVYSFGVVLLELTTGKVANDSGADMCLAEWAWRRYQKGAPFDDIVDEAIREPAYMQDILSVFTMGVICTGENPLTRPSMKEVLHQLIRCEQIAAEACQVDYDG

SEQ ID NO: 110534 - protein, 126 aa, Setaria italica
  misc_feature (16)..(16): Xaa can be any naturally occurring amino acid
  Transcript Sequence Number=SeqID_44560
  Gene Ontology: Mol. function=diacylglycerol kinase activity; Biological process=activation of protein kinase C activity
  Homolog annotation: Hit_ID=Q6K9R6; Match level="QueryCoverage=98%, HitCoverage=16%, E-value=3e-38, Identity=64%"; Hit description =Selenium-binding protein-like
  Pfam annotation: Domain name=PPR; Domain location=67-101; Score=47.6; E_value=4.9e-11; Accession=PF01535.12; Description=PPR repeat
VDFTACVQHGAIDLAXKRLHCRVKQNGVISRNARVATSFVHIYAKQGYIQTAMDVFHGVVDEFKTVELFNAMIHGLAHHGYGEKAISLFDEMESLGLHPDEITFVGVLCACSRSCLIIQGWHMLNS

SEQ ID NO: 110535 - protein, 202 aa, Setaria italica
  Transcript Sequence Number=SeqID_44561
  Subcellular localization annotation: CTP_CleavageSite=82; ConfidenceScore=5.28e-01
AREGPTLPPITHQRSPLTNSLSYLLPRSHPFFLSHPFLLGSFLDLSLAPIRPFPAPEIPSRAPPAVFQAQRRPIQLEFELFLAAELESIQEQAARQQVSLAPPIPGLRFGRIRPNFIVFCSPAALFFSPSCRKVGSIASPARLFLRSGGERKRHKRDKRRVLDAVLVVAATATPLLVAPPAVYPLGAAGAPAAAARFSAGAC

SEQ ID NO: 110536 - protein, 92 aa, Setaria italica
  Transcript Sequence Number=SeqID_44562
  Subcellular localization annotation: CTP_CleavageSite=4; ConfidenceScore=5.30e-01
APPRPSSPAATCRLVQLGFVFNLKFSPSIRLLFLLVAFDCSSIYFCCRYKARSRSVRGGEGVVQCPIRDQLLLAGAWRRAWCRMRRPASDHG

SEQ ID NO: 110537 - protein, 97 aa, Setaria italica
  Transcript Sequence Number=SeqID_44563
TRKWIGVFQASSEGAIRAGEMVGLEGRFLRAIDFRLFVETWEFDSFCLVLERGPRAPRGGSGSVGCASKKRQADATVGEDERRRVRARLPPPAVLSN

SEQ ID NO: 110538 - protein, 231 aa, Setaria italica
  misc_feature (16)..(16): Xaa can be any naturally occurring amino acid
  Transcript Sequence Number=SeqID_44564
  Pfam annotation: Domain name=Cyclin; Domain location=21-170; Score= -1.3; E_value=1.6e-05; Accession=PF08613.3; Description=Cyclin
SAAVAAPVLREDDRGXPRSLPLLAALVEAESRRFAAAASRPAETGLVRAFRGGAAPKVPIRIFMERIHLLTRSVPTSRGMTRIDGTSFVLAGIYLTRFIRSPAGREAGILVEPATAHRLVAVALFLGAKFGGHPPRKWIGVFQASSEGAIRAGEMVGLEGRFLRAIDFRLFVETWEFDSFCLVLERGPRAPRGGSGSVGCASKKRQADATVGEDERRRVRARLPPPAVLSN

SEQ ID NO: 110539 - protein, 65 aa, Setaria italica
  Transcript Sequence Number=SeqID_44565
FTIASPYAYCFMGSLLKSAYYNSFLVVVFYCFTFVEDVCVTPWCHKVISKFFHGSSLLQSVQSNW

SEQ ID NO: 110540 - protein, 112 aa, Setaria italica
  Transcript Sequence Number=SeqID_44566
DQLLLFDLTNEALLDIYKKYSVSKSRFSWFSSSGRPKPVGHRGLKELWSRVSCRIDERPWSSIKVDSILSKDLAKSDHWMNFEKDADDMGNKVADFVFDKLLTELVLQLAEF

SEQ ID NO: 110541 - protein, 134 aa, Setaria italica
  Transcript Sequence Number=SeqID_44567
  Gene Ontology: Mol. function=calcium ion binding
  Homolog annotation: Hit_ID=B6UDK3; Match level="QueryCoverage=97%, HitCoverage=57%, E-value=6e-48, Identity=70%"; Hit description=ABA -induced protein
  Pfam annotation: Domain name=Caleosin; Domain location=1-133; Score =142.6; E_value=1.3e-39; Accession=PF05042.5; Description=Caleosin related protein
  Pfam annotation: Domain name=efhand; Domain location=4-32; Score =18.5; E_value=0.028; Accession=PF00036.24; Description=EF hand
  Pfam module annotation: Pfam domain module=Caleosin::efhand; Domain location=1-133::4-32
GMTELQKHVAFFDRDHDGIVTFDETYQGLKDVGLGAVAAKASAALINAALGPKTRPDNANSSSSMDIYIQNIQKGKHGSDTGAYDAQGRFVPAKLDEMFTKHAKTVPNALTQDEVEEMLKANRQSNDVLRVLVF

SEQ ID NO: 110542 - protein, 51 aa, Setaria italica
  Transcript Sequence Number=SeqID_44568
LYHCSMKVTVHLANDLLSCLITCKEPNFPYCPPAPAEEKQRGSKASSCRKI

SEQ ID NO: 110543 - protein, 128 aa, Setaria italica
  misc_feature (59)..(59): Xaa can be any naturally occurring amino acid
  Transcript Sequence Number=SeqID_44569
  Gene Ontology: Mol. function=transferase activity, transferring glycosyl groups
  Homolog annotation: Hit_ID=Q339E2; Match level="QueryCoverage=56%, HitCoverage=10%, E-value=2e-10, Identity=49%"; Hit description =Glycosyltransferase QUASIMODO1, putative, expressed
VPSVGSAYLDKIYLQNEDHKCGNWAACPVTFYNLTCPLIVLAIPWDIGYDTAVDISSIXEAAAAHYNRDYKPWRDLPVPEYSHYWSKDKLTERNSWPTCCFVLRNDAYDMDNTEPVYKFYNRPTKEQS

SEQ ID NO: 110544 - protein, 53 aa, Setaria italica
  Transcript Sequence Number=SeqID_44570
  Gene Ontology: Mol. function=binding; Cellular component=plasma membrane
MANLNITNILEKMTGKDKDYRYMATSDLLSELNKDSFKADQDLEPKLTSTVLL

SEQ ID NO: 110545 - protein, 171 aa, Setaria italica
  misc_feature (120)..(120): Xaa can be any naturally occurring amino acid
  Transcript Sequence Number=SeqID_44571
  Gene Ontology: Mol. function=protein tyrosine kinase activity; Cellular component=plasma membrane; Biological process=protein amino acid phosphorylation
  Homolog annotation: Hit_ID=B9RQ53; Match level="QueryCoverage=95%, HitCoverage=54%, E-value=5e-40, Identity=48%"; Hit description =Serine/threonine-protein kinase PBS1, putative
  Pfam annotation: Domain name=Pkinase_Tyr; Domain location=1-164; Score=-166.9; E_value=0.013; Accession=PF07714.9; Description =Protein tyrosine kinase
LQQLDLQTHRHVVRLRGFAEAHHARFLVFDHMENRSLKECLHDPLRTPLDWRTRLQVAIDIAAALEYLYYFCDPPVFHVAVNSGNVLMDANFVAKLSDVSVISHDMKLPTTESFQDQVEXRRAGLVFQYGVLVLELVTGQSPGGDGELVRWVQEPGFAGSMHRMVDADLGG

SEQ ID NO: 110546 - protein, 153 aa, Setaria italica
  Transcript Sequence Number=SeqID_44572
  Gene Ontology: Mol. function=protein tyrosine kinase activity
  Homolog annotation: Hit_ID=B9RQ53; Match level="QueryCoverage=92%, HitCoverage=36%, E-value=8e-17, Identity=34%"; Hit description =Serine/threonine-protein kinase PBS1, putative
QIRFLNLTWFQEYLYYFCDPPVFHVAVNSGNVLMDANFVAKLSDVSVISHDMKLPTTESFQGFRGANFNSSTAIHAKPSKFLPILHCSHLLENCSCSDQVEERRAGLVFQYGVLVLELVTGQSPGGDGELVRWVQEPGFAGSMHRMVDADLGG

SEQ ID NO: 110547 - protein, 67 aa, Setaria italica
  Transcript Sequence Number=SeqID_44573
FFCSVLRGYLSPWNDHVLHVYCLVTLILNCLVIYLGSGFIFRFAHYVHCSLILVLFFPVTFPSLPFI

SEQ ID NO: 110548 - protein, 71 aa, Setaria italica
  Transcript Sequence Number=SeqID_44574
  Subcellular localization annotation: CTP_CleavageSite=40; ConfidenceScore=5.05e-01
TAKITYKLKLSHISIFVNRSDTTPQAKGPIPKLGKAVFTMVARVKSIGAGQWTTTDGTDHVRNQVICMAYM

SEQ ID NO: 110549 - protein, 119 aa, Setaria italica
  Transcript Sequence Number=SeqID_44575
  Subcellular localization annotation: CTP_CleavageSite=56; ConfidenceScore=5.49e-01
QPPHSSARSSFPPRAGARNPAIRSSPLERIPRRSRAPAPHWPREQRATPPSQQAGCASPVSGLGFSQGAAAAAGASTVVVQRQGTATATAKKIRWPGLLSRGWDLVLGVPVCCFLPHSA

SEQ ID NO: 110550 - protein, 173 aa, Setaria italica
  Transcript Sequence Number=SeqID_44576
  Gene Ontology: Mol. function=nucleic acid binding
  Pfam annotation: Domain name=R3H; Domain location=34-98; Score=37.3; E_value=5.9e-08; Accession=PF01424.14; Description=R3H domain
MATTQFAMVEELASLVKDNLHSKHLILSTEEALIAALQQLRCSDDGGREEVDDAADTIELQPAGAYHRLLLHRLAEIYGFAHESVGEGEDRHLVLQRCPETAIPSVLVSDMLWKFDNSDDSTSVVITRNDTDFQKPWKLDVQEDTSAKSSHLKDATDLKPLKQSVVSPAVSLK

SEQ ID NO: 110551 - protein, 237 aa, Setaria italica
  Transcript Sequence Number=SeqID_44577
  Gene Ontology: Mol. function=protein binding
  Homolog annotation: Hit_ID=B9RV68; Match level="QueryCoverage=89%, HitCoverage=89%, E-value=3e-22, Identity=35%"; Hit description=GTP binding protein, putative
  Pfam annotation: Domain name=DUF567; Domain location=6-213; Score =110.2; E_value=7.2e-30; Accession=PF04525.4; Description=Protein of unknown function (DUF567)
MGQQQVVIVGEEHCGGEDRKLTVRKTTLFKPGDGLEAYDHRTGALAFRVETYGRGGECGGGAAAGDLALLDAEGEPVLTVRRHRPSLHNRWDGFLGDGGAGHGHQKPLFSARRSSILGHGTGAAAVLVDLLAPGATGEFHVDGSFPRRCCRVVASKAWGASEGGGKEEEEDVVVAEVRRKVDEDAHVVMGRDVFVLWVRAGFDAAFAMGIVLVLDRITGDEVDGDLGEDLFEATSPA

SEQ ID NO: 110552 - protein, 90 aa, Setaria italica
  misc_feature (8)..(8): Xaa can be any naturally occurring amino acid
  Transcript Sequence Number=SeqID_44578
  Gene Ontology: Mol. function=aspartic-type endopeptidase activity; Cellular component=chromatin; Biological process=DNA integration
  Homolog annotation: Hit_ID=Q8SA93; Match level="QueryCoverage=70%, HitCoverage=2%, E-value=1e-11, Identity=41%"; Hit description =Putative polyprotein
KLVWRAWXPLKVKFFMWLAVKDRLWMAERRHRRGLQDHVACALCEQDTETSDNLFAQCSFTAQVWQAIVSLLNLQNQPSSQQLCITNFWL

SEQ ID NO: 110553 - protein, 137 aa, Setaria italica
  Transcript Sequence Number=SeqID_44579
HSSKELTQRASSMVAQKVRGTMRIRPSQHAWQCGPRYGPTWLAALGGIGARPIRAHGSSRLALAPPPVAAAVLAAYSPVSHSVSPPSPSTAPCRHQAASDERDCWRSNRVSRRRYGVAGRGWVLGSLAHGHDNIQRM

SEQ ID NO: 110554 - protein, 376 aa, Setaria italica
  Transcript Sequence Number=SeqID_44580
  Gene Ontology: Mol. function=protein serine/threonine kinase activity; Cellular component=plasma membrane; Biological process =protein amino acid phosphorylation
  Homolog annotation: Hit_ID=Q5DNX1; Match level="QueryCoverage=100%, HitCoverage=100%, E-value=0.0, Identity=84%"; Hit description =Putative PTI1-like kinase
  Pfam annotation: Domain name=Pkinase; Domain location=71-347; Score =102.4; E_value=1.6e-27; Accession=PF00069.17; Description=Protein kinase domain
  Pfam annotation: Domain name=Pkinase_Tyr; Domain location=71-347; Score=107.7; E_value=4e-29; Accession=PF07714.9; Description=Protein tyrosine kinase
  Pfam module annotation: Pfam domain module=Pkinase::Pkinase_Tyr; Domain location=71-347::71-347
MGCFSCCSVVDDDVGKRKKHDDDYVPLPAQVNNYGPSRPPAPTYVTPTGRAQPIAVPVIPLEEMKEITKNFSNDALIGEGSYARVYFGVLKDGMKSAVKKLDSSKQPDQEFLVQVSAVSRLKHENVLQLVGFCAEGNIRVLAYEYATRGSLHDILHGKKGVKGAQPGPALSWMQRVRIAVSAARGLEFLHEKAEPRVVHRDIKSSNILLFDNDVAKIGDFDVSNQAPDMAARLHSTRVLGTFGYHAPEYAMTGQLSTKSDVYSFGVVLLELLTGRKPVDHTLPRGQQSLVTWATPRLSEDKVRQCVDPRLDGEYPPKAVAKMAAVAALCVQYEGDFRPNMSIVVKALSPLLHSRSGNRPSGSSASTATTAAERPGL

SEQ ID NO: 110555 - protein, 323 aa, Setaria italica
  Transcript Sequence Number=SeqID_44581
  Gene Ontology: Mol. function=catalytic activity; Cellular component =protein serine/threonine phosphatase complex; Biological process =protein amino acid dephosphorylation
  Homolog annotation: Hit_ID=B6TPM6; Match level="QueryCoverage=100%, HitCoverage=88%, E-value=1e-151, Identity=81%"; Hit description =Catalytic/ protein phosphatase type 2C/ protein serine/threonine phosphatase
  Pfam annotation: Domain name=PP2C; Domain location=62-300; Score =246.0; E_value=9e-71; Accession=PF00481.13; Description=Protein phosphatase 2C
VRHPLKHCRFFAAVQMMANARVREAGEATLVAALAAAQKESERESEEVPDVHGGWKSEDGSLNCGYSSIRGRRASMEDFYDIRSSRIDDKQINLFGVFDGHGGTRAAEYLKKHLFENLMKHPAFVADTKSAISEVYKKTDADFLDAEGNIQVGSTASTAVLVGNHLYVANVGDSRAVISNAGKAIALSDDHKPNRSDEQKRIEDAGGIVTWSGTWRVGGILAMSRAFGNHLLKRFVVADPEIQDQEIDGELEFLILASDGLWDVVSNEHAVAFVKDEDGPEAAARKLTEIAFRRGSTDNITCIVVEFRHDNMTDGSPPSADQS

SEQ ID NO: 110556 - protein, 55 aa, Setaria italica
  Transcript Sequence Number=SeqID_44582
RGRWRQFTAASTRCVVECLPRVTSLMNQFRSVWTMYKPPLHWISMLKLSYSKGPA

SEQ ID NO: 110557 - protein, 54 aa, Setaria italica
  Transcript Sequence Number=SeqID_44583
SSYNTRAEIRTSAKLRHNSYDTKMINSWANKAQAPGLLIFSQTLDLGKQISCLE

SEQ ID NO: 110558 - protein, 482 aa, Setaria italica
  Transcript Sequence Number=SeqID_44584
  Gene Ontology: Mol. function=transferase activity, transferring glycosyl groups; Cellular component=cell wall; Biological process =purine base biosynthetic process
  Homolog annotation: Hit_ID=B6SRU6; Match level="QueryCoverage=99%, HitCoverage=87%, E-value=0.0, Identity=85%"; Hit description =Amidophosphoribosyltransferase
  Pfam annotation: Domain name=GATase_2; Domain location=21-218; Score =127.7; E_value=3.7e-35; Accession=PF00310.13; Description=Glutamine amidotransferases class-II
  Pfam annotation: Domain name=Pribosyltran; Domain location=273-401; Score=65.7; E_value=1.7e-16; Accession=PF00156.19; Description =Phosphoribosyl transferase domain
  Pfam module annotation: Pfam domain module=GATase_2::Pribosyltran; Domain location=21-218::273-401
RVTPFSYGVDEDADDHPREECGLVGVVGDPDASSLCYLGLQKLQHRGEEGAGIVAVGGDGKLKSVTGLGLVADVFGDPSRLASLPGPAAIGHVRYSTAGAAASLRNVQPFLAGYRFGQVAVAHNGNLVNYQALRNKLEARGSIFNTSSDTEVILHLIATSLSRPLLARVCDACERLAGAYSLLFLTADKMFAVRDPHGFRPLVMGRRRNGAVVFASETCALDLIDATYEREVQPGEVVVVDRRDMSVASACLVPQRPRRACVFEHIYFSLPNSVVFSHAVHERRTAFGRALAEESPAPGADVVIPVPDSGFYAALGFARASGLEFQQGLIRWHYSGRSFIQPTQAIRDLAVKLKLAPVRGVIAGKSVVVVDDSLVRGTTSSKIVRLLRDAGAREVHMRIASPPVVGSCLYGIDTPSEGELISNRMDLEGVRREIGSDSLAFLSLGKLHGIYGEEAGDYCDACFSRKYPVLPTLADPAAELEE

SEQ ID NO: 110559 - protein, 70 aa, Setaria italica
  Transcript Sequence Number=SeqID_44585
  Homolog annotation: Hit_ID=B3U1U8; Match level="QueryCoverage=92%, HitCoverage=42%, E-value=1e-13, Identity=56%"; Hit description =Pentatricopeptide repeat protein (Fragment)
HVFIAGDLSHPISDSIVQELNRLIGRISALGYVPQTEFVLQDLAIEQKEDLLKYHSEKLAIALELATHGS

SEQ ID NO: 110560 - protein, 94 aa, Setaria italica
  Transcript Sequence Number=SeqID_44586
FIRRLGELTDLRKLGMIFVNSYADEEWEEKYEEIVSSIYKLTKANLDSLHIYTLNEPPELLDNLSKEHPDPLGLRELVIEGDAVSGLAAWWVYL

SEQ ID NO: 110561 - protein, 78 aa, Setaria italica
  Transcript Sequence Number=SeqID_44587
TSFTSPIRTVSDWSVEGIIAYARSRPTEDKGQESDDDSNIQQNLRDESAVKEDAGASRACTKDKLSDEDRKAQLKLHG

SEQ ID NO: 110562 - protein, 51 aa, Setaria italica
  Transcript Sequence Number=SeqID_44588
APYLCKLRHLCTFFISLVLTCTSSIHLNNFIFDSGLYMFQCLVASYSHIIR

SEQ ID NO: 110563 - protein, 107 aa, Setaria italica
  Transcript Sequence Number=SeqID_44589
STNAHSIELASKELVHEYTSLDPNHTQRTPTRASQLNKHQAQTFTDSDLSALQPHAHTDMLHTQLQHRKELGTRYIMPHSRTTNTCTRTPCTLHEPTSPWLLQLLKA

SEQ ID NO: 110564 - protein, 94 aa, Setaria italica
  Transcript Sequence Number=SeqID_44590
  Gene Ontology: Mol. function=hydrolase activity
  Homolog annotation: Hit_ID=B6SWT6; Match level="QueryCoverage=100%, HitCoverage=17%, E-value=5e-45, Identity=88%"; Hit description =Hydrolase
YHECRLGAAFVPELEGKFWQRKFYHTSKFFGLHSKSFLSDLMVAGEKFCHGDWSKIKKKYSSFDEGELLLFCFSSAYIIALLHDSLKMPLDHKR

SEQ ID NO: 110565 - protein, 193 aa, Setaria italica
  Transcript Sequence Number=SeqID_44591
  Gene Ontology: Mol. function=hydrolase activity; Cellular component =integral to membrane
  Homolog annotation: Hit_ID=B6SWT6; Match level="QueryCoverage=97%, HitCoverage=35%, E-value=7e-87, Identity=81%"; Hit description =Hydrolase
LSGFADGCAYHECRLGAAFVPELEGKFLATENFYHTSKFFGLHSKSFLSDLMVAGEKFCHGDWSKIKKKYSSFDEGELLLFCFSSAYIIALLHDSLKMPLDHKRIDVVNQIHGVPVDWALGAFIVQTALNRTEYSDSSVSYLNSYDSSGLAPLFLITAVVVFTAFSILRWRRPQLKTIYDMEKGRYIITRVSR

SEQ ID NO: 110566 - protein, 434 aa, Setaria italica
  Transcript Sequence Number=SeqID_44592
  Gene Ontology: Mol. function=hydrolase activity; Cellular component =integral to plasma membrane; Biological process=response to chemical stimulus
  Homolog annotation: Hit_ID=B6SWT6; Match level="QueryCoverage=90%, HitCoverage=73%, E-value=0.0, Identity=84%"; Hit description =Hydrolase
  Pfam annotation: Domain name=GDA1_CD39; Domain location=3-388; Score =161.3; E_value=2.9e-45; Accession=PF01150.9; Description=GDA1CD39 (nucleoside phosphatase) family
  Subcellular localization annotation: CTP_CleavageSite=52; ConfidenceScore=5.12e-01
QLDWARTASLKANPGLSSFAADPDGAGLSLAPLVDFARRRVPRERWADTEVRLMATAGLRLLDAAVAESVLESCRGVLRQSGFLFQDKWATVISGAEEGIYAWVAANYALGTLGGDPHDTTGIIELGGASVQVTFVTGEPLPPEFSHVLKFGDVSYNLYSNSFLQLGLNVAYESLHDLLSSPGLKSMATHLITQTKYKDPCTPRGFTSMVGSVKLPVSVLDPKVGYRPFAHAVGNFSECRSAALTLLQKGKDGCAYHECRLGAAFVPELEGKFLATENFYHTSKFFGLHSKSFLSDLMVAGEKFCHGDWSKIKKKYSSFDEGELLLFCFSSAYIIALLHDSLKMPLDHKRIDVVNQIHGVPVDWALGAFIVQTALNRTDILHPEVEKASAEDDLRHGERPVHHNQGQPMSFARRRWEWLDFLQRSTSNRVCRFS

SEQ ID NO: 110567 - protein, 280 aa, Setaria italica
  Transcript Sequence Number=SeqID_44593
  Gene Ontology: Mol. function=hydrolase activity; Cellular component =spliceosome; Biological process=mRNA processing
  Homolog annotation: Hit_ID=B7PB44; Match level="QueryCoverage=100%, HitCoverage=17%, E-value=2e-47, Identity=40%"; Hit description =DNA2/nam7 helicase, putative
ILEVSQYLENYLWPHFDPANASFEHVMSIILMVNEKFRENVAAWTCFHDRKDAFKGFLWRVLKLKEEERALNMAEKTNYLLFMINAFQSLEDELVRETILQLVSLKLWNTLSFGRLQMELCLNPELIKKWTKIKRREAKEAKKADQPTNPSETLENKSLRNLIEEFLEILDSKVILSSQDGGEESVLNEPLGGQVDDSCVLYCERFMEFLIDMLSQLPTRRFLRPLVADVAVVAKCHLSALYTHEKGRLFAQLVDLLQFYEGFEINDHSGTQLGDDDILQ

SEQ ID NO: 110568 - protein, 74 aa, Setaria italica
  Transcript Sequence Number=SeqID_44594
SLYYPAVNIYTIAYKTSIVSLFKNLAIRYFLKGWLLMRSLLIIITKRNLPECKSYFLRSFNLYGDIPLASSIAS

SEQ ID NO: 110569 - protein, 68 aa, Setaria italica
  Transcript Sequence Number=SeqID_44595
  Subcellular localization annotation: CTP_CleavageSite=44; ConfidenceScore=5.32e-01
CLAHTCPRMPSPTMTSLAMGRAPSANRHLGHDPTVPQLANPFARQSRSRALPISPGQSPGDSPQSSVL

SEQ ID NO: 110570 - protein, 113 aa, Setaria italica
  Transcript Sequence Number=SeqID_44596
SRGGARGGGRRGPSRRSNNHGVRQENANFFYCGILWSLDKVLRRMWGITEPVLGDETLLVLDVNSYLIGIWNFKKYLHLGPGPSKRSRPCGKDTVANNLPPFSCSPFPMSMTA

SEQ ID NO: 110571 - protein, 47 aa, Setaria italica
  Transcript Sequence Number=SeqID_44597
IGVTWEEEIRERCNNQTLFQNLEMRIGVILLYSDEFMKIEIIFQENG

SEQ ID NO: 110572 - protein, 54 aa, Setaria italica
  Transcript Sequence Number=SeqID_44598
PPPPPPLPKQPPCKYPTWSSSCYCGGYPPCVPPTMPCPMVVCDDSPPYGTCTVM

SEQ ID NO: 110573 - protein, 122 aa, Setaria italica
  Transcript Sequence Number=SeqID_44599
  Subcellular localization annotation: CTP_CleavageSite=73; ConfidenceScore=5.23e-01
MHCKFAILQLLLLLPVLKLKVAQMPLLNFPLFLLPLLLAPPPSAASSSSFSLDFFPAAGAAAQLALSGGANATAAAVSMPSPGARVQYRTPIVFSSAPGLTFSTYFAFALPATASSLAFFLT

SEQ ID NO: 110574 - protein, 93 aa, Setaria italica
  Transcript Sequence Number=SeqID_44600
  Subcellular localization annotation: CTP_CleavageSite=34; ConfidenceScore=5.74e-01
LLAHLEAKSPTKQASSSAPFLSLSLPPRLRVRVRARARASLHRHELRTPSPPRAASLPRKSKPQRSRPASQPTPTPPRRPVPQPNAPNPHPAP

SEQ ID NO: 110575 - protein, 180 aa, Setaria italica
  Transcript Sequence Number=SeqID_44601
  Gene Ontology: Cellular component=cell wall
  Homolog annotation: Hit_ID=B6U8G2; Match level="QueryCoverage=82%, HitCoverage=85%, E-value=2e-74, Identity=92%"; Hit description =Dirigent-like protein pDIR12
  Pfam annotation: Domain name=Dirigent; Domain location=10-175; Score =85.6; E_value=1.7e-22; Accession=PF03018.6; Description=Dirigent -like protein
MAPPKLQLPLLLSLLASVAVVHVAGDAGHDGLTHIHLYVHETYTGANATAAAVLQSPLGANSSFGSIGVVDDEIRVGPDRSSQLVGRYQAVFFGTSLQLGAGYLSSVTLVFTAGEHAGSTLSVQGPILGFTGTIERAVVGGTGKFRLARGYMLFKMISKPTPETDVNEVDLFVLMHHGKY

SEQ ID NO: 110576 - protein, 99 aa, Setaria italica
  Transcript Sequence Number=SeqID_44602
  Gene Ontology: Mol. function=zinc ion binding; Cellular component =intracellular
  Homolog annotation: Hit_ID=Q1G733; Match level="QueryCoverage=82%, HitCoverage=37%, E-value=4e-21, Identity=60%"; Hit description =Truncated COL1 (Fragment)
KRENSHEVATMPTPGYENGNWNNGDYHVLNDACKVELTYDQVPVSSAEACLSSFELTYDQVPVSSAEACLSSFVPMSEICPSMSKVRITLVVLLHAATI

SEQ ID NO: 110577 - protein, 301 aa, Setaria italica
  Transcript Sequence Number=SeqID_44603
  Gene Ontology: Mol. function=zinc ion binding; Cellular component =intracellular
  Homolog annotation: Hit_ID=A6N0Z8; Match level="QueryCoverage=74%, HitCoverage=99%, E-value=9e-77, Identity=66%"; Hit description =Constans-like b-box zinc finger protein (Fragment)
  Pfam annotation: Domain name=CCT; Domain location=256-300; Score =77.5; E_value=4.9e-20; Accession=PF06203.6; Description=CCT motif
ASAAFLCSNCDFGRHRDGGGEPALQDRCAVQPYSGCPPATELAALLGVPLFDKPAAEDGGWWNIWEEPQVLSLEDLIVPTTPCHGFQPLLTPSSPKNRSICTDEKMNEEILRQLGELAESDGGVQAAAGHEEAEQAGVQFPSWAPPPQYTTGHGNFGAENSHEVATMPTPGYENGNWNNGDYHVLNDACKVELTYDQVPVSSAEACLSSFVPMSEICPSMSNGSSMEENHQGNPNLATPLQAPKRTGFDVVPCPDRDSVISRYKEKRKTRRFDRQVRYESRKVRADGRQRIKGRFAKAHQT

SEQ ID NO: 110578 - protein, 329 aa, Setaria italica
  Transcript Sequence Number=SeqID_44604
  Gene Ontology: Mol. function=sugar binding; Cellular component =microtubule cytoskeleton; Biological process=establishment or maintenance of cell polarity
  Homolog annotation: Hit_ID=Q8VWY8; Match level="QueryCoverage=97%, HitCoverage=97%, E-value=1e-138, Identity=74%"; Hit description=D -protein
  Pfam annotation: Domain name=Kelch_1; Domain location=122-167; Score =39.3; E_value=1.5e-08; Accession=PF01344.17; Description=Kelch motif
  Pfam annotation: Domain name=Kelch_1; Domain location=17-64; Score =26.7; E_value=9.5e-05; Accession=PF01344.17; Description=Kelch motif
  Pfam annotation: Domain name=Kelch_1; Domain location=172-216; Score =37.9; E_value=4.2e-08; Accession=PF01344.17; Description=Kelch motif
  Pfam annotation: Domain name=Kelch_1; Domain location=221-275; Score =15.8; E_value=0.043; Accession=PF01344.17; Description=Kelch motif
  Pfam annotation: Domain name=Kelch_1; Domain location=69-115; Score =38.9; E_value=2e-08; Accession=PF01344.17; Description=Kelch motif
  Pfam annotation: Domain name=Kelch_2; Domain location=121-167; Score =35.3; E_value=2.4e-07; Accession=PF07646.7; Description=Kelch motif
  Pfam annotation: Domain name=Kelch_2; Domain location=17-64; Score =13.5; E_value=0.7; Accession=PF07646.7; Description=Kelch motif
  Pfam annotation: Domain name=Kelch_2; Domain location=172-216; Score =16.0; E_value=0.16; Accession=PF07646.7; Description=Kelch motif
  Pfam annotation: Domain name=Kelch_2; Domain location=219-275; Score =8.5; E_value=3.2; Accession=PF07646.7; Description=Kelch motif
  Pfam annotation: Domain name=Kelch_2; Domain location=69-115; Score =19.2; E_value=0.017; Accession=PF07646.7; Description=Kelch motif
  Pfam module annotation: Pfam domain module=Kelch_1::Kelch_1::Kelch _1::Kelch_1::Kelch_1::Kelch_2::Kelch_2::Kelch_2::Kelch_2::Kelch_2; Domain location=122-167::17-64::172-216::221-275::69-115::121 -167::17-64::172-216::219-275::69-115
MAGAWVKLEQKGAGPGARSSHAITLVGDMAYAFGGEFTPRVPVDKTMYAFDLKSHTWSAVGATGDVPPPRVGVTMAAVGGTVYMFGGRDQEHKELNELYSFDTSTGTWALLSSGADGPPHRSYHSMVADAVGGRVYVFGGCGDAGRLNDLWGYDVAAGRWERLPSPGEACRPRGGPGLAVAGGKLWVVYGFGGEELDDVHCYDPATGRWSAVETSGDKPSPRSVFCVTGIGRHVLVFGGEVDPSDLGHLGAGKFSAEAFALDTETGAWTRLDDDAEAEPEHHPGPRGWCAFAAGEKEGRRGLLVYGGNSPTNDRLDDIYFFAPVLEAAR

SEQ ID NO: 110579 - protein, 77 aa, Setaria italica
  Transcript Sequence Number=SeqID_44605
MGASDNIDSLVANSIGRLIFEAGLEPGFVHLPSFNGVIDLLTRGVRIAMPSYEYILQVQIKEVQQRDRALRQHWEKS

SEQ ID NO: 110580 - protein, 129 aa, Setaria italica
  Transcript Sequence Number=SeqID_44606
  Gene Ontology: Mol. function=6-phosphofructokinase activity; Cellular component=6-phosphofructokinase complex; Biological process=glycolysis
  Homolog annotation: Hit_ID=Q6Z522; Match level="QueryCoverage=73%, HitCoverage=17%, E-value=1e-50, Identity=96%"; Hit description =Putative diphosphate-fructose-6-phosphate 1-phosphotransferase
AVGGELGFLGVRTVDLRFSVNPDRSFTSSLINPKHFKDIGVPADLKYIDPTYMVRACRANASDAILCTVLGQNAVHGAFAGFSGITSCICNTHYVYLPITEVIKAPKRVNPNSRMWHRCLTSTGQPDFH

SEQ ID NO: 110581 - protein, 78 aa, Setaria italica
  misc_feature (47)..(47): Xaa can be any naturally occurring amino acid
  Transcript Sequence Number=SeqID_44607
  Gene Ontology: Mol. function=6-phosphofructokinase activity; Cellular component=6-phosphofructokinase complex; Biological process=glycolysis
  Homolog annotation: Hit_ID=Q6Z522; Match level="QueryCoverage=55%, HitCoverage=8%, E-value=2e-15, Identity=95%"; Hit description =Putative diphosphate-fructose-6-phosphate 1-phosphotransferase
MQQKIKTHFKDIGIGLVKLMGRSSGFIAMHASLSSGQVDVCLIPEVXFTLDGETGNSRLFFRVHGVPTEAYNMNEGPI

SEQ ID NO: 110582 - protein, 137 aa, Setaria italica
  misc_feature (72)..(72): Xaa can be any naturally occurring amino acid
  Transcript Sequence Number=SeqID_44608
  Gene Ontology: Mol. function=6-phosphofructokinase activity; Cellular component=6-phosphofructokinase complex; Biological process=glycolysis
  Homolog annotation: Hit_ID=Q6Z522; Match level="QueryCoverage=81%, HitCoverage=20%, E-value=1e-49, Identity=83%"; Hit description =Putative diphosphate-fructose-6-phosphate 1-phosphotransferase
TDIYDLKPRPTTFSLKKNRTPTGDENVDMWNGYVNNDDRALLKVIKYSSPTSAGAECIDPECSWVEQWVHRXAGPNDKRKIYYEPEEVKAAIVTCGGLCPGLNDVIRQVLILRIVHTFLHFPHFKQTLDIHRKHQFE

SEQ ID NO: 110583 - protein, 529 aa, Setaria italica
  Transcript Sequence Number=SeqID_44609
  Gene Ontology: Mol. function=6-phosphofructokinase activity; Cellular component=6-phosphofructokinase complex; Biological process=glycolysis
  Homolog annotation: Hit_ID=Q6Z522; Match level="QueryCoverage=99%, HitCoverage=100%, E-value=0.0, Identity=84%"; Hit description =Putative diphosphate-fructose-6-phosphate 1-phosphotransferase
  Pfam annotation: Domain name=PFK; Domain location=173-480; Score=9.9; E_value=1.4e-13; Accession=PF00365.12; Description=Phosphofructokinase
  Subcellular localization annotation: CTP_CleavageSite=52; ConfidenceScore=5.26e-01
MSLSGMAVALKASTSSATQQQWWHPTRDQCQYGFTSLSKRKCRKRSVLLHVRAISGKLDLDFSDPSWKQKYQEDWDRRFSLPHITDIYDMEPRTTTFSLKKNRTPLGDGDVSSTDMRNGYVNKDDRALLKVIKYASPTSAGAECIDPDCSWVEHWVHRAGPRKEIYYEPEEVKAAIVTCGGLCPGLNDVIRQIVFTLETYGVKNIVGIPFGYRGFFEKGLKEMPLSRDVVENINLSGGSFLGVSRGGAKTSEIVDSIQARRIDMFFVIGGNGSHAGANAIHEECRKRKLKVSVVAVPKTIDNDILFMDKTFGFDTAVEEAQRAINSAYIEARSAYHGIGLVKLMGRSSGFIAMHASLSSGQIDVCLIPEVSFTLDGELGVLQHLEHLLKTKGFCVVCVAEAAGQDLLQNSGATDASGNVILSDFGVHMQQKIKKHFKDIGVPADLKYIDPTYMVRACRANASDAILCTVLGQNAVHGAFAGFSGITSGVCNTHYVYLPIPEVITTPKHVNPNSRMWHRCLTSTGQPDFH

SEQ ID NO: 110584 - protein, 49 aa, Setaria italica
  Transcript Sequence Number=SeqID_44610
  Subcellular localization annotation: CTP_CleavageSite=37; ConfidenceScore=5.12e-01
PPTPAPPKPRPPTPPTPTPKPPAPKAPPPPKKPPCPPGSETVNANDNYN

SEQ ID NO: 110585 - protein, 157 aa, Setaria italica
  Transcript Sequence Number=SeqID_44611
  Gene Ontology: Mol. function=hydrolase activity
  Homolog annotation: Hit_ID=Q7XPW3; Match level="QueryCoverage=94%, HitCoverage=33%, E-value=4e-60, Identity=74%"; Hit description =OSJNBa0032F06.18 protein
KKMFTQSPMEDNQDCVMDTVGVICVDSYGNVASGASSGGIALKVDGRVGLAAMYGSGCWASSKGPFGTPFMVACCATGAGEHLIRGFAARECCISSSLSQSGPASACTKVLRTVVQSSSKMSHDTGAGLLLVQVDAQRRDLSEPEAEKLINKLIIIT

SEQ ID NO: 110586 - protein, 38 aa, Setaria italica
  Transcript Sequence Number=SeqID_44612
LSNMVYADDDESLADAEEDESFPDRDQVGYDLLSNIRN

SEQ ID NO: 110587 - protein, 183 aa, Setaria italica
  misc_feature (115)..(115): Xaa can be any naturally occurring amino acid
  Transcript Sequence Number=SeqID_44613
  Gene Ontology: Mol. function=hydrolase activity; Cellular component =mitochondrion; Biological process=metabolic process
  Homolog annotation: Hit_ID=B6U9W2; Match level="QueryCoverage=99%, HitCoverage=47%, E-value=2e-93, Identity=90%"; Hit description=Cat eye syndrome critical region protein 5
FVVSDPVDWGRDLQVLCDILSTGGLPGSGKGDQPPLYFAADDLEYQAAFPSERLGMGAFRIALESIFNQINDRPLKYTSYGKPNPFVFKNAANILEKLVMSMYPNSQTSKEVKDXKFSTIYMVGDNPRVDINGASKAGHPWSSVLTRTGFFRGKDNDPQFPADTVVDTVEDAINYILEKECIC

SEQ ID NO: 110588 - protein, 69 aa, Setaria italica
  misc_feature (42)..(69): Xaa can be any naturally occurring amino acid
  Transcript Sequence Number=SeqID_44614
KDQRLDAVGLKLKCNSIVIDVLVYMQIICLPLTGRYLFEVMXXXXXXXXXXXXXXXXXXXXXXXXXXXX

SEQ ID NO: 110589 - protein, 53 aa, Setaria italica
  Transcript Sequence Number=SeqID_44615
TSVGTYVLESKIPRFHGPRTHGVSYRLKIKWCIHCTEYNVSMSQNNHQSRTSK

SEQ ID NO: 110590 - protein, 53 aa, Setaria italica
  Transcript Sequence Number=SeqID_44616
MAKFSFDDADDDPPAAASGGEKRKREDGPAEAAGGWEPPKPRILVARGGKPEG

SEQ ID NO: 110591 - protein, 30 aa, Setaria italica
  Transcript Sequence Number=SeqID_44617
FCSELHVRLKRRPKEHHFQNSRHRGMNLNS

SEQ ID NO: 110592 - protein, 79 aa, Setaria italica
  Transcript Sequence Number=SeqID_44618
FEVSCIFCKVPSFLPLHNQRSTDCTLQANKATVYRTTCQSYPSFIPEQYANFFFNKKVINNYIYMPNCVRYIVYMEKNV

SEQ ID NO: 110593 - protein, 278 aa, Setaria italica
  Transcript Sequence Number=SeqID_44619
  Homolog annotation: Hit_ID=Q9FZF0; Match level="QueryCoverage=85%, HitCoverage=87%, E-value=2e-81, Identity=62%"; Hit description =T2E6.19
  Pfam annotation: Domain name=DUF862; Domain location=74-211; Score =227.3; E_value=3.8e-65; Accession=PF05903.6; Description=Eukaryotic protein of unknown function (DUF862)
QKCIIDQQDLVQHFFSNQYDYPFLQVGKHRTSVMMLDSKKERNLSTCFQLGQKSSAHFCLFSKVRSASPPPGNTPVYLNVYDLTPVNGYFYWAGLGIFHSGIEVHGVEYAFGAHDYSISGVFEVEPRQCPGFKFRKSIYMGTTCLDPLQVREFMEIQSVNYNGDTYHLISKNCNHFCEDICKRLTGNLIPKWVNRLARMGAVCNCILPESLKINAVRHDPDGQAEDSEKRRLTGAFSCFSSISLCQRHFSTSSLFLRSPAKGTSWHTKQSSSARLKKS

SEQ ID NO: 110594 - protein, 72 aa, Setaria italica
  Transcript Sequence Number=SeqID_44620
ASCYGSGESGLLVPIVVTEFALMLIFSVIFSIFSVIFSTSPFSTPNPIRGSKSPSYSETPATLHLVEELEFS

SEQ ID NO: 110595 - protein, 128 aa, Setaria italica
  misc_feature (23)..(23): Xaa can be any naturally occurring amino acid
  Transcript Sequence Number=SeqID_44621
QVYLETVGGFIQGSGLAMRKEDXISHGSLILESRSDELIEHEATFLLLPKDQDGKGAAERIFQSTHKVKGSAAIASAHLIAECEELDTWIVCYEKLECLLQHKDLPPFYEQNNEISGLFGKNSNLRVL

SEQ ID NO: 110596 - protein, 53 aa, Setaria italica
  Transcript Sequence Number=SeqID_44622
LWKKTEPETDGMGTNVAAAEINRLKLIDGRITGFTQTMGYHFSSNLFFYLRFS

SEQ ID NO: 110597 - protein, 57 aa, Setaria italica
  Transcript Sequence Number=SeqID_44623
EPATVGSRSFDERAWDNSIVGWRRRSRSDYSLPSCALVTDTPPSVATAILWGVSPGH

SEQ ID NO: 110598 - protein, 82 aa, Setaria italica
  Transcript Sequence Number=SeqID_44624
WKEPVSRHNRCFPSFKCPSNGSLQHAMHHAAMQSLSPGIVIESAWKLSQKLMKNKTSQPSAAITTSTKQISVSIAQNTHVAT

SEQ ID NO: 110599 - protein, 28 aa, Setaria italica
  Transcript Sequence Number=SeqID_44625
SEQFPKSESDHMIIQHTVTSFTYRLIQL

SEQ ID NO: 110600 - protein, 103 aa, Setaria italica
  Transcript Sequence Number=SeqID_44626
DGSKEANLIVKEYLHKLMLKWSDGTCKDEQQLDIEKSERVIEALCPHTNLKHLRIHNYPGRRLPSWVEQLSFLESLEIVSCPRHAQFSMETLQSRRNLRISVM

SEQ ID NO: 110601 - protein, 86 aa, Setaria italica
  Transcript Sequence Number=SeqID_44627
  Subcellular localization annotation: CTP_CleavageSite=43; ConfidenceScore=5.37e-01
KITLSSLSLVQPIAGGAGRPRATPSRLLVLFPPVDFAHVSIFLGSHRRHFRQQLNPRQEFFVHCWPLSASTWCCLSRSQKEALGRP

SEQ ID NO: 110602 - protein, 66 aa, Setaria italica
  Transcript Sequence Number=SeqID_44628
  Gene Ontology: Mol. function=cysteine-type peptidase activity; Biological process=biosynthetic process
  Homolog annotation: Hit_ID=Q2R3A5; Match level="QueryCoverage=74%, HitCoverage=12%, E-value=2e-09, Identity=67%"; Hit description =Chalcone and stilbene synthases, N-terminal domain containing protein
TVRRTLLYFHGCSAIFTAIGLAKDAAENNRGARVLVACAHAVLLPFRAPDREQPPTPSVAMAPSFR

SEQ ID NO: 110603 - protein, 136 aa, Setaria italica
  Transcript Sequence Number=SeqID_44629
  Subcellular localization annotation: CTP_CleavageSite=60; ConfidenceScore=5.74e-01
MAPFCTPAATAAPHATPTPLTSSRKHISMCLSPKLGGGGSQRARLASSAAPQVRALAPATAAEEAAAAPSPAPVNVEYLAAEFAGHGVGFEPVGGSCAVKMALSNGSVAHLLLPSGLVTSYKPAMWHGTVTEVLHT

SEQ ID NO: 110604 - protein, 281 aa, Setaria italica
  misc_feature (10)..(10): Xaa can be any naturally occurring amino acid
  misc_feature (22)..(22): Xaa can be any naturally occurring amino acid
  misc_feature (41)..(41): Xaa can be any naturally occurring amino acid
  Transcript Sequence Number=SeqID_44630
  Gene Ontology: Mol. function=catalytic activity; Biological process =polysaccharide catabolic process
  Homolog annotation: Hit_ID=C2D1A2; Match level="QueryCoverage=80%, HitCoverage=37%, E-value=6e-40, Identity=41%"; Hit description =Possible acetyl-CoA carboxylase, biotin carboxylase
  Pfam annotation: Domain name=DUF1680; Domain location=1-279; Score= -121.4; E_value=1.6e-08; Accession=PF07944.4; Description=Putative glycosyl hydrolase of unknown f
LDQYTLAGNXKGLDVVVWMTDXFSNRVKNLIQNYTIQRHWXAMNEETGGFNDVMYQLYTIMKDQKHLTMAHLFDKPCFLGPLGLHKDDISGLHANTHLPVLVGAQKRYEVVGDNLYKDISTYLFDVVNSSHTFATGGTSTMEHWHDPKRLVDEIKISSNEETCATYNFLKVSRNLFRWTKEAKYADHYERLLINGIMGNQRGTQPGVMLYFLPMGPGRSKSVSGLSPSGLPPMNPGGWGGPNDTFWCCYGTGIESFSKVGDSIYFLEEGETPGLYIIQYIP

SEQ ID NO: 110605 - protein, 163 aa, Setaria italica
  Transcript Sequence Number=SeqID_44631
LVRGFVDVLVLAGGRTSSGAAATWSSDEVKKAFRWAFFFEEVFKDLRESGHYEDSAGELDAALVQLTSSPEFPKGLAGMRSETLSKARVLVIRHFLKAKAMSVQNFGALLEAVVEMDIDGICASGVPNACQEYAESILVMNSSFTQTRNACDIRLPASSDEWY

SEQ ID NO: 110606 - protein, 94 aa, Setaria italica
  Transcript Sequence Number=SeqID_44632
  Subcellular localization annotation: CTP_CleavageSite=43; ConfidenceScore=5.52e-01
SSSTASLLVTTLENERRSSASLRRRFCTGAAPRGLTRPATSTLAAARGTRGRGGASPGREGGRGRPSLGPGCRRGRGGGGRRWPYPASGVLGGG

SEQ ID NO: 110607 - protein, 220 aa, Setaria italica
  Transcript Sequence Number=SeqID_44633
  Gene Ontology: Mol. function=catalytic activity; Biological process =response to stress
  Homolog annotation: Hit_ID=B4FCR1; Match level="QueryCoverage=92%, HitCoverage=92%, E-value=1e-109, Identity=93%"; Hit description =Phosphopantothenoylcysteine decarboxylase
  Pfam annotation: Domain name=Flavoprotein; Domain location=21-141; Score=164.8; E_value=2.5e-46; Accession=PF02441.11; Description =Flavoprotein
MATSEPVQESLMLDYPQPSKPRVLLAASGSVAAIKFESLCRSFSEWADVRAVATKSSLHFVDRSSLPSDIVLYTDDDEWSTWKKIGDEVLHIELRKWADILVIAPLSANTLAKIASGLCDNLLTCIVRAWDYSKPLFVAPAMNTLMWNNPFTERHLQTINQLGIILIPPVTKRLACGDYGNGAMAETSQIYTSVRLACKTQPHDSSSSVVIPVSNNQPSS

SEQ ID NO: 110608 - protein, 63 aa, Setaria italica
  Transcript Sequence Number=SeqID_44634
ALALLLPFAGCQFLHNPCKTRLFIMTHVSFYLMAVEEQPRSGELITKEHASIYFGVGVMIVQH

SEQ ID NO: 110609 - protein, 169 aa, Setaria italica
  misc_feature (107)..(107): Xaa can be any naturally occurring amino acid
  misc_feature (148)..(148): Xaa can be any naturally occurring amino acid
  Transcript Sequence Number=SeqID_44635
  Gene Ontology: Mol. function=protein tyrosine kinase activity; Cellular component=intracellular; Biological process=protein amino acid phosphorylation
  Homolog annotation: Hit_ID=Q7XH55; Match level="QueryCoverage=92%, HitCoverage=24%, E-value=9e-28, Identity=45%"; Hit description =Leucine Rich Repeat family protein
  Pfam annotation: Domain name=LRR_1; Domain location=103-125; Score =3.7; E_value=60; Accession=PF00560.25; Description=Leucine Rich Repeat
  Pfam annotation: Domain name=LRR_1; Domain location=127-148; Score =5.5; E_value=26; Accession=PF00560.25; Description=Leucine Rich Repeat
  Pfam annotation: Domain name=LRR_1; Domain location=30-52; Score =17.2; E_value=0.067; Accession=PF00560.25; Description=Leucine Rich Repeat
  Pfam annotation: Domain name=LRR_1; Domain location=54-76; Score=3.8; E_value=56; Accession=PF00560.25; Description=Leucine Rich Repeat
  Pfam annotation: Domain name=LRR_1; Domain location=6-28; Score=11.7; E_value=1.7; Accession=PF00560.25; Description=Leucine Rich Repeat
  Pfam module annotation: Pfam domain module=LRR_1::LRR_1::LRR_1::LRR _1::LRR_1; Domain location=103-125::127-148::30-52::54-76::6-28
IGNMGNVYWLYLSKNQLLGTIPSQIGHLNNLMRLDLSHNLLSGTIPKELGDCQKLMLVKLNDNNFNGILPTVIGSMINLQIMLDLSKNNLNGGIPLELGELIMLEIXNLSHNQLSGGIPSSVTSMRNLSIFDVSFNSLEGPVRLFPKXMHNASIKWWQTNILATQTLVM

SEQ ID NO: 110610 - protein, 52 aa, Setaria italica
  Transcript Sequence Number=SeqID_44636
  Subcellular localization annotation: CTP_CleavageSite=44; ConfidenceScore=5.17e-01
LYHLLSAIVGSCSRWFIPPRSRSCRKLLQFNLICVSVTSQTCVMSSTMWCLT

SEQ ID NO: 110611 - protein, 70 aa, Setaria italica
  Transcript Sequence Number=SeqID_44637
  Subcellular localization annotation: CTP_CleavageSite=32; ConfidenceScore=5.05e-01
FQPISLSVTKNLDSRRYISIFVNVRKISKLLPSSMPTVLITPKLFCSFYTYNYVNWSNLPLSKTNLIRIN

SEQ ID NO: 110612 - protein, 79 aa, Setaria italica
  Transcript Sequence Number=SeqID_44638
  Gene Ontology: Mol. function=protein tyrosine kinase activity; Biological process=protein amino acid phosphorylation
  Homolog annotation: Hit_ID=Q7XQQ4; Match level="QueryCoverage=77%, HitCoverage=12%, E-value=1e-20, Identity=72%"; Hit description =OSJNBa0084A10.1 protein
  Subcellular localization annotation: CTP_CleavageSite=39; ConfidenceScore=5.22e-01
HRFVVQAGTDASLVPTEMASLNATVKLTFRNTGTFFGVHVSSEPVTLYYTQLQLASGNVSHCSSLCLLPRMIDRSSLIY

SEQ ID NO: 110613 - protein, 244 aa, Setaria italica
  Transcript Sequence Number=SeqID_44639
  Gene Ontology: Mol. function=protein tyrosine kinase activity; Cellular component=MHC class I protein complex; Biological process =protein amino acid phosphorylation
  Homolog annotation: Hit_ID=Q7XQQ4; Match level="QueryCoverage=98%, HitCoverage=46%, E-value=8e-57, Identity=48%"; Hit description =OSJNBa0084A10.1 protein
  Pfam annotation: Domain name=Hin1; Domain location=61-221; Score =22.3; E_value=2.3e-05; Accession=PF07320.5; Description=Harpin -induced protein 1 (Hin1)
PWMKEAAIEEEGLLGMDDDGDDGYGGSGGGGWSGIPKRVRYGILFVGAFFGLFFFFALILWGASRNQRPVVTLHSATFHRFVVQAGTDASLVPTEMASLNATVKLTFRNTGTFFGVHVSSEPVTLYYTQLQLASGNIKYFYQARKSQRSLTVSVVGDKVPLYGGGSSLSSTPTTLPPPKKKMPPVVVPPPPVPLQLTVRLRSRAFVLGRLVKPKFHSEARCKVTMDQTKLGKPVSLKNACTYSH

SEQ ID NO: 110614 - protein, 65 aa, Setaria italica
  misc_feature (14)..(14): Xaa can be any naturally occurring amino acid
  Transcript Sequence Number=SeqID_44640
  Gene Ontology: Mol. function=metal ion binding
  Homolog annotation: Hit_ID=Q10R93; Match level="QueryCoverage=69%, HitCoverage=8%, E-value=2e-12, Identity=73%"; Hit description =ReMembR-H2 protein JR702, putative, expressed
VKGSASAFALVIRXGCQFDDKVRNAQNAGFKAAIVYDNEDNGVLVSSNAPDIIFSSLSSFTFIHY

SEQ ID NO: 110615 - protein, 69 aa, Setaria italica
  Transcript Sequence Number=SeqID_44641
AFRGVMGDSVLKSLISYAPFVFSWWCSLSCVMDILVQFGDATGFRVVSPIYHHVFYLGGLGDWCSGAWR

SEQ ID NO: 110616 - protein, 114 aa, Setaria italica
  misc_feature (18)..(18): Xaa can be any naturally occurring amino acid
  Transcript Sequence Number=SeqID_44642
  Gene Ontology: Mol. function=metal ion binding
  Homolog annotation: Hit_ID=Q10R93; Match level="QueryCoverage=78%, HitCoverage=16%, E-value=2e-33, Identity=78%"; Hit description =ReMembR-H2 protein JR702, putative, expressed
  Pfam annotation: Domain name=zf-C3HC4; Domain location=66-99; Score =2.0; E_value=0.06; Accession=PF00097.17; Description=Zinc finger, C3HC4 type (RING finger)
ISFISLLAMSAVLATCFXVRRHQIRRDRARIPQAREFHGMSSQLVKAMPSLIFTKVQEDNCTSSTCAICLEDYTVGEKLRVLPCRHSMYLSHLYMKSVCIVYYSLLCLTDVNVE

SEQ ID NO: 110617 - protein, 507 aa, Setaria italica
  Transcript Sequence Number=SeqID_44643
  Gene Ontology: Mol. function=metal ion binding; Cellular component =cytoplasm
  Homolog annotation: Hit_ID=Q10R93; Match level="QueryCoverage=96%, HitCoverage=91%, E-value=1e-176, Identity=66%"; Hit description =ReMembR-H2 protein JR702, putative, expressed
  Pfam annotation: Domain name=PA; Domain location=50-149; Score=66.3; E_value=1.2e-16; Accession=PF02225.14; Description=PA domain
  Pfam annotation: Domain name=PHD; Domain location=236-281; Score= -0.1; E_value=0.027; Accession=PF00628.21; Description=PHD-finger
  Pfam annotation: Domain name=zf-C3HC4; Domain location=237-278; Score= 42.7; E_value=1.5e-09; Accession=PF00097.17; Description=Zinc finger, C3HC4 type (RING finger)
  Pfam module annotation: Pfam domain module=PA::PHD::zf-C3HC4; Domain location=50-149::236-281::237-278
MTCPRGWRSFPLCFFLVICLMVQLGACNVVLMANNTTLSFDDVEATFTPAVKNSGANGVLYAAEPLDACSPLTTKAVKGSASAFALVIRGGCQFDDKVRNAQNAGFKAAIVYDNEDNGVLVSMAGSSSGVHIYAVFISKASGEVLKKYSGQTEAELWIIPTYENSAWSIMAISFISLLAMSAVLATCFFVRRHQIRRDRARIPQAREFHGMSSQLVKAMPSLIFTKVQEDNCTSSTCAICLEDYTVGEKLRVLPCRHKFHAACVDLWLTSWRTFCPVCKRDANAGTSNPPVSESTPLLSSAIRLPAESTALASFRSTVAASPPRPISRHPSSQSISRNYSISSSGIPRTPNPHRSCANSPPIYRSGSNVDLANMSSPWSRTSHLASAHSLCGGHLSPPINIRYTSPHVSCSGYGSPSRYIGSSHFSHGSPRYYPGSSGQQHPYLRHCTLSGPSLFTMVPPSPQQTQLQHGGDSETSLSAAASTQSFCQLYLQHCPDSDTSSQSLPGC

SEQ ID NO: 110618 - protein, 53 aa, Setaria italica
  Transcript Sequence Number=SeqID_44644
  Homolog annotation: Hit_ID=Q7XPU2; Match level="QueryCoverage=66%, HitCoverage=7%, E-value=4e-11, Identity=88%"; Hit description =OSJNBa0088H09.14 protein
TTVAVVTDLGGAGDVGSGPAIILGSFQQQNYYVEYDLGKERLGFRRQPCAASS

SEQ ID NO: 110619 - protein, 83 aa, Setaria italica
  Transcript Sequence Number=SeqID_44645
  Gene Ontology: Mol. function=nucleotide binding; Cellular component =myosin complex; Biological process=protein amino acid phosphorylation
  Homolog annotation: Hit_ID=Q6UAL3; Match level="QueryCoverage=100%, HitCoverage=5%, E-value=8e-43, Identity=97%"; Hit description=Myosin heavy chain class XI E1 protein
EGRTVEQQVLESNPVLEAFGNAKTVKNNNSSRFGKFVEIQFDKYGKISGAAVRTYLLERSRVCQVSDPERNYHCFYMLCNAAP

SEQ ID NO: 110620 - protein, 103 aa, Setaria italica
  Transcript Sequence Number=SeqID_44646
  Gene Ontology: Mol. function=transcription coactivator activity; Cellular component=nucleus; Biological process=regulation of transcription, DNA-dependent
  Homolog annotation: Hit_ID=B6SQD0; Match level="QueryCoverage=99%, HitCoverage=99%, E-value=3e-38, Identity=77%"; Hit description=RNA polymerase II transcriptional coactivator KIWI
  Pfam annotation: Domain name=PC4; Domain location=1-99; Score=107.2; E_value=5.7e-29; Accession=PF02229.8; Description=Transcriptional Coactivator p15 (PC4)
MWGKGKKRFGGGGGSEPAAKRQAAGDEGPSESAEDGTVVAEISKNKKVSVRSWKGKVYVDMREFYTKDGKTLPTKKGISLQLDQWKILRDNIKAIDEAIKENA

SEQ ID NO: 110621 - protein, 206 aa, Setaria italica
  Transcript Sequence Number=SeqID_44647
  Gene Ontology: Mol. function=ATPase activity, coupled to transmembrane movement of substances; Cellular component=integral to membrane; Biological process=transport
  Homolog annotation: Hit_ID=Q8GU76; Match level="QueryCoverage=90%, HitCoverage=65%, E-value=3e-85, Identity=58%"; Hit description=MDR -like ABC transporter
  Pfam annotation: Domain name=ABC_tran; Domain location=112-206; Score= -34.9; E_value=0.0018; Accession=PF00005.19; Description=ABC transporter
SWALVFWYAGVFIRNGQTDGGKAFTAIFSAIVGGLSLGQSFSNLGAFSKGKIAGYKLLEVIRQRPTIVQDTADGRCLDEVHGNIEFKEVAFSYPSRPDVMIFRDFSLFFPAGKTAAVVGGSGSGKSTVVALIERFYDPNQGQVLLDNVDIKTLQLKWLRDQIGLVNQEPALFATTILENILYGKPDATMAEVEAAATSANAHSVIS

SEQ ID NO: 110622 - protein, 736 aa, Setaria italica
  Transcript Sequence Number=SeqID_44648
  Gene Ontology: Mol. function=ATPase activity, coupled to transmembrane movement of substances; Cellular component=integral to membrane; Biological process=transport
  Homolog annotation: Hit_ID=Q8GU76; Match level="QueryCoverage=97%, HitCoverage=99%, E-value=0.0, Identity=58%"; Hit description=MDR -like ABC transporter
  Pfam annotation: Domain name=ABC_membrane; Domain location=171-447; Score=154.8; E_value=2.6e-43; Accession=PF00664.15; Description=ABC transporter transmembrane region
  Pfam annotation: Domain name=ABC_tran; Domain location=522-706; Score= 205.1; E_value=1.9e-58; Accession=PF00005.19; Description=ABC transporter
  Pfam module annotation: Pfam domain module=ABC_membrane::ABC_tran; Domain location=171-447::522-706
MRATTVLFPDPLPPTTAADAGSESIVQEALDRLMVGRTTVVVAHRLSTIRCVDMIAVIQQGQVVETGTHDELLAKGSSGAYAALIRFQETARNRACPSTRKSRSSRLSNSLSTRSLSLRSGSLRNLSYSYSTGADGRIEMVSNADNDRKYPAPRGYFFKLLKLNAPEWPYTILGAIGSILSGFIGPTFAIVMSNMIEVFYYRNPNKMESKTREYVFIYIGTGLYAVVAYLVQHYFFSIMGENLTTRVRRMMLAVILRNDVGWFDQEENNSSLVAARLATDAADVKSAIAERISVILQNMTSLLVSFVVGFIIEWRVALLILITFPLLVLANFAQQLSMKGFAGDTAKAHAKTSMIAGEGVSNIRTVAAFNAQDKILSLFCGELRVPQMYSLRRSQISGALFGLSQLSLYASEALILWFGAHLVRTHVSTFSKVIKVFVVLVITANSVAETVSLAPEIVRGGESIRSVFAILNSRTRIDPDEPDTEQVESVRGEIDFRHVDFAYPTRPDVMVFKDFSLRIRAGQSQALVGASGSGKSTVIALIERFYDPLAGKVMIDGRDIRRLNLKSLRLKIGLVQQEPVLFATSILENIAYGKDGATEEEVVEAAKAANVHGFVSALPDGYRTPVGERGVQLSGGQKQRIAIARAVLKDPAVLLLDEATSALDAESECVLQEALERIMKGRTAVLVAHRLSTIRGVDSIAVVQDGRVVEQGSHGDLVSRPDGAYSRLLQLQLHHG

SEQ ID NO: 110623 - protein, 139 aa, Setaria italica
  Transcript Sequence Number=SeqID_44649
  Pfam annotation: Domain name=DUF588; Domain location=12-136; Score =1.6; E_value=0.00016; Accession=PF04535.4; Description=Domain of unknown function (DUF588)
MGSGCHAMNEEPNGSKAVTLLFRLSTMVLALTSAVVMATASECSIFEPHGSRVTVTFKNYPPFVYLAWVNIAATILEAAGIYLQVGKGGDGDDEAPKLPRVILVAIDVTVPALLNTATGAVFSAVVAYGPQISACTGTA

SEQ ID NO: 110624 - protein, 148 aa, Setaria italica
  Transcript Sequence Number=SeqID_44650
  Gene Ontology: Mol. function=small conjugating protein ligase activity; Cellular component=cytosol; Biological process=ubiquitin -dependent protein catabolic process
  Homolog annotation: Hit_ID=Q0E4G3; Match level="QueryCoverage=100%, HitCoverage=96%, E-value=2e-81, Identity=97%"; Hit description =Ubiquitin carrier protein (Fragment)
  Pfam annotation: Domain name=UQ_con; Domain location=5-142; Score =267.3; E_value=3.6e-77; Accession=PF00179.18; Description=Ubiquitin -conjugating enzyme
MALRRIIKELKDLQRDPPTSCSAGPVSDDIFHWQATIIGPSDSPYSGGVFLVTIHFPPDYPFKPPKVAFKTKVFHPNINSNGNICLDILKEQWSPALTISKVLLSICSLLTDPNPDDPLVPEIAHMCKTDRLRYESTARGWTQKYAMG

SEQ ID NO: 110625 - protein, 137 aa, Setaria italica
  Transcript Sequence Number=SeqID_44651
  Gene Ontology: Mol. function=hydrolase activity, hydrolyzing O -glycosyl compounds; Cellular component=anchored to membrane; Biological process=carbohydrate metabolic process
  Homolog annotation: Hit_ID=B6TRI0; Match level="QueryCoverage=88%, HitCoverage=28%, E-value=6e-39, Identity=68%"; Hit description =Glucan endo-1,3-beta-glucosidase 7
ATPQNAARYNSNAMRLVAEGKGTPLKPGVPLRAYVFALFNENLKPGLASERYYGLFKPDGTPAYELSFKLPRDNSTFGHGGGGFGGNGNGNSGYISGGGNSNGYYDISASTRDPPGRWRMWAQAAVAGAAAVLMVAA

SEQ ID NO: 110626 - protein, 117 aa, Setaria italica
  Transcript Sequence Number=SeqID_44652
  Homolog annotation: Hit_ID=Q4JQF9; Match level="QueryCoverage=100%, HitCoverage=4%, E-value=4e-54, Identity=88%"; Hit description =Aberrant pollen transmission 1
RKRESVIAIDLESLKISGELADGVEAMVQVGSIFSENAKIGVLVEGLAVSFCGAWIFKSSRMQLSRIPVSVSDSHPDKKLQSAAVCDWVIQCRDANICLPFRLQLRAIDDAVEDTLR

SEQ ID NO: 110627 - protein, 135 aa, Setaria italica
  Transcript Sequence Number=SeqID_44653
  Gene Ontology: Mol. function=hydrolase activity, hydrolyzing O -glycosyl compounds; Biological process=carbohydrate metabolic process
  Homolog annotation: Hit_ID=A6N1U0; Match level="QueryCoverage=98%, HitCoverage=95%, E-value=1e-52, Identity=70%"; Hit description=Non -cyanogenic beta-glucosidase (Fragment)
  Pfam annotation: Domain name=Glyco_hydro_1; Domain location=1-135; Score=-296.7; E_value=0.00095; Accession=PF00232.10; Description =Glycosyl hydrolase family 1
MVGVPIGPRAASSWLYIYPEGIRELLLYIKQYYGNPTIYITENGVDEANNKTVTLQESLKDDTRVDFYHRHLLALLRAIREGANVKAYFAWSLLDNFEWGNGFTVRFGLNFVDYSDGNKRYPKKSAHWFKEFLRK

SEQ ID NO: 110628 - protein, 466 aa, Setaria italica
  Transcript Sequence Number=SeqID_44654
  Gene Ontology: Mol. function=hydrolase activity, hydrolyzing O -glycosyl compounds; Biological process=carbohydrate metabolic process
  Homolog annotation: Hit_ID=Q7XKV5; Match level="QueryCoverage=92%, HitCoverage=81%, E-value=0.0, Identity=72%"; Hit description =OSJNBa0022H21.2 protein
  Pfam annotation: Domain name=Glyco_hydro_1; Domain location=32-464; Score=612.6; E_value=3.9e-181; Accession=PF00232.10; Description =Glycosyl hydrolase family 1
MSGARLLLAVVLVAVASGAYAGYDTAGTPPISRRSFPKGFVFGTSSSAYQYEGGAKEGGKGQSIWDTFTHQQPDKIADRSTGDVAVDSYHLYKEDVQLMENMGMDAYRFSISWTRILPNGSLSGGINREGVNYYNNLINELLAKGVQPYVTIFHWDSPQVLEDKYGGFLSPNIVNDFKDYAEVCFKEFGDRVKHWITFNQPFTFASGGYATGTKAPGRCSPWEGKCSAGDSGREPYIVGHHELLAHAETVRLYKEKYQAAQKGKIGITLVSHWFVPFSRSKSSKAAAKRAIDFMFGWFMDPLIRGDYPASMKGLVGNRLPMLTKEQSELVKGSFDFIGLNYYTTNYADHLPPSNGLNTSYSTDSQANTTGVRNGVPIGPRAASSWLYIYPEGIRELLLYIKQYYGNPTIYITENGVDEANNKTVTLQESLKDDTRVDFYHRHLLALLRAIREGANVKAKKGNTVED

SEQ ID NO: 110629 - protein, 175 aa, Setaria italica
  Transcript Sequence Number=SeqID_44655
  Gene Ontology: Mol. function=hydrolase activity, hydrolyzing O -glycosyl compounds; Biological process=carbohydrate metabolic process
  Homolog annotation: Hit_ID=Q01KA9; Match level="QueryCoverage=82%, HitCoverage=28%, E-value=2e-57, Identity=69%"; Hit description =OSIGBa0135C13.2 protein
  Pfam annotation: Domain name=Glyco_hydro_1; Domain location=5-174; Score=-173.7; E_value=6.4e-10; Accession=PF00232.10; Description =Glycosyl hydrolase family 1
PKKLTYGHRRNDFKDYAEVCFKEFGDRVKHWITFNQPFTFASGGYATGTKAPGRCSPWEGKCSAGDSGREPYIVGHHELLAHAETVRLYKEKYQAAQKGKIGITLVSHWFVPFSRSKSSKAAAKRAIDFMFGWFMDPLIRGDYPASMKRLVGNRYDLDPNRLQLKETSTEVRLKG

SEQ ID NO: 110630 - protein, 50 aa, Setaria italica
  Transcript Sequence Number=SeqID_44656
GQLSKKFGFCRHCCRHMILLVLERIYWELAVLLHAIMKNEYLTCEIVMGD

SEQ ID NO: 110631 - protein, 56 aa, Setaria italica
  Transcript Sequence Number=SeqID_44657
EAFSLSMLIRLLFEGPNPQVSLCRCCFQLFHEHPLPSLMPVHPRANGHLTVQHCNN

SEQ ID NO: 110632 - protein, 332 aa, Setaria italica
  misc_feature (11)..(11): Xaa can be any naturally occurring amino acid
  Transcript Sequence Number=SeqID_44658
  Gene Ontology: Cellular component=membrane
  Homolog annotation: Hit_ID=O80600; Match level="QueryCoverage=54%, HitCoverage=73%, E-value=8e-54, Identity=54%"; Hit description =T27I1.11 protein
RIAEENERLRXAFILERFVPSTGWIVKALQCTEEEILAAAGLDAVVFNRILVFSIRIFSLAAVLCVFGILPLNYFGQDIKHVRIPSESLDIFTIGNVEVRSRWLWVHCVALYIISGVACILLYIEYKHIARLRLLHLTSATPNPSHFTVLVRGIPKTAKESCSDVVDDFFTKYHSSSYLFHQVVYKVGKVQKIMTGAKKAYKKFKHFTDETVDQGCRSITYRCCLCGASSNSFKLLNTECKQNRRKPDNESSLNLDDEECTAAFVFFKTRYAALVASEILQTTNPMKWVANLAPEPEDVYWSNLWLPYKQLWVRRIATLLGSIVFMFLFLVT

SEQ ID NO: 110633 - protein, 86 aa, Setaria italica
  misc_feature (26)..(26): Xaa can be any naturally occurring amino acid
  Transcript Sequence Number=SeqID_44659
  Homolog annotation: Hit_ID=B6TXI9; Match level="QueryCoverage=100%, HitCoverage=56%, E-value=1e-18, Identity=53%"; Hit description =SAUR55-auxin-responsive SAUR family member
  Pfam annotation: Domain name=Auxin_inducible; Domain location=48-86; Score=9.1; E_value=0.00022; Accession=PF02519.6; Description=Auxin responsive protein
MISAKRLAQMARKWQRMAALARKRLXAHPAKETEGSSCSSSTSSVAGKGHCMVYSADGRRFEVPLAYLATAIFSELLSLSQEEFGF

SEQ ID NO: 110634 - protein, 312 aa, Setaria italica
  misc_feature (307)..(307): Xaa can be any naturally occurring amino acid
  Transcript Sequence Number=SeqID_44660
  Gene Ontology: Mol. function=phosphatidylcholine-sterol O -acyltransferase activity; Cellular component=integral to membrane
  Homolog annotation: Hit_ID=A4Q7N1; Match level="QueryCoverage=83%, HitCoverage=71%, E-value=3e-63, Identity=47%"; Hit description=Hly -III related proteins
  Pfam annotation: Domain name=HlyIII; Domain location=87-308; Score =101.7; E_value=2.4e-27; Accession=PF03006.12; Description=Haemolysin- III related
  Pfam annotation: Domain name=MerC; Domain location=132-235; Score= -74.1; E_value=0.072; Accession=PF03203.6; Description=MerC mercury resistance protein
  Pfam module annotation: Pfam domain module=HlyIII::MerC; Domain location=87-308::132-235
MAMESSEEGATLCGHQEAAAAAAAVKGGGGGKRRKKGQRRGGEAGGERKKYKLVSYHELPDYMKENEFILNYYRSEWPILNAVLSLFSWHNETINIWTHLLGFMLFFGLTLVHLGQYFPQVADLIGHLSWPISKVAENVSSNIGDVLSGAAMFIQTNPTLASYGTAVASQTTRWPFFVFLAGAMFCLLSSSACHLLSCHSHRLNLFLIRLDYTGIAVMIVVSFFPPIYYIFQCEPRWQAVYLSAITAAGVGTVYALMSPRLSAARYRAHRALLFVGMGLSGVVPAAHAAAVNWHEPARNVTLAYEGXMAASY

SEQ ID NO: 110635 - protein, 48 aa, Setaria italica
  Transcript Sequence Number=SeqID_44661
GALHRHGAIVMFLVAHFDDNLGCCIMDALSYLVSGPEEMAMDSSLRAP

SEQ ID NO: 110636 - protein, 89 aa, Setaria italica
  Transcript Sequence Number=SeqID_44662
AMICLLKIQIHFCDFFKIPFTIRLLLNTKNKDIKSTSLIVMNHQSFYYSPIYPKNLTCLRFQNFHIYFLPVNINCTYLPENKNMVENTN

SEQ ID NO: 110637 - protein, 297 aa, Setaria italica
  Transcript Sequence Number=SeqID_44663
  Gene Ontology: Mol. function=nucleic acid binding
  Homolog annotation: Hit_ID=B9SEZ1; Match level="QueryCoverage=83%, HitCoverage=24%, E-value=5e-19, Identity=34%"; Hit description=RNA binding protein, putative
  Subcellular localization annotation: CTP_CleavageSite=40; ConfidenceScore=5.11e-01
FSGRTYAFVQYTSIAAACRAKEALQGKLFNNPRVSICFSRSEGAAPEVGKRSFVAPYSPQPSAQPVFRDQDFEAFPTTRPFDSPPRDFRMASPHFGLNRLSRDSDDMGFHRDGYFQHEAGAELGRVSNIKPFRIRELGPERRMPEELYEPHIQSPTARSDAPWRNIPFERPRRPLPLEDSWDVEDNSYLISKELRGSQVHDTELPEYPFSEFDRGKVLPDYPRRPHRDLPEDDLRSRTYPFTPMHSRHHTDPLKNLTPLVNKHEPWHAQESFARHLGEMDRLTPEHHEPALKEELEI

SEQ ID NO: 110638 - protein, 107 aa, Setaria italica
  Transcript Sequence Number=SeqID_44664
  Gene Ontology: Mol. function=receptor activity
  Homolog annotation: Hit_ID=Q0PY41; Match level="QueryCoverage=80%, HitCoverage=14%, E-value=4e-27, Identity=65%"; Hit description =Leucine-rich repeat family protein
  Pfam annotation: Domain name=SKG6; Domain location=18-55; Score=10.2; E_value=0.05; Accession=PF08693.2; Description=Transmembrane alpha -helix domain
ARFNFTDNAGLCGIPGLDECGIHVTVAAKIGMAFGVLLAILFLVVFAACWWKRRQNILRAQKLAAAREAPYAKSRTQFTRDVQMAKHQRPSESSRSSNNESSPHLLS

SEQ ID NO: 110639 - protein, 44 aa, Setaria italica
  Transcript Sequence Number=SeqID_44665
RRYICSKYCIRTTFYKTSFYNISDIIQRIDFGVMCLHLFCLRAL

SEQ ID NO: 110640 - protein, 153 aa, Setaria italica
  Transcript Sequence Number=SeqID_44666
  Subcellular localization annotation: CTP_CleavageSite=61; ConfidenceScore=5.17e-01
RRAHLYIPSSQRPAGLVPKNPIPTSPIDGGGVAAGGASRVPEASRTTSPKRSGSDQGEPIRVAARPWLSPFSLSSSFFHLPRGIRAPAPNPRRPTPGTAPPPPPPPLSSGGLHCPTLTRGGQTPPPPPPPTGVPPLPGSGSALAASAPPLFLL

SEQ ID NO: 110641 - protein, 100 aa, Setaria italica
  Transcript Sequence Number=SeqID_44667
  Gene Ontology: Mol. function=lyase activity
  Homolog annotation: Hit_ID=Q9S7I5; Match level="QueryCoverage=98%, HitCoverage=21%, E-value=1e-33, Identity=71%"; Hit description =Ribosomal RNA apurinic site specific lyase
  Pfam annotation: Domain name=FBD; Domain location=1-49; Score=34.3; E_ value=5e-07; Accession=PF08387.2; Description=FBD
GYQVGFTECVYSHLKKLVLEAVRGEDSELAFAKFVMERAQMLEDMRVLVDGSCSRDVVLSRLSSEGCVSADATVLVERHDGTAWTFQRAIDLLQSDPFGC

SEQ ID NO: 110642 - protein, 90 aa, Setaria italica
  Transcript Sequence Number=SeqID_44668
  Gene Ontology: Mol. function=lyase activity
  Homolog annotation: Hit_ID=Q9S7I5; Match level="QueryCoverage=98%, HitCoverage=19%, E-value=1e-29, Identity=71%"; Hit description =Ribosomal RNA apurinic site specific lyase
  Pfam annotation: Domain name=FBD; Domain location=1-39; Score=12.5; E_ value=0.0051; Accession=PF08387.2; Description=FBD
YSHLKKLVLEAVRGEDSELAFAKFVMERAQMLEDMRVLVDGSCSRDVVLSRLSSEGCVSADATVLVERHDGTAWTFQRAIDLLQSDPFGC

SEQ ID NO: 110643 - protein, 630 aa, Setaria italica
  Transcript Sequence Number=SeqID_44669
  Gene Ontology: Mol. function=phospholipase A2 activator activity; Cellular component=cytoplasm; Biological process=phospholipid metabolic process
  Homolog annotation: Hit_ID=B9RZC7; Match level="QueryCoverage=100%, HitCoverage=82%, E-value=0.0, Identity=62%"; Hit description =Phospholipase A-2-activating protein, putative
  Pfam annotation: Domain name=PFU; Domain location=209-323; Score =222.1; E_value=1.5e-63; Accession=PF09070.3; Description=PFU (PLAA family ubiquitin binding)
  Pfam annotation: Domain name=PUL; Domain location=357-625; Score =291.4; E_value=2e-84; Accession=PF08324.3; Description=PUL domain
  Pfam annotation: Domain name=WD40; Domain location=11-48; Score=20.3; E_value=0.0083; Accession=PF00400.24; Description=WD domain, G-beta repeat
  Pfam annotation: Domain name=WD40; Domain location=129-165; Score =21.4; E_value=0.0036; Accession=PF00400.24; Description=WD domain, G- beta repeat
  Pfam annotation: Domain name=WD40; Domain location=50-87; Score=33.6; E_value=8.2e-07; Accession=PF00400.24; Description=WD domain, G-beta repeat
  Pfam annotation: Domain name=WD40; Domain location=90-127; Score =37.5; E_value=5.2e-08; Accession=PF00400.24; Description=WD domain, G-beta repeat
  Pfam module annotation: Pfam domain module=PFU::PUL::WD40::WD40::WD40: :WD40; Domain location=209-323::357-625::11-48::129-165::50-87::90-127
MDCTVRRWRNGNAIEVWEAHKVAVQTVLKLPTGELFTGSSDSTIKLWKGRTCIQTFSGHADTVRCLAEMPGLGILSASHDSTVKLWALTGQPLLEMIGHSSLVYSVDAHSSGLIASGSEDRSLKIWKDGVCVQSIEHPGCIWDVKFLENGDIVTACSDGTARIWTTHANRFCSDEELAAYTDLISQYTLSRKTVGGLKLMDLPGVEALQVPGNSDGQTLIVREGDNGVAYSWNSAELKWDKIGEVVDGPGDAAQGQVHDGVRYDFVFNVDIGDGEPIRKLPYNRSDDPYAVADKWLLKENLPLTYRQQVVEFILQNSGQNNFVPDPSFRDPYTGANAYVPGGQPSSSNGNAPKQIFKHIPKSGMLSFETAQFDGILKKVTEFNTTLSSDSEQKQLSLSEAEMSRLPAIVKVLKETSFYHTSKLADADMALLVKILNSWPSKMMFPVIDFLRMFVLHPDGAALLLKTIETGNDVLMETLRKAVAPPVQPANLLTILKALTNLFDNSCLHQWLRTHSAEIIDSMSNCKSSFSKNAHLAYATLLLNYAVLSIESKDEQSQAQILSAALEIAEDDTQDFDSKYRALVAIGSLMQKGNVKSLALDLDVKSVASSAKASMDSKIAEVGADIELLTR

SEQ ID NO: 110644 - protein, 68 aa, Setaria italica
  Transcript Sequence Number=SeqID_44670
  Gene Ontology: Mol. function=transferase activity; Cellular component= membrane
  Homolog annotation: Hit_ID=B6T2U9; Match level="QueryCoverage=60%, HitCoverage=9%, E-value=3e-17, Identity=100%"; Hit description =Secondary cell wall-related glycosyltransferase family 47
MGTGGARAPALALALLLAFAHVAVVAAQDTERIEGSAGDVLEDDPVGRLKVYVYELPTKYNKKMVAKD

SEQ ID NO: 110645 - protein, 45 aa, Setaria italica
  Transcript Sequence Number=SeqID_44671
IGILQDGQPIAVKKLADNSPVAPEKQFLNEVINLMAVQHENIVEI

SEQ ID NO: 110646 - protein, 172 aa, Setaria italica
  misc_feature (98)..(98): Xaa can be any naturally occurring amino acid
  misc_feature (140)..(140): Xaa can be any naturally occurring amino acid
  Transcript Sequence Number=SeqID_44672
  Gene Ontology: Mol. function=transferase activity; Cellular component= membrane
  Homolog annotation: Hit_ID=B6T2U9; Match level="QueryCoverage=97%, HitCoverage=40%, E-value=1e-91, Identity=94%"; Hit description =Secondary cell wall-related glycosyltransferase family 47
  Pfam annotation: Domain name=Exostosin; Domain location=1-172; Score=- 16.0; E_value=1.3e-05; Accession=PF03016.7; Description=Exostosin family
GIFMHRFLLSSAIRTLNPEEADWFYTPVYTTCDLTPWGHPLPFKSPRIMRSAIQFISKRWPYWNRTEGADHFFVVPHDFGACFHYQEEKAIERGVLPXLRRATLVQTFGQKDHVCLKEGSITIPPYTPPYKMRTHLVPPXPPRSIFVYFRGLFYDTSNDPEGGYYARYAPKN

SEQ ID NO: 110647 - protein, 126 aa, Setaria italica
  misc_feature (39)..(39): Xaa can be any naturally occurring amino acid
  Transcript Sequence Number=SeqID_44673
  Gene Ontology: Mol. function=transferase activity; Cellular component= membrane
  Homolog annotation: Hit_ID=B6T2U9; Match level="QueryCoverage=92%, HitCoverage=27%, E-value=1e-49, Identity=85%"; Hit description =Secondary cell wall-related glycosyltransferase family 47
VGRTSRYFRTSIPVIIADDIVLPFADAIPWEEIGVFVDXEGMNVPKLDTILTSIPMEVILRKQRLLANPSMKQAMLFPQPTEPRDAFHQILNGLARKLPHGKGVFLKPGQKVLNWTEGEPADLKPW

SEQ ID NO: 110648 - protein, 415 aa, Setaria italica
  Transcript Sequence Number=SeqID_44674
  Gene Ontology: Mol. function=transferase activity; Cellular component= membrane
  Homolog annotation: Hit_ID=B6T2U9; Match level="QueryCoverage=95%, HitCoverage=94%, E-value=0.0, Identity=94%"; Hit description =Secondary cell wall-related glycosyltransferase family 47
  Pfam annotation: Domain name=Exostosin; Domain location=45-343; Score= 364.0; E_value=2.7e-106; Accession=PF03016.7; Description=Exostosin family
MGTARARALPLALTLLLACSDVAVVAAQVTERIQGSAGDVLEDDPVGRLKVYVYELPPKYNKNILAKDSRCLKHMFATEIFIHRFLLSSAIRTLNPEEADWFYTPVYTTCDLTPWGHPLTTKSPRIMRSAIQFISKRWPYWNRTEGADHFFVVPHDFGACFHYQEEKAIERGVLPLLRRATLVQTFGQKDHVCLKEGSITIPPFAPPQKMKTHLVPPETPRSIFVYFRGLFYDTANDPEGGYYARGARASVWENFKNNPLFDISTDHPPTYYEDMQRSVFCLCPLGWAPWSPRLVEAVVFGCIPVIIADDIVLPFADAIPWEEIGVFVAEDDVTKLDTILTSIPMEVILRKQRLLANPSMKQAMLFPQPAQPGDAFHQILNGLARKLPHGKDVFLKPGQKVLNWTEGPRGDLKPW

SEQ ID NO: 110649 - protein, 47 aa, Setaria italica
  Transcript Sequence Number=SeqID_44675
SSIVKGCKQADDQIKICRVNSNDKSCYFQVCSINQKFRIYCYLLKEV

SEQ ID NO: 110650 - protein, 143 aa, Setaria italica
  Transcript Sequence Number=SeqID_44676
  Homolog annotation: Hit_ID=Q9LMG4; Match level="QueryCoverage=93%, HitCoverage=13%, E-value=3e-13, Identity=37%"; Hit description =F16A14.15
MGTKVEGETYIPGYFDMADSSVNSNGNALPYYKENKPNVHLSDKFTITSPNGSVHYDKEMLKRTMLVHEATFRKQVYELHRLYRTQKEIMVQFQREEFKGCPRYAEALQPRSSASQILLEDVKRVRQTATPISVDTILKQSSI

SEQ ID NO: 110651 - protein, 104 aa, Setaria italica
  Transcript Sequence Number=SeqID_44677
  Homolog annotation: Hit_ID=B6TNC9; Match level="QueryCoverage=50%, HitCoverage=19%, E-value=8e-24, Identity=90%"; Hit description=AAA ATPase containing von Willebrand factor type A
VVVRDGEDGGDEDGDEDEDNDEDEDNDEDEDDDEDEDDDDDDDDDDDDDGHRAYRDCCRWLKEVEPDCVCQALLRLPSFLVKPQHKYTVRVGHSCKFIYRCGGT

SEQ ID NO: 110652 - protein, 63 aa, Setaria italica
  Transcript Sequence Number=SeqID_44678
  Subcellular localization annotation: CTP_CleavageSite=35; ConfidenceScore=5.00e-01
FSLFSFQDIITSKFRANAILINYLQLQALPRSNICCVLNVSIFFICRNARLRLFVIAAYTDKG

SEQ ID NO: 110653 - protein, 82 aa, Setaria italica
  Transcript Sequence Number=SeqID_44679
  Gene Ontology: Mol. function=nucleic acid binding; Cellular component= ribonucleoprotein complex
  Homolog annotation: Hit_ID=B6SLH9; Match level="QueryCoverage=98%, HitCoverage=65%, E-value=1e-27, Identity=79%"; Hit description=Sm protein
MEGPSMPSQAIPVSEDAYCNSTPVPLDALGSSSPAVTKLRKLLFRRMLIGVNDGRYFLGLFHCIDKQGNIILQDAVEYRSAR

SEQ ID NO: 110654 - protein, 122 aa, Setaria italica
  Transcript Sequence Number=SeqID_44680
  Gene Ontology: Mol. function=nucleic acid binding; Cellular component= ribonucleoprotein complex
  Homolog annotation: Hit_ID=B6SLH9; Match level="QueryCoverage=99%, HitCoverage=98%, E-value=5e-50, Identity=81%"; Hit description=Sm protein
  Pfam annotation: Domain name=LSM; Domain location=37-99; Score=2.5; E_ value=0.062; Accession=PF01423.14; Description=LSM domain
MEGPSMPSQAIPVSEDAYCNSTPVPLDAAGSSSPAVTKLRKLLFRRMLIGVNDGRYFLGLFHCIDKQGNIILQDAVEYRSARHSSPPTEQRCLGIILIPATCRSSCQVDCSIEEKMSLLCLE

SEQ ID NO: 110655 - protein, 176 aa, Setaria italica
  Transcript Sequence Number=SeqID_44681
  Gene Ontology: Mol. function=ATPase activity, coupled to transmembrane movement of substances; Cellular component=proton -transporting two-sector ATPase complex; Biological process=ATP metabolic process
  Homolog annotation: Hit_ID=Q9SZY7; Match level="QueryCoverage=97%, HitCoverage=95%, E-value=3e-74, Identity=83%"; Hit description=H+ -transporting ATPase-like protein
  Pfam annotation: Domain name=ATP-synt_C; Domain location=104-169; Score=19.2; E_value=0.00025; Accession=PF00137.13; Description=ATP synthase subunit C
  Pfam annotation: Domain name=ATP-synt_C; Domain location=20-85; Score= 42.5; E_value=1.6e-09; Accession=PF00137.13; Description=ATP synthase subunit C
  Pfam module annotation: Pfam domain module=ATP-synt_C::ATP-synt_C; Domain location=104-169::20-85
MSSDSSSWARALVQISPYTFSAIGIAVSIGVSVLGAAWGIFITGSSLIGAAIKAPRITSKNLISVIFCEAVAIYGVIVAIILQTKLESVPSAQMYAPESLRAGYAIFASGLIVGFANLVCGVCVGIIGSSCALSDAQNSSLFVKILVIEIFGSALGLFGVIVGIIMSAQATWPAKA

SEQ ID NO: 110656 - protein, 63 aa, Setaria italica
  Transcript Sequence Number=SeqID_44682
SPMGKFGDFLGSEDQLSIESNVEFSGLLSSFMLRSETSHVHARKSTAENSDNQIGSTPSDFQI

SEQ ID NO: 110657 - protein, 43 aa, Setaria italica
  Transcript Sequence Number=SeqID_44683
TIQCSSYFSYKAYQQYHLYVSNQLNIISVIKLISSTIYMFLIN

SEQ ID NO: 110658 - protein, 387 aa, Setaria italica
  Transcript Sequence Number=SeqID_44684
  Gene Ontology: Mol. function=transferase activity, transferring groups other than amino-acyl groups; Cellular component=cytoplasm; Biological process=biosynthetic process
  Homolog annotation: Hit_ID=B6TRM1; Match level="QueryCoverage=100%, HitCoverage=98%, E-value=0.0, Identity=85%"; Hit description =Chalcone synthase G
  Pfam annotation: Domain name=ACP_syn_III; Domain location=166-249; Score=14.8; E_value=4.5e-05; Accession=PF08545.2; Description=3 -Oxoacyl-[acyl-carrier-protein (ACP)]
  Pfam annotation: Domain name=ACP_syn_III_C; Domain location=290-385; Score=-20.8; E_value=0.0023; Accession=PF08541.2; Description=3 -Oxoacyl-[acyl-carrier-protein (ACP)
  Pfam annotation: Domain name=Chal_sti_synt_C; Domain location=242 -387; Score=256.6; E_value=5.8e-74; Accession=PF02797.7; Description =Chalcone and stilbene synthases, C-te
  Pfam annotation: Domain name=Chal_sti_synt_N; Domain location=7-232; Score=412.4; E_value=7.3e-121; Accession=PF00195.11; Description =Chalcone and stilbene synthases, N-te
  Pfam module annotation: Pfam domain module=ACP_syn_III::ACP_syn_III _C::Chal_sti_synt_C::Chal_sti_synt_N; Domain location=166-249::290 -385::242-387::7-232
MSGSVVSGGANGKSQQGSRGKAMLLALGKGLPGQVLPQEKVVESYLQDSTCDDPATRAKLERLCKTTTVRTRYTVMTKELLDEHPELKTEGIPTLTPRLDICNSAVIDLGAAAARAALDDWGRPAADITHLVYISSSELRLPGGDLHLAARLGLSPNTVRTSLLFLGCSGGAAALRTAKDIAENNPGSRVLVTAAETTVLGFRPPSYDRPYDLVGAALFGDGASAVIVGAGPMTPAENPFLELEFSTQEFLPGTDKVIDGKISEEGINFKLGRDLPEKIESRIEGFCRNLMDQVGIKDFNDVFWAVHPGGPAILNRLEFCLELQPEKLKISRKALMNYGNVSSNTIFYVLEYLRDELKKGAISEEWGLILAFGPGITFEGLLVRGVN

SEQ ID NO: 110659 - protein, 111 aa, Setaria italica
  misc_feature (10)..(10): Xaa can be any naturally occurring amino acid
  Transcript Sequence Number=SeqID_44685
  Gene Ontology: Mol. function=catalytic activity; Cellular component =membrane; Biological process=phosphatidylcholine metabolic process
  Homolog annotation: Hit_ID=Q8SAG4; Match level="QueryCoverage=100%, HitCoverage=33%, E-value=6e-41, Identity=70%"; Hit description =Phospholipase D nu-2 (Fragment)
RSAQHFVYIXNQYFIGSSYYWSAHRSAGAENLIPIELAIKIARKIKAKERFAAYIVIPMWPEGNPTTAAMQEILYWQGHTMSLMYKIVADALRKEGLHERHPQEYLNFYCL

SEQ ID NO: 110660 - protein, 77 aa, Setaria italica
  Transcript Sequence Number=SeqID_44686
  Gene Ontology: Mol. function=hydroxymethyl-, formyl- and related transferase activity; Biological process=biosynthetic process
  Homolog annotation: Hit_ID=B4FRN6; Match level="QueryCoverage=64%, HitCoverage=13%, E-value=1e-15, Identity=80%"; Hit description =Methionyl-tRNA formyltransferase
SSRCLFIKLLLSSIDCLLCHFLCLQAPELLAILFDIGSKLLINELPSILDGSAKETAQPQDDSKATLAPKVSIGSSS

SEQ ID NO: 110661 - protein, 52 aa, Setaria italica
  Transcript Sequence Number=SeqID_44687
  Gene Ontology: Cellular component=integral to membrane
  Homolog annotation: Hit_ID=A4Q7N1; Match level="QueryCoverage=94%, HitCoverage=13%, E-value=5e-15, Identity=67%"; Hit description=Hly -III related proteins
SRVPERWRPGAFDLAGHSHQIFHALVIAGALAHYGAAIVFLKARDEMGCPAK

SEQ ID NO: 110662 - protein, 87 aa, Setaria italica
  Transcript Sequence Number=SeqID_44688
EIAVSAYPYPCCIEGKPRNSFCFSQKILRNILSKLLIADAKVSLRTDSPNRELGVSSCDPALLVRCRVITTSMISSWRMSLFQLFSK

SEQ ID NO: 110663 - protein, 75 aa, Setaria italica
  Transcript Sequence Number=SeqID_44689
IRSSFQRALQPLSHILHLFHTAVKHIFLIKVQNKEIADSNEVALKQLESAHQDYKAEAEVGREALEDEIALLHVR

SEQ ID NO: 110664 - protein, 31 aa, Setaria italica
  Transcript Sequence Number=SeqID_44690
  Gene Ontology: Mol. function=protein binding; Cellular component =chromosome; Biological process=chromosome organization and biogenesis
  Homolog annotation: Hit_ID=Q8GU56; Match level="QueryCoverage=100%, HitCoverage=2%, E-value=5e-10, Identity=100%"; Hit description=SMC1 protein
DKAEALVGVYRDSERSCSRTLTFDLTKYREA

SEQ ID NO: 110665 - protein, 106 aa, Setaria italica
  misc_feature (10)..(10): Xaa can be any naturally occurring amino acid
  misc_feature (32)..(32): Xaa can be any naturally occurring amino acid
  Transcript Sequence Number=SeqID_44691
  Gene Ontology: Mol. function=protein binding; Cellular component =chromosome; Biological process=chromosome organization and biogenesis
  Homolog annotation: Hit_ID=Q8GU56; Match level="QueryCoverage=100%, HitCoverage=8%, E-value=4e-41, Identity=82%"; Hit description=SMC1 protein
EEEINRLEPXKEELEIRLAKKEAEVTKLEKKXNEIVDKVYRDFSISVGVKNIREYEERQLKDAQALQERKLTLNTQMSKLKYQLEYEQKRDMQAPIVKLRETYESL

SEQ ID NO: 110666 - protein, 98 aa, Setaria italica
  Transcript Sequence Number=SeqID_44692
CFFFPVASVCMLRNTDTPPGDRIPYRIRIRYGYAPDTYQWRIHVSPIKWAENFGSETFPRLDSAQPAQHHSTSHLLSYSRDPSGVGSPTRSRLTQRIA

SEQ ID NO: 110667 - protein, 60 aa, Setaria italica
  misc_feature (28)..(28): Xaa can be any naturally occurring amino acid
  misc_feature (38)..(38): Xaa can be any naturally occurring amino acid
  misc_feature (45)..(45): Xaa can be any naturally occurring amino acid
  Transcript Sequence Number=SeqID_44693
  Gene Ontology: Cellular component=plasma membrane
  Homolog annotation: Hit_ID=B6U1N5; Match level="QueryCoverage=95%, HitCoverage=11%, E-value=5e-21, Identity=85%"; Hit description=Tubby- like protein
RKTTCTEYTISMDSGNTSRSSRTYIGKXRSNFLGTKFXIYDTQPXYNGAVVPPVGRTRQG

SEQ ID NO: 110668 - protein, 117 aa, Setaria italica
  Transcript Sequence Number=SeqID_44694
EGRRRFGLGSSPRCTGVRRCQRFLFGSSSGPRGEEGYTAWLPRGPNRWRGEEMAPLMVRSDWRLAVAQLLGEGAAQSGRRSGAPCLLESLTAVALDGWENRLTVTALGRHSSSSGAG

SEQ ID NO: 110669 - protein, 87 aa, Setaria italica
  Transcript Sequence Number=SeqID_44695
NHSGSLTTEQGLGLLTPEADGSNHGRTEADGRQPAAGGRRPRGPWPREADGGWQEAASRTAASGRRPTRGGGAASAVRSRRENAAMR

SEQ ID NO: 110670 - protein, 91 aa, Setaria italica
  misc_feature (81)..(81): Xaa can be any naturally occurring amino acid
  Transcript Sequence Number=SeqID_44696
  Gene Ontology: Mol. function=protein binding; Cellular component =chromosome; Biological process=chromosome organization and biogenesis
  Homolog annotation: Hit_ID=Q8GU56; Match level="QueryCoverage=97%, HitCoverage=7%, E-value=1e-39, Identity=89%"; Hit description=SMC1 protein
HCTFDRALEKAVLYAVGNTLVCDKLDEAKTLSWSGERYKVVTVDGILLTKSGTMTGGISGVMEARSNKWDDSRIESLKKKXNQLESEMSVV

SEQ ID NO: 110671 - protein, 153 aa, Setaria italica
  misc_feature (88)..(88): Xaa can be any naturally occurring amino acid
  Transcript Sequence Number=SeqID_44697
  Gene Ontology: Mol. function=protein binding; Cellular component =chromosome; Biological process=chromosome organization and biogenesis
  Homolog annotation: Hit_ID=Q2QLI0; Match level="QueryCoverage=100%, HitCoverage=25%, E-value=3e-59, Identity=78%"; Hit description =RecF/RecN/SMC N terminal domain containing protein, expressed
LGVRSAHLRGAQLKDLIYALDDRDKEAKGRRASVRLVYRQDVYRQPNQEELHFTRTITGAGGSEYRIDGRLVSWDDYNAKLRSLGILXVKARNFLVFQGDVESIASKNPKELTVLLEQISGSDELRREYDELEEQKARAEENSALAYQDKRPL

SEQ ID NO: 110672 - protein, 206 aa, Setaria italica
  misc_feature (89)..(89): Xaa can be any naturally occurring amino acid
  misc_feature (114)..(114): Xaa can be any naturally occurring amino acid
  misc_feature (126)..(126): Xaa can be any naturally occurring amino acid
  Transcript Sequence Number=SeqID_44698
  Gene Ontology: Mol. function=protein binding; Cellular component =chromosome; Biological process=chromosome organization and biogenesis
  Homolog annotation: Hit_ID=Q2QLI0; Match level="QueryCoverage=54%, HitCoverage=21%, E-value=3e-48, Identity=80%"; Hit description =RecF/RecN/SMC N terminal domain containing protein, expressed
  Pfam annotation: Domain name=SMC_N; Domain location=40-178; Score= -19.8; E_value=3.5e-10; Accession=PF02463.11; Description=RecFRecNSMC N terminal domain
RWREEDGGGGGGGWAHQRHPDGGGGGGWAHQRHPDGGGGRIHRLEVENFKSYKGGTKTIGPFFDSTAIIGPNGAGKSNLMDAISFVLGXDLIYALDDRDKEAKGRRASVRLVYXKTNQEELQFTRXITGAGGSEYRIDGRLVSWDDYNAKLTFPVSLKQPGPREGNTMIQCLLRGISQNPPTSCTCALVMLLLQKVGNSSYQLEDT

SEQ ID NO: 110673 - protein, 84 aa, Setaria italica
  Transcript Sequence Number=SeqID_44699
AARGRADARRVTGVGQEVGCAVMLGRLGRIQARKRFRSEVFGPFNRGYVDTPRPGGVSVFRRLKSSKTAVSDRDSSKKIKIQQC

SEQ ID NO: 110674 - protein, 146 aa, Setaria italica
  misc_feature (50)..(50): Xaa can be any naturally occurring amino acid
  misc_feature (59)..(59): Xaa can be any naturally occurring amino acid
  misc_feature (80)..(80): Xaa can be any naturally occurring amino acid
  Transcript Sequence Number=SeqID_44700
  Gene Ontology: Mol. function=protein binding; Cellular component =chromosome; Biological process=chromosome organization and biogenesis
  Homolog annotation: Hit_ID=Q8GU56; Match level="QueryCoverage=88%, HitCoverage=10%, E-value=4e-27, Identity=55%"; Hit description=SMC1 protein
YKDKRTIVMERKQKKAQKEEAEKHLRLHQDLKLLKAEHSLWQLYTIEKDXKMEAELAEXRESLQQVQEENQAAENELTAXKKEQSGFLKKMTLCEKNITKKKLELDKKTCWLPSPPVWLGYTEIVEPLKLDPHIQDVIQHLPLYDG

SEQ ID NO: 110675 - protein, 96 aa, Setaria italica
  Transcript Sequence Number=SeqID_44701
  Subcellular localization annotation: CTP_CleavageSite=57; ConfidenceScore=5.20e-01
CSGQGTETMKYRWLLSKFINNDSCFRPNQRQRRPNPSGRRNSAHNNWSIKIPLRRLKSMQHGYGYAYRYRKDTDTRIRQFLKQPDTRIHFNYFFNK

SEQ ID NO: 110676 - protein, 81 aa, Setaria italica
  Transcript Sequence Number=SeqID_44702
SCRLLIVLLFYQVTFRDTGRDIPATSEENDELFQLKEQLEKYKEEAQANRNYMVQYKEIADSNEVALKQLESAHQDYKAEA

SEQ ID NO: 110677 - protein, 92 aa, Setaria italica
  Transcript Sequence Number=SeqID_44703
  Gene Ontology: Mol. function=heat shock protein binding; Biological process=response to stress
  Homolog annotation: Hit_ID=B4UW90; Match level="QueryCoverage=89%, HitCoverage=75%, E-value=2e-13, Identity=48%"; Hit description=Heat shock protein 3 (Fragment)
  Pfam annotation: Domain name=DnaJ; Domain location=9-77; Score=55.8; E_value=1.7e-13; Accession=PF00226.23; Description=DnaJ domain
MVLGSIQKTLYEVLSVSEDATYGEIRAAYKSAALNTHPDKGHMTLESSVPSSEQQEFLSVQRAWEILRHPASRADYDKQLQSSRQNIEINCI

SEQ ID NO: 110678 - protein, 145 aa, Setaria italica
  misc_feature (83)..(83): Xaa can be any naturally occurring amino acid
  misc_feature (115)..(115): Xaa can be any naturally occurring amino acid
  Transcript Sequence Number=SeqID_44704
  Gene Ontology: Cellular component=plasma membrane
  Homolog annotation: Hit_ID=B6U1N5; Match level="QueryCoverage=100%, HitCoverage=29%, E-value=7e-71, Identity=91%"; Hit description=Tubby- like protein
  Pfam annotation: Domain name=Tub; Domain location=2-144; Score=29.2; E_value=6.7e-12; Accession=PF01167.10; Description=Tub family
QPGPREGNTMIQCFIKRNKSKSTYQLYLCLSNVVTSESGKFLLSARRHRKTTCTEYTISMDSGNTSRSSRTYIGKIRSNFLGXLKFLIYDTHAPYNGAVVPPVGRTSRRFNSTKXVSPKLPSVSYNIAQVSYELNVLGTRGPRRI

SEQ ID NO: 110679 - protein, 76 aa, Setaria italica
  Transcript Sequence Number=SeqID_44705
  Gene Ontology: Mol. function=protein binding; Cellular component =chromosome; Biological process=chromosome organization and biogenesis
  Homolog annotation: Hit_ID=Q8GU56; Match level="QueryCoverage=86%, HitCoverage=5%, E-value=8e-20, Identity=74%"; Hit description=SMC1 protein
HPVSEKYLKEQRLPPQTFIPLQSVRVKPIIEKLRTLGGSAQLVFDVIQYPFVFLPHTNYFIYLILQMISFDWSNLV

SEQ ID NO: 110680 - protein, 195 aa, Setaria italica
  misc_feature (53)..(53): Xaa can be any naturally occurring amino acid
  misc_feature (116)..(116): Xaa can be any naturally occurring amino acid
  misc_feature (130)..(130): Xaa can be any naturally occurring amino acid
  Transcript Sequence Number=SeqID_44706
  Gene Ontology: Mol. function=protein binding; Cellular component =chromosome; Biological process=chromosome organization and biogenesis
  Homolog annotation: Hit_ID=Q2QLI0; Match level="QueryCoverage=76%, HitCoverage=27%, E-value=2e-44, Identity=66%"; Hit description =RecF/RecN/SMC N terminal domain containing protein, expressed
CGIHRLQEPQGALPAVSLCSSFACSLFNYAHSLIPSLKTEHSLWQLYTIEKDXKMEAELAEDRESLQQVQEENQSAENELTAKKEQSGFLKKMTLCEKSIAKKKLELDKKQPELHXSKIKSCKKEIEKKXDDNKKHLEEMRRLQSSLVDVTNALEELNEQGQDKSGKLQLADDQLQEYHRMPRLAGKPWKMRLLN

SEQ ID NO: 110681 - protein, 114 aa, Setaria italica
  misc_feature (73)..(73): Xaa can be any naturally occurring amino acid
  Transcript Sequence Number=SeqID_44707
  Homolog annotation: Hit_ID=Q9LMC1; Match level="QueryCoverage=69%, HitCoverage=29%, E-value=6e-17, Identity=53%"; Hit description =F14D16.22
  Subcellular localization annotation: CTP_CleavageSite=81; ConfidenceScore=5.10e-01
GDCVTLPKKKVSVLLPTFLCFHIYRVNDKSIGMFLRYAFTSRYKEVLSKSHSSSTMTVPKFVPRLTKEETRVXESARESMAAFKKWRAGGVRLQKATILGRKRKTKLPDGPSTP

SEQ ID NO: 110682 - protein, 565 aa, Setaria italica
  misc_feature (167)..(167): Xaa can be any naturally occurring amino acid
  misc_feature (203)..(203): Xaa can be any naturally occurring amino acid
  misc_feature (386)..(386): Xaa can be any naturally occurring amino acid
  Transcript Sequence Number=SeqID_44708
  Gene Ontology: Mol. function=3'-5' exonuclease activity; Cellular component=intracellular; Biological process=nucleobase, nucleoside, nucleotide and nucleic acid metabolic process
  Homolog annotation: Hit_ID=B9SDW9; Match level="QueryCoverage=99%, HitCoverage=60%, E-value=1e-151, Identity=49%"; Hit description=3' -5' exonuclease, putative
SDQAIAALAVSLPKGPTEVFAVLAETDLNISSMYPSLSSPSPIVVAHVEELCYLLENTTTSMDDIFKSLLEKYKDPSGLCRLSVYNYNLITELSLKQTNMFSFAPSGEKLLTAPPNKKASRDLFIKKFSCKSPVYHNCRIYASDGRLLCYCDRKKLEWYVQRNLAKXIEDSPPAIMLLFEPKGRPEDEDNEFYIQSKKNICVXGCGEKSHYIRYRIIPSCYRMHFPEHLKSHRSHDIVLLCVDCHEIAHSAAEKYKRRVAEEFGIPLFVQKIVNSGDISLITHTSVSEDKLNGTGVSPLQLRTAAMALLRHGSTMPLKRCEELMQIVKSYYGGRDVTPEDLEMALLVGMSPHERRRLEKKKGYSFKAQAQNIITKSSSSNISENSXGHGSENSHALSEQFPEDGTESNGQQEFDETESENQLEDLTLSQGGSSLPVSMEDTTFGHDTATFETDTKQQASGACIPANGYLNRDPSIRDNSNQAISKNAEKKISLLGHGHHGKQVVELLLSNGGEEAINQFCQRWRQVFVEAVHPRYLPSGWNINHSGRRDFCDFSVYKPSKNATPP

SEQ ID NO: 110683 - protein, 125 aa, Setaria italica
  Transcript Sequence Number=SeqID_44709
GPEAACGHQEVATSEGGAAAAACWLVERRRTLGLLACGDRGLGRWAAGWAVSLTRPLSYLGGLRDGPVCMLHNTHHIALLTGLASKPKPHLSILACKENATHPTPVFHPQKSNPTNPIILPQQII

SEQ ID NO: 110684 - protein, 144 aa, Setaria italica
  Transcript Sequence Number=SeqID_44710
  Gene Ontology: Cellular component=plasma membrane
  Homolog annotation: Hit_ID=B6U1N5; Match level="QueryCoverage=86%, HitCoverage=25%, E-value=1e-60, Identity=92%"; Hit description=Tubby- like protein
  Pfam annotation: Domain name=Tub; Domain location=2-144; Score=15.1; E_value=5.3e-11; Accession=PF01167.10; Description=Tub family
SNGWIILFLLIKFIENHFSPLCTVVTSESGKFLLSARRHRKTTCTEYTISMDSGNTSRSSRTYIGKIRSNFLGTKFLIYDTQPPYNGAVVPPVGRTSRRFNSTKVSPKLPSVSYNIAQVSYELNVLGTRGPRRMRCSMHSIPAS

SEQ ID NO: 110685 - protein, 443 aa, Setaria italica
  misc_feature (369)..(369): Xaa can be any naturally occurring amino acid
  misc_feature (420)..(420): Xaa can be any naturally occurring amino acid
  Transcript Sequence Number=SeqID_44711
  Gene Ontology: Mol. function=molecular_function; Cellular component =cellular_component; Biological process=biological_process
  Homolog annotation: Hit_ID=B9RYK2; Match level="QueryCoverage=97%, HitCoverage=20%, E-value=1e-109, Identity=48%"; Hit description =Nucleoprotein TPR, putative
TQEKELLEKHNLWLDEELKVKVKNLAELRKTNMDEEARMSARIAELEREISESSSSLRRGKERISELEQRVSYMEKELCSTKDAAAANEQRLGAELSTVMKLAELHKESSEEWSKKAGELEGVIKALETHLTQVEDEYKEKLEKETLFRRDLEKEAANLKQKLEKCQFDLENTRKSSELSLIPLTSVAADSTALIDARIQELPISDELNQNDLMVVPKVPSGVSGTALAASLLRDGWSLAKIYEKYQEATDAFLHERRGRRHAEAVLERVLHEIEEKAELILDERAEHERMVEAYALMDQKLQQALLEHDNFENIIRNLKSELKRRERDHSVAQKEIDDLQKQVAVLLKECQDIQLRCGSSLPNVNNGXFSASIGSVLSNVEQNMKDNQIAFKDINGLVQQNVQLRNQVHMLSADLDKKXMELRESFQIALKQLESAHQDYKA

SEQ ID NO: 110686 - protein, 323 aa, Setaria italica
  Transcript Sequence Number=SeqID_44712
  Homolog annotation: Hit_ID=B9RYK2; Match level="QueryCoverage=99%, HitCoverage=12%, E-value=5e-15, Identity=34%"; Hit description =Nucleoprotein TPR, putative
SDLEAKLKSRKVTFRDTGRDIPATSEENDELFQLKEQLEKYKEEAQANRNYMVQYKEIADSNEVALKQLESAHQDYKAEAEVGREALEDEIAKLRDKLSYMEKSYLIKCEEAASAIESKEKQITSLVNEISVLRTDVSQRLPQVEKLEMELASSKSALDEQYKRWRSAEENYERQRDWAELKELQEQGDLVRVLNLDQKNMFDSCMKQVEDMRKGLQSSLKAASDAESRAAIAEAKCSDLEAKLKSRKVTFRDTGRDIPATSEENDELFQLKEQLEKYKEEAQANRNYMVQYKEIADSNEVALKQLESAHQDYKAEVRRFGLG

SEQ ID NO: 110687 - protein, 375 aa, Setaria italica
  Transcript Sequence Number=SeqID_44713
  Gene Ontology: Mol. function=protein binding; Cellular component =nuclear speck; Biological process=mRNA processing
  Homolog annotation: Hit_ID=B8Q888; Match level="QueryCoverage=85%, HitCoverage=91%, E-value=1e-144, Identity=80%"; Hit description=SKIP interacting protein 2
MNTDPGILGPASIGLGFLQKIFGGMSAAGIGFFWVIASHLVSYFCLLVVAAVFLSAGEKRPFGDLDDDDDDVFASKKAKTKVEESAPGAATGMILSLRESLQDCKHSLASCQVELEAAKSEIEKWHSAFQKIPAVPSGANPDPVSVVSYLSNLKSSEESLREQLEKAKKREAAFIVTFAKREQEIAELKSAVRDLKTQLRPPSMQTRRLLLDPAIHEEFTRLKNLVEEKEKKIKELQDNVAAVNFTPSSKLGKMLMAKCRTLQEENEEIGAMASEGKIHELGMKIAVLKSQNNELRNQFDVLYKHMDGVTNDVERSNEMVSILQEELEAKDLELARLKEMLSQKEASHDEAVEERDEAANDMNTASDPMHVKVES

SEQ ID NO: 110688 - protein, 1028 aa, Setaria italica
  misc_feature (7)..(7): Xaa can be any naturally occurring amino acid
  misc_feature (14)..(14): Xaa can be any naturally occurring amino acid
  misc_feature (81)..(81): Xaa can be any naturally occurring amino acid
  misc_feature (863)..(863): Xaa can be any naturally occurring amino acid
  Transcript Sequence Number=SeqID_44714
  Gene Ontology: Mol. function=microtubule motor activity; Cellular component=nuclear pore; Biological process=protein import into nucleus
  Homolog annotation: Hit_ID=B9RYK2; Match level="QueryCoverage=95%, HitCoverage=47%, E-value=0.0, Identity=44%"; Hit description =Nucleoprotein TPR, putative
  Pfam annotation: Domain name=Filament; Domain location=425-709; Score= -195.8; E_value=0.1; Accession=PF00038.13; Description=Intermediate filament protein
  Pfam annotation: Domain name=M; Domain location=263-283; Score=2.8; E_ value=63; Accession=PF02370.8; Description=M protein repeat
  Pfam annotation: Domain name=M; Domain location=330-350; Score=5.5; E_ value=27; Accession=PF02370.8; Description=M protein repeat
  Pfam annotation: Domain name=M; Domain location=481-501; Score=1.3; E_ value=97; Accession=PF02370.8; Description=M protein repeat
  Pfam annotation: Domain name=M; Domain location=622-642; Score=3.6; E_ value=49; Accession=PF02370.8; Description=M protein repeat
  Pfam annotation: Domain name=M; Domain location=691-711; Score=0.8; E_ value=1.1e+02; Accession=PF02370.8; Description=M protein repeat
  Pfam annotation: Domain name=M; Domain location=873-893; Score=3.4; E_ value=52; Accession=PF02370.8; Description=M protein repeat
  Pfam annotation: Domain name=M; Domain location=926-946; Score=1.6; E_ value=88; Accession=PF02370.8; Description=M protein repeat
  Pfam annotation: Domain name=Myosin_tail_1; Domain location=222-987; Score=-524.2; E_value=0.091; Accession=PF01576.11; Description =Myosin tail
  Pfam annotation: Domain name=Pox_A_type_inc; Domain location=182-204; Score=2.1; E_value=47; Accession=PF04508.4; Description=Viral A-type inclusion protein repeat
  Pfam annotation: Domain name=Pox_A_type_inc; Domain location=330-352; Score=8.9; E_value=4.7; Accession=PF04508.4; Description=Viral A-type inclusion protein repeat
  Pfam annotation: Domain name=Pox_A_type_inc; Domain location=488-510; Score=3.2; E_value=32; Accession=PF04508.4; Description=Viral A-type inclusion protein repeat
  Pfam annotation: Domain name=Pox_A_type_inc; Domain location=698-720; Score=0.4; E_value=82; Accession=PF04508.4; Description=Viral A-type inclusion protein repeat
  Pfam annotation: Domain name=Pox_A_type_inc; Domain location=809-831; Score=10.9; E_value=2.4; Accession=PF04508.4; Description=Viral A -type inclusion protein repeat
  Pfam annotation: Domain name=Pox_A_type_inc; Domain location=887-909; Score=1.7; E_value=53; Accession=PF04508.4; Description=Viral A-type inclusion protein repeat
  Pfam annotation: Domain name=Pox_A_type_inc; Domain location=922-944; Score=0.3; E_value=86; Accession=PF04508.4; Description=Viral A-type inclusion protein repeat
  Pfam annotation: Domain name=TPR_MLP1_2; Domain location=514-765; Score=122.5; E_value=1.4e-33; Accession=PF07926.4; Description =TPRMLP1MLP2-like protein
  Pfam module annotation: Pfam domain module=Filament::M::M::M::M::M::M: :M::Myosin_tail_1::Pox_A_type_inc::Pox_A_type_inc::Pox_A_type _inc::Pox_A_type_inc::Pox_A_type_inc::Pox_A_type_inc::Pox_A_type _inc::TPR_MLP1_2; Domain ...
  Pfam module annotation: Pfam domain module=location=425-709::263 -283::330-350::481-501::622-642::691-711::873-893::926-946::222 -987::182-204::330-352::488-510::698-720::809-831::887-909::922 -944::514-765
DDLQKQXAVLLKEXCQDIQLRCGSSLPNVNNGAFSASIGSVLSNVEQNMKDNQIAFKDINGLVQQNVQLRNQVHMLSADLXKKDMELRESFQIELKKITDDAASRVEKVMKKSEEQAIMIESLHRSVAMYRKLCEEQQKTRSNVESVPSNLQDSDRTDLMVLFEGSQEVSKKAYEQVSERARSLDEELTKLRTELVSLRSERDKAVLEAGFARDRLNGFTVELEHQRKETNSISLRNAELMHLIVDYERRLREDSDSKQAFEENSRKISMEVSMLKHEKEILEKSEKRALDEVHDLTERVHRLQATLDTIHTTEEVRENARSMERRNHEEHIKRLERDWAELKKELQEQRDHVRVLTLDKKNTFDSCMKQVEDMRKELQSSLKAASDAESRAAIAEAKCSDLEAKLKSRKVIFRDAGRDISATSEENDELFQLKEELEKYKEEAQANKNYMVQYKEIAHSNEVALKQLESAHQDYKAEAEVGRKALEDEIAKLRDKLSDMEKSYVMKCEEAASAIESKEKQITSLMNEISVLRTDVSQRLPQVEKLEMELASSKSALDEQYKRWRTAQENYERQVILQSETIQELTNTSKQLSSLQHEITILRQTADAQKAENDALRTLGEQEKVGLLKEKDDALRKYNELNDQNKILHNQLESLHIRLAEKERSAAGLSSQRTDSHAEDDLHSVISYLRRSKEIAETEISLLKQEKSRLQIELESALKSAKEAQDLLRSQVDNARTLMLKDEEFKSLQLQVREINLLRESNIQLREENRHNFEECQKFRDEAQKAKMESERLQSLVLEKEVNAEICKKELEMQKAEIANLNQRISELVENSKGIDLNTYEGMKNELQNIKSTLRETSMELEXTKKLLSEKEVAIRNLEEKLAVSQSELDSREKKLNDVEASLKSEMDRLKKINFSIKRKLDNLIKEKEEVIKENQSLQKQMEDLKSSQKTMSENTLEQAIKEKDFRIQTLERTLEKERDDNKKEKANRKRNEKLQLNILQRVQQEKKQVEESIEKHKQACERGCICS

SEQ ID NO: 110689 - protein, 578 aa, Setaria italica
  misc_feature (25)..(25): Xaa can be any naturally occurring amino acid
  Transcript Sequence Number=SeqID_44715
  Gene Ontology: Mol. function=protein binding; Cellular component =chromosome; Biological process=chromosome organization and biogenesis
  Homolog annotation: Hit_ID=Q8GU56; Match level="QueryCoverage=100%, HitCoverage=48%, E-value=0.0, Identity=73%"; Hit description=SMC1 protein
  Pfam annotation: Domain name=EzrA; Domain location=98-522; Score= -396.5; E_value=0.1; Accession=PF06160.4; Description=Septation ring formation regulator, EzrA
  Pfam annotation: Domain name=Filament; Domain location=200-424; Score= -195.8; E_value=0.1; Accession=PF00038.13; Description=Intermediate filament protein
  Pfam module annotation: Pfam domain module=EzrA::Filament; Domain location=98-522::200-424
EDENTGKECIKCLRRKPLLLQVLNXIPLQSVRVKPIIEKLRTLGGSAQLVFDVIQFDRALEKAVLYAVGNTLVCDKLDEAKTLSWSGERYKVVTVDGILLTKSGTMTGGISGGMEARSNKWDDSRIESLKKKKNQLESEMSELGSPRELQRKELAISEKITGLEKKLQYLNVEHSNLTAKLLKVASERNNIEEEINRLEPEKEELEIRLAEKEAEVTKLEKKINEIVDKVYRDFSISVGVKNIREYEERQLKDAQALQERKLTLNTQMSKLKYQLEYEQKRDMQAPIVKLRETYESLEKELKGLQERESGAKVEAEEILTQMDELKAEAEDWKSKSDECEKVIDELKEQNGSIASTLAKLDRRVKSKEGQLLQLMSRQRDIHEKCELEQLKLPTVNDPMDTGPSSQEPVLDYSQLSEIYLQDMRPSERDKHEAVFKQKTGALLAEIERTAPNLKALDQYDALQRKEKEITEKFEATRKEEREISDKYNSIKQRRYELFMEAFDHISKGIDKIYKQLTKSHTHPLGGTAYLNLENEDEPFLHGIKYTAMPPTKRFRDMEQLSGGEKTVAALALLFAIHR

SEQ ID NO: 110690 - protein, 653 aa, Setaria italica
  Transcript Sequence Number=SeqID_44716
  Gene Ontology: Mol. function=microtubule motor activity; Cellular component=microtubule associated complex; Biological process =microtubule-based movement
  Homolog annotation: Hit_ID=B6SY02; Match level="QueryCoverage=63%, HitCoverage=56%, E-value=1e-88, Identity=44%"; Hit description =Kinesin-1
  Pfam annotation: Domain name=Kinesin; Domain location=271-587; Score =374.4; E_value=2e-109; Accession=PF00225.15; Description=Kinesin motor domain
KLLLMLNQGLPLQRLMMNILMVNLKRSCHNGVDNPNCELPSDIQKINIYDEDIEELKKYAKNGIAYFVLKLTPAKGRGGGFTRKMKNGSGSWVRANKINGNKCTIRIYKFNENSTYHRERRMMEFTLNNGPQDMVLCSVEWDCKTSKIKNDATKVRITRRCQEVETSQTEEVECFKQKLLEAEKKIQFFERKLEEADRTCLEQSNLEQKLEEAEKACLELRRHVTYIEDEKKSLKQNVIEIERLLLESEDLRKDLHNQMMALKGNMRVFCRVRPLAAKDNPNDQKLIIFPESLEYSGRGLQVVHNGHVVSHTYDRVFKDTCSQEVIFNEISELVRSALDGYKVTIFSYGQTGSGKTYTMIGKPDDKGMIPRALTEIFNKIGASIQWNFDVEASMFEIYNEKIYDLLDTSMKKNCDVRTDEHGRVMVSGLVQQPVRDEDDAAYLFKEALKHRSVGKTQMNENSSRSHFVFKLIISGYNKQSNHKIEGVLQMIDLAGSESVSKTTDVLDATRNETGNINKSLLALGQVFEAIPKGEFLPFRGSKLTHFLQNSFEGHSKVLLFVNISQDPMFVHATLGSLKFADKVRKCMVNSRVRAVQEKSMLHEDNEGHSVLPSTHKISKSLFKQKATEPKGQGAGKFGTSVKHPKHPISRFPT

SEQ ID NO: 110691 - protein, 482 aa, Setaria italica
  misc_feature (122)..(122): Xaa can be any naturally occurring amino acid
  Transcript Sequence Number=SeqID_44717
  Gene Ontology: Cellular component=plasma membrane; Biological process= ubiquitin-dependent protein catabolic process
  Homolog annotation: Hit_ID=B6U1N5; Match level="QueryCoverage=100%, HitCoverage=100%, E-value=0.0, Identity=85%"; Hit description=Tubby -like protein
  Pfam annotation: Domain name=F-box; Domain location=57-112; Score =29.5; E_value=1.3e-05; Accession=PF00646.25; Description=F-box domain
  Pfam annotation: Domain name=Tub; Domain location=125-476; Score =559.0; E_value=5.5e-165; Accession=PF01167.10; Description=Tub family
  Pfam module annotation: Pfam domain module=F-box::Tub; Domain location=57-112::125-476
MSFRSIVRDVRDGFGSLSRRSFEVTLASIYGLTGHHKGKTQSSSHELDDSPSIIRESRWASLPPELIRDIIRRLEADESTWPARKHVVCFAAVCRTWREMCKEIVLSPEFCGKLTFPVSLKXRQPGPREGNTMIQCFIKRNKSKSTYQLYLCLSNVVTSESGKFLLSARRHRKTTCTEYTISMDSGNTSRSSRTYIGKIRSNFLGTKFLIYDTQPPYNGAVVPPVGRTSRRFNSTKVSPKLPSVSYNIAQVSYELNVLGTRGPRRMRCSMHSIPASSVEPGGIVPGQPEQIVPRALEDSFRSTASFSQSFRSTTSLSKSIMDSSMDFNSARFSDIAGSGSSARFSGIGSSARISGIGSSARISGIASGRLDHDEDSEVKERPLVLRNKPPRWHEQLQCWCLNFRGRVTIASVKNFQLIAATTPPPAGAPTPSQPAPSDPDKVILQFGKVARDMFTMDYRYPLSAFQAFAICLSSFDTKLACE

SEQ ID NO: 110692 - protein, 1234 aa, Setaria italica
  misc_feature (787)..(787): Xaa can be any naturally occurring amino acid
  misc_feature (896)..(896): Xaa can be any naturally occurring amino acid
  Transcript Sequence Number=SeqID_44718
  Gene Ontology: Mol. function=protein binding; Cellular component =chromosome; Biological process=chromosome organization and biogenesis
  Homolog annotation: Hit_ID=Q8GU56; Match level="QueryCoverage=97%, HitCoverage=98%, E-value=0.0, Identity=76%"; Hit description=SMC1 protein
  Pfam annotation: Domain name=M; Domain location=183-203; Score=1.3; E_ value=99; Accession=PF02370.8; Description=M protein repeat
  Pfam annotation: Domain name=M; Domain location=425-445; Score=7.7; E_ value=14; Accession=PF02370.8; Description=M protein repeat
  Pfam annotation: Domain name=M; Domain location=722-742; Score=2.6; E_ value=66; Accession=PF02370.8; Description=M protein repeat
  Pfam annotation: Domain name=M; Domain location=764-784; Score=6.5; E_ value=20; Accession=PF02370.8; Description=M protein repeat
  Pfam annotation: Domain name=SMC_N; Domain location=24-1220; Score =304.1; E_value=3e-88; Accession=PF02463.11; Description=RecFRecNSMC N terminal domain
  Pfam annotation: Domain name=SMC_hinge; Domain location=531-648; Score=112.7; E_value=1.2e-30; Accession=PF06470.5; Description=SMC proteins Flexible Hinge Domain
  Pfam module annotation: Pfam domain module=M::M::M::M::SMC_N::SMC _hinge; Domain location=183-203::425-445::722-742::764-784::24 -1220::531-648
MAAAAAEDGRTSDIRSRGDGGGGRIHRLEVENFKSYKGTQTIGPFFDFTAIIGPNGAGKSNLMDAISFVLGVRSAHLRGAQLKDLIYALDDRDKEAKGRRASVRLVYRQPNQEELHFTRTITGAGGSEYRIDGRLVSWDDYNAKLRSLGILVKARNFLVFQGDVESIASKNPKELTALLEQISGSDELRREYDELEEQKARAEENSALVYQEKRTIVMERKQKKAQKEEAENHLRHQQDLKLLKTEHSLWQLYTIEKDREKMEAELAEDRESLQQVQEENQSAENELTAKKKEQSAFLKKMTLCEKSIAKKKLELDKKQPELLKLKEQISRLKSKIKSCKKEIDKKKDDSKKHLEEMRRLESALVDVRKALEELNEKGQDKSGKLQLADDQLQEYHRIKEDAGMKTAKLRDEKEVIDKKLNAYVEAKKNLEENMQQLHSREEELSSQERELQTRINKILHSIPKHENELAQLREEHNRIAKERQSSGSRYQTLKQRVDEIDTQLRELKADKHESERDARLKETVGSLKRLFPGVHGRMHELCRPSQKKYNLAVTVAMGKFMDAVVVEDENTGKECIKYLKEQRLPPQTFIPLQSVRVKPIIEKLRTLGGSAQLVFDVIQFDRALEKAVLYAVGNTLVCDKLDEAKTLSWSGERYKVVTVDGILLTKSGTMTGGISGVMEARSNKWDDSRIESLKKKKNQLESEMSELGSPRELQRKELAISEKITGLEKKLQYLNVEHSNLTAKLLKVASERNNIEEEINRLEPEKEELEIRLAKKEAEVTKLEKKXNEIVDKVYRDFSISVGVKNIREYEERQLKDAQALQERKLTLNTQMSKLKYQLEYEQKRDMQAPIVKLRETYESLEKELKGLQERESGAKVEAEEILTQMDELKAEAEDXWKSKSDECEKVIDELKEQNGSIASTLAKLDRQVKSKEGQLLQLMSRQRDIYEKCELEQLKLPTVNDPMDTGPSSQEPVLDYSQLSEIYLQDMRPSERDKHEAVFKQKTGALLAEIERTAPNLKALDQYDALQRKEKEITEKFEATRKEEREISDKYNSIKQRRYELFMEAFDHISKGIDKIYKQLTKSHTHPLGGTAYLNLENEDEPFLHGIKYTAMPPTKRFRDMEQLSGGEKTVAALALLFAIHSFRPSPFFILDEVDAALDNLNVAKVAGFIRSKSCERVADEQGRNGECGFQSIVISLKDSFYDKAEALVGVYRDSERSCSRTLTFDLTKYREA

SEQ ID NO: 110693 - protein, 238 aa, Setaria italica
  misc_feature (161)..(161): Xaa can be any naturally occurring amino acid
  Transcript Sequence Number=SeqID_44719
  Homolog annotation: Hit_ID=Q7RGM8; Match level="QueryCoverage=69%, HitCoverage=10%, E-value=1e-14, Identity=33%"; Hit description =Rhoptry protein, putative
  Pfam annotation: Domain name=M; Domain location=143-163; Score=3.7; E_ value=47; Accession=PF02370.8; Description=M protein repeat
  Pfam annotation: Domain name=M; Domain location=164-184; Score=9.1; E_ value=9; Accession=PF02370.8; Description=M protein repeat
  Pfam annotation: Domain name=M; Domain location=59-79; Score=7.1; E _value=17; Accession=PF02370.8; Description=M protein repeat
  Pfam module annotation: Pfam domain module=M::M::M; Domain location =143-163::164-184::59-79
RPEGSTRCGCEELGYCEANQKLRVELAQKAKEMQCLRKQNEGMRKQNEDLQAKNDGMMKQNKDLQAKNDVLVKENEELRSNIDGISKQNLELQIKNGGLTKWNEELLAKNGRLTKQNEELKAKDVDLVKQNEAVQANNDRMRKRNGELHAENAGLTKRNEXLQVKNEGLTESNEKLQAKNDRLTKWIGELEDKNDDLEDLNGTLVSKERQRTMSYGKPEKSLHGFGGRVKWPASYWDQ

SEQ ID NO: 110694 - protein, 51 aa, Setaria italica
  Transcript Sequence Number=SeqID_44720
  Gene Ontology: Mol. function=ubiquitin-protein ligase activity; Cellular component=ubiquitin ligase complex; Biological process =ubiquitin-dependent protein catabolic process
  Homolog annotation: Hit_ID=B6SP20; Match level="QueryCoverage=100%, HitCoverage=11%, E-value=2e-17, Identity=80%"; Hit description=U-box domain containing protein
EGGLARLLLLMQSGCSAAARQMASELLKIFKVSGKSCLAGYDSKNSHIMPF

SEQ ID NO: 110695 - protein, 44 aa, Setaria italica
  Transcript Sequence Number=SeqID_44721
EPFYSNIIPSHIPYSHPGSSSSLCLVITNCIPFKVYLVAYHSAL

SEQ ID NO: 110696 - protein, 146 aa, Setaria italica
  misc_feature (33)..(33): Xaa can be any naturally occurring amino acid
  Transcript Sequence Number=SeqID_44722
  Gene Ontology: Mol. function=DNA binding; Cellular component=nucleus; Biological process=regulation of transcription
  Homolog annotation: Hit_ID=B4G152; Match level="QueryCoverage=99%, HitCoverage=26%, E-value=7e-54, Identity=74%"; Hit description=Myb -like DNA-binding domain containing protein
  Subcellular localization annotation: CTP_CleavageSite=32; ConfidenceScore=5.23e-01
SPTIGKVSSPLTVDSILKTAADSFPCTPSILRXRKRDKSTPTSDNELKMGGVNTDSFYTPNGKGASTNTPGSFKTALLSLGPLDGLLTSVRSSDASPPYQIRSKRMAAMKSVEKQLDFSADGLDTSGSEILNSPCHNSQGANSNRT

SEQ ID NO: 110697 - protein, 59 aa, Setaria italica
  Transcript Sequence Number=SeqID_44723
GKHLTIPGTKMAMMRQTRILPVPFILTIWIFFPLLLPAPMICKVAADGGYWLGWCPLVA

SEQ ID NO: 110698 - protein, 96 aa, Setaria italica
  Transcript Sequence Number=SeqID_44724
GAAGCVGRCPAMAWRWRSLAVADFFFHSFVSQNPVGEQFICDFVLPLNACKLARCPQECTACSIRANVVVIHAFVCNLQNSVKLYKINQTGFVPKL

SEQ ID NO: 110699 - protein, 340 aa, Setaria italica
  Transcript Sequence Number=SeqID_44725
  Gene Ontology: Mol. function=zinc ion binding; Cellular component =nucleus
  Homolog annotation: Hit_ID=B9RCI3; Match level="QueryCoverage=67%, HitCoverage=26%, E-value=1e-53, Identity=47%"; Hit description=Sumo ligase, putative
  Pfam annotation: Domain name=zf-MIZ; Domain location=93-142; Score =108.1; E_value=2.9e-29; Accession=PF02891.12; Description=MIZ zinc finger
EPLVKLHFLLIGQLSSVHIKQEPGPQFPTDITKMLKYGANIIQAAGYFNANYIIAVAFVNNSTSFSAPKLEDYAQPMTVYPADSDVLEGPSRVSLNCPISFKRIKTPIKGRLCKHYQCFDYDNYMEMNSRKPNWRCPFCNTPSNFTDLRIDQKMAKILEENGNDVIDVLVFADGSWKAAPAHDEKSDRHRGDAVQQNGDTIETDSSSSGVIDLINGNGDGDLPMDWTSTSEDTKPQLNSQDLSVSDYLPDFPMADQTEDLYLGDGSNGGSNMAFTSRQNLLLPSTSGLGSSSFGTLESILPQNVLRPVITDAVSPSLEASSSTSSMQHVSQETHCCKLVV

SEQ ID NO: 110700 - protein, 351 aa, Setaria italica
  misc_feature (51)..(51): Xaa can be any naturally occurring amino acid
  Transcript Sequence Number=SeqID_44726
  Gene Ontology: Mol. function=zinc ion binding
  Homolog annotation: Hit_ID=B9RCI3; Match level="QueryCoverage=85%, HitCoverage=35%, E-value=1e-75, Identity=44%"; Hit description=Sumo ligase, putative
SAAAPAPQPPPQPQAQQPHNDQQQRALTVNAIRLKAIGDRIRAHLDGVAAXPINEFAHLVYAFARGIDFAVSAGDIPPMAGDIPGILRKVYELRRETFIQSSLMVLVISCKNACSSKWFQPADSRDILSMANELSGNFCTSSGQAASDSTVLEIISQIMPRYYPRLKFERLIISMEAKVGYDILMADFFIERNLPRDEKIRLIVVQKENLDASTCVTSPPHVSFLVNGKGVDKRTNVSMEPGPQFPTDITKMLKYGANIIQAAGYFNANYIIAVAFVNNSTSFSAPKLEDYAQPMTVYPADSDVLEGPSRVSLNCPISFKRIKLLLRAPLQTLSGTYLILPFYIYSVFFRH

SEQ ID NO: 110701 - protein, 54 aa, Setaria italica
  Transcript Sequence Number=SeqID_44727
EIFLASIFKNNGSHWKLALCKCYIGEFLCHYIFSLCCRNGVSFHKQSVTCKNIH

SEQ ID NO: 110702 - protein, 66 aa, Setaria italica
  Transcript Sequence Number=SeqID_44728
  Gene Ontology: Mol. function=transferase activity, transferring glycosyl groups; Biological process=nucleoside metabolic process
  Homolog annotation: Hit_ID=B9SV47; Match level="QueryCoverage=100%, HitCoverage=27%, E-value=9e-26, Identity=84%"; Hit description =Uracil phosphoribosyltransferase, putative
DLLIERGVTSKQIKVVSAVAAPPALQKLNNKFPGLHVYTGIIDPEVNEKGFIVPGLGDAGDRSFAT

SEQ ID NO: 110703 - protein, 146 aa, Setaria italica
  Transcript Sequence Number=SeqID_44729
TTAMENSPLTCCPVSLYHKSPSCLPATSEPVRACRFDDGRQHARNKFINVTSIPHQSSLSHVRLRVRFICGPRKARLGFSARQCFSSFVLSVGGAPNWRARAGIQRVGGEGPRSNGWIWAWPRCCSSPLLPVFAPSSRSGRRGERK

SEQ ID NO: 110704 - protein, 406 aa, Setaria italica
  Transcript Sequence Number=SeqID_44730
  Gene Ontology: Mol. function=protein serine/threonine phosphatase activity; Cellular component=protein serine/threonine phosphatase complex; Biological process=protein amino acid dephosphorylation
  Homolog annotation: Hit_ID=Q5Z8P0; Match level="QueryCoverage=95%, HitCoverage=98%, E-value=0.0, Identity=94%"; Hit description =Probable protein phosphatase 2C 60
  Pfam annotation: Domain name=PP2C; Domain location=67-345; Score =100.8; E_value=4.8e-27; Accession=PF00481.13; Description=Protein phosphatase 2C
LTKKEYEDGVVPTDQLTNELVTLMNLLRACWRPSSNRHARTGSDVAGRQDGLLWYKDTGQHVNGEFSMAVVQANNLLEDQCQIESGPLSFLDSGPYGTFVGVYDGHGGPETACYINDHLFQNLKRFASEQNSMSADVLKKAYEATEDGFFSVVTKQWPVKPQIAAVGSCCLVGVICGGMLYVANVGDSRVVLGRHVKATGEVLAVQLSAEHNVSIESVRKELQSMHPEDRHIVVLKHNVWRVKGLIQVCRSIGDAYLKKQEFNKEPLYAKFRLREPFSKPILSSEPSISVQPLQPHDQFLIFASDGLWEHLTNQEAVDIVQSSPRNGCARKLIRAALQEAAKKREMRYSDLKKIERGVRRHFHDDITVIVVFLDSSLVSRASTHRGPALSLRGGGASMRSNTLTPT

SEQ ID NO: 110705 - protein, 120 aa, Setaria italica
  Transcript Sequence Number=SeqID_44731
  Gene Ontology: Mol. function=ATP-dependent helicase activity; Cellular component=intracellular; Biological process=DNA recombination
  Homolog annotation: Hit_ID=Q8W028; Match level="QueryCoverage=100%, HitCoverage=13%, E-value=8e-25, Identity=47%"; Hit description =Helicase
QRLRGGDIKVLFVSPERFLNEEFLLIFKDALPISLVAIDEAHCISEWSHNFRPSYLRLRASLLRRKLNVQCILAMTATATTQTLEEIVNALEIPSDNLIKTSQIRDNLQLSISTSDNRLK

SEQ ID NO: 110706 - protein, 101 aa, Setaria italica
  Transcript Sequence Number=SeqID_44732
LEYRLEDCIVHECHEWESVNGVSCFLLQYEVPEAKNIQVDLSETCRFVGPDWVFFLSWGELVGILRLFLMHCAWIAWNLTYVQGDLVAVILLCHAAYHPGT

SEQ ID NO: 110707 - protein, 57 aa, Setaria italica
  misc_feature (46)..(57): Xaa can be any naturally occurring amino acid
  Transcript Sequence Number=SeqID_44733
EDECACVQLRRSQIQAPHFVSKFMNLLRCTGPFSNNKAASLIPKKXXXXXXXXXXXX

SEQ ID NO: 110708 - protein, 58 aa, Setaria italica
  Transcript Sequence Number=SeqID_44734
MGKKGKWFSAVKKVFSPESKEKKEEKLRKKLAASNPIPLDLTPSASLEVNVSVPPPPA

SEQ ID NO: 110709 - protein, 96 aa, Setaria italica
  Transcript Sequence Number=SeqID_44735
  Gene Ontology: Cellular component=nucleus
  Homolog annotation: Hit_ID=B4F9U2; Match level="QueryCoverage=84%, HitCoverage=17%, E-value=2e-29, Identity=82%"; Hit description=IQD1
  Subcellular localization annotation: CTP_CleavageSite=48; ConfidenceScore=5.14e-01
ARRALRALRGLVRLKSLVEGDSVKRQSASTLRCMQTLSRVQSQIRSRRAKMSEENQALQRQLLLKQELENFRMGENWDDSTQSKEQIEASLISRQV

SEQ ID NO: 110710 - protein, 210 aa, Setaria italica
  misc_feature (118)..(118): Xaa can be any naturally occurring amino acid
  Transcript Sequence Number=SeqID_44736
  Gene Ontology: Cellular component=nucleus
  Homolog annotation: Hit_ID=B4F9U2; Match level="QueryCoverage=91%, HitCoverage=41%, E-value=4e-38, Identity=50%"; Hit description=IQD1
MGKKGKWFGAVKKVFSPESKEKKEERQRRKSAASNPTPLDLTPSTSLEVNVSVPPPPAPPVLHQTEEIRVPEAEQEQRKDVTVEEAPAAPAQALVQPPGVPSEELAAIKIQTAFHCNXARRALRALRGLVRLKSLVEGDSVKRQSASTLRCMQTLSRVQSQIRSRRAKMSEENQALQRQLLLKQELENFRVCKPSQSFTVKIFIVLVLFN

SEQ ID NO: 110711 - protein, 333 aa, Setaria italica
  misc_feature (111)..(111): Xaa can be any naturally occurring amino acid
  misc_feature (277)..(277): Xaa can be any naturally occurring amino acid
  misc_feature (310)..(310): Xaa can be any naturally occurring amino acid
  Transcript Sequence Number=SeqID_44737
  Gene Ontology: Cellular component=nucleus
  Homolog annotation: Hit_ID=B4F9U2; Match level="QueryCoverage=96%, HitCoverage=68%, E-value=1e-133, Identity=77%"; Hit description=IQD1
VVLSLASTLRCMQTLARVQSQIRSRRLKMSEENQALQRQLLLKQELENFRMGEQWDDSTQSKEQIEASLINKQEAAVRRERALAYAFSHQWKSTSRSANPMFVDPNNLQWXWSWLERWMAAKPWEGRSGTDKESNIDRGSVKSMTLNLGEGEITKAFNRRDSKADKSSPATPKLIRPASRQSPSTPSPRVTPIFARKKSATPKNGPLLVDDDARSVFSVQSERPRRHSIATSAARDSDSVAGSPSIPSYMVPTESARAKSRLQGSALTNGAETPEKXGSAGPVKKKLSFQAGMSSPSPMRRHSGPPKVEXVVNIVEPTEAEALVINGGNKCFI

SEQ ID NO: 110712 - protein, 514 aa, Setaria italica
  Transcript Sequence Number=SeqID_44738
  Gene Ontology: Cellular component=plasma membrane
  Homolog annotation: Hit_ID=B4F9U2; Match level="QueryCoverage=90%, HitCoverage=98%, E-value=0.0, Identity=74%"; Hit description=IQD1
  Pfam annotation: Domain name=IQ; Domain location=147-167; Score=31.2; E_value=4.2e-06; Accession=PF00612.19; Description=IQ calmodulin -binding motif
RIPTPSPPAPAGSAPTVLHPLAPLLISLLVLRLFLAEGFGVGVHGKKGKWFSAVKKVFSPESKEKKEERQRRKSAASNPTPLDLTPSTSLEVNVSVPPPPAPPVLHQTEEIRVPEAEQEQRKDVTVEEAPAAPAQALVQPPGVPSEELAAIKIQTAFRGYLARRALRALRGLVRLKSLVEGDSVKRQSASTLRCMQTLSRVQSQIRSRRAKMSEENQALQRQLLLKQELENFRMGENWDDSTQSKEQIEASLISRQEAAIRRERALAYAFSHQWKSTSRSVNAMFVDPNNLQWGWSWLERWMAAKPWEGRNGADKESNIDRGSVKSMSLNLGEGEITKAFNRRDLKPEKPSPPTPKLTRPASRQSPSTPSAKVAPLPARRKSATPKNGLSQVDDDARSVFSVQSERPRRHSIATSTVRDDESLASSPSLPSYMVPTESARAKSRLQGSALTNGAETPEKGGSAGPVKKRLSFQGGTAAASPMRRHSGPPKVESAVKDIVAPPQPEALVINGGSK

SEQ ID NO: 110713 - protein, 618 aa, Setaria italica
  misc_feature (171)..(171): Xaa can be any naturally occurring amino acid
  misc_feature (208)..(208): Xaa can be any naturally occurring amino acid
  Transcript Sequence Number=SeqID_44739
  Gene Ontology: Mol. function=hydrolase activity, hydrolyzing O -glycosyl compounds; Biological process=carbohydrate metabolic process
  Homolog annotation: Hit_ID=B6UFP5; Match level="QueryCoverage=99%, HitCoverage=76%, E-value=0.0, Identity=88%"; Hit description =Isoamylase-type starch debranching enzyme ISO2
  Pfam annotation: Domain name=Alpha-amylase; Domain location=109-481; Score=-92.5; E_value=0.00043; Accession=PF00128.16; Description =Alpha amylase, catalytic domain
GGDEPALEIELDPYVHRTGDVWHVLLESVEGYASYGFRTGLFALFGIDRPLLDPYAKVIGNFVPDDTVNDEGLAVPSVRCLASLVNAPSYNWGRDKHPSLPLEKLVVYRANVALFTKDKSSGLPENVAGTFSGLAAKVEHFKSLGVNAVLLEPVFPFHQVKGPYFPYHFFXPMNLYSSERSSLSAIRSMKDMVKTMHRHGIEVLLEVXFTHTAEGGAECQMISIHGIDGSSYYIADGIVGCKASVLNCNHPVTQRLILDSLRHWVLDFHVDGFCFINAPFLVRGPGGEGLSRPPLLEAIAFDPVLSKTKIIADPWSPLDISNVQFPFPHWKRWAEMNTRFSMDVRKFLKGEALISDLATRLCGSGDLFSSRGPAFSFNYVSRNSGLTLVDLVSFSSDELGSEFSWNCGEEGPSESNAVLQTRLRQIRNFLFILFVSLGIPVLNMGDECGHSTAGSTSYEDRGPLNWKALKTIFVKEVTGFISFLSALRSRRADIFQRREFLKLENIHWYGSNLSEPQWEDPTSNFLCMHINPELGENTPDSVRGDLYICFNANEESVSATLPALAEGSMWLRLVDTSLAFPGFFSSESNPKVHQVPGFSSYQVKAHSCVLFELKRVLS

SEQ ID NO: 110714 - protein, 182 aa, Setaria italica
  misc_feature (12)..(12): Xaa can be any naturally occurring amino acid
  misc_feature (28)..(28): Xaa can be any naturally occurring amino acid
  misc_feature (154)..(154): Xaa can be any naturally occurring amino acid
  misc_feature (165)..(165): Xaa can be any naturally occurring amino acid
  Transcript Sequence Number=SeqID_44740
  Gene Ontology: Mol. function=protein tyrosine kinase activity; Cellular component=plasma membrane; Biological process=protein amino acid phosphorylation
  Homolog annotation: Hit_ID=B9SB23; Match level="QueryCoverage=99%, HitCoverage=16%, E-value=9e-42, Identity=50%"; Hit description =Protein binding protein, putative
  Pfam annotation: Domain name=LRR_1; Domain location=118-141; Score =14.2; E_value=0.55; Accession=PF00560.25; Description=Leucine Rich Repeat
  Pfam annotation: Domain name=LRR_1; Domain location=142-167; Score =5.1; E_value=32; Accession=PF00560.25; Description=Leucine Rich Repeat
  Pfam annotation: Domain name=LRR_1; Domain location=168-182; Score =4.4; E_value=44; Accession=PF00560.25; Description=Leucine Rich Repeat
  Pfam annotation: Domain name=LRR_1; Domain location=25-43; Score=5.3; E_value=29; Accession=PF00560.25; Description=Leucine Rich Repeat
  Pfam annotation: Domain name=LRR_1; Domain location=46-67; Score=5.1; E_value=32; Accession=PF00560.25; Description=Leucine Rich Repeat
  Pfam annotation: Domain name=LRR_1; Domain location=70-93; Score =14.1; E_value=0.59; Accession=PF00560.25; Description=Leucine Rich Repeat
  Pfam annotation: Domain name=LRR_1; Domain location=94-117; Score =12.0; E_value=1.5; Accession=PF00560.25; Description=Leucine Rich Repeat
  Pfam module annotation: Pfam domain module=LRR_1::LRR_1::LRR_1::LRR _1::LRR_1::LRR_1::LRR_1; Domain location=118-141::142-167::168 -182::25-43::46-67::70-93::94-117
SLVLSELDLSAXNLTGHINMITSTTLQXLNLSSNALFGDLPLLAGSCTVLDLSNNKFRGNLSVIAKWTSDLEYVDLSQNNLTGTIPDVSSQFLRLNYLNLSHNGLSDTIPEAVVQYPKLTVLDLSSNQLRGPIPADLLTSSMLQELYIQNNMLXGGLSFPGSSSXNLSLQVLDISGNHFNGS

SEQ ID NO: 110715 - protein, 132 aa, Setaria italica
  Transcript Sequence Number=SeqID_44741
  Gene Ontology: Mol. function=protein binding
NKLVKKGQFLQSFNVQACPCNVRAKKPQNIKGEIFTKIQRRSPYLDVCQCEAASIFPMMKLQPKQRRVQISTKNRYPNGLRHLLSVTNSMFITDDAFVRCLTDLNYSLICLEECQLQRCHQITEVFRMNSEA

SEQ ID NO: 110716 - protein, 73 aa, Setaria italica
  misc_feature (34)..(34): Xaa can be any naturally occurring amino acid
  Transcript Sequence Number=SeqID_44742
  Gene Ontology: Mol. function=electron carrier activity; Cellular component=chloroplast
  Homolog annotation: Hit_ID=B6TIZ9; Match level="QueryCoverage=100%, HitCoverage=38%, E-value=1e-33, Identity=93%"; Hit description =Cytochrome c6
KDLERNGVVTEEELYNITYYGKGRMPGFGEKCTXPRGQCTFGPRLSEDDIKLLASFVKSQAENGWPKIEGDGD

SEQ ID NO: 110717 - protein, 68 aa, Setaria italica
  Transcript Sequence Number=SeqID_44743
IFELRIDTVLENVRWECKIFCWLHTGIAYVYHSVKIRQLNLVKMVLLFCEKKLKYLSHLQLVSPHRSS

SEQ ID NO: 110718 - protein, 54 aa, Setaria italica
  Transcript Sequence Number=SeqID_44744
YSSLRVLRIKNCDGIKLLPPSLQNRLGYLETKYLDARYEEPTWKRPIRKLVCAK

SEQ ID NO: 110719 - protein, 96 aa, Setaria italica
  Transcript Sequence Number=SeqID_44745
FSIPLQHCQEKKSVLKEQVNNNEKIQYLIHRTYTGESSALSVHIKQQLGQLVEQQHEYVGLLVYSMASILCGQSVMYVDKQIIKWKCCLCFACAGG

SEQ ID NO: 110720 - protein, 134 aa, Setaria italica
  Transcript Sequence Number=SeqID_44746
LRTNLETFNQEAGVLEIVDQGLTKESYLRGIFAKISPRIVPDLQKMDYCDSCLQILDCKLKNLAHRAACSSLLSFFKPKTFILSRNEVPDCKQKNLAYRAAGSSRLSLFFLLNYDVFAFVSASASSTSETQAAL

SEQ ID NO: 110721 - protein, 188 aa, Setaria italica
  Transcript Sequence Number=SeqID_44747
  Gene Ontology: Mol. function=nucleotide binding; Cellular component =nucleus; Biological process=defense response
  Homolog annotation: Hit_ID=Q852D5; Match level="QueryCoverage=81%, HitCoverage=12%, E-value=1e-32, Identity=50%"; Hit description =Powdery mildew resistance protein PM3b, putative, expressed
  Pfam annotation: Domain name=LRR_1; Domain location=116-135; Score =8.2; E_value=8.1; Accession=PF00560.25; Description=Leucine Rich Repeat
  Pfam annotation: Domain name=LRR_1; Domain location=71-93; Score =10.4; E_value=3.1; Accession=PF00560.25; Description=Leucine Rich Repeat
  Pfam module annotation: Pfam domain module=LRR_1::LRR_1; Domain location=116-135::71-93
DQEDTRLVSGEGVVRPNTSSLIPGSSSSEATTSTAVLKLSSAANHPFLPCLESLIIWTCDGLSEVANLPPSIKTLHISNCGKLQSLSGDLRLLEKLTLYGCERLVSLPDGPQAYSSLRVLQIENCDGIKLLPPNLQSRLGYLEKKDLDARYEGNLQFLVLLTNDQELNCCCLKCNSVLKHSVSYYKMW

SEQ ID NO: 110722 - protein, 64 aa, Setaria italica
  Transcript Sequence Number=SeqID_44748
MHTLLMKGDREKLLITIFSFLKRRWILETGISRFPWQHSLEFSRGVLVCWTKIFQQHSSRPLSV

SEQ ID NO: 110723 - protein, 111 aa, Setaria italica
  Transcript Sequence Number=SeqID_44749
  Gene Ontology: Mol. function=nucleotidyltransferase activity; Cellular component=cytoplasm; Biological process=tRNA modification
  Homolog annotation: Hit_ID=Q75KT6; Match level="QueryCoverage=99%, HitCoverage=15%, E-value=1e-13, Identity=43%"; Hit description =Putative tRNAHis guanylyltransferase
VYREKVETTVKIDDYGNPIKRPRLKVTVAHIDIIGPEFWENHQHILREGKFMHEFVKKFGNDRMLPPCNWIVVRINGCQFDQFSTIHSFDKPNDETALRLMDASASLMMEQ

SEQ ID NO: 110724 - protein, 48 aa, Setaria italica
  Transcript Sequence Number=SeqID_44750
LITYHLSLKSSTELFFGLYIRAQLATILPFLYLLINKPYRSLLNIKAH

SEQ ID NO: 110725 - protein, 175 aa, Setaria italica
  misc_feature (32)..(32): Xaa can be any naturally occurring amino acid
  Transcript Sequence Number=SeqID_44751
  Gene Ontology: Mol. function=triacylglycerol lipase activity; Biological process=lipid metabolic process
  Homolog annotation: Hit_ID=Q9MA47; Match level="QueryCoverage=87%, HitCoverage=14%, E-value=2e-40, Identity=53%"; Hit description =T20M3.5 protein
MCAIIKDVLAEGSLKQCFYRKNSEQQGVEAHXLLIVFLVSMWVAIVVQCVTGSDVLRWRSFYASHDIAWRAHYREVFDHGIREVLCCLGRVKYSSVLEDDDICVVAQLLGDLMAYRASGTGHLELVAGLSLLQKSKLSTVTSKELVEAPQDLIQEAVLFHPFAEAAYTGPLLDFG

SEQ ID NO: 110726 - protein, 563 aa, Setaria italica
  Transcript Sequence Number=SeqID_44752
  Gene Ontology: Mol. function=mannosyl-oligosaccharide 1,2-alpha -mannosidase activity; Cellular component=membrane
  Homolog annotation: Hit_ID=B6SH10; Match level="QueryCoverage=88%, HitCoverage=77%, E-value=0.0, Identity=87%"; Hit description=ER degradation-enhancing alpha-mannosidase-like 1
  Pfam annotation: Domain name=Glyco_hydro_47; Domain location=1-368; Score=334.1; E_value=2.7e-97; Accession=PF01532.12; Description =Glycosyl hydrolase family 47
MPLLNRNGSTRWQRSLLLLSALSHGILSLFPHMFVLSHGMRIQSYDDQLLNLAADLAQRLLPAFDTPTGIPFGSVNLKYGVDENESKITSTAGGGTLTLEFGILSRLTNNTVFERVTKNSVRGIWARRTKLNLVGAHINVFTGEWTQKDAGIGTSIDSFYEYLLKAYLLFGDEEYLYIFQEAYKAAMHYLHHDPWYVEVNMNSGATVWPLFNSLQAFWPGLQVLAGDVDPAIRTHAAFFSVWKKYGFTPEGFNLATSTVQNGQRSYPLRPELIESTYWLFKATRDYRYLDVGRDILASLQYGARCPCGYCHISDVETHKQDDHMESFFLAETVKYLWLLFDLAAGPDNIVENGPYKYIFSTEGHLLPVTPEIVLVDEHCSYFGAFCNGGADRGYGISASSMKHKKANYTHLDDIQTPSSHYSASNMFATRGYIKGVCPGLTHAQKLGISYSDEEGNVIEQTSEGHEHHDESAIESSVRTQSSNVILISHPVASQQDQALESSSGNGDHADIVVTADSDSISHDNNDGSLGANTEELTEDTERTSKHSEDEDIAQNLNLKEDIS

SEQ ID NO: 110727 - protein, 140 aa, Setaria italica
  misc_feature (45)..(45): Xaa can be any naturally occurring amino acid
  misc_feature (104)..(104): Xaa can be any naturally occurring amino acid
  misc_feature (112)..(112): Xaa can be any naturally occurring amino acid
  Transcript Sequence Number=SeqID_44753
RQLSRADIAHYLGIPEADVSLHRLYYPGIEPPHHAHDLVFPTDEXITPLFVQPFLPGTPRTPDRLTPEAYVVHNALKRSLLYKVGNAKSITRLQQWLLHIMTHXPFDIIDLXLCEVEDAFMDGMGMNHQQPYAHWISWLL

SEQ ID NO: 110728 - protein, 94 aa, Setaria italica
  Transcript Sequence Number=SeqID_44754
LALHYTFPTLVEPLLKLLLRTNQRCGGSTRLGGVISVHVLGQLPVESPCLLKIRCDNNKFFLFGLKDYRSCNNNILSLHYDIDCDINKKKNQKK

SEQ ID NO: 110729 - protein, 119 aa, Setaria italica
  Transcript Sequence Number=SeqID_44755
  Gene Ontology: Mol. function=protein serine/threonine kinase activity; Biological process=protein amino acid phosphorylation
  Homolog annotation: Hit_ID=Q8S5G8; Match level="QueryCoverage=57%, HitCoverage=6%, E-value=7e-17, Identity=65%"; Hit description =Leucine Rich Repeat family protein
  Pfam annotation: Domain name=LRRNT_2; Domain location=63-102; Score =42.5; E_value=1.7e-09; Accession=PF08263.4; Description=Leucine rich repeat N-terminal domain
  Subcellular localization annotation: CTP_CleavageSite=26; ConfidenceScore=5.18e-01
MSMIYFTSILIISSGTYPVTKFSFVQCSSVPEGKMFPVLKLLILPHLLLLAPTSCTQALLSRNETDQDALLALKAGLSLQSDSLASWEISTDFCQWIGIICSHRHKHRVSALNLSSTGL

SEQ ID NO: 110730 - protein, 46 aa, Setaria italica
  Transcript Sequence Number=SeqID_44756
ILTCLSWVSVTLQQTLPPPAETKTRSLKEKAKRLQKNFETLYLNFL

SEQ ID NO: 110731 - protein, 204 aa, Setaria italica
  Transcript Sequence Number=SeqID_44757
  Gene Ontology: Mol. function=catalytic activity; Biological process =metabolic process
  Homolog annotation: Hit_ID=B9S9I9; Match level="QueryCoverage=90%, HitCoverage=98%, E-value=3e-74, Identity=68%"; Hit description =Magnesium-dependent phosphatase, putative
PLLPPASDRRLSKERRAAMGDERVKAEALQILGLFQVLPRLVVFDLDYTLWPFYCECRSKRDSPSLFRHARGIMYALKEKGIDMAIASRSPTPDIAKVFIDKLELQSMFVAQEIFSSWTHKTEHFQKIQRKTGIPYKSMLFFDDEDRNIETVSKMGVTSVLVENGVNLDMFKLGLSNFATNFAASSRNQDEKPQGESKAFKKEL

SEQ ID NO: 110732 - protein, 147 aa, Setaria italica
  misc_feature (142)..(142): Xaa can be any naturally occurring amino acid
  Transcript Sequence Number=SeqID_44758
  Gene Ontology: Mol. function=2 iron, 2 sulfur cluster binding; Cellular component=peroxisome; Biological process=oxidation reduction
  Homolog annotation: Hit_ID=O23887; Match level="QueryCoverage=100%, HitCoverage=10%, E-value=7e-71, Identity=87%"; Hit description =Aldehyde oxidase
GALEFDTKLCKTNVSSKSSMRGPGDVQGSFIAEAIIEHVASALSVDTNTIRRKNLHDFESLAVFYEESAGEPSTYSLVSMFDKLALSPDYQHRAEMIELFNNSNKWKKRGICCVPCTYEVSLRPTPGKVSIMTDGSIAVEVXGIEIG

SEQ ID NO: 110733 - protein, 74 aa, Setaria italica
  misc_feature (63)..(63): Xaa can be any naturally occurring amino acid
  Transcript Sequence Number=SeqID_44759
  Subcellular localization annotation: CTP_CleavageSite=39; ConfidenceScore=5.35e-01
MSSLAAPPAAPPPERVRLLVAAPPSRARPPGRGLHCAVRGTAGGGPGAGCGRRQLVLQRCSPXGESRVAGDGGV

SEQ ID NO: 110734 - protein, 58 aa, Setaria italica
  Transcript Sequence Number=SeqID_44760
SIVYCNPSILVQWPMIFSLEKDETNMLLYSSYGFVQDIFIIKQSYLSFQHSRGEEVMN

SEQ ID NO: 110735 - protein, 111 aa, Setaria italica
  misc_feature (69)..(69): Xaa can be any naturally occurring amino acid
  Transcript Sequence Number=SeqID_44761
  Homolog annotation: Hit_ID=Q9SA06; Match level="QueryCoverage=85%, HitCoverage=30%, E-value=3e-20, Identity=54%"; Hit description =F28K20.6 protein
  Subcellular localization annotation: CTP_CleavageSite=20; ConfidenceScore=5.03e-01
MELASGDLAALGAAELVRVSASIPRAAPRTFALLTACLVFPLSFAVLAHSLFTHPVLLRIQRASSGADXAQWLRLFAYQFLYLIVLFTFSLLSTAAAVFTVASLYAAKPAS

SEQ ID NO: 110736 - protein, 212 aa, Setaria italica
  Transcript Sequence Number=SeqID_44762
VGGGVKRGLEGGREWEREMGLEERRRREKERGWFLGFVERFLDADVAAAAPWDRERAARMLPQLKRVNDWLGEIGKRSEAPPPTLPDADGEAAAASTAPVAANGGLGVPEETIERLRKKIYEYLLTNVDSAAAMLGGGGGPTAPTNGRRADTWMAGSSVKFDWAKKWAWLANLGFLLFLYWAFVIFSCFRSFFEGFITGKRKGDEKLTCIYH

SEQ ID NO: 110737 - protein, 98 aa, Setaria italica
  Transcript Sequence Number=SeqID_44763
  Gene Ontology: Mol. function=phosphatidylinositol binding; Cellular component=clathrin coat; Biological process=clathrin coat assembly
  Subcellular localization annotation: CTP_CleavageSite=39; ConfidenceScore=5.21e-01
LQVLIIQTTSTATQQDKGFDPTGWELALVATPSTNTNPLAMESSLVGFLNLSLRISTFWWLPQFPKSRFGNCYAATYCFLASLSSSYTSTVMVNSVAV

SEQ ID NO: 110738 - protein, 497 aa, Setaria italica
  Transcript Sequence Number=SeqID_44764
  Gene Ontology: Mol. function=phosphatidylinositol binding; Cellular component=clathrin coat; Biological process=clathrin coat assembly
  Homolog annotation: Hit_ID=B9SP68; Match level="QueryCoverage=99%, HitCoverage=87%, E-value=1e-151, Identity=57%"; Hit description =Clathrin assembly protein, putative
  Pfam annotation: Domain name=ANTH; Domain location=1-242; Score =293.6; E_value=4.2e-85; Accession=PF07651.8; Description=ANTH domain
  Pfam annotation: Domain name=ENTH; Domain location=1-89; Score=-35.5; E_value=0.047; Accession=PF01417.12; Description=ENTH domain
  Pfam module annotation: Pfam domain module=ANTH::ENTH; Domain location=1-242::1-89
AYCIHALARRLAKTRNWIVALKTLVVIHRLLREGDPTFREEFLAFTQRVRILQLSNFKDDSSPIAWDYSSWVRTYGLFLEEKLECFRVLKYDIEAERSSKQGQGPEKGHSRTRELNSQDLLEQLPALQQLLYRLIGCRPEGAANNNYLVQYALALVLKESFKIYCAINDGIINLVDKFFEMPKHEALKALDIYRRAGQQAGSLSDFYESCRGLELARNFQFPTLREPPQTFLSTMEEYVKEAPRMLPVTEPLELPERLLLTYKPEEAEAAPEPVPIVEEKPQIVEEPAQVPSTSEIASPPPKPEIADTGDLLGLSDPNPNVSVIEESNALALAIMPTGVDNSTTSTATQQDKGFDPTGWELALVATPSTNTNPLAMESSLGGGFDKLTLDSLYDDGTYRQMQQQQLYGSAPPNPFMASDPFAMSNQVASPPSVQMAAMAQQPQPLMIEANPFGPPLQPQHAGMAPAANPFLDAGFGAFPAANGMHPQANPFGAAQLL

SEQ ID NO: 110739 - protein, 75 aa, Setaria italica
  Transcript Sequence Number=SeqID_44765
HPCYLEVIMILDHMIYLAYILGVFVFMRSQYYHYIIHIIIRHLIVPWFAFNFIRHWTSERCCSMQQAIHATCMSH

SEQ ID NO: 110740 - protein, 25 aa, Setaria italica
  Transcript Sequence Number=SeqID_44766
YLSLLVKVGDLCYLLIAAARGLSKP

SEQ ID NO: 110741 - protein, 81 aa, Setaria italica
  Transcript Sequence Number=SeqID_44767
  Gene Ontology: Mol. function=histone acetyltransferase activity; Cellular component=nucleus; Biological process=regulation of transcription, DNA-dependent
  Homolog annotation: Hit_ID=B9RAQ1; Match level="QueryCoverage=65%, HitCoverage=14%, E-value=7e-09, Identity=47%"; Hit description =Protein binding protein, putative
AALCDAPRLHLRCTRLLAKEFAAVERTEAWRFLQENDPWQELQLLQRLHEADMGMADIGTWPDLHVAFVGVRRDTARECFS

SEQ ID NO: 110742 - protein, 159 aa, Setaria italica
  Transcript Sequence Number=SeqID_44768
  Gene Ontology: Mol. function=histone acetyltransferase activity; Cellular component=nucleus; Biological process=regulation of transcription, DNA-dependent
  Homolog annotation: Hit_ID=B9RAQ1; Match level="QueryCoverage=78%, HitCoverage=34%, E-value=1e-31, Identity=53%"; Hit description =Protein binding protein, putative
  Pfam annotation: Domain name=zf-TAZ; Domain location=19-109; Score= -11.0; E_value=0.083; Accession=PF02135.8; Description=TAZ zinc finger
LTLGFRCVQRRRKWRRKRAEQRVYVELSEAMDCLDHICTEGCTEVGPAGRAPAPSPCARYATCRGLQLLIRHFSQCHRKSCARCQRMWQLLRLHSALCDRPDRCNTPLCTRFKQKEQEKAAVKAGDDGDKWGLLVKKVKAARVFSSLANRKQMSSTSQC

SEQ ID NO: 110743 - protein, 346 aa, Setaria italica
  misc_feature (237)..(237): Xaa can be any naturally occurring amino acid
  Transcript Sequence Number=SeqID_44769
  Gene Ontology: Mol. function=histone acetyltransferase activity; Cellular component=nucleus; Biological process=regulation of transcription, DNA-dependent
  Homolog annotation: Hit_ID=B9RAQ1; Match level="QueryCoverage=87%, HitCoverage=80%, E-value=4e-71, Identity=45%"; Hit description =Protein binding protein, putative
  Pfam annotation: Domain name=BTB; Domain location=16-131; Score=12.5; E_value=0.0013; Accession=PF00651.23; Description=BTBPOZ domain
MCEAPRLRCDAGAGEAVAAADVDVVTTRGRRRIPAHSSVLATASPVLGSILERRLRKDRESGKKAGRSVVRIRGVTDDAAAAFVRLLYAGRCGDGEEEDMEQHAVQVLVLAHAYQVPWLKRACEGAIGARLTADSVVDVLQLAALCDAPRLHLRCTRLLAKEFAAVERTEAWRFLQENDPWQELQLLQRLHEADMRRRKWRRKRAEQRVYVELSEAMDCLDHICTEGCTEVGPAGRXAPAPSPCARYATCRGLQLLIRHFSQCHRKSCARCQRMWQLLRLHSALCDRPDRCNTPLCTRFKQKEQEKAAVKAGDDGDKWGLLVKKVKAARVFSSLANRKQMSSTSQC

SEQ ID NO: 110744 - protein, 123 aa, Setaria italica
  misc_feature (59)..(59): Xaa can be any naturally occurring amino acid
  misc_feature (77)..(77): Xaa can be any naturally occurring amino acid
  misc_feature (102)..(102): Xaa can be any naturally occurring amino acid
  Transcript Sequence Number=SeqID_44770
  Homolog annotation: Hit_ID=Q8W0Y1; Match level="QueryCoverage=60%, HitCoverage=10%, E-value=8e-22, Identity=61%"; Hit description =Putative transposase
YNPKDPPSAYSNATVHSRLDGYTSMARKVHGPKYHPSAHDLDGEVVMRAGGGKKHGRFXIGDDTIDTASTPTLSQLXAWSMSSSPAICPWLNSTQFQMEALXAQLEEERRLREELAATMEAER

SEQ ID NO: 110745 - protein, 194 aa, Setaria italica
  misc_feature (14)..(14): Xaa can be any naturally occurring amino acid
  Transcript Sequence Number=SeqID_44771
  Gene Ontology: Mol. function=protein serine/threonine kinase activity; Biological process=protein amino acid phosphorylation
  Homolog annotation: Hit_ID=B9SWQ3; Match level="QueryCoverage=90%, HitCoverage=28%, E-value=1e-85, Identity=83%"; Hit description =Serine/threonine protein kinase, putative
  Pfam annotation: Domain name=Pkinase; Domain location=1-140; Score= -48.8; E_value=1.4e-05; Accession=PF00069.17; Description=Protein kinase domain
SSKSKSKKEKKPKXKPEIVNQVSPLPELIAEPTDARSMSFVGTHEYLAPEIIKGEGHGSAVDWWTFGIFLYELLFGKTPFKGSGNRATLFNVVGQPLRFPESPIVSFSARDLIRGLLVKDPQHRLGYKRGTTEIKQHPFFEGVNWALIRCASPPDVPKPVELDRPPKPVPANDKAAASAANQKGTDNFLEFEFF

SEQ ID NO: 110746 - protein, 108 aa, Setaria italica
  Transcript Sequence Number=SeqID_44772
  Homolog annotation: Hit_ID=B6U9B2; Match level="QueryCoverage=67%, HitCoverage=62%, E-value=4e-13, Identity=44%"; Hit description=Lipid binding protein
  Pfam annotation: Domain name=Tryp_alpha_amyl; Domain location=33-104; Score=15.4; E_value=0.011; Accession=PF00234.14; Description=Protease inhibitorseed storageLTP f
MSQLISVSRSVAATLLLLLSAAAAAEAQAGAACHNDIVALRTTCYEYVQEGGRAVPPSSNCCATLMGLTNVPCVCDYLGSDLDIDLDKVFYIGRHCGVAIPRACGGQM

SEQ ID NO: 110747 - protein, 42 aa, Setaria italica
  Transcript Sequence Number=SeqID_44773
FPEPELNSLTKSSSFFTPIGNLGEGAANISHDLGGFLFFQLF

SEQ ID NO: 110748 - protein, 150 aa, Setaria italica
  Transcript Sequence Number=SeqID_44774
MARRLRRPSPVPVTRLLLLAGLAAIAVAVAIAVAAPAAKDPEDGQIRISVQYPTEEESQWLDRWAEKYRSKEPGSGFSVQPATDEESAYLNRIFSGSKNSGYEGRIEFDDNDRPRLVVDKFHSGARSSEPSDDLKNKEGESHAEHDVMEL

SEQ ID NO: 110749 - protein, 313 aa, Setaria italica
  Transcript Sequence Number=SeqID_44775
  Gene Ontology: Mol. function=transferase activity, transferring glycosyl groups; Biological process=metabolic process
  Homolog annotation: Hit_ID=C3W7B0; Match level="QueryCoverage=100%, HitCoverage=66%, E-value=1e-118, Identity=71%"; Hit description=C -glucosyltransferase
GADPFFLRFEAMRRSAPLLGPLLATAGASAVVTDIVLASVVLPVARECGVPCYVLFTASAAMLAFCAHFPGYLDANSAAGRAGVVGDVDIPGVYRIPKSSVPQALHDPKHLFTQQFVANGRGLVDADGILVNTFDALEPEAVTALRKGKVVSSFPLVFAVGPLLPVMFPAKDPAGYMQWLDAQPARSVVYVSFGSRTAISPDQLLELAAGLEASGHRFLWVVKSTVVDRDDAGELGDLLGHGFLERVRGRALVTKGWVEQEEILQHGSVGLFVSHCGWNSVTEAAAFGVPVLAWPRFGDQRINAAVVTRGGLG

SEQ ID NO: 110750 - protein, 304 aa, Setaria italica
  Transcript Sequence Number=SeqID_44776
  Homolog annotation: Hit_ID=Q53PX3; Match level="QueryCoverage=29%, HitCoverage=45%, E-value=4e-24, Identity=67%"; Hit description =Hydroxyproline-rich glycoprotein family protein, putative
  Subcellular localization annotation: CTP_CleavageSite=56; ConfidenceScore=5.32e-01
LPTFLPSASSSPPPPLPTPISSTKDALSLLTTLQTQLFEAVAELQETLDLQDARVRLAREARAKDAALLAFAKKLHEAHHVLDRLVDDYADYRRDPKRPRGAAAADDPEPVSDGDFGASLHSRIKLEDILIYAHHISYTTFAPPEHGAGLPLRGALPPAPQESEMRSSKLYQFADMDVGVPKKPLEAKEGITVEVEAMPLYEPPPQEGAPRLPDTLPPMFPKDLKPPPGWKPGDPITLPLDDILPGVKGEEPKAPVPQAPVSVRPMVPMGPAPIQVAAVQLDFGSSSSDEYSSDVGSSEEDDED

SEQ ID NO: 110751 - protein, 90 aa, Setaria italica
  Transcript Sequence Number=SeqID_44777
  Gene Ontology: Mol. function=transferase activity; Cellular component= chloroplast; Biological process=metabolic process
  Homolog annotation: Hit_ID=Q53NI2; Match level="QueryCoverage=76%, HitCoverage=7%, E-value=3e-33, Identity=92%"; Hit description =Probable NAD kinase 2, chloroplastic
ARWWWRPAAAARHGVAARALSFGSRLGLDSQNFHTRDLSQLLWVGPVPGDISEIEAYCRIFRAAEQLHTAVMSALCDPETGECPVRYDVE

SEQ ID NO: 110752 - protein, 121 aa, Setaria italica
  Transcript Sequence Number=SeqID_44778
  Subcellular localization annotation: CTP_CleavageSite=35; ConfidenceScore=5.37e-01
PPPRISSMAPSQPPPPPPSPPPLPNSGAAKQQNVCAAPPPPPPPPPRTAHGIANKGPPPPPPPPPSSSKAPTTAAAATSKGPPPPPPPPPGTSSRTAGPAVPSPPPPPPLPGANKNSSGPT

SEQ ID NO: 110753 - protein, 38 aa, Setaria italica
  Transcript Sequence Number=SeqID_44779
LLSQCQGLHFYGNIENHGSMVPSMLLTKGSGVTPTIWS

SEQ ID NO: 110754 - protein, 338 aa, Setaria italica
  Transcript Sequence Number=SeqID_44780
  Gene Ontology: Mol. function=RNA binding; Cellular component =chloroplast; Biological process=regulation of translation
  Homolog annotation: Hit_ID=Q2R1U8; Match level="QueryCoverage=94%, HitCoverage=36%, E-value=4e-82, Identity=47%"; Hit description =CRS1/YhbY domain containing protein, expressed
  Pfam annotation: Domain name=CRS1_YhbY; Domain location=158-245; Score=123.1; E_value=8.8e-34; Accession=PF01985.13; Description=CRS1 YhbY domain
CNDRMAEEIKKLTGGVLLSRNKEYIIFYRGNDFIAPKVRQVLVEKQEQAITQLDEEELARLKASASITTIPNELKGPLVAGTLAETTEAKSRWGHSLNDKQREEEMKYLALMKHASLLKSLKRKLILAKTKIAKALSALAKVQQFLSPAELPTDLETVTDEERFLFRRIGLKMRAFLMLGRRDVFDGTVQNMHLHWKHRELIKIIVRGKSFAQVKHIAISLEAESEGVLISVDKTTKGYAIIFYRGKNYRRPQIVKPRNLLTRRQALARSIELQRREALKHHISSLQGKIWKLNTQLVQMKEAMEKEDVKLLQTVEADLSSDDDDVEEGREQQILWLQ

SEQ ID NO: 110755 - protein, 145 aa, Setaria italica
  Transcript Sequence Number=SeqID_44781
  Gene Ontology: Mol. function=metal ion binding; Cellular component =nucleus; Biological process=cell differentiation
  Homolog annotation: Hit_ID=Q0JBF0; Match level="QueryCoverage=100%, HitCoverage=53%, E-value=5e-30, Identity=63%"; Hit description =Protein YABBY 5
  Pfam annotation: Domain name=YABBY; Domain location=19-145; Score =12.4; E_value=6e-12; Accession=PF04690.5; Description=YABBY protein
MMSSVPEAAFAMDQHLAPPQLQTAAEQEQLCYVHCKCCDTILAVGVPCSSLFKTVTVRCGHCANLLSVNLRGLLLPTAAANNQLPFGGQQQALLSPTSPHGLLDEMMPFQQAPSLTSAEPASACVSTITSINNSCGGRNNASAMS

SEQ ID NO: 110756 - protein, 83 aa, Setaria italica
  misc_feature (17)..(17): Xaa can be any naturally occurring amino acid
  Transcript Sequence Number=SeqID_44782
  Homolog annotation: Hit_ID=Q851B2; Match level="QueryCoverage=96%, HitCoverage=22%, E-value=2e-22, Identity=63%"; Hit description =Putative ATP synthase subunit
MAGDPETGEWPTAMQVXRATYQKADGTWSIPTGEEIMIKLHEVARTHQEKISSAPVPIVEPFALVLGRKSNHIHMVVGIRAVN

SEQ ID NO: 110757 - protein, 90 aa, Setaria italica
  Transcript Sequence Number=SeqID_44783
  Subcellular localization annotation: CTP_CleavageSite=67; ConfidenceScore=5.57e-01
RARPPTPILPVMRMLRGCRRRSSSPATFDALLGAPSPSASPSPTTPSPPCSNRRWIFRPSLGQVKVRRFSSQSLPPFPHMPSPESPDPGQ

SEQ ID NO: 110758 - protein, 45 aa, Setaria italica
  Transcript Sequence Number=SeqID_44784
CQRIYAFGMGSAQPTNLTTHLIKVIQKYESSKDGNDLEFQQYIFQ

SEQ ID NO: 110759 - protein, 94 aa, Setaria italica
  Transcript Sequence Number=SeqID_44785
SNCQSKVYSLKDCLYLTMHIVFIGIFNFNHQKNYKYCSRGKKINFNWLLKLKQLCSCLCVYPSPFGTNVLKLRLYSKYQSGGFGCTASRQCRGR

SEQ ID NO: 110760 - protein, 139 aa, Setaria italica
  Transcript Sequence Number=SeqID_44786
  Subcellular localization annotation: CTP_CleavageSite=32; ConfidenceScore=5.43e-01
LGKPAGHLLSRSFSESSRSRYALHPGGGAIARSSSSQSQGNRLNGSRSVSSAGNGLDSSEISLPGDSVGRAHVHHCRPRLKDRLHWLRRSRSVHYSSPTSIADAGFTPFRSRSSSTRSVTHKNQRRFTAGFFAAQRHRH

SEQ ID NO: 110761 - protein, 62 aa, Setaria italica
  Transcript Sequence Number=SeqID_44787
KHDQNFTSAYHVHVSPSNSSLGTLHEYINLLGQSMCKKHCMLLTAQRSKSVQYQHCTQRIKP

SEQ ID NO: 110762 - protein, 56 aa, Setaria italica
  Transcript Sequence Number=SeqID_44788
LDKHVDKDSTASSLQLKSLGNQCTTNMCRKHEHFLFSDCYKDPVNLENTNYLLDGL

SEQ ID NO: 110763 - protein, 110 aa, Setaria italica
  Transcript Sequence Number=SeqID_44789
  Gene Ontology: Mol. function=protein binding; Cellular component =integral to membrane; Biological process=negative regulation of apoptosis
  Homolog annotation: Hit_ID=B6TE89; Match level="QueryCoverage=63%, HitCoverage=28%, E-value=5e-30, Identity=91%"; Hit description=Bax inhibitor 1
FAASIFGHSSATFTFELYFGLLVFLGYMVFDTQEIIERAHRGDMDYIKHALTLFTDFVAVLVRILVIMVSLWGLPDYLDRYLSELLQSMITDNSADDGLLQFGRAAQERS

SEQ ID NO: 110764 - protein, 84 aa, Setaria italica
  Transcript Sequence Number=SeqID_44790
  Gene Ontology: Mol. function=protein binding; Cellular component =integral to membrane
  Homolog annotation: Hit_ID=B6TE89; Match level="QueryCoverage=100%, HitCoverage=34%, E-value=6e-33, Identity=86%"; Hit description=Bax inhibitor 1
MESLFGFQSQHRRRTGGFDSLKRLGHISPAVQSHLKHVYLTLCFALAFSALGVYLHILLNVGGTLTTVGCLAAIAFLISLPPSR

SEQ ID NO: 110765 - protein, 62 aa, Setaria italica
  Transcript Sequence Number=SeqID_44791
  Subcellular localization annotation: CTP_CleavageSite=42; ConfidenceScore=5.01e-01
TRDGSAQIGNSAIHCDFFTACYQAQTNANQHSVNTGRQIRVVCSAQGICKAPADSTRDSQKN

SEQ ID NO: 110766 - protein, 253 aa, Setaria italica
  misc_feature (183)..(183): Xaa can be any naturally occurring amino acid
  Transcript Sequence Number=SeqID_44792
  Gene Ontology: Mol. function=protein binding; Cellular component =integral to membrane; Biological process=negative regulation of apoptosis
  Homolog annotation: Hit_ID=B6TQQ2; Match level="QueryCoverage=89%, HitCoverage=89%, E-value=6e-92, Identity=75%"; Hit description=Bax inhibitor 1
  Pfam annotation: Domain name=UPF0005; Domain location=29-239; Score =59.8; E_value=1e-14; Accession=PF01027.12; Description =Uncharacterised protein family UPF0005
MDAFYSSSSAAYGAAPGGGWGYDSLKNFRQITPAVQTHLKLVYLTLCVALASSAVGAYLHVVWNIGGMLTMLGCVGSIAWLFSVPVYEERKRYGLLMAAALLEGASVGPLIKLAVDFDPSILVTAFVGTAIAFACFSCAAIVAKRREYLYLGGLLSSGLSILLWLQFAASIFGHSTSSFMFEXVYFGLLIFLGYMVYDTQEIIERAHRGDMDYIKHALTLFTDFVAVLVRILVIMLKNAADKSEDKKRKNRRS

SEQ ID NO: 110767 - protein, 263 aa, Setaria italica
  misc_feature (43)..(43): Xaa can be any naturally occurring amino acid
  Transcript Sequence Number=SeqID_44793
  Gene Ontology: Mol. function=protein binding; Cellular component =integral to membrane; Biological process=negative regulation of apoptosis
  Homolog annotation: Hit_ID=B6TE89; Match level="QueryCoverage=84%, HitCoverage=88%, E-value=3e-91, Identity=80%"; Hit description=Bax inhibitor 1
  Pfam annotation: Domain name=UPF0005; Domain location=40-249; Score =80.3; E_value=7.1e-21; Accession=PF01027.12; Description =Uncharacterised protein family UPF0005
YLSFWYCLSSGRPSYSIRPKSSSRSITGGFDSLKRLGHISPAXVQSHLKHVYLTLCFALAFSALGVYLHILLNVGGTLTTVGCLAAIAFLISLPPSQDQQRNRFALLMSAAFLQGASVGPLVDLVLHFDPRILVTAFVGTAIAFGCFSGAAIIAKRREYLYLGGLLSSALSILLWLQFAASIFGHSSATFTFELYFGLLVFLGYMVFDTQEIIERAHQGDMDYIKHALTLFTDFVAVLVRVLVIMLKNAQERSEEEEKKRKKR

SEQ ID NO: 110768 - protein, 131 aa, Setaria italica
  misc_feature (52)..(52): Xaa can be any naturally occurring amino acid
  misc_feature (108)..(108): Xaa can be any naturally occurring amino acid
  Transcript Sequence Number=SeqID_44794
  Gene Ontology: Mol. function=nucleic acid binding
  Homolog annotation: Hit_ID=Q01K45; Match level="QueryCoverage=95%, HitCoverage=24%, E-value=6e-16, Identity=45%"; Hit description =OSIGBa0158F13.2 protein
LTHLSVTGCDKLRLIESKAPNLSNFRFDSDRHVQVSLEKALQVKKLYINCYXPCLCAELASSTQNLGAGLHPSNKMVNTPLVPSKFLYLECLSITLGGSTIAQSFDYXSMASSPSLETFILDASLFSFLSI

SEQ ID NO: 110769 - protein, 37 aa, Setaria italica
  Transcript Sequence Number=SeqID_44795
CECDSKMNGMGTWIHSEDVWFHGLKFSPRTKVQSLLH

SEQ ID NO: 110770 - protein, 62 aa, Setaria italica
  misc_feature (9)..(9): Xaa can be any naturally occurring amino acid
  Transcript Sequence Number=SeqID_44796
LSPVCLGSXFLGFFPKTSKFRVIINEQDVCDGIQIPWVTSSTKNSKTLHTSQASALSSFLLI

SEQ ID NO: 110771 - protein, 110 aa, Setaria italica
  Transcript Sequence Number=SeqID_44797
CSSSIQFAKENIMHLYKLQQCSQFTNFYVSTKEEKQKKQKSGKDTIKIQTKIYLIKLHGHTYSTYNPAPSHQPHYPNCITFSISRGYLADRSDQMTHSFEPLPSCHQESK

SEQ ID NO: 110772 - protein, 55 aa, Setaria italica
  Transcript Sequence Number=SeqID_44798
CLPQIKISQEKVGICSISKISAQLIGLAVYPHHPTKSVHQILEPRNKRLNFNSSL

SEQ ID NO: 110773 - protein, 127 aa, Setaria italica
  Transcript Sequence Number=SeqID_44799
  Gene Ontology: Mol. function=kinase activity; Cellular component =plasma membrane
  Homolog annotation: Hit_ID=B9T6U1; Match level="QueryCoverage=74%, HitCoverage=8%, E-value=2e-27, Identity=53%"; Hit description=Myosin- 1, putative
  Pfam annotation: Domain name=KIP1; Domain location=1-60; Score=94.6; E_value=3.5e-25; Accession=PF07765.4; Description=KIP1-like protein
WLDSNLQDMETRVKAMIKLIEIDADTFAKKAELYFKNRPELVSLVEETYRSYQALADRCDRISGELHKSNHTIATAFPEQVQLSLQNDNGDGFPKGITGINISRGTSPAPKRAQTHRRISSQMSKDK

SEQ ID NO: 110774 - protein, 161 aa, Setaria italica
  misc_feature (43)..(43): Xaa can be any naturally occurring amino acid
  misc_feature (137)..(137): Xaa can be any naturally occurring amino acid
  Transcript Sequence Number=SeqID_44800
  Gene Ontology: Mol. function=transferase activity, transferring groups other than amino-acyl groups; Cellular component=cellular _component; Biological process=biosynthetic process
  Homolog annotation: Hit_ID=Q2R3A8; Match level="QueryCoverage=96%, HitCoverage=39%, E-value=3e-37, Identity=50%"; Hit description =Chalcone and stilbene synthases, N-terminal domain containing protein, expressed
  Pfam annotation: Domain name=ACP_syn_III_C; Domain location=58-154; Score=-20.0; E_value=0.0019; Accession=PF08541.2; Description=3 -Oxoacyl-[acyl-carrier-protein (ACP)
  Pfam annotation: Domain name=Chal_sti_synt_C; Domain location=5-156; Score=187.6; E_value=3.4e-53; Accession=PF02797.7; Description =Chalcone and stilbene synthases, C-te
  Pfam module annotation: Pfam domain module=ACP_syn_III_C::Chal_sti _synt_C; Domain location=58-154::5-156
SPIFHMVSATQTTLAATARVVELKLGELGIEYRLSAALPAMVXGGIERCLSEALAPHLHGLAGAWNDLFWAAHPGSRAILDSYEAALGLQPEKLAASRRVLSEYGNMLGATVFFVLEEMWRRRGANEEEREKCAWGXMLGLGPGITVETMLLHAAGSQDED

SEQ ID NO: 110775 - protein, 174 aa, Setaria italica
  Transcript Sequence Number=SeqID_44801
FPVKRRKVEEISLLHPASVSLPFHLPQIHGVGQSGKKTDAFFMGESMNGEAEAEAAESLGMELTASPMKSSMCSRSTPAEEVGTFIVTVEKERRARAATEPTLSSEVQIAVEGSAALPPAASQRETHEVEVEQFARHQSLARLAKVFTAAAGAATSIYTMVRTPCKLPQAENQA

SEQ ID NO: 110776 - protein, 69 aa, Setaria italica
  Transcript Sequence Number=SeqID_44802
IARRTRGLPVQMPWLTFYLEHLSSHGYELCAGLKRLHTDDYSFLTTSFCLPVGLHSLSSLKRLEITFCP

SEQ ID NO: 110777 - protein, 219 aa, Setaria italica
  Transcript Sequence Number=SeqID_44803
  Gene Ontology: Mol. function=nucleotide binding; Biological process =defense response
  Homolog annotation: Hit_ID=Q01JX6; Match level="QueryCoverage=99%, HitCoverage=18%, E-value=5e-48, Identity=46%"; Hit description =B0809H07.4 protein
  Pfam annotation: Domain name=LRR_1; Domain location=134-156; Score =9.6; E_value=4.5; Accession=PF00560.25; Description=Leucine Rich Repeat
  Pfam annotation: Domain name=LRR_1; Domain location=158-181; Score =7.5; E_value=11; Accession=PF00560.25; Description=Leucine Rich Repeat
  Pfam annotation: Domain name=LRR_1; Domain location=30-52; Score=8.7; E_value=6.5; Accession=PF00560.25; Description=Leucine Rich Repeat
  Pfam annotation: Domain name=LRR_1; Domain location=8-27; Score=1.2; E_value=1.8e+02; Accession=PF00560.25; Description=Leucine Rich Repeat
  Pfam module annotation: Pfam domain module=LRR_1::LRR_1::LRR_1::LRR _1; Domain location=134-156::158-181::30-52::8-27
ALEGNFTRLWKLDLFDNPRLKSLQLRSCTALEELNVHYCASLTALEGNFTRLRKLDLGLPVQMPWLTFYLEHLSSHGYELCAGLKRLHTDDYSFLTTSFCKCLTSLRCLELCDPMGEVTGLTEEQERVLPHLTSLQELRFEDCSNLAGLPVGLHSLSSLKRLEITFCPSLSRLPEKGLPPSLEEIEISSGCSKELADECRMLATTTRKPKVKINGKYVN

SEQ ID NO: 110778 - protein, 45 aa, Setaria italica
  Transcript Sequence Number=SeqID_44804
LVLSAASALLAGLVVAMTCFIMMRRKRPPPPMEIELPGKCSLLDV

SEQ ID NO: 110779 - protein, 207 aa, Setaria italica
  Transcript Sequence Number=SeqID_44805
  Gene Ontology: Mol. function=protein serine/threonine kinase activity; Biological process=protein amino acid phosphorylation
  Homolog annotation: Hit_ID=B6SVB5; Match level="QueryCoverage=74%, HitCoverage=21%, E-value=8e-33, Identity=47%"; Hit description =Protein kinase
  Pfam annotation: Domain name=Pkinase; Domain location=74-207; Score= -96.5; E_value=0.0096; Accession=PF00069.17; Description=Protein kinase domain
  Pfam annotation: Domain name=Pkinase_Tyr; Domain location=74-205; Score=-88.9; E_value=8.1e-08; Accession=PF07714.9; Description =Protein tyrosine kinase
  Pfam module annotation: Pfam domain module=Pkinase::Pkinase_Tyr; Domain location=74-207::74-205
  Subcellular localization annotation: CTP_CleavageSite=22; ConfidenceScore=5.11e-01
MLRGRTDPSNSSTKIQLWVILVLSAASALLAGLVVAMTCFIMMRRKRPPPPMEIELPVARKFSYHELTLATDSFSQDRKLGAGTFGAVYRGDLRDRRRVDAPVAVKKLTLLLEQTRRDYVTEIMILGQLKHRNLVKLVGWCDGGGDDKLLLVYELVTNGSLDDHLHGSSERLLTWPERYKIVLGIGSAIEYLHTGDKDAILHRDIKP

SEQ ID NO: 110780 - protein, 212 aa, Setaria italica
  misc_feature (8)..(8): Xaa can be any naturally occurring amino acid
  misc_feature (40)..(40): Xaa can be any naturally occurring amino acid
  misc_feature (99)..(99): Xaa can be any naturally occurring amino acid
  Transcript Sequence Number=SeqID_44806
  Gene Ontology: Mol. function=nucleic acid binding
EEQVASGXATNDIVEAAAARYIESGVVLLPSEETSNLKDXQLNPKKESAIVMESGLNCSKDVTNTSDNGSVVDIVGQRTPSGSGLPEDYRTDHNLQQEXLDGCSVESSLQGSTISSKKIVSGVAGTFGNPSFSLATPNYKHEGALSEEAVCKMKNYTGTCSADPRHLLMELQSLFSEGSIEKIDPHDDLAFPSAGRGRNEPVDTLVCSEPDT

SEQ ID NO: 110781 - protein, 91 aa, Setaria italica
  Transcript Sequence Number=SeqID_44807
LHSKVNTVSTTYKKRIGPYCHHRERHARKRNMQMLVTALAHLIFMLHAQLLFLLKASQWFARHQVPIPYYEMQQFNPIIAYTAASASPFTC

SEQ ID NO: 110782 - protein, 67 aa, Setaria italica
  Transcript Sequence Number=SeqID_44808
  Subcellular localization annotation: CTP_CleavageSite=59; ConfidenceScore=5.25e-01
QRQRRQGQDGSNLAAGAAMQMPARLSSPKPRLQCLPQLLAHVVRRGRLLGRDFPRGAPRAVRLRGNA

SEQ ID NO: 110783 - protein, 103 aa, Setaria italica
  Transcript Sequence Number=SeqID_44809
AYHGCLGQCLVHASSKARHTSEQRSPPFSASNVWRDFRPPHHLWRADVLKDSPSPVTSPVTFHSIFSHLSTAVTTTTVPWLPPATRGAKRKYSPVRAAPLPGQ

SEQ ID NO: 110784 - protein, 48 aa, Setaria italica
  Transcript Sequence Number=SeqID_44810
KTYKRSKPLNHWLRLTSHKRGTEMQSKKDATRTMKKSLYIHHSTTINA

SEQ ID NO: 110785 - protein, 45 aa, Setaria italica
  Transcript Sequence Number=SeqID_44811
MDQVEHMLYAMFASKNACRALSKMSFELQDLNGGFTQIKLGSLND

SEQ ID NO: 110786 - protein, 118 aa, Setaria italica
  Transcript Sequence Number=SeqID_44812
  Subcellular localization annotation: CTP_CleavageSite=67; ConfidenceScore=5.17e-01
QQLRVDFVGAAGSFLFQDLDGVGRCTPEGRWFAASSWRPLSMSWLSSRPGRRAPSPSPADLEDVRCPGDLRQDLRTFVSNSKCSRVLHETLHYWRMCAEDLIVISSSSRVLVVRSRLF

SEQ ID NO: 110787 - protein, 72 aa, Setaria italica
  Transcript Sequence Number=SeqID_44813
TLHVSLRFYITAVRPLPRLLLVQHIETVHHSEAVEDVLHSLLLADSAIKEMKSKTKQWNDRIKQDKKSDQLR

SEQ ID NO: 110788 - protein, 79 aa, Setaria italica
  Transcript Sequence Number=SeqID_44814
LRLQVDDGEDECYDDDYPYDTDDSNAEDNPLFDYPEELSEDEDEDEDDGSNDEDPFGDMEGSGSEYEKEEVDVEEDEQR

SEQ ID NO: 110789 - protein, 338 aa, Setaria italica
  misc_feature (322)..(322): Xaa can be any naturally occurring amino acid
  Transcript Sequence Number=SeqID_44815
  Subcellular localization annotation: CTP_CleavageSite=3; ConfidenceScore=5.04e-01
MASAAAAAGEASTSGSAAREKPIVVRVKRKPSQTRPDAFWLEINERPAKKAMLDFSSLSISEPSSSSAGAEASEEQPRVKKLLVQHIETVHHSEAVEDVLHSLLLADSAIKEMKSKTKQWNDRIKQDKKSDQLRSAARQRHEDVGRNARFAQIWKSRKGQKNEADESLREICHLYDAVQVDTDEEKHPAEPRITSFEEGAVLCNFLPLIREYLPSAAEEIESDIISLAQSEDSEVYDIYTVKEVDDTNMEDTSAASYPRLQVDDGEDECYDDDYPYDTDDSNAEDNPLFDYPEELSEDEDEDEDDGSNDEDPFGDKNNSGSXYEKEEVDVEEDEQRVI

SEQ ID NO: 110790 - protein, 97 aa, Setaria italica
  misc_feature (51)..(51): Xaa can be any naturally occurring amino acid
  Transcript Sequence Number=SeqID_44816
  Gene Ontology: Mol. function=methyltransferase activity
  Homolog annotation: Hit_ID=B9SUG7; Match level="QueryCoverage=96%, HitCoverage=25%, E-value=2e-21, Identity=55%"; Hit description =Jasmonate O-methyltransferase, putative
  Pfam annotation: Domain name=Methyltransf_7; Domain location=1-97; Score=-192.4; E_value=0.002; Accession=PF03492.7; Description=SAM dependent carboxyl methyltransferase
GEGPLVMVFGAPGSFYGRLFPAETLHLVCSSFSLHWLSQVPQELVDGLWSXINKGSVSAGRTSSPAVNAAYTRQFEQDFKRFLAAGAEEVVPGGWMV

SEQ ID NO: 110791 - protein, 51 aa, Setaria italica
  Transcript Sequence Number=SeqID_44817
QTLHHILSQMKVEYASTEIKDEEWLVNAMRDFLNDKRYRLFHCKLILHLID

SEQ ID NO: 110792 - protein, 127 aa, Setaria italica
  Transcript Sequence Number=SeqID_44818
  Gene Ontology: Mol. function=oxidoreductase activity, acting on the CH-NH2 group of donors, NAD or NADP as acceptor; Cellular component =chloroplast; Biological process=nitrogen compound metabolic process
  Homolog annotation: Hit_ID=A7VKB1; Match level="QueryCoverage=100%, HitCoverage=5%, E-value=5e-57, Identity=85%"; Hit description=NADH -glutamate synthase 2
  Pfam annotation: Domain name=Glu_syn_central; Domain location=1-70; Score=-198.4; E_value=0.0025; Accession=PF04898.6; Description =Glutamate synthase central domain
YLAIETICRLQIDGKIASKGDGQPYPQEELINKYFNASNYGIMKVLAKMGISTLASYKGAQIFEALGLASEVTSKCFEGTPSRVEGATFEMLAQDALYLHDLAFPSRTLPSGSADANAVPNPGDYHW

SEQ ID NO: 110793 - protein, 75 aa, Setaria italica
  Transcript Sequence Number=SeqID_44819
FIILLYLLIASLVGGFCRTARTRRKCTAKCANFVYFTYSSLKFWCPFVMLCHYCGRKNIGVELIFCLPVRQSMLT

SEQ ID NO: 110794 - protein, 541 aa, Setaria italica
  Transcript Sequence Number=SeqID_44820
  Gene Ontology: Mol. function=electron carrier activity; Cellular component=integral to membrane; Biological process=oxidation reduction
  Homolog annotation: Hit_ID=B6TED7; Match level="QueryCoverage=100%, HitCoverage=100%, E-value=0.0, Identity=90%"; Hit description =Cytochrome P450 CYP704B12v2
  Pfam annotation: Domain name=p450; Domain location=43-537; Score =150.2; E_value=6.4e-42; Accession=PF00067.14; Description=Cytochrome P450
MVEAHATPAAPFFPLAGLHKYIAIFLVLLSWILVHKWSLRKQKGPRSWPVIGATVEQLRNYHRMHDWLVEYLSKHRSVTVDMPFTSYTYIADPVNVEHVLKTNFTNYPKGDVYRSYMDVLLGDGIFNADGELWRKQRKTASFEFASKNLRDFSAIVFREYSLKLSGILRQASKAGKVVDMQELYMRMTLDSICKVGFGVEIGTLSPDLPENSFAQAFDAANIIVTLRFIDPLWRLKRFFHVGSEALLEQSIKLVDEFTYSVIRRRKAEIMEARSSGKEEKIKHDILSRFIELGEAGEDSGGLGDDKSLRDVVLNFVIAGRDTTATTLSWFTYMAMSHPDVAEKLRRELCTFEAERAREEGVELVPCGPDADDDESFAARVTQFAGLLTYDSLGKLVYLHACVTETLRLYPAVPQDPKGILEDDVLPDGTKVRAGGMVTYVPYSMGRMEYNWGADAARFRPERWINEDGAFRNASPFKFTAFQAGPRICLGKDSAYLQMKMALAILCRFYRFQLLEGHPVEYRMMTILSMAHGLKLRVSRAV

SEQ ID NO: 110795 - protein, 75 aa, Setaria italica
  Transcript Sequence Number=SeqID_44821
NLGSSCLIIHVSVLCPGSYETEYVDEARNYGRDGYLQTLLHALIIWICSVACKTTSQSAFHFLYYTLSYGFTRYT

SEQ ID NO: 110796 - protein, 51 aa, Setaria italica
  Transcript Sequence Number=SeqID_44822
WVQTHLVTQISTRVPSYVGPYAYKMRTQQRPWQNQATEHIQMISACSKVCR

SEQ ID NO: 110797 - protein, 84 aa, Setaria italica
  Transcript Sequence Number=SeqID_44823
  Gene Ontology: Mol. function=protein serine/threonine kinase activity
  Homolog annotation: Hit_ID=Q2QLI7; Match level="QueryCoverage=90%, HitCoverage=7%, E-value=3e-19, Identity=65%"; Hit description =Protein kinase domain containing protein, expressed
MDGDETTHLKDDNDSGSTGNDEAENKHDSLEVFVGEADFTVGKSPARNDTLVSTGAFSDEMTIGVSGLGEGSPKSERSADMFCD

SEQ ID NO: 110798 - protein, 888 aa, Setaria italica
  misc_feature (143)..(143): Xaa can be any naturally occurring amino acid
  misc_feature (588)..(588): Xaa can be any naturally occurring amino acid
  Transcript Sequence Number=SeqID_44824
  Gene Ontology: Mol. function=protein serine/threonine kinase activity; Cellular component=spliceosome; Biological process=protein amino acid phosphorylation
  Homolog annotation: Hit_ID=Q2QLI7; Match level="QueryCoverage=99%, HitCoverage=95%, E-value=0.0, Identity=64%"; Hit description=Protein kinase domain containing protein, expressed
  Pfam annotation: Domain name=Pkinase; Domain location=570-885; Score =202.3; E_value=1.3e-57; Accession=PF00069.17; Description=Protein kinase domain
  Pfam annotation: Domain name=Pkinase_Tyr; Domain location=570-865; Score=-89.0; E_value=8.3e-08; Accession=PF07714.9; Description =Protein tyrosine kinase
  Pfam module annotation: Pfam domain module=Pkinase::Pkinase_Tyr; Domain location=570-885::570-865
RQRHDDSPLAVAPDDDVEEGEILDDAAAADSAAPQDSLVPERLDNGADTHSNADAMMPQASALPTLPPSSKDGRKSLSGAPESESGGILSSDADENKGYEQSQSLSKSTREKERRHIDERHSLSYKDYHSKNHSRTSPYPRHXSEARSRDHSRSTEKSDGANGPRASLRDGFDHDSNDRNGKSGRHATSRQENERERSSSRVVHDRPGDRHGSRERYRDDRIDGDKFDSLEATRRLRERSRSRSRSDLRESARVRDQSRERERRSGSSRHKDHERNRDTSKDRHRESDRVDSVREREKYDRDREWHRVKGSETRRTREARDKVSDSDRHRDSTHSKYSTSDGYKERARSREKYRDADHKSRRSEEMKENSLNKEEDEEEYQEKIEQQLAMQEEDDPEKIKEEARRRKEAIMAKYRQQQLQKQHMESKPSSNNEEVKAMDGDETTHLKDDNDSGSTGNDEAENKHDSLEVFVGEADFTVGKSPARNDTLVSTGAFSDEMTIGVSGLGEGSPKSERSADMFCDDIFGESPAGIRKSGKDDGLHVERNALHDNWDDADGYYTYRFGELLDGRYEITAAHGKGVFSTVVRAXDLKAGKDDPEEVAIKIIRNNDTMYKAGKQEVSILEKLASADREDKRHCVRFISSFMYRNHLCLVFESLNMNLREVLKKFGRNIGLKLTAVRAYSKQLFIALKHLKNCKVLHCDIKPDNMLVNEAKNVLKLCDFGNAMLAGMNEVTPYLVSRFYRAPEIILGLPYDHPLDIWSVGCCLYELYTGKVLFPGPSNNAMLRLHMELKGPFPKKMLRKGAFTMQHFDQDLNFHATEEDLVTKTAVRRLILNIKPKDIGSLISNFPGEDPKMLSSFKDLLDKIFILDPEKRITVSQALSHPFITGK

SEQ ID NO: 110799 - protein, 82 aa, Setaria italica
  Transcript Sequence Number=SeqID_44825
MANHLHTIVMLVLNGFLYLVTFYGLLGAFHSSTHDLVLKSKFPWLSSLFAIFLELCKYDKWNVSNKALLMLNYDSKHNYSCF

SEQ ID NO: 110800 - protein, 51 aa, Setaria italica
  Transcript Sequence Number=SeqID_44826
ILGNDGNLNEDAIQEYADRLKDLLPSDHLKPLKGLKSRAFLDLLVEVSCFL

SEQ ID NO: 110801 - protein, 117 aa, Setaria italica
  Transcript Sequence Number=SeqID_44827
  Gene Ontology: Mol. function=DNA binding; Cellular component =mitochondrion
  Homolog annotation: Hit_ID=Q7F7G0; Match level="QueryCoverage=84%, HitCoverage=16%, E-value=1e-22, Identity=49%"; Hit description =Putative DNA-binding protein
KLYANSGELAKADSFLVNVTEENPDRHPLFRSYITLLSAYAKKGDIHNSEKIFDRLKQIRYPGRTPPYNLLLAAYASAKVTPYGFRERMKADNVRPTKTDIECLRRLDNLLITRLLE

SEQ ID NO: 110802 - protein, 198 aa, Setaria italica
  misc_feature (198)..(198): Xaa can be any naturally occurring amino acid
  Transcript Sequence Number=SeqID_44828
  Gene Ontology: Mol. function=calmodulin binding; Cellular component =integral to membrane; Biological process=cell death
  Homolog annotation: Hit_ID=Q94CG7; Match level="QueryCoverage=99%, HitCoverage=38%, E-value=3e-59, Identity=62%"; Hit description=MLO -like protein 1
  Pfam annotation: Domain name=Mlo; Domain location=1-198; Score= -172.2; E_value=1.3e-10; Accession=PF03094.7; Description=Mlo family
KEELMLLGFISLLMTAFQETIQRTCIPPSWTEYMLPCQRPEAHQPAGVAATRARFTAAEILGGISRARVLGEGEAGAEAGLCQMQGKVPLLSEEALHQLHIFIFVLAVAHVFFSATTMLLGGAKIHKWKQWEEEIQKNNAAGNGPKKVLPVHQLSFIREHYKGIGKDSMTLSWLHSFVKQFYGSVAKSDYNAMRLGFX

SEQ ID NO: 110803 - protein, 98 aa, Setaria italica
  Transcript Sequence Number=SeqID_44829
  Gene Ontology: Mol. function=calmodulin binding; Cellular component =integral to membrane; Biological process=cell death
  Homolog annotation: Hit_ID=Q94CG7; Match level="QueryCoverage=90%, HitCoverage=18%, E-value=3e-34, Identity=79%"; Hit description=MLO -like protein 1
STYGFDSCIMGQVRFIVPRLVIGVLIQLLCSYSTLPLYAIVTQMGSYYKKEIFNEHVQQGVLGWAEKAKKRSGLKEGNSTAESMHNSTAEIMHGDDVA

SEQ ID NO: 110804 - protein, 119 aa, Setaria italica
  misc_feature (6)..(6): Xaa can be any naturally occurring amino acid
  Transcript Sequence Number=SeqID_44830
  Gene Ontology: Mol. function=calmodulin binding; Cellular component =integral to membrane; Biological process=response to biotic stimulus
  Homolog annotation: Hit_ID=Q94CG7; Match level="QueryCoverage=99%, HitCoverage=24%, E-value=2e-56, Identity=89%"; Hit description=MLO -like protein 1
  Pfam annotation: Domain name=Mlo; Domain location=1-118; Score= -366.9; E_value=0.053; Accession=PF03094.7; Description=Mlo family
AFFFWXLSTYGFDSCIMGQVRFIVPRLVIGVLIQLLCSYSTLPLYAIVTQMGSCYKKEIFNEHVQQGVLGWAQKVKMRKGLKGAANKAESTSNADSAGPSATIEMAKAGADVEAVGNTE

SEQ ID NO: 110805 - protein, 162 aa, Setaria italica
  misc_feature (23)..(23): Xaa can be any naturally occurring amino acid
  Transcript Sequence Number=SeqID_44831
  Gene Ontology: Mol. function=calmodulin binding; Cellular component =integral to membrane; Biological process=cell death
  Homolog annotation: Hit_ID=Q94CG7; Match level="QueryCoverage=75%, HitCoverage=24%, E-value=3e-52, Identity=75%"; Hit description=MLO -like protein 1
  Pfam annotation: Domain name=Mlo; Domain location=1-160; Score= -187.3; E_value=6e-10; Accession=PF03094.7; Description=Mlo family
SAIEGDLVVNPSDEHFWFGRPKXVLYLIHFILFQNAFEIAFFFWILTTYGFNSCIMDHVPFIVPRLVVGATIQLVCSYSTLPLYAIVTQMGTFFKKEIFDEHVQQSLVGWAQKAKKRKALKNNGGSGSGAAGSASARPPARLELMRRAAALEEGSTGGHGSQ

SEQ ID NO: 110806 - protein, 116 aa, Setaria italica
  Transcript Sequence Number=SeqID_44832
  Gene Ontology: Mol. function=hydrolase activity, acting on ester bonds; Biological process=lipid metabolic process
  Homolog annotation: Hit_ID=B6U0K0; Match level="QueryCoverage=100%, HitCoverage=30%, E-value=8e-42, Identity=74%"; Hit description =Anther-specific proline-rich protein APG
TTARADSPPYGLDYPTHRATGRFSNGRNVPDIISEYLGAEPVLPYLSPHLDGGDLLRGANFASAGVGILNDTGIQFANIIRIQKQLRYFQQYQSRVRRLLCGDSDAVGRLVQGALV

SEQ ID NO: 110807 - protein, 154 aa, Setaria italica
  Transcript Sequence Number=SeqID_44833
  Gene Ontology: Mol. function=hydrolase activity, acting on ester bonds; Biological process=lipid metabolic process
  Homolog annotation: Hit_ID=B6U0K0; Match level="QueryCoverage=73%, HitCoverage=29%, E-value=3e-50, Identity=84%"; Hit description =Anther-specific proline-rich protein APG
  Pfam annotation: Domain name=Lipase_GDSL; Domain location=26-154; Score=-6.8; E_value=0.021; Accession=PF00657.14; Description=GDSL -like LipaseAcylhydrolase
MMMMSLVQLLLIQQPTTMVECQPRAFFVFGDSLVDSGNNNYLATTARADSPPYGLDYPTHRATGRFSNGRNVPDIISEYLGAEPVLPYLSPHLDGGDLLRGANFASAGVGILNDTGIQFANIIRIQKQLRYFQQYQYLSKYRTLVRTVPYLTVL

SEQ ID NO: 110808 - protein, 302 aa, Setaria italica
  Transcript Sequence Number=SeqID_44834
  Gene Ontology: Cellular component=plasma membrane; Biological process= ubiquitin-dependent protein catabolic process
  Homolog annotation: Hit_ID=Q8H485; Match level="QueryCoverage=100%, HitCoverage=75%, E-value=1e-123, Identity=72%"; Hit description =Tubby-like F-box protein 11
  Pfam annotation: Domain name=Tub; Domain location=18-296; Score =413.5; E_value=3.5e-121; Accession=PF01167.10; Description=Tub family
RSRKASGKLTFPISLKQPGPRDAPVKCFIRRNRATQSYFLCLGVTDALVDDGKFLLAARKYRRPSCTEYLISLDSKGNGTYLGKLRSNFLGTKFTVYDAHPPCAGAVVSKGPSAHMIGSAQVSPMKGGPPAGNYPVSHISYEVNVLGSRGPRKMNCVMDSIPASAIKEGGTAPTQTEFPSSNSSSFASVPFFRSKSGQLDSSGAQNESKVALKNKSPSWHQQLQCWCLNFHGRVTVASVKNFQLVASGESAPTPSNQEDDDVILQFGKVGKDLFTMDYRYPISAFQAFAICLSSFDTKIGCE

SEQ ID NO: 110809 - protein, 161 aa, Setaria italica
  Transcript Sequence Number=SeqID_44835
  Homolog annotation: Hit_ID=B9SWK8; Match level="QueryCoverage=83%, HitCoverage=19%, E-value=4e-19, Identity=36%"; Hit description =Protein dimerization, putative
  Pfam annotation: Domain name=DUF659; Domain location=3-57; Score= -60.3; E_value=0.0033; Accession=PF04937.7; Description=Protein of unknown function (DUF 659)
INDVSPHMQAAEHAVLKRYEQSFIFTVCADHCIDLLLENIAALDNVKDVLTKAKEITRFLYGHALPMELKRLYIGDAEIISNSNLKCVAMFDTLEKLVSRRENLVEMFNSADWVSSDLASTNLSMGICEVVQMENAFWSAAAHVLKVTGPLIRVLYKLEDD

SEQ ID NO: 110810 - protein, 236 aa, Setaria italica
  Transcript Sequence Number=SeqID_44836
  Gene Ontology: Mol. function=protein dimerization activity; Cellular component=nucleus; Biological process=regulation of transcription, DNA-dependent
  Homolog annotation: Hit_ID=Q6K223; Match level="QueryCoverage=97%, HitCoverage=33%, E-value=3e-92, Identity=73%"; Hit description=Auxin response factor 8
  Pfam annotation: Domain name=Auxin_resp; Domain location=39-122; Score=173.2; E_value=7.8e-49; Accession=PF06507.5; Description=Auxin response factor
EALPMPGWDHYAGMMRGNVSPCGSAKARGKVRPEDVAEAARLASAGQPFEVVYYPRASTPEFCVRVASVRAAMRVQWSPGMRFKMAFETEDSTRISWFMGTVAGVQVADPIRWPQSPWRLLQVTWDEPDLLQNVKRVSPWLVELVSSIPAIHLASFSPPRKKPRIPAYPEFPFEGQLLNPAFPPTPLSHGHHGHHYLHTHPSFFPFPDGSAPAAIQGARHAQFVPPLSDQYYQPLT

SEQ ID NO: 110811 - protein, 38 aa, Setaria italica
  Transcript Sequence Number=SeqID_44837
SIVDSNLILIHHVLYMTVSEFNSFNNNFAAIGRHYIVI

SEQ ID NO: 110812 - protein, 80 aa, Setaria italica
  Transcript Sequence Number=SeqID_44838
  Gene Ontology: Mol. function=nucleic acid binding; Cellular component= intracellular
  Homolog annotation: Hit_ID=UPI000019713A; Match level="QueryCoverage =100%, HitCoverage=8%, E-value=6e-30, Identity=77%"; Hit description =zinc finger protein-related
  Pfam annotation: Domain name=DUF537; Domain location=1-73; Score =10.9; E_value=8.2e-06; Accession=PF04396.6; Description=Protein of unknown function, DUF537
KDASDKKILVDMLIWAIDNPPPANYLLISGDRDFSNALHKLVQRRYNILLAQPPNVSQALTAAAKHVWLWKSLVAGEPPL

SEQ ID NO: 110813 - protein, 72 aa, Setaria italica
  Transcript Sequence Number=SeqID_44839
MMTRKATVDAREAEEIRRRNAELERAVAEAAAREERLRRELEAALARLAVAEEGEERLCVQLGELEDRRTVE

SEQ ID NO: 110814 - protein, 83 aa, Setaria italica
  misc_feature (10)..(10): Xaa can be any naturally occurring amino acid
  Transcript Sequence Number=SeqID_44840
  Gene Ontology: Mol. function=ubiquitin-protein ligase activity; Cellular component=nucleus; Biological process=ubiquitin-dependent protein catabolic process
  Homolog annotation: Hit_ID=B3F0L4; Match level="QueryCoverage=96%, HitCoverage=26%, E-value=3e-32, Identity=89%"; Hit description =Ubiquitin ligase SINAT2
SIVTVVPESXCGDDGLSEALGSIRLDVDSTSKPWSTSLANVALSSLAGLNDLLECPVCTNSMRPPILQCPNGHTICSSCKLGN

SEQ ID NO: 110815 - protein, 124 aa, Setaria italica
  misc_feature (7)..(7): Xaa can be any naturally occurring amino acid
  Transcript Sequence Number=SeqID_44841
  Gene Ontology: Mol. function=DNA binding; Cellular component=nucleus; Biological process=regulation of transcription
  Homolog annotation: Hit_ID=Q4TV00; Match level="QueryCoverage=100%, HitCoverage=66%, E-value=3e-52, Identity=82%"; Hit description =Knotted 1-type homeobox protein 8 (Fragment)
  Pfam annotation: Domain name=KNOX1; Domain location=1-27; Score=12.5; E_value=0.038; Accession=PF03790.5; Description=KNOX1 domain
  Pfam annotation: Domain name=KNOX2; Domain location=35-86; Score =93.0; E_value=1e-24; Accession=PF03791.5; Description=KNOX2 domain
  Pfam module annotation: Pfam domain module=KNOX1::KNOX2; Domain location=1-27::35-86
AYLDCQXVGAPPDVSDRLSAMAAKLDAQPGPSRRRHEPTRADPELDQFMEAYCNMLVKYQEELARPIQEAAEFFKSVERQLDSITDSNCEGAGSSEDDQDASCPEEIDPCAEDKELKHQLLRKY

SEQ ID NO: 110816 - protein, 229 aa, Setaria italica
  Transcript Sequence Number=SeqID_44842
  Gene Ontology: Mol. function=sequence-specific DNA binding; Cellular component=nucleus; Biological process=regulation of transcription, DNA-dependent
  Homolog annotation: Hit_ID=Q6QHI3; Match level="QueryCoverage=99%, HitCoverage=97%, E-value=1e-119, Identity=90%"; Hit description =APETALA3-like protein
  Pfam annotation: Domain name=K-box; Domain location=71-170; Score =111.0; E_value=3.9e-30; Accession=PF01486.9; Description=K-box region
  Pfam annotation: Domain name=SRF-TF; Domain location=9-59; Score =110.0; E_value=7.7e-30; Accession=PF00319.10; Description=SRF-type transcription factor (DNA-binding and dimerisation domain)
  Pfam module annotation: Pfam domain module=K-box::SRF-TF; Domain location=71-170::9-59
MGRGKIEIKRIENATNRQVTYSKRRTGIMKKARELTVLCDAEVAIIMFSSTGKYHEFCSPGTDIKTIFDRYQQAIGTSLWIEQYENMQRTLSHLKDINRNLRTEIRQRMGEDLDSLEFDELRGLEQNVDTALKEVRHRKYHVITTQTETYKKKVKHSYEAYKNLQQELGMREDPAFGFVDNTGAGGWEGSSVTTLGGGASAADMYAFRVVPSQPNLHGMAYGSHDLRLG

SEQ ID NO: 110817 - protein, 50 aa, Setaria italica
  Transcript Sequence Number=SeqID_44843
KKRVLCIFDDLPMFTCYNWSVRLSLVSCHSCKKIAVNFSCWCVLLDVATS

SEQ ID NO: 110818 - protein, 328 aa, Setaria italica
  Transcript Sequence Number=SeqID_44844
  Gene Ontology: Mol. function=transferase activity
  Homolog annotation: Hit_ID=B6SKF9; Match level="QueryCoverage=96%, HitCoverage=64%, E-value=1e-134, Identity=79%"; Hit description =Glycosyltransferase
  Pfam annotation: Domain name=DUF563; Domain location=111-328; Score =237.4; E_value=3.6e-68; Accession=PF04577.6; Description=Protein of unknown function (DUF563)
MKSSLRSRQEPRRVSNGVIIGAMLLSLCVLSIVKARYCATPFGKAEDQLQEQMNASIRMETEESPARTPGEEEEDEEKEEVLPSTAPAVTKPAAVATPTTGGRDKKGKAKPTCYMTSKRSERCDASGDIRVDGNRSTIYVSGIDREWRTKPYARYHDPVAMAHVREYTLKPLGDGAPACTRNHSVPGFLFSNGGFSGNLYHDYTDVLVPLFISTHQFKRRVQFLLSGMKPWWVGKFTPFFRQLTRFDVIDVDNDQEVHCFPRIVAGATFHKDMGVDPRRSPGHVSVVDFKRALRRAFGLEREAASRGGATGAGKPRLLIISRRGSRRF

SEQ ID NO: 110819 - protein, 50 aa, Setaria italica
  Transcript Sequence Number=SeqID_44845
  Gene Ontology: Mol. function=phosphotransferase activity, for other substituted phosphate groups; Cellular component=membrane; Biological process=phospholipid biosynthetic process
  Homolog annotation: Hit_ID=Q8W0U8; Match level="QueryCoverage=68%, HitCoverage=9%, E-value=1e-09, Identity=94%"; Hit description =Aminoalcoholphosphotransferase
MLFINTCTCVNSFFTNTLILPTINGPTEGLMLIYVSHLFTFLTGNPPTPN

SEQ ID NO: 110820 - protein, 393 aa, Setaria italica
  Transcript Sequence Number=SeqID_44846
  Gene Ontology: Mol. function=phosphotransferase activity, for other substituted phosphate groups; Cellular component=membrane; Biological process=phospholipid biosynthetic process
  Homolog annotation: Hit_ID=Q8W0U8; Match level="QueryCoverage=82%, HitCoverage=96%, E-value=1e-177, Identity=93%"; Hit description =Aminoalcoholphosphotransferase
  Pfam annotation: Domain name=CDP-OH_P_transf; Domain location=85-209; Score=65.0; E_value=2.8e-16; Accession=PF01066.13; Description=CDP -alcohol phosphatidyltransferase
MGFIGAHGVETLKRYKYSGEDRSVVAKYVLQPFWSRCVTLFPLWMPPNMITLTGFTFLVLSALLGYIYSPRLDTAPPRWVHLAHGLLLFLYQTFDAVDGKQARRTSSSSPLGELFDHGCDALACAFEALALGSTLMCGGWTFCFWVVAAVPFYLATWEHFFTNTLILPTINGPTEGLMLIYVSHLFTFLTGAEWWAQDFRKSLPIFGWIPLPFLSEIEIPLYVIVLILMIMGAVIPTVRSNVSNVQEVVEARKGSMALALAMILPFIALLAGVSIWCYLSPSSIMRNQPHLLVIGTGFNFGYLVGRMILAHLCDEPKGLKSGMFMSLVFLCFLIANALIAKINDGTPLVDELVLLVLYCAYTVGLYLHLAVSVVHEIKDALGIYCFRITRKEA

SEQ ID NO: 110821 - protein, 328 aa, Setaria italica
  Transcript Sequence Number=SeqID_44847
  Gene Ontology: Mol. function=catalytic activity; Biological process =metabolic process
  Homolog annotation: Hit_ID=B6TNE1; Match level="QueryCoverage=96%, HitCoverage=56%, E-value=1e-152, Identity=83%"; Hit description=4 -coumarate--CoA ligase 2
  Pfam annotation: Domain name=AMP-binding; Domain location=10-328; Score=161.8; E_value=2e-45; Accession=PF00501.20; Description=AMP -binding enzyme
FRTKGCKGNVRSGVPVIGIGDAERMPGAIGWDELLAAADRTGAPVVALEPVQQSDLCALPYSSGTTGVSKGVMLSHRNLVSNLCSSMFAVGEELAGQVVTLGLMPFFHIYGITGICCATLRHKGTVVVMDRFDLRTFLGALVAHRVMFAPLVPPVMLAMVKSPVAAEFDLSGLALRSVMTAAAPLAPDLLAAFQEKFPGVQVEEAYGLTEHSCITLTHAGGDPQRGPVQIAKKNSVGFILPNLEVKFVDPDTGRSLPKNTPGEVCVRSQAVMQGYYKKKEETERTIDAKGWLHTGDVGYIDDDGDVFIVDRIKELIKYKGFQVAPAEL

SEQ ID NO: 110822 - protein, 176 aa, Setaria italica
  Transcript Sequence Number=SeqID_44848
  Gene Ontology: Mol. function=DNA binding; Cellular component=nucleus; Biological process=regulation of transcription, DNA-dependent
  Homolog annotation: Hit_ID=B6T3X1; Match level="QueryCoverage=90%, HitCoverage=56%, E-value=3e-50, Identity=64%"; Hit description=NAC domain-containing protein 67
  Pfam annotation: Domain name=NAM; Domain location=1-45; Score=-24.2; E_value=3.5e-05; Accession=PF02365.7; Description=No apical meristem (NAM) protein
KATGADKPVEHAGRTAGIKKALVFYHGKPPRGVKTEWIMHEYRLAGAGAKKPGKDGSLRLDDWVLCRLYHKKNEYEKMQGHKEKVVEAEASLTDTRTPESEIDDDAFPAFDDMAPAPAPTTAPAPAGAVQPKEEVQDFGSLGGDDWLAGINLDDLQMDADLQHARVAGGPQGGSGR

SEQ ID NO: 110823 - protein, 138 aa, Setaria italica
  misc_feature (27)..(27): Xaa can be any naturally occurring amino acid
  Transcript Sequence Number=SeqID_44849
  Homolog annotation: Hit_ID=B9RDF9; Match level="QueryCoverage=86%, HitCoverage=4%, E-value=6e-60, Identity=85%"; Hit description =Nucleotide binding protein, putative
  Subcellular localization annotation: CTP_CleavageSite=10; ConfidenceScore=5.12e-01
ATSGKSSAMSAAAAASALAGEGTTHMXPRLFSFLSSDNQGVEAYFHGQFLVVESVGGRGKKASLHFTYAFKPQCWYFVGLEHTNKHGLLGKGESELRLYVDGSLYESRPFEFPRISKPLAFCCIGTNPPPTIAGLQRR

SEQ ID NO: 110824 - protein, 50 aa, Setaria italica
  Transcript Sequence Number=SeqID_44850
INPYMAVEVYAVVAAAIKNASKQYHLRGEHLTSRKSSQITRITFTQESST

SEQ ID NO: 110825 - protein, 41 aa, Setaria italica
  Transcript Sequence Number=SeqID_44851
ECSQLIVFIFRICSNSCKLYKIYSFYFNQELCTQLICYINE

SEQ ID NO: 110826 - protein, 128 aa, Setaria italica
  Transcript Sequence Number=SeqID_44852
AGAISRQLHWLSCWGQSSSQDGLMGLKGFLCYFYEDFFYCAWASPRAAARGPDPPLGVTLVPAPGVAVRRDVRRAHPGVALRLGPRRHRFPYTGSSGEEEADHGHRDDDEGDLAGRRRKLGCHRFGLS

SEQ ID NO: 110827 - protein, 94 aa, Setaria italica
  Transcript Sequence Number=SeqID_44853
PSNIPVELKELKFFYRDNYITKAAGENSYMIHNPDFVSSENIMSNTLSTCLDKPIPSRNMWIRVENELISTSILPNTHGLEGIYHVSKQSLKVS

SEQ ID NO: 110828 - protein, 566 aa, Setaria italica
  Transcript Sequence Number=SeqID_44854
  Gene Ontology: Mol. function=nucleotide binding; Biological process =defense response
  Homolog annotation: Hit_ID=Q2R1W1; Match level="QueryCoverage=100%, HitCoverage=58%, E-value=0.0, Identity=65%"; Hit description=NB-ARC domain containing protein
  Pfam annotation: Domain name=NB-ARC; Domain location=168-461; Score =201.8; E_value=1.8e-57; Accession=PF00931.14; Description=NB-ARC domain
MEFATGAIGTLLPKLGMLLKEEYDLQKSVKEGIRFLMAELECMQVGLKKVSNVPVDQLDELVKIWARDVRELSYDMEDIVDTFMLRVDGLEANKKHDIKGLVQRCCNSLSKVKICHSIGNKIKYIKSQVEEVKKRHDRYRIDDVIAQHPTVDPRIFTLFEEVTNLVGIGKTSNDLIKRLFGGDDSTNKKLKIVSIVGFGGLGKTTLAKAVFDMLEKQFECTAFVPVGRESDIKKVFRNILIALDKHKYMGFDTAALSDWQLINELREHLDKRRYLIVIDDVWETSTWKLIKCALVDGSCGSRVITTTRISQVAHEVGDVYVMETLSDDDSKKLFYTRILDPVSQGDECKGQTNNQLDEATKRILRKCGGVPLSIITIASLLVDKPVEDWSNVYDSIGFGPKDQNGTVQNTRNILSLSYYDLPSYLKTCLLYLSIFPEDHWIEKNSLIWMWVAEGFLKEEQGKGSFEDGERCFTELINKSMIQPTKSDEDAAVDGCHVHDMVLDLIRSLATEENFIKILDREHQDCSSPWSSSVRRLALHEGSNQDKNNNLADGMAKLRSFNAIKCP

SEQ ID NO: 110829 - protein, 89 aa, Setaria italica
  misc_feature (16)..(16): Xaa can be any naturally occurring amino acid
  Transcript Sequence Number=SeqID_44855
  Gene Ontology: Mol. function=zinc ion binding
MPSPSRKRKYAYPPKXSNPAAPTGRRSKLCCTEEEEAALREAMEKFTPRDNGAIPWVQILEHGRNVFHRTRLPCDLRVKWRNMRKKAGS

SEQ ID NO: 110830 - protein, 92 aa, Setaria italica
  Transcript Sequence Number=SeqID_44856
RKSIVIPVDEGRKVGRKGKVKGKRDFESEMEEASIDIKKSKKGKIEEGKKKKKSVMCGGDDGEVLVDGLEDKKSKGVRSDGKVNKTRTRVKV

SEQ ID NO: 110831 - protein, 129 aa, Setaria italica
  Transcript Sequence Number=SeqID_44857
MDAEANGDEGVANESGKRKRNKKDQIKNIEMQGEVQVETEKKKWRKSVVVSVDEEKKVGKKGKDKGKRDLENEMEEPSIGNKKNKKGKIEEGKKKKSMKGDEVCVDESLEDKKSKGKKLDGKIKKTRRG

SEQ ID NO: 110832 - protein, 419 aa, Setaria italica
  Transcript Sequence Number=SeqID_44858
  Gene Ontology: Mol. function=structural constituent of ribosome; Cellular component=intracellular; Biological process=translation
  Homolog annotation: Hit_ID=B6SGX4; Match level="QueryCoverage=98%, HitCoverage=99%, E-value=1e-127, Identity=61%"; Hit description =Structural constituent of ribosome
PPTPQKPHPVPRETVAGAVASLTKWMKKRAEEGPPNLLADERDDLVIVQLSLRRVPASPTTRPRLLPLPHPVVAHDGASVCFISDDRPNSRSPSASGLLDASKSLHRLPVSEVIPLSTLRTDYRPYESRRRLAASHDLFIADRAILPLLPRVLGKAFYSTKKAPIGVDFTRVGWPEQVRKVLGSAFLYLRTGTCSGIKVGRLDMDEEEIVENVMAAVEAAVEKVPKMWANVRALHLKAVDSVALPIYQIVPELGMKIEVPVARLEGELGSGEVIDAAEVETLGKKIDKKKRTLRYADANDGAGVASEESGKRKRNKKEQIVMQEEVQAEIKKKRRKSIVIPVDEGRKVGRKGKVKGKRDFESEMEEASIDIKKSKKGKIEEGEKRGDDGEVLVDGLEDKKSKGVRSDGKVNKTRTRVKV

SEQ ID NO: 110833 - protein, 175 aa, Setaria italica
  Transcript Sequence Number=SeqID_44859
  Gene Ontology: Mol. function=calcium ion binding; Cellular component =synaptic vesicle; Biological process=pathogenesis
  Homolog annotation: Hit_ID=B6T814; Match level="QueryCoverage=100%, HitCoverage=100%, E-value=7e-97, Identity=97%"; Hit description =Calcineurin subunit B
  Pfam annotation: Domain name=efhand; Domain location=31-59; Score =9.5; E_value=1.9; Accession=PF00036.24; Description=EF hand
  Pfam annotation: Domain name=efhand; Domain location=95-123; Score =24.5; E_value=0.00044; Accession=PF00036.24; Description=EF hand
  Pfam module annotation: Pfam domain module=efhand::efhand; Domain location=31-59::95-123
MGSTSSMLTQYDIEEVQDHCNHAFSQPEIVSLYHRFCQLDRNGGGFVSADEFMSVPEFAVNPLSQRLLRMLDGLNFKEFVAFLSAFSPRTSLQQKMEFIFRVYDTDCNGKVAFDDMLSILRDLTGSFMTEQQRQKVLTHVLEEAGYTKDSHFTLPDFMKILGNSELKMEVEVPID

SEQ ID NO: 110834 - protein, 187 aa, Setaria italica
  Transcript Sequence Number=SeqID_44860
  Gene Ontology: Mol. function=hydrolase activity, acting on glycosyl bonds; Biological process=cell wall organization and biogenesis
  Homolog annotation: Hit_ID=B9RZX1; Match level="QueryCoverage=96%, HitCoverage=37%, E-value=1e-72, Identity=68%"; Hit description =Polygalacturonase, putative
  Pfam annotation: Domain name=Glyco_hydro_28; Domain location=1-152; Score=-73.8; E_value=2e-05; Accession=PF00295.9; Description =Glycosyl hydrolases family 28
TGSYDVDIQNVTCGPGHGISIGSLGVHNSQACVANVTVRNAVIRNSDNGLRIKTWQGGMGAVSGITFDTVVMENVRNCIIVDQYYCLDKRCMNQSTAVHVTDVSYTNVRGSYDVRAAPIHFACSDTVPCTNITMSEVELLPASGELVDDPFCWSAYGTQQTPTIPPITCLQEGLPDALLDNPDLKCR

SEQ ID NO: 110835 - protein, 822 aa, Setaria italica
  Transcript Sequence Number=SeqID_44861
  Gene Ontology: Mol. function=nucleic acid binding
  Homolog annotation: Hit_ID=Q6J733; Match level="QueryCoverage=92%, HitCoverage=94%, E-value=0.0, Identity=49%"; Hit description=AML1
  Pfam annotation: Domain name=RRM_1; Domain location=193-258; Score =51.7; E_value=2.9e-12; Accession=PF00076.14; Description=RNA recognition motif. (a.k.a. RRM, RBD, o
  Pfam annotation: Domain name=RRM_1; Domain location=278-343; Score =45.4; E_value=2.2e-10; Accession=PF00076.14; Description=RNA recognition motif. (a.k.a. RRM, RBD, o
  Pfam annotation: Domain name=RRM_2; Domain location=654-750; Score =219.3; E_value=1e-62; Accession=PF04059.4; Description=RNA recognition motif 2
  Pfam module annotation: Pfam domain module=RRM_1::RRM_1::RRM_2; Domain location=193-258::278-343::654-750
  Subcellular localization annotation: CTP_CleavageSite=48; ConfidenceScore=5.14e-01
MDQPGVHPKQSEPANIPSRRTHQMRNIWAWGVPSTTTTNGSNDAVLFSCSLPSGLKLPGVEREHLAQPINEMFPARKQPGPNNRVTDTMDDVAQHLIGNLLPDDEEELLAGVINDFDHVKLQNQAEELEEYDVFRNSGGMELDVDPLETITVGTAKTSIINGTGSGSSQYSLQSCVGTVTGEHPFGEHPSRTLFVRNINSNVEDSELRSLFEPFGDIRSMYTATKHRGFVMISYYDIRDARTAMRTLQNKPLRRRKLDIHFSIPKENPSDKDMNQGTLVIFNLEPAVSNEELLRIFGAFGEVREIRETPQKRHHRFIEYYDVRAAEAALRSLNKSDIAGKRVKLEPSRPGGARRSFVQQINHDFEQDDARHTMLHLGSPSANSPPSLWSQLGSPTEHNQFNTLSENAFNSGMSPLGGNHITGLSPGYPPMKPIGKSSNRNILADHIFHGVSNFHNSHSFPEQHGGIVSASPLVSSAASSASTASGFTTLAGTPFLWANKHTLREHSQPSAFHSPPIGNSHFPNSITQRQGSLYRNLRGSFGPSEYFSQYHVGSAPSVLPLESNFGYNPESPDTSYMRQGKFGSIGPSRAGGNLVTNFGVHSRFNAPSVQSDLVGFEGPLEPGRNHAIGHMGDQEDSRMQYQLDLEKIVTGKDTRTTLMIKNIPNKYTSKMLLDVIDETHEGAYDFFYLPIDFKNKCNVGYAFINMTAPAYIVSFYKAFTGRKWEKFNSEKVVSLAYARIQGKSALINHFQNSSLMNEDKRCRPMLFDPKHIENGNKILADGTNISLKDGMQDGCDLSGDPTKDSFRLSSEIIGQLGSSPEGI

SEQ ID NO: 110836 - protein, 257 aa, Setaria italica
  misc_feature (17)..(17): Xaa can be any naturally occurring amino acid
  Transcript Sequence Number=SeqID_44862
  Gene Ontology: Mol. function=receptor activity; Cellular component =cell wall
  Homolog annotation: Hit_ID=B6UAZ2; Match level="QueryCoverage=87%, HitCoverage=57%, E-value=9e-66, Identity=59%"; Hit description =Systemin receptor SR160
  Pfam annotation: Domain name=LRRNT_2; Domain location=35-74; Score =18.3; E_value=0.012; Accession=PF08263.4; Description=Leucine rich repeat N-terminal domain
  Pfam annotation: Domain name=LRR_1; Domain location=108-130; Score =4.8; E_value=36; Accession=PF00560.25; Description=Leucine Rich Repeat
  Pfam annotation: Domain name=LRR_1; Domain location=132-154; Score =6.8; E_value=15; Accession=PF00560.25; Description=Leucine Rich Repeat
  Pfam annotation: Domain name=LRR_1; Domain location=156-179; Score =10.7; E_value=2.7; Accession=PF00560.25; Description=Leucine Rich Repeat
  Pfam annotation: Domain name=LRR_1; Domain location=205-227; Score =2.3; E_value=1.1e+02; Accession=PF00560.25; Description=Leucine Rich Repeat
  Pfam annotation: Domain name=LRR_1; Domain location=230-252; Score =6.2; E_value=20; Accession=PF00560.25; Description=Leucine Rich Repeat
  Pfam annotation: Domain name=LRR_1; Domain location=84-106; Score =0.4; E_value=2.5e+02; Accession=PF00560.25; Description=Leucine Rich Repeat
  Pfam module annotation: Pfam domain module=LRRNT_2::LRR_1::LRR_1::LRR_ 1::LRR_1::LRR_1::LRR_1; Domain location=35-74::108-130::132-154::156 -179::205-227::230-252::84-106
CLILPCLSQPLPAPSPXPAAAPPPTLPLSPFNDRLDAAYIALQAWKHAITEDPKNLTANWCGPFVCNYTGVFCTAAPDDPHILTVAGVDLNHGRIAGFLPDHLGLLADVALLHLNSNRFHGTLPGSMQHMRLLFELDVSNNLLSGAFPSFLTSLPSLKYLDLRFNKFDGDLPDSVFGGKLSLDAIFANNNRFNVTLSSRTLANSTASVIVLANTELAGCLPPSIGDMADTLVELVLLNTSISSCIPPEIGKLKKLKV

SEQ ID NO: 110837 - protein, 160 aa, Setaria italica
  Transcript Sequence Number=SeqID_44863
  Gene Ontology: Mol. function=metal ion binding
  Pfam annotation: Domain name=zf-C3HC4; Domain location=2-26; Score =1.3; E_value=0.072; Accession=PF00097.17; Description=Zinc finger, C3HC4 type (RING finger)
LPSCSHAFHIDCIDTWLHHNVSCPLCRTVVTGGVALPLARDDHEGSWRELQVGDRHIGPAARMGYGSSCRFPTKSGAAQEPITRSFSMDCFAGGLGRKPPQKDPAAGSSEAGPSLANAAAAAAGSSSNVVADRGAGETSGRFRRLLSSFGLGRSSRSTVL

SEQ ID NO: 110838 - protein, 383 aa, Setaria italica
  Transcript Sequence Number=SeqID_44864
  Gene Ontology: Mol. function=oxidoreductase activity; Cellular component=extracellular region; Biological process=oxidation reduction
  Homolog annotation: Hit_ID=Q8S8Z5; Match level="QueryCoverage=91%, HitCoverage=61%, E-value=1e-122, Identity=60%"; Hit description =Syringolide-induced protein B13-1-1 (Fragment)
  Pfam annotation: Domain name=Cu-oxidase; Domain location=159-320; Score=205.2; E_value=1.7e-58; Accession=PF00394.14; Description =Multicopper oxidase
  Pfam annotation: Domain name=Cu-oxidase_2; Domain location=38-147; Score=-12.5; E_value=0.016; Accession=PF07731.6; Description =Multicopper oxidase
  Pfam annotation: Domain name=Cu-oxidase_3; Domain location=31-148; Score=189.3; E_value=1.1e-53; Accession=PF07732.7; Description =Multicopper oxidase
  Pfam module annotation: Pfam domain module=Cu-oxidase::Cu-oxidase _2::Cu-oxidase_3; Domain location=159-320::38-147::31-148
MGRPPRLLCCLFLTLSLAAAARAATRHHEWDISYQFTHSDCVRKLAVTINGQTPGPTIRATQGDTVVVRVKNSLLTENVAIHWHGIRQIGTPWADGTEGVTQCPILPGDVFTYTFVVDRPGTYMYHAHYGMQRSAGLNGLIVVAAAPGGPDAEPFRYDGEHSVLLNDWWHRSTYEQSTGLASVPIVWVGEPQSLLINGRGRFVNCSAMAAGACNATHPECAAPVFAVVPGKTYRFRIASVTSLSALNFEIEGHPMTVVEADGHYVKPFVVKNLNIYSGETYSVLIKADQDPNRNYWLASNVVSRKPSTATGTAILSYYGGRSSTRRPPPTTPPTGPAWNDTTYRFRQSVATVAHPAHVEPPPPRADRTILLLNTQNKIDGRIK

SEQ ID NO: 110839 - protein, 152 aa, Setaria italica
  Transcript Sequence Number=SeqID_44865
ETNRRVVKIPLTPSQLKSNSLGKLSGTSGSVSEHMGSIPELSCFRIDEDSDIAEENEYQDILPGSVGTQRQSGRKVLQDITRLCQNTGNSASCSIGIMDTSDTNFTTETCSSELNHQPGLRNDGDNKKAKESYASLVKKGGKMSRSFRDRLS

SEQ ID NO: 110840 - protein, 376 aa, Setaria italica
  Transcript Sequence Number=SeqID_44866
  Gene Ontology: Mol. function=kinase activity
  Homolog annotation: Hit_ID=C3SA48; Match level="QueryCoverage=89%, HitCoverage=80%, E-value=7e-23, Identity=30%"; Hit description =Autophagy-related protein 10
MEVQMAAQAAKSAGRSTPPHHHGGGAKPVPGYLRPSAGSCHHVCKYGGTHAFEDKEATKNKKPHPKARKQPAAAAPAESQSRVMGKVRSVFRRRVGDSSRAAEKAASAGKGSKGGGDSVEWKDIVAYDTTVPPHGSSPQQPGKVSAPIIGSGEAEKEDVVKGNKSHEKTKIVTGQVGDGVGAQGETLDKKSAKPPKGKKPMATLLVEKMSIDQELLQGYQILSPSLIQSRASLLRDLEKEMVHEATNAKEVKPMYSLDEEEEYAAAAEASRPIPAHRRVKSMSMSISSRSVRYPFARQASKNSSAGTFKLRSRSTKAPIAPPEEEKKPARLRSRRGEDPSSGSTGRSIQLRIRSLRRRGVGGSGGAGAGFVVPAVV

SEQ ID NO: 110841 - protein, 107 aa, Setaria italica
  Transcript Sequence Number=SeqID_44867
ISMIIFPSYDKVLASGWHHARGVRGCGLHGRSCAPTAQLVHGAPGRKRAPILDMQSSRRRAPGVRSLHASTPLPLPPWQLPGSSGVSFPSFSSSFPLEPMHMRRTSS

SEQ ID NO: 110842 - protein, 69 aa, Setaria italica
  Transcript Sequence Number=SeqID_44868
SLIELRSREVVVGTNNLIINRRKRTENIWNTHGDRRRKKKRQNFIRKGSKVLHACNARPAPGPPPPASY

SEQ ID NO: 110843 - protein, 209 aa, Setaria italica
  Transcript Sequence Number=SeqID_44869
  Gene Ontology: Mol. function=transporter activity; Cellular component= integral to membrane; Biological process=transport
  Homolog annotation: Hit_ID=Q9ATM1; Match level="QueryCoverage=98%, HitCoverage=82%, E-value=7e-85, Identity=77%"; Hit description =Aquaporin SIP2-1
  Pfam annotation: Domain name=MIP; Domain location=9-187; Score=-65.5; E_value=1.8e-05; Accession=PF00230.12; Description=Major intrinsic protein
GFGGRPEAEAVKVSLSLVYMFIFAWLVAATGGASYNPLTVLAAAVASHGGPAVYLFTAFVRIPAQVVGAVLGVKLIQFTFPNVGKGARLSVGAHHGALAEGLATFMVVMVSVTLKKKKMKSFFMKTWITSIWKNTIHILSSDITGGIMNPASAFAWAYARGDHTTFDHLLVYWLAPLQATLLGVWVVTFLTKPKKIKEQEADENKTKKE

SEQ ID NO: 110844 - protein, 171 aa, Setaria italica
  misc_feature (3)..(3): Xaa can be any naturally occurring amino acid
  misc_feature (6)..(6): Xaa can be any naturally occurring amino acid
  Transcript Sequence Number=SeqID_44870
  Gene Ontology: Mol. function=protein serine/threonine kinase activity; Cellular component=plasma membrane; Biological process =protein amino acid phosphorylation
  Homolog annotation: Hit_ID=Q2R000; Match level="QueryCoverage=100%, HitCoverage=52%, E-value=2e-33, Identity=48%"; Hit description =Protein kinase domain containing protein
PRXTDXGLALTWEGPDHMECVRGTYGYAAPEYICTGALNLTSDVYSFGVVMLQLLTGKRSACFNELVKWEEGAKKDHFARYTLVELEREKQDNFASYGLVDLTVPLIEAGELWKVLDRRPAVKPTPRQLEAAELVAQAAVRCVRLQWEARPSISEVVATLETALELARCDG

SEQ ID NO: 110845 - protein, 94 aa, Setaria italica
  Transcript Sequence Number=SeqID_44871
  Gene Ontology: Mol. function=hydrolase activity, acting on ester bonds; Cellular component=apoplast; Biological process=lipid metabolic process
  Homolog annotation: Hit_ID=B6SRX6; Match level="QueryCoverage=60%, HitCoverage=15%, E-value=2e-23, Identity=89%"; Hit description =Anther-specific proline-rich protein APG
  Subcellular localization annotation: CTP_CleavageSite=11; ConfidenceScore=5.08e-01
MGAATVTSSPRSMVAVAFLAAATTFLLAAATAAPVPAIYVFGDSLADVGNNNHLPTLLRADFPHNGIDYPGRKATGRFSNGKNSVDFLADSLGL

SEQ ID NO: 110846 - protein, 303 aa, Setaria italica
  Transcript Sequence Number=SeqID_44872
  Gene Ontology: Mol. function=hydrolase activity, acting on ester bonds; Biological process=lipid metabolic process
  Homolog annotation: Hit_ID=B6SRX6; Match level="QueryCoverage=84%, HitCoverage=70%, E-value=1e-105, Identity=74%"; Hit description =Anther-specific proline-rich protein APG
  Pfam annotation: Domain name=Lipase_GDSL; Domain location=48-287; Score=110.1; E_value=7.4e-30; Accession=PF00657.14; Description=GDSL- like LipaseAcylhydrolase
  Subcellular localization annotation: CTP_CleavageSite=37; ConfidenceScore=5.21e-01
QANVVDDGAMGAATVTSSHRSMAVAVAFLAAATTFLLAAATAAPVPAIYVFGDSLADVGNNNHLPTLLRADFPHNGIDYPGRKATGRFSNGKNSVDFLADSLGLASPPPYLALSRSNANYANGVNFASGGAGVSNATNKGQCISFDKQIDYFSSVNASLAQSLGQAQTTAHLAKSLFAITIGSNDIIHYAKSSSAAGNLPPQPFVDALIQTLTAQLQRLYDLGARKLVFLGTAPVGCCPRLRKLSAARDCSAVANDASVRYNAAAASLLGGMAARHPDMHYALFESSAALLPFINTPAAYGFA

SEQ ID NO: 110847 - protein, 112 aa, Setaria italica
  Transcript Sequence Number=SeqID_44873
  Gene Ontology: Mol. function=zinc ion binding; Biological process =carbohydrate metabolic process
  Homolog annotation: Hit_ID=Q75IS6; Match level="QueryCoverage=85%, HitCoverage=6%, E-value=9e-16, Identity=45%"; Hit description =Putative Mutator-like transposase
  Pfam annotation: Domain name=FAR1; Domain location=47-112; Score =30.4; E_value=2.6e-08; Accession=PF03101.7; Description=FAR1 family
YHFGCSVYNTTKSWSVPFCGSSYTPECDESLKPAVGMTFDNIESAKEFYRAYAAHVGFPVRVGQHKAKDGVVTHKRLYCSREGFRKPRDETQSEPECSEKRKCERKITRCGC

SEQ ID NO: 110848 - protein, 42 aa, Setaria italica
  Transcript Sequence Number=SeqID_44874
NTTTKVAASMLNICNIQHVPLTCPQNMNGKHFPQLFYQMHHF

SEQ ID NO: 110849 - protein, 76 aa, Setaria italica
  Transcript Sequence Number=SeqID_44875
RIEETAIRTSSLTLFKWCIVIDMSFSFLHFPTVTTTHAGAACVSPKGQNDQASSNALDDQGSPRVMERRYATEISD

SEQ ID NO: 110850 - protein, 58 aa, Setaria italica
  misc_feature (1)..(19): Xaa can be any naturally occurring amino acid
  Transcript Sequence Number=SeqID_44876
XXXXXXXXXXXXXXXXXXXNYKSVIRYLDRFKFDFPCQKLASIHHFFVRMPSLHLVIL

SEQ ID NO: 110851 - protein, 105 aa, Setaria italica
  misc_feature (8)..(8): Xaa can be any naturally occurring amino acid
  Transcript Sequence Number=SeqID_44877
  Gene Ontology: Mol. function=mRNA (2'-O-methyladenosine-N6-) -methyltransferase activity; Cellular component=nucleus; Biological process=nucleobase, nucleoside, nucleotide and nucleic acid metabolic process
  Homolog annotation: Hit_ID=B6SVX1; Match level="QueryCoverage=100%, HitCoverage=14%, E-value=4e-39, Identity=77%"; Hit description=N6 -adenosine-methyltransferase MT-A70-like protein
MEAQTDAXPGGGDDLAAMREQCRTLEESITARREAQLDLIGSLQHLVPDLVPSLDQSLRLVAAFNGRPFVPTLYPNASGHAQSASLKPHHRRALPDPARSTRRKT

SEQ ID NO: 110852 - protein, 28 aa, Setaria italica
  Transcript Sequence Number=SeqID_44878
ILYIAIWLMNATLKIYVIHKPYILVLHS

SEQ ID NO: 110853 - protein, 64 aa, Setaria italica
  Transcript Sequence Number=SeqID_44879
  Subcellular localization annotation: CTP_CleavageSite=58; ConfidenceScore=5.27e-01
EAIKRFNPIPSPQFSTSHLHSRAPLQAGSQPRIGQQPFAVADTCCVPCPRGVTHSVSRLNHSKK

SEQ ID NO: 110854 - protein, 31 aa, Setaria italica
  Transcript Sequence Number=SeqID_44880
LVLFNEKLQRYACMTKMDSKEIMADAAGLTE

SEQ ID NO: 110855 - protein, 446 aa, Setaria italica
  misc_feature (274)..(274): Xaa can be any naturally occurring amino acid
  Transcript Sequence Number=SeqID_44881
  Gene Ontology: Mol. function=galactosylgalactosylxylosylprotein 3 -beta-glucuronosyltransferase activity; Cellular component=membrane
  Homolog annotation: Hit_ID=B6U0V3; Match level="QueryCoverage=100%, HitCoverage=100%, E-value=0.0, Identity=85%"; Hit description =Galactosylgalactosylxylosylprotein 3-beta-glucuronosyltransferase 1
  Pfam annotation: Domain name=Glyco_transf_43; Domain location=214 -424; Score=216.0; E_value=1e-61; Accession=PF03360.8; Description =Glycosyltransferase family 43
MARRNAGAMQREGSAGSVKDWSEFDPSPSPKLAYSQSYVAMRGLLTSVASMDPVLMSSGLKSLWAALSSHRHARSLERPKSKGANWKRPMVHLLVCFLVGILIGFTPLFSVDLSNKIDSENEMLPFDGDVVDRQMLELKSTKLESFAAETEAVEEQQVDESPPVPAMLDDEVDYIEASHVVPSVSDSDFVVRKQLIIVTTTSVRPHQAYYLNRLAHVLKNVPPPLLWIVAEWPYQSRETAEILRSSGVMYRHLICTRNTTNIRKIIVCQKNNAXFHIKKHRLDGIVHFADEERAYSVDLFEEMRKIRRFGTWPVAIHVGARYRVVLEGPLCRGNQVTGWHTNQRRGVPRRFPIGFSGFAFNSTILWDPQRWNSPTLESIILHSGGRGGLQESRFIEKLVEDETQMEGLADNCSRVMVWNFDLEPPQLNYPTGWLLKKHLDVVVPIT

SEQ ID NO: 110856 - protein, 65 aa, Setaria italica
  Transcript Sequence Number=SeqID_44882
FCNKEINKMFSISRILVVIRGVAITLFNFNYCSPGGTGRVLQLYKIFWASRFFKEPMFQLLCFLL

SEQ ID NO: 110857 - protein, 107 aa, Setaria italica
  Transcript Sequence Number=SeqID_44883
  Subcellular localization annotation: CTP_CleavageSite=43; ConfidenceScore=5.15e-01
HATTNSRNHRMATEKIGTSLSLSFLSLSHNNTQDLQAGPSRARGSSVERLMGRPGPKNPQPNELVPPAHEHGDAAAHDVEPSSLLLHHAGQTAWHRPGGRASRRPAL

SEQ ID NO: 110858 - protein, 124 aa, Setaria italica
  Transcript Sequence Number=SeqID_44884
  Gene Ontology: Mol. function=protein serine/threonine kinase activity; Biological process=protein amino acid phosphorylation
  Homolog annotation: Hit_ID=Q2R2M7; Match level="QueryCoverage=65%, HitCoverage=12%, E-value=2e-18, Identity=60%"; Hit description =Protein kinase domain containing protein
AVLLELIARRRVKQGNVSLIGTMCSAYAKGNRSRELFDAEITNSINVRILEELASLATECLNLDIDKRPLMNDVAYRLRMLRKTLLGWQGVGLWEKSVGVSKRNCGISETLAKLSNVRILQKMR

SEQ ID NO: 110859 - protein, 95 aa, Setaria italica
  Transcript Sequence Number=SeqID_44885
TSQTRRERRVVLVSTPNRTRAFAGCLSCTESNARKPQPKKRIDRQHRHLDYVLGSVLKMKRQPDQVLVQWSRGIYSSMQCCQSSVLRGTSELTRP

SEQ ID NO: 110860 - protein, 770 aa, Setaria italica
  Transcript Sequence Number=SeqID_44886
  Gene Ontology: Mol. function=nucleoside-triphosphatase activity; Cellular component=nucleus; Biological process=regulation of transcription, DNA-dependent
  Homolog annotation: Hit_ID=Q43704; Match level="QueryCoverage=100%, HitCoverage=100%, E-value=0.0, Identity=94%"; Hit description=DNA replication licensing factor MCM3 homolog 1
  Pfam annotation: Domain name=AAA; Domain location=335-521; Score= -38.9; E_value=0.065; Accession=PF00004.21; Description=ATPase family associated with various cellular activities (AAA)
  Pfam annotation: Domain name=AAA_3; Domain location=335-476; Score =0.8; E_value=0.0003; Accession=PF07726.3; Description=ATPase family associated with various
  Pfam annotation: Domain name=AAA_5; Domain location=335-482; Score= -4.7; E_value=0.0024; Accession=PF07728.6; Description=ATPase family associated with various
  Pfam annotation: Domain name=MCM; Domain location=277-645; Score =617.4; E_value=1.5e-182; Accession=PF00493.15; Description=MCM235 family
  Pfam annotation: Domain name=Mg_chelatase; Domain location=324-486; Score=-130.2; E_value=0.00093; Accession=PF01078.13; Description =Magnesium chelatase, subunit ChlI
  Pfam module annotation: Pfam domain module=AAA::AAA_3::AAA_5::MCM::Mg_ chelatase; Domain location=335-521::335-476::335-482::277-645::324-486
MDVNEEAMAAHKRAFLDFLDQDVGKGVYMQAVRDMVQNKRHRLIIGMDDLRNHNLDLARRVIRSPGEYMQPASDAVSEVARNLDPKFLKEGERVMVGFSGPFGFHRVTPRDLMSSFIGTMVCVEGIVTKCSLVRPKVVKSVHFCPVTGDFLSREYRDISSFVGLPTGSVYPTRDDNGNLLVTEYGMCEYKDHQTLSMQEVPENSAPGQLPRTVDVIVEDDLVDCCKPGDRVSIVGVYKALPGKSKGSVSGVFRTVLIGNNVSLLNKEANAPVYTREDLKRMKEISRRNDTFDLLGNSLAPSIYGHLWIKKAVVLLMLGGVEKNLKNGTHLRGDINMMMVGDPSVAKSQLLRAVMNIAPLAISTTGRGSSGVGLTAAVTSDQETGERRLEAGAMVLADRGVVCIDEFDKMNDQDRVAIHEVMEQQTVTIAKAGIHASLNARCSVIAAANPIYGTYDRSLTPTKNIGLPDSLLSRFDLLFIVLDQMDPEIDRQISEHVARMHRYCTDDGGARSLDKQGYTEEDDGDANAGIFVKYDRMLHGQDRRRGKKAKQDRLTVKFLKKYIHYAKNLIQPKLTDEASDHIATSYAELRDGSANAKSGGGTLPITARTLETIIRLSTAHAKMKLRHEVLKSDVEAALQVLNFAIYHKELTEMEEREQREMEMKQQADHDAGVNDGTADGHGSSGNDPMDVDVGNASNDQDVPTERIEAFEAILGQHVLANHVDQMSINDIEQTVNKESAAPYTRRQVEFILERMQDANRIMIRDGIVRII

SEQ ID NO: 110861 - protein, 135 aa, Setaria italica
  misc_feature (98)..(98): Xaa can be any naturally occurring amino acid
  Transcript Sequence Number=SeqID_44887
HNRETVHRRRVSCRRRRRRSCPARSPPIFLSIAQPQQVLTISSLAQAEQVTENLPVDEVGLLVDVEMPLKNTDGIKVNTHAGIRGIRVMNPELMDCKXCIARHKLDRAFDAMLRGWMEECSREIDRVDLLISTVK

SEQ ID NO: 110862 - protein, 108 aa, Setaria italica
  Transcript Sequence Number=SeqID_44888
  Gene Ontology: Mol. function=DNA binding; Cellular component=nucleus
  Homolog annotation: Hit_ID=B6TIY4; Match level="QueryCoverage=95%, HitCoverage=29%, E-value=2e-18, Identity=56%"; Hit description=KNOX1 domain containing protein
  Pfam annotation: Domain name=KNOX1; Domain location=71-107; Score =38.8; E_value=2.2e-08; Accession=PF03790.5; Description=KNOX1 domain
  Subcellular localization annotation: CTP_CleavageSite=47; ConfidenceScore=5.30e-01
MEDLSDLGAHGHPGAAARPPLCPLPSSSKVSVQVYTVPSSTAGGGARAQVVAPAGHASSGSGHGGRVGDLDPVKAKIVSHPRYHGLLTAFLDCHKARAPIDKAHARTY

SEQ ID NO: 110863 - protein, 192 aa, Setaria italica
  Transcript Sequence Number=SeqID_44889
YTWISLAYVSIVGNTFISEGYPFDTHEIHFDEGGWKSHSHNYKLEPLMNLEASARGPNGLMMDSDWKYNDELSHKGGNVMDKAKVWPEFQYSEMCFSDRIIIELSEVGVSIEPVPDLAQSEDEDIDTEICKLEGQLHKEVVEKKNLLLKLDGIVRTAKESQQREFSRRAMDRLLLRAYEKYMAFCCPNVSSL

SEQ ID NO: 110864 - protein, 50 aa, Setaria italica
  Transcript Sequence Number=SeqID_44890
ATKAEAKSQTHSLLTNTCEHLEPGWISEFLLHQGSIMECIRPISARVITD

SEQ ID NO: 110865 - protein, 122 aa, Setaria italica
  Transcript Sequence Number=SeqID_44891
  Gene Ontology: Mol. function=molecular_function; Cellular component =integral to membrane; Biological process=morphogenesis of an epithelium
  Homolog annotation: Hit_ID=Q658Y4; Match level="QueryCoverage=45%, HitCoverage=6%, E-value=2e-15, Identity=61%"; Hit description =Protein FAM91A1
DNRRIVDFCIRKRLQWNTCFARRVCREGEYYEEMMRYLRRNLASYTRTTLHDICRVSRISPFRYYCDILFEAMKNEQPYDSIPNFTAADALRLTGVGRNEFIDIMNKCRSKKLICSASTLIL

SEQ ID NO: 110866 - protein, 84 aa, Setaria italica
  Transcript Sequence Number=SeqID_44892
  Gene Ontology: Mol. function=oxidoreductase activity, acting on the CH-OH group of donors, NAD or NADP as acceptor; Cellular component =glycerol-3-phosphate dehydrogenase complex; Biological process =glycerol-3-phosphate catabolic process
  Homolog annotation: Hit_ID=B9SLT7; Match level="QueryCoverage=91%, HitCoverage=20%, E-value=4e-34, Identity=81%"; Hit description =Glycerol-3-phosphate dehydrogenase, putative
  Pfam annotation: Domain name=NAD_Gly3P_dh_C; Domain location=2-68; Score=-41.8; E_value=0.00085; Accession=PF07479.6; Description=NAD -dependent glycerol-3-phosphate deh
FARNGGKRSFDELEAEMLHGQKLQGVSTAREVYEVLTYRGWQELFPLLSTVHEICIGQLPPTSIVEYSEHTPNLSIIGGPTPFY

SEQ ID NO: 110867 - protein, 240 aa, Setaria italica
  misc_feature (152)..(152): Xaa can be any naturally occurring amino acid
  Transcript Sequence Number=SeqID_44893
  Gene Ontology: Mol. function=oxidoreductase activity, acting on the CH-OH group of donors, NAD or NADP as acceptor; Cellular component =glycerol-3-phosphate dehydrogenase complex; Biological process =glycerol-3-phosphate catabolic process
  Homolog annotation: Hit_ID=P52425; Match level="QueryCoverage=97%, HitCoverage=63%, E-value=1e-108, Identity=78%"; Hit description =Glycerol-3-phosphate dehydrogenase [NAD+]
  Pfam annotation: Domain name=NAD_Gly3P_dh_C; Domain location=165-237; Score=26.2; E_value=9.9e-10; Accession=PF07479.6; Description=NAD -dependent glycerol-3-phosphate deh
  Pfam annotation: Domain name=NAD_Gly3P_dh_N; Domain location=3-148; Score=160.1; E_value=6.6e-45; Accession=PF01210.15; Description=NAD -dependent glycerol-3-phosphate deh
  Pfam module annotation: Pfam domain module=NAD_Gly3P_dh_C::NAD_Gly3P _dh_N; Domain location=165-237::3-148
PPFYDEVRMWVFEEILPTGKKLSESINEENENCKYLPGIKLGANVIADPDLESAVKDANMLVFVTPHQFVEGICKKLVGKLRPGAEAISLIKGMEVKMEGPCMISKLIADTLGINCCVLMGANIANEIAVEMFSEATIGYRKDKEVANRWAXLFYHTLFLVSVAEDIEGVELCGTLKNIVAIAAGLVDGLDMGNNTKAAIMRIGLREMRAFSKLLFPSVRDNTFFESCGVADLITYMPWR

SEQ ID NO: 110868 - protein, 237 aa, Setaria italica
  misc_feature (83)..(83): Xaa can be any naturally occurring amino acid
  misc_feature (192)..(192): Xaa can be any naturally occurring amino acid
  Transcript Sequence Number=SeqID_44894
  Gene Ontology: Mol. function=oxidoreductase activity, acting on the CH-OH group of donors, NAD or NADP as acceptor; Cellular component =glycerol-3-phosphate dehydrogenase complex; Biological process =glycerol-3-phosphate catabolic process
  Homolog annotation: Hit_ID=P52425; Match level="QueryCoverage=96%, HitCoverage=87%, E-value=3e-70, Identity=75%"; Hit description =Glycerol-3-phosphate dehydrogenase [NAD+]
  Pfam annotation: Domain name=NAD_Gly3P_dh_C; Domain location=100-237; Score=232.6; E_value=9.5e-67; Accession=PF07479.6; Description=NAD -dependent glycerol-3-phosphate deh
  Pfam annotation: Domain name=NAD_Gly3P_dh_N; Domain location=8-182; Score=32.7; E_value=5.8e-09; Accession=PF01210.15; Description=NAD -dependent glycerol-3-phosphate deh
  Pfam module annotation: Pfam domain module=NAD_Gly3P_dh_C::NAD_Gly3P _dh_N; Domain location=100-237::8-182
MENGHAKYRVAVIGSGNWGSVASRLIASNTAKLPSFYDEVRMWVFEEILPTGKKLSESINEENENCKYLPGIKLGANVIADPXLESAVFTTPYFLVSVAEDIEGVELCGTLKNIVAIAAGLVDGLDMGNNTKAAIMRIGLREMRAFSKLLFPSVRDNTFFESCGVADLITTCLGGRNRRVAEAFARNGGKRXFDELEAEMLHGQKLQGVSTAREVYEVLTYRGWQELFPLLSTVLCL

SEQ ID NO: 110869 - protein, 88 aa, Setaria italica
  misc_feature (1)..(26): Xaa can be any naturally occurring amino acid
  Transcript Sequence Number=SeqID_44895
  Subcellular localization annotation: CTP_CleavageSite=60; ConfidenceScore=5.41e-01
XXXXXXXXXXXXXXXXXXXXXXXXXXFFFLVSAGKQLFISFVQTRFPVFSFALTNSKLIPAAISRKIVLPVDLSCTMTLAHKIAFDPA

SEQ ID NO: 110870 - protein, 71 aa, Setaria italica
  Transcript Sequence Number=SeqID_44896
VCPKFIGIQDQSTRTRRIERHTLEGAEGHCKSSRLCRRWLRLDPSCHGHPCAARPWWSYEAEPCDYQGLCT

SEQ ID NO: 110871 - protein, 29 aa, Setaria italica
  Transcript Sequence Number=SeqID_44897
TKGGRPSVSPWGKPTKAGYRSPSVASRKA

SEQ ID NO: 110872 - protein, 160 aa, Setaria italica
  Transcript Sequence Number=SeqID_44898
  Gene Ontology: Mol. function=structural constituent of ribosome; Cellular component=large ribosomal subunit; Biological process =translation
  Homolog annotation: Hit_ID=Q5MF19; Match level="QueryCoverage=81%, HitCoverage=74%, E-value=4e-20, Identity=38%"; Hit description =Ribosomal protein L2 (Fragment)
IALVRWVQGVHFRRRKIPQELSTNSHTPGSTTADVSSRFSLAALSGREHKGKEAASALYSSLGNGDIPSVNSGPSLSLPRIALAGAKPAFFTQVRGNEEGKQTFSLSEIQKWTTDDVLWAQRMKRQAALSWQNDLKKKPWLRTQANRFSSLAAKSVGTSK

SEQ ID NO: 110873 - protein, 443 aa, Setaria italica
  misc_feature (118)..(118): Xaa can be any naturally occurring amino acid
  Transcript Sequence Number=SeqID_44899
  Gene Ontology: Mol. function=structural constituent of ribosome; Cellular component=large ribosomal subunit; Biological process =translation
  Homolog annotation: Hit_ID=P92812; Match level="QueryCoverage=96%, HitCoverage=98%, E-value=1e-111, Identity=46%"; Hit description=60S ribosomal protein L2, mitochondrial
  Pfam annotation: Domain name=Ribosomal_L2; Domain location=31-101; Score=60.6; E_value=5.8e-15; Accession=PF00181.15; Description =Ribosomal Proteins L2, RNA binding domain
  Pfam annotation: Domain name=Ribosomal_L2_C; Domain location=300-428; Score=268.1; E_value=2e-77; Accession=PF03947.10; Description =Ribosomal Proteins L2, C-terminal domain
  Pfam module annotation: Pfam domain module=Ribosomal_L2::Ribosomal_L2_ C; Domain location=31-101::300-428
  Subcellular localization annotation: CTP_CleavageSite=39; ConfidenceScore=5.45e-01
MARQSAISLMRDRAKVGVLKRLTLSSSKTAGRNSSGRITSFHRGGGAKRLQRKVDVKRGTSSLGIVERIEYDPNRSSSIALVRWVQGVHFRRRKIPQELSTNSHTPGSTTADISGRFXLAPLSGRVHKEKEASSALYSSASSALYSSLGNGDVPSVNTGASMSLPRIALAGAKPTFFAQVRGNEEGKQTFSLSGIQKWATDDVLWAQRMKRQAALSWQNDLKKKPSPQAQANRFSTLAAKSIGTSKGPKAKVDCVPVSYILASHHCVPGSTVMNYDSSKPSKSSASSSSANQFDIIDLNSKVGNCIPLANARIGTWVHDIECRPGQGGKMVRAAGTYAKVVQEPGAQCVLRLPSGAEKIVDSKCRATIGIVSNPSHGTRKLRKAGHSRWLGRRPVVRGVAMNPVDHPHGGGEGRTKGGRPSVSPWGKPTKAGYRSPSVASRKA

SEQ ID NO: 110874 - protein, 120 aa, Setaria italica
  misc_feature (26)..(26): Xaa can be any naturally occurring amino acid
  Transcript Sequence Number=SeqID_44900
  Subcellular localization annotation: CTP_CleavageSite=70; ConfidenceScore=5.60e-01
MASPPPSAQLPTSAAAAAGNGRAASXSPVDALFLQNLMSRVQLRPPFLDTNSFLTQDLDDFLLNEFAALSAAAGASDDDEDEGEDDELAGGEGSGEARRRRMLAREEAKLEKEIVRMVLL

SEQ ID NO: 110875 - protein, 217 aa, Setaria italica
  Transcript Sequence Number=SeqID_44901
  Gene Ontology: Mol. function=nucleotide binding; Biological process =defense response
  Homolog annotation: Hit_ID=Q53N63; Match level="QueryCoverage=98%, HitCoverage=24%, E-value=1e-37, Identity=41%"; Hit description=NB -ARC domain, putative
  Pfam annotation: Domain name=LRR_1; Domain location=122-143; Score =4.0; E_value=52; Accession=PF00560.25; Description=Leucine Rich Repeat
  Pfam annotation: Domain name=LRR_1; Domain location=145-166; Score =11.0; E_value=2.4; Accession=PF00560.25; Description=Leucine Rich Repeat
  Pfam annotation: Domain name=LRR_1; Domain location=168-189; Score =4.0; E_value=53; Accession=PF00560.25; Description=Leucine Rich Repeat
  Pfam module annotation: Pfam domain module=LRR_1::LRR_1::LRR_1; Domain location=122-143::145-166::168-189
GGCIKLVSIHNLLHAFMESEAQDSCFLEIHHQANVVNPNTVRRLAIQNYVDAYVHIPNAFPKLRSLLCDFAEDQRSSSSFGELQPQSLWGNLAELCSRACSISENVGSNTLYGLHFLQGSRFLRVIDLNGLKMQKLPDEIGSIIHLRYLGIRNSNLEELPSSMYKLDNLQTLDVRRTNVGKTVDEFWGIEALRHVLAEKMLLPNCSVPLNNQKAPHH

SEQ ID NO: 110876 - protein, 216 aa, Setaria italica
  Transcript Sequence Number=SeqID_44902
  Gene Ontology: Mol. function=nucleotide binding; Cellular component =intracellular; Biological process=small GTPase mediated signal transduction
  Homolog annotation: Hit_ID=Q9XF07; Match level="QueryCoverage=95%, HitCoverage=94%, E-value=1e-113, Identity=94%"; Hit description=Rop3 small GTP binding protein
  Pfam annotation: Domain name=Miro; Domain location=14-127; Score =49.2; E_value=1.6e-11; Accession=PF08477.5; Description=Miro-like protein
  Pfam annotation: Domain name=Ras; Domain location=14-185; Score =248.6; E_value=1.5e-71; Accession=PF00071.14; Description=Ras family
  Pfam module annotation: Pfam domain module=Miro::Ras; Domain location= 14-127::14-185
MSAAAASSVAKFIKCVTVGDGAVRKTCMLICYTCNKFPTDYIPTVFDNFSANVSVDGRIVNLGLWDTAGQEDYSRLRPLSYRGADVFILSFSLVSRASYENVLKKWMPELRRFSPSIPVVLVGTKLDLREDRSYLADHPAASIITTEQGEELRKQIGAVAYIECSSKTQRNIKAVFDTAIKVVLQPPRRREVTRKKMKTSSNQSVRRYFCGSACFR

SEQ ID NO: 110877 - protein, 123 aa, Setaria italica
  misc_feature (15)..(15): Xaa can be any naturally occurring amino acid
  Transcript Sequence Number=SeqID_44903
VVCAHARRSSGTEHXGRIPSSPNDMCHGGDLRRTALLRSVQMRVQSPHPCDLLSSSGHGQEQEGDHVHADELDHDQKRAVGVQLDQRSFSCPKSIQDAEYQSPTNCGLRSDHDVDFVEDQITV

SEQ ID NO: 110878 - protein, 96 aa, Setaria italica
  misc_feature (79)..(79): Xaa can be any naturally occurring amino acid
  Transcript Sequence Number=SeqID_44904
  Gene Ontology: Mol. function=transcription factor activity; Cellular component=plastid
HLTIVLTTSVDPDHSYEELLSKGQVFVRSKRLLERRSKKRKVPRALSNDVLCSVVNSKKKEKPKKFGRVLDPDEPFKLXFLRDRETTEFLTAKEEK

SEQ ID NO: 110879 - protein, 499 aa, Setaria italica
  Transcript Sequence Number=SeqID_44905
  Gene Ontology: Mol. function=transcription factor activity; Cellular component=plastid; Biological process=regulation of transcription, DNA-dependent
  Homolog annotation: Hit_ID=Q9ZPL0; Match level="QueryCoverage=99%, HitCoverage=89%, E-value=0.0, Identity=71%"; Hit description=Sigma factor SIG6
  Pfam annotation: Domain name=Sigma70_r2; Domain location=264-334; Score=82.9; E_value=1.2e-21; Accession=PF04542.6; Description=Sigma -70 region 2
  Pfam annotation: Domain name=Sigma70_r3; Domain location=338-419; Score=66.6; E_value=9.4e-17; Accession=PF04539.8; Description=Sigma -70 region 3
  Pfam annotation: Domain name=Sigma70_r4; Domain location=431-484; Score=82.9; E_value=1.1e-21; Accession=PF04545.8; Description=Sigma -70, region 4
  Pfam module annotation: Pfam domain module=Sigma70_r2::Sigma70 _r3::Sigma70_r4; Domain location=264-334::338-419::431-484
VGVAEDQLHGSKDTLTMKGEKALLELLLDMALDQHVDGKKLIGQETEDSDFESYLREATNRVLYQPAFTEEGDSTSQSSSASAYEPVGSLDLVTPSIEKVTSPEEESGTSATQLDVPHFHCVDPDHSYEELLSKGQVFVRSKRLLERRSKKRKVPRALSNDVLCSVVNSKKKEKPKKFGRVLDPDEPFKLFLRDRETTEFLTAKEEKQMFSQIQNLMKLEEAQRKLEVQCGREPTVAEWAAAVGMSCRELQSSIRIGRRCREKMARSNFRLVIHVARKYEGYGLDIQDLVQDGCCGLMKTFEKFNPSKGCRFPTYAYWWIRQSIKKSIFKNSRLIRLPESVFALLRKVGKARLECIMEGEQPTNENVARRAGITIEKLARLRAKTRKPRSMQDRVWSDDGVTYQEITEDPNFEPPELSVDRLMMRQQVRNFLAILSPREKEIIEHRFGIHDGEPKTLHVIGDMYGLSKERIRQVQNKALDKLKRSVSAQGFDVYFDLLT

SEQ ID NO: 110880 - protein, 89 aa, Setaria italica
  misc_feature (19)..(19): Xaa can be any naturally occurring amino acid
  Transcript Sequence Number=SeqID_44906
  Gene Ontology: Mol. function=transporter activity; Cellular component= mitochondrial inner membrane; Biological process=mitochondrial transport
  Homolog annotation: Hit_ID=B6TAZ9; Match level="QueryCoverage=87%, HitCoverage=26%, E-value=2e-36, Identity=93%"; Hit description =Mitochondrial uncoupling protein 2
  Pfam annotation: Domain name=Mito_carr; Domain location=7-89; Score =85.8; E_value=1.6e-22; Accession=PF00153.19; Description =Mitochondrial carrier protein
  Subcellular localization annotation: CTP_CleavageSite=57; ConfidenceScore=5.10e-01
LSWPATTNSKQAGLGAGFXAVCIGSPVDVVKSRMMGDSTYRSTLDCFAKTLKNDGPGAFYKGFIANFCRIGSWNVIMFLTLEQVRRLFL

SEQ ID NO: 110881 - protein, 215 aa, Setaria italica
  Transcript Sequence Number=SeqID_44907
  Gene Ontology: Mol. function=transporter activity; Cellular component= mitochondrial inner membrane; Biological process=mitochondrial transport
  Homolog annotation: Hit_ID=B6TAZ9; Match level="QueryCoverage=88%, HitCoverage=62%, E-value=8e-77, Identity=79%"; Hit description =Mitochondrial uncoupling protein 2
  Pfam annotation: Domain name=Mito_carr; Domain location=118-212; Score=92.3; E_value=1.7e-24; Accession=PF00153.19; Description =Mitochondrial carrier protein
  Pfam annotation: Domain name=Mito_carr; Domain location=6-112; Score =67.8; E_value=4e-17; Accession=PF00153.19; Description=Mitochondrial carrier protein
  Pfam module annotation: Pfam domain module=Mito_carr::Mito_carr; Domain location=118-212::6-112
  Subcellular localization annotation: CTP_CleavageSite=47; ConfidenceScore=5.11e-01
MATASAFAAVFFSSAFAACFAEVCTIPLDTAKVRLQLQRKAPQSLPPAAAATGAGWAASAGGTLATILSIARDEGVAALWKGIIPGLHRQFLYGGLRVGLYEPVKAFFVGGTAVGDVSLISKILAALTTGVIAIVVANPTDLVKVRLQADGKANTVKRNYSGALNAYATIIRQEGIGALWTGLGPNVARNAIINAAELASYDEFKQLDLVLGFLL

SEQ ID NO: 110882 - protein, 111 aa, Setaria italica
  Transcript Sequence Number=SeqID_44908
MTLGLSWSHAVTLCWCRDAEETIPVETGIVPKPLTTASIPLEDFIVEEVPEVDVGRLGATMSMLQDVIRSVEVPATASGSGSVALSSSTGGSVAVVDVGKAKQATAPGKCL

SEQ ID NO: 110883 - protein, 70 aa, Setaria italica
  Transcript Sequence Number=SeqID_44909
  Gene Ontology: Cellular component=endoplasmic reticulum; Biological process=ubiquitin-dependent protein catabolic process
  Homolog annotation: Hit_ID=B4FHK5; Match level="QueryCoverage=61%, HitCoverage=10%, E-value=5e-14, Identity=93%"; Hit description=NPL4 family protein
MILRIRSRDGTDRITVPDPASATVADLQRLIESHLTVPVTLQRLSLEPALLLPSPSAVPLLADPAAQLAS

SEQ ID NO: 110884 - protein, 329 aa, Setaria italica
  Transcript Sequence Number=SeqID_44910
  Gene Ontology: Mol. function=protein tyrosine kinase activity; Cellular component=MHC class I protein complex; Biological process =protein amino acid phosphorylation
  Homolog annotation: Hit_ID=Q00RM8; Match level="QueryCoverage=99%, HitCoverage=32%, E-value=1e-113, Identity=66%"; Hit description =H0814G11.12 protein
  Pfam annotation: Domain name=Hin1; Domain location=150-307; Score =19.6; E_value=3.9e-05; Accession=PF07320.5; Description=Harpin -induced protein 1 (Hin1)
  Subcellular localization annotation: CTP_CleavageSite=3; ConfidenceScore=5.43e-01
MPHAKTDSEVTSLAPSSPPRSPPRTRPVYYVQSPSRDSHDGEKTATSVHSTPALSPMASPRHSHSSVGRDSSSSRFSGHPKRGHHKGDKSSAGRKGAPPGKGWQEIGVIEEEGLLDDEEHTRIVPKKCYYFLVFVLGFVALFSFFALVLWGASRSQKPQIVMKSIKFENFIIQAGTDASLVPTDMATTNATVKFTYRNKGTFFGIHVTADPFQLAYSQLTLANGDLKKFYQARSSRRTVSVAVLGNKVPLYGGGPTLMAAPAAGGGKQAASSSSVAPVPMVLRTTLHSRAYVLGALVKPKFTMAVECRVVMNPSKLNKIISLEKACHYS

SEQ ID NO: 110885 - protein, 72 aa, Setaria italica
  Transcript Sequence Number=SeqID_44911
  Homolog annotation: Hit_ID=Q84RQ6; Match level="QueryCoverage=94%, HitCoverage=25%, E-value=1e-13, Identity=60%"; Hit description =Putative integral membrane protein NRAMP
HLLCSQVISWIVTVFLMLINGYLIVSFYITDVRGAVLRSSLCVVLVVYLAFIVYLIVRNTSLYSRLCSSMPK

SEQ ID NO: 110886 - protein, 417 aa, Setaria italica
  Transcript Sequence Number=SeqID_44912
  Gene Ontology: Mol. function=transporter activity; Cellular component= membrane; Biological process=iron ion transport
  Homolog annotation: Hit_ID=B9SG31; Match level="QueryCoverage=96%, HitCoverage=79%, E-value=1e-170, Identity=72%"; Hit description =Natural resistance-associated macrophage protein, putative
  Pfam annotation: Domain name=Nramp; Domain location=1-346; Score =685.1; E_value=5.9e-203; Accession=PF01566.10; Description=Natural resistance-associated macrophage protein
FAISTVMGALVQLLSARLGVATGKHLAELCREEYPPWATRALWAMTELALVGADIQEVIGSAIAIKILSGGTVPLWGGVVITALDCFIFLFLENYGVRKLEAFFAVLIATMAVSFAVMFGETKPSGKELLIGLVVPKLSSKTIKQAVGIVGCIIMPHNVFLHSALVQSRKIDTNKKSRVQEAVYYYNIESILALIVSFFINICVTTVFAKGFYGTEQAGNIGLENAGQYLQEKYGTAFFPILYIWAIGLLASGQSSTITGTYAGQFVMGGFLNLRLKKWLRAMITRSFAIIPTMIVALFFDTEDPTMDILNESLNVLQSIQIPFALIPLITLVSKEQVMGSFVVGPITKVISWIVTVFLMLINGYLIVSFYITDVRGAVLRSSLCVVLVVYLAFIVYLIVRNTSLYSRLCSSMPKRS

SEQ ID NO: 110887 - protein, 46 aa, Setaria italica
  Transcript Sequence Number=SeqID_44913
MEASAAAEGGGGGGSAAARSSPAAVQATNDDAATSKLSCVNKGYMK

SEQ ID NO: 110888 - protein, 150 aa, Setaria italica
  Transcript Sequence Number=SeqID_44914
PTRRQQHSKVAANFAPFQLSPTQGYFGQLFCYNPLHCRYSDQQRQATAANISCWQTRYSEQQWPSSITEHIIHADPQFHNQQQAITGKYNPCIPDTQINNDMQSWTTLTHRPGLLPTQAQHAQQKHPLASPTCTTAQRRLMNSLCKKVRQ

SEQ ID NO: 110889 - protein, 550 aa, Setaria italica
  misc_feature (268)..(268): Xaa can be any naturally occurring amino acid
  Transcript Sequence Number=SeqID_44915
  Gene Ontology: Mol. function=gamma-tubulin binding; Cellular component=microtubule organizing center; Biological process =microtubule cytoskeleton organization and biogenesis
  Homolog annotation: Hit_ID=Q4JF26; Match level="QueryCoverage=99%, HitCoverage=75%, E-value=0.0, Identity=70%"; Hit description =OSJNBa0029H02.26 protein
  Pfam annotation: Domain name=Spc97_Spc98; Domain location=1-436; Score=362.2; E_value=9.5e-106; Accession=PF04130.5; Description =Spc97  Spc98 family
  Subcellular localization annotation: CTP_CleavageSite=57; ConfidenceScore=5.11e-01
LQLEHQFRIGRLSVQGLWFFCQRMMSSLNALAVLVEKATSNNTSGSATLNLLQSQAKAMGGDSAVRSLLEKMTEYTSAAYLRMLERWVYEGVIDDPYGEFFIAENKSLQKESLTQDYDAKYWQQRYSLKEGIPSFLTNVAAMILTTGKYLNVMRECGHNVQVSFSENSKLMSFGSNHQYLECIKSAYDFASGELLTLMKDKYDLIGKLRSLKRYLLLDQGDFLVHFMDIAREELTKKPEEISAEKLQSLLDIALRSTAAASDPTHEDXICCVERSSLLKKLATLKDLDCDCPADKLAAADIDQSMQLSITGLETFCLSNKVQWPLSLVISRKALTKYQLIFRLLFHCKHVSRQLCAAWQIQQVFRSVKILGTPILRSSILCRSMLKFVNSLLHYLTFEVLEPNWHLMHDRLQTARSIDEVIQIHDFFLQKCLKECLLLSPELLVKVEKLKALCLQYATSIQLLMPSIEVANSENTSKSGKSRSRTNKSQDRDQQLKLASENVVMSESILKFQAAFNSELQSLAPTLSNSSHAEPYLTHLAQCILGVRIDQ

SEQ ID NO: 110890 - protein, 61 aa, Setaria italica
  Transcript Sequence Number=SeqID_44916
LLKCSPQSAYTITNCFVIIQVQPPELFIITITSTCTRFHQVCLSFYRAKHASMNPSNTSSR

SEQ ID NO: 110891 - protein, 88 aa, Setaria italica
  Transcript Sequence Number=SeqID_44917
MTPLTPAAFLLLLLLCLPEAPPAAAAGDPTPTPWPPQFHATLVMDSHGNMSIADLWYDWPGGRNLHVIRYQLADDAPYYDNEWNNGTS

SEQ ID NO: 110892 - protein, 110 aa, Setaria italica
  misc_feature (35)..(35): Xaa can be any naturally occurring amino acid
  misc_feature (48)..(48): Xaa can be any naturally occurring amino acid
  misc_feature (63)..(63): Xaa can be any naturally occurring amino acid
  Transcript Sequence Number=SeqID_44918
  Gene Ontology: Cellular component=nucleus; Biological process =regulation of transcription, DNA-dependent
  Homolog annotation: Hit_ID=A5HJS4; Match level="QueryCoverage=94%, HitCoverage=17%, E-value=2e-39, Identity=76%"; Hit description =Scarecrow
FTGCYTPRGKVPDRMNVEPTVPSHGENLLNILACXKGPDRVERYVFVXGKWRARMTMAGFTPXCPFNSNVISGIKSILKSYCDRYKFEEDHGGLHFGWGEKTLIVSSAWQ

SEQ ID NO: 110893 - protein, 215 aa, Setaria italica
  Transcript Sequence Number=SeqID_44919
  Gene Ontology: Mol. function=protein phosphatase type 2A regulator activity; Cellular component=protein phosphatase type 2A complex; Biological process=signal transduction
  Homolog annotation: Hit_ID=B9RS96; Match level="QueryCoverage=96%, HitCoverage=41%, E-value=3e-45, Identity=42%"; Hit description =Protein phosphatase 2a, regulatory subunit, putative
  Pfam annotation: Domain name=B56; Domain location=1-215; Score=22.1; E_value=3.6e-10; Accession=PF01603.12; Description=Protein phosphatase 2A regulatory B subunit (B56 family)
PLPPDGLDEDAPAAVLAPAWPHLQVVYDILLSVVAAADARALRHHVDRAFLSSLLALFASEDPRERDRLKTAYHQLYSKLTCERAFMRRSMATALLRLAYEAPPGERPCGAAELLEICGSIINGFAVPLKEEHREFLTRVLMPLHRTRWAHTYHRQLAYCVLQFVHKEPGLAGAVVTGILRHWPVTNCQKEVLLIEELEDILQVLEPEQFQKLAV

SEQ ID NO: 110894 - protein, 228 aa, Setaria italica
  Transcript Sequence Number=SeqID_44920
  Gene Ontology: Mol. function=DNA binding
VARAGPAAAGPSWRFFARMDGLLKGPAICSGQVPQAELGNSIDLRAPAKAEAEVVEADFAAQLPDAGPGAFSDLMNIDTNGAVPEKAEKVDNSVQKESRAADSDANVSSPRSKVANEDVEEVDKVRDRPKKRKSTEFDIAKSIELLASSYLKIEHARMEMYRETERMRAEAEIKKGEMELKRTEIMAKTHLQIAKLFAKRLKEGSGKTGGSSSVTAEVDTHTKKGENG

SEQ ID NO: 110895 - protein, 57 aa, Setaria italica
  Transcript Sequence Number=SeqID_44921
LRLSRTSKKAGGRIQLYKSEGNSLKFKSNNLFRCSSVYVADTVIRTIKYARIIDYFS

SEQ ID NO: 110896 - protein, 120 aa, Setaria italica
  Transcript Sequence Number=SeqID_44922
TRCNQSHETLSLIRTIKRYSGKSNCHTKLNIFCFCSQAYFNALGDKNYLKSKFQYCFVVGPKHVCPLSSVSTRSIPLPSAARFHLQPLSRPAGLVLVPCRRRETSSSVSTSADPLRRSWA

SEQ ID NO: 110897 - protein, 147 aa, Setaria italica
  Transcript Sequence Number=SeqID_44923
  Gene Ontology: Mol. function=binding
  Homolog annotation: Hit_ID=Q7XJU7; Match level="QueryCoverage=97%, HitCoverage=15%, E-value=7e-30, Identity=44%"; Hit description =OSIGBa0124N08.1 protein
  Pfam annotation: Domain name=PPR; Domain location=43-77; Score=6.4; E_ value=1.5; Accession=PF01535.12; Description=PPR repeat
  Pfam annotation: Domain name=PPR; Domain location=8-42; Score=43.9; E_ value=6.3e-10; Accession=PF01535.12; Description=PPR repeat
  Pfam annotation: Domain name=PPR; Domain location=80-114; Score=13.3; E_value=0.24; Accession=PF01535.12; Description=PPR repeat
  Pfam module annotation: Pfam domain module=PPR::PPR::PPR; Domain location=43-77::8-42::80-114
VASSRDAVLWTTMISAYGKFGRVQDAVSLFDRMAQLGIKQDGIAYLAVLSACSHGGLVREGCHYFNLMSDGQSSVKMHPEHYGCMADLLCRRGYLEEALEFIENMPFESSIAAWSALLNSSRIHGNAKLSQLAASRLIKLDPDEPQT

SEQ ID NO: 110898 - protein, 57 aa, Setaria italica
  Transcript Sequence Number=SeqID_44924
  Gene Ontology: Mol. function=mismatched DNA binding
  Homolog annotation: Hit_ID=Q7G278; Match level="QueryCoverage=77%, HitCoverage=6%, E-value=4e-17, Identity=97%"; Hit description=MutS domain V family protein, expressed
VGAGTNPLEGAALGMSLLESFAEAGSFLTLATTHHGQLKTLKYRFLAFQARNYLVLR

SEQ ID NO: 110899 - protein, 606 aa, Setaria italica
  misc_feature (15)..(15): Xaa can be any naturally occurring amino acid
  Transcript Sequence Number=SeqID_44925
  Gene Ontology: Mol. function=mismatched DNA binding; Biological process=maintenance of fidelity during DNA-dependent DNA replication
  Homolog annotation: Hit_ID=Q7G278; Match level="QueryCoverage=73%, HitCoverage=71%, E-value=0.0, Identity=77%"; Hit description=MutS domain V family protein, expressed
  Pfam annotation: Domain name=MutS_V; Domain location=199-425; Score= -37.6; E_value=3.5e-12; Accession=PF00488.13; Description=MutS domain V
LMDKLMRNANNEDSXCIVNGRCCIRTTGDKSSTFDGLLLSSGSDAGSMIEPIAAVPLNDELQESRALVAKAELDVLSKLTDKILLELDSIQSLLQETIKLDKVTARAKYSIAYDGTFPDLYLPNFENETVTSATGGSAKGTSSAQPPKKAWKLYMPNAYHPLLLQQHQENLDRAKRDVASATAEIRRRRIYGQDIAEDQLASDLSSMKLRVSQLEKDQPVPVDFMIAEETTVLVITGPNTGGKTISLKTVGLASLMAKIGLYILASEPVKIPWFNAVYADIGDEQSLTQSLSTFSGHLKQIGAIRAESTSESLVLLDEVGAGTNPLEGAALGMSLLESFAEAGSFLTLATTHHGQLKTLFVSNNSFENACVEFDEENLKPTFKILWGIPGRSNAINIAERLGLPPDIVESSRCLLGTAGAEINALIMDMERFKQDYQRHLQKSQHLLMQSKELHNNLELAQKNIVDHTSAQRKRRVRVISEYAVMARSIIRKKFQQFQESAIAERVKEEEKAANNAKSERVKDPIPSTTAAIGKTQNTDNNLGAAADDEEDRIPEVGDSVYVPKLKNQATVVKIDSSKNEVQVQAGMMKLKLKLQDVKVQKRKVSR

SEQ ID NO: 110900 - protein, 189 aa, Setaria italica
  Transcript Sequence Number=SeqID_44926
  Gene Ontology: Mol. function=zinc ion binding; Cellular component =intracellular
  Homolog annotation: Hit_ID=B6U456; Match level="QueryCoverage=89%, HitCoverage=68%, E-value=1e-29, Identity=51%"; Hit description=Zinc finger protein 1
MQDWSMEQMADEASVNEQSTERLPMAGGEQISRVDGAMAWLDLTLAVKASQDDLSAPATDGDSSSSDGEPAKPASPPSPAAGAAGAGAAPHKVFSCNFCMRKFFSSQALGGHQNAHKRERSAAKRSSSSATAYHHLHAQRMVMAGLPLEAHAAFVHAALRVSPASSAIHKASQELAAARAAATAAGTAP

SEQ ID NO: 110901 - protein, 91 aa, Setaria italica
  Transcript Sequence Number=SeqID_44927
  Subcellular localization annotation: CTP_CleavageSite=55; ConfidenceScore=5.28e-01
LPSFLPSFLLSLPLSLFHAAAFCTLLTCFFCVSCRPSYGHRRGGWTRIVGVGAAVAAGKQAGDLDPRHHHRVPHGGDGGGGGGGGGGRREE

SEQ ID NO: 110902 - protein, 94 aa, Setaria italica
  Transcript Sequence Number=SeqID_44928
NRVDGTCSDITLKETHIDGISPSFEVYLPNSKFKKSSPGTPSFLLCLLRNKPPTRVELEMVENNLGGIPLKYCHVDNGRVSFLSFDKVALPSLP

SEQ ID NO: 110903 - protein, 56 aa, Setaria italica
  Transcript Sequence Number=SeqID_44929
SPAIVIKVSNKLSTWSSSYLSLRGSWLGINPVQCLCSTLPIYLKLAQNILSWEEDI

SEQ ID NO: 110904 - protein, 62 aa, Setaria italica
  Transcript Sequence Number=SeqID_44930
  Subcellular localization annotation: CTP_CleavageSite=45; ConfidenceScore=5.03e-01
DLDPLISPSACHAVGSICSGSKPANPFGQSRDRGHLNCYACLDLSCMKSSNSEYLCEILVRL

SEQ ID NO: 110905 - protein, 222 aa, Setaria italica
  Transcript Sequence Number=SeqID_44931
  Gene Ontology: Cellular component=nucleus; Biological process =regulation of transcription, DNA-dependent
  Homolog annotation: Hit_ID=A5HJS4; Match level="QueryCoverage=100%, HitCoverage=38%, E-value=1e-123, Identity=93%"; Hit description =Scarecrow
  Pfam annotation: Domain name=GRAS; Domain location=2-222; Score =117.6; E_value=4.1e-32; Accession=PF03514.6; Description=GRAS family transcription factor
VASGNGIYKALTCKDPPSLYQLSAMQILFEICPCFRLGFMAANYAILEACKGEERLHIIDFDINQGSQYITLIQFLKNNSNKPRHLRITGVDDPETVQRPIGGLKVIGQRLEQLAEDCGVSFEFRAVGANLGDVTPAMLDCRPGEALAVNFAFQLHHLPDESVSIMNERDQLLRMVKGLQPKLVTLVEQDANTNTAPFLTRFREVYDYYYALFDSLDATLPK

SEQ ID NO: 110906 - protein, 298 aa, Setaria italica
  misc_feature (235)..(235): Xaa can be any naturally occurring amino acid
  Transcript Sequence Number=SeqID_44932
  Gene Ontology: Cellular component=nucleus; Biological process =regulation of transcription, DNA-dependent
  Homolog annotation: Hit_ID=A5HJS4; Match level="QueryCoverage=98%, HitCoverage=51%, E-value=1e-134, Identity=80%"; Hit description =Scarecrow
MSFVRRADPSTAYTDNLYIHKFAAPSSNFAAQRFSSDTQLFRYGPEPYNGEYGHMGFTGSSSAVFQNSFCSQQASLTPYCVTADERSPSVADTQSNSCSDAAKESPVVSNVSQHNSQSVSDTQSSEIEVQFDEDEIRLKLQELEHALLDDGDDILFEISQAGSINDEWADPMKNVLLPNSPKESESSISCAVSNSRTARTPKQLLIDCATALSEYNIDEAQAIISDLRQMVSIQXGDPSQRIAAYLVEGLAARIVASGNGIYKALTCKDPPSLYQLSAMQILFEICPCFRLGFLLVLS

SEQ ID NO: 110907 - protein, 51 aa, Setaria italica
  Transcript Sequence Number=SeqID_44933
VEQMLRYSRNTNRVTPNPIPGPRKSNITHINHRPWGTCQQEGLEGHLAHQR

SEQ ID NO: 110908 - protein, 117 aa, Setaria italica
  Transcript Sequence Number=SeqID_44934
  Subcellular localization annotation: CTP_CleavageSite=39; ConfidenceScore=5.05e-01
PADIFQFELLQAFLSRTFAPSKCWALDRGQWRSGRSSIRLSATRTKPPWMPAQKHHLAMTGQAVAQTAKNASILLEANPATGTNDRRQQRGELYQFNLLYFCSLAFVCMVENHRKLL

SEQ ID NO: 110909 - protein, 72 aa, Setaria italica
  Transcript Sequence Number=SeqID_44935
  Homolog annotation: Hit_ID=B9RR38; Match level="QueryCoverage=80%, HitCoverage=6%, E-value=3e-16, Identity=56%"; Hit description =Phosphoinositide 5-phosphatase, putative
IVGFVKFLGPYYMVVITRRRKVGTICGHEIYSIGKSEMITIPSVIVWPNVAYSRDENRSFIFQHVNIVYCLL

SEQ ID NO: 110910 - protein, 123 aa, Setaria italica
  Transcript Sequence Number=SeqID_44936
  Gene Ontology: Mol. function=transporter activity; Cellular component= integral to membrane; Biological process=transport
  Homolog annotation: Hit_ID=B9S742; Match level="QueryCoverage=92%, HitCoverage=16%, E-value=1e-19, Identity=41%"; Hit description =Phosphoinositide 5-phosphatase, putative
CEVLNAASRKGTNVLALLNKVASDVLDLTEFLHCKISTSAKSEDATSGERTVTKPHDDKSSSVQSECVAKLVPILLQKGVLRTNCIDCLDRTNVAQFAYGLAALRRQLHALGLTEAPKIELHA

SEQ ID NO: 110911 - protein, 155 aa, Setaria italica
  misc_feature (44)..(44): Xaa can be any naturally occurring amino acid
  Transcript Sequence Number=SeqID_44937
  Gene Ontology: Mol. function=transporter activity; Cellular component= integral to membrane; Biological process=transport
  Homolog annotation: Hit_ID=B9RR38; Match level="QueryCoverage=96%, HitCoverage=16%, E-value=1e-61, Identity=75%"; Hit description =Phosphoinositide 5-phosphatase, putative
  Pfam annotation: Domain name=Syja_N; Domain location=1-155; Score= -38.7; E_value=9.3e-09; Accession=PF02383.10; Description=SacI homology domain
MGQLTIRYKRLLCSVDLSKDFFFSYSYNIMRSLQKNITEKNTGXIVYETMFVWNEFLTRAIRNHLKNTSWTVALVHGFFKQYFEHLLSKLSVSGKDFWLTLIARRSRHFAGTRFLKRGVNEKGRVANDVETEQIVFEDTSDGIPSHMASVVQHRG

SEQ ID NO: 110912 - protein, 76 aa, Setaria italica
  Transcript Sequence Number=SeqID_44938
  Gene Ontology: Mol. function=hydrolase activity; Cellular component =cytoplasm; Biological process=phosphoinositide dephosphorylation
  Homolog annotation: Hit_ID=B9ST50; Match level="QueryCoverage=81%, HitCoverage=10%, E-value=1e-20, Identity=77%"; Hit description =Phosphoinositide 5-phosphatase, putative
NWHYKPCAVGRHANTLVLVWQSKLSVSGKDFWLTLIARRSRHFAGTRFLKRGVNEKGRVANDVETEQIVFEDTSDG

SEQ ID NO: 110913 - protein, 55 aa, Setaria italica
  Transcript Sequence Number=SeqID_44939
EATQCCFRPLLQLDTGRLFSNKILPSDSDLFMNDLISLHQMRITKLEESEESIQE

SEQ ID NO: 110914 - protein, 252 aa, Setaria italica
  Transcript Sequence Number=SeqID_44940
  Gene Ontology: Mol. function=transporter activity; Cellular component= integral to membrane; Biological process=transport
  Homolog annotation: Hit_ID=B9RR38; Match level="QueryCoverage=94%, HitCoverage=28%, E-value=1e-105, Identity=72%"; Hit description =Phosphoinositide 5-phosphatase, putative
  Pfam annotation: Domain name=Syja_N; Domain location=84-252; Score =10.6; E_value=1.6e-11; Accession=PF02383.10; Description=SacI homology domain
MEAMTGGKFLQKFRLYETRSKFYLIGRDKSRAHWRVLKIDRMECTELGVEEDPTIYTESECQELLWRIHEGNRLTGGLKFVTKCYGIVGFVKFLGPYYMVVITRRRKVGTICGHEIYSIGKSEMITIPSVIVWPNVAYSRDENRYKRLLCSVDLSKDFFFSYSYNIMRSLQKNITEKNTGQVVYETMFVWNEFLTRAIRNHLKNTSWTVALVHGFFKQSKLSVSGKDFWLTLIARRSRHFAGTRFLLQLLSL

SEQ ID NO: 110915 - protein, 200 aa, Setaria italica
  Transcript Sequence Number=SeqID_44941
  Homolog annotation: Hit_ID=B9RR38; Match level="QueryCoverage=100%, HitCoverage=26%, E-value=1e-59, Identity=55%"; Hit description =Phosphoinositide 5-phosphatase, putative
REKKPRESLLRAEFAKAIHYINKGLTEDKRLKFLHMDLSKLSRRKGTNVLALLNKVASDVLDLTEFLHCKISTSAKSEDATSGERTVTKPHDDKSSSVQSECVAKLVPILLQKGVLRTNCIDCLDRTNVAQFAYGLAALRRQLHALGLTEAPKIELHAPLADDLMDFYERMGDTLAIQYGGSAAHNKIFCEQRDKWKAAT

SEQ ID NO: 110916 - protein, 60 aa, Setaria italica
  Transcript Sequence Number=SeqID_44942
  Subcellular localization annotation: CTP_CleavageSite=33; ConfidenceScore=5.23e-01
KNIALYKNVSFVQFSLSIFNSTRLKKSHSVNLKAQTIYTSNIPLVILTKGTILTKTCLAT

SEQ ID NO: 110917 - protein, 37 aa, Setaria italica
  Transcript Sequence Number=SeqID_44943
HTIYNNSALFSPFFFFFLKNTFLYFFHNFYGERENVS

SEQ ID NO: 110918 - protein, 222 aa, Setaria italica
  Transcript Sequence Number=SeqID_44944
NNKGSVRFAAAWRPPAGSFVRLRLYLHQLVGLDPPGDPPQDPSFGFVSISTRLRMYFDHWTTRDLGERQPTSWRSTDVLGKPKKTMKKCVRRLNMLSFTYPPEFNTGENQRLRGLNAKLLDVFRLIAHSYDCLAEEQDKYDNLLTVWLNQERIDSTKATLRDLRAECEALLAEVSAIGGEFYIPPKLQGKVRLKKYVPVGSLQHLTGADHFFQEQLPDGALG

SEQ ID NO: 110919 - protein, 386 aa, Setaria italica
  misc_feature (285)..(285): Xaa can be any naturally occurring amino acid
  Transcript Sequence Number=SeqID_44945
  Gene Ontology: Mol. function=mannosyl-oligosaccharide 1,2-alpha -mannosidase activity; Cellular component=membrane; Biological process=transport
  Homolog annotation: Hit_ID=B9RR38; Match level="QueryCoverage=97%, HitCoverage=50%, E-value=1e-163, Identity=67%"; Hit description =Phosphoinositide 5-phosphatase, putative
  Pfam annotation: Domain name=Syja_N; Domain location=2-254; Score =233.3; E_value=6e-67; Accession=PF02383.10; Description=SacI homology domain
MFSSLIFCRYKRLLCSVDLSKDFFFSYSYNIMRSLQKNITEKNTGQVVYETMFVWNEFLTRAIRNHLKNTSWTVALVHGFFKQSKLSVSGKDFWLTLIARRSRHFAGTRFLKRGVNEKGRVANDVETEQIVFEDTSDGIPSHMASVVQHRGSIPLVWFQETSRLNIRPDIILKADVDYKATRLHFENLALRYGNPIIILNLIKTREKKPRESLLRAEFAKAIHYINKGLTEDKRLKFLHMDLSKLSRRKGTNVLALLNKVASDVLDLTEFLHCKISTSAKSEDAXKKGVLRTNCIDCLDRTNVAQFAYGLAALRRQLHALGLTEAPKIELHAPLADDLMDFYERMGDTLAIQYGGSAAHNKIFCEQRGQWKAATQSQEFLRTLQRY

SEQ ID NO: 110920 - protein, 145 aa, Setaria italica
  Transcript Sequence Number=SeqID_44946
PLSIVWLLNRLVLINVCFNQIVAGTKATLRDLRAECEALLAEVSAIGGEFYIPPKLQGKVRLKKYVPVGSLQHLTGADHFFQEQLPDGALGENHERDVGSINRLSFQVNRMAFLQACGVEYAQTKLYKGNLFLPLLSAYLLCKMI

SEQ ID NO: 110921 - protein, 50 aa, Setaria italica
  Transcript Sequence Number=SeqID_44947
LGFRVANFRPGQALNTCLLVIQTTSLLAEMLAISVLSAVRNLDPLCYYLL

SEQ ID NO: 110922 - protein, 58 aa, Setaria italica
  misc_feature (11)..(11): Xaa can be any naturally occurring amino acid
  Transcript Sequence Number=SeqID_44948
VKMASQDMTLXKHFITSGHITFFMSIAIHLFYYKTVYQNSIVILFTRTVVLLLLDNCH

SEQ ID NO: 110923 - protein, 84 aa, Setaria italica
  Transcript Sequence Number=SeqID_44949
  Gene Ontology: Cellular component=nucleus; Biological process=cell cycle
  Homolog annotation: Hit_ID=B9SQY5; Match level="QueryCoverage=100%, HitCoverage=8%, E-value=2e-24, Identity=59%"; Hit description =Pentatricopeptide repeat-containing protein, putative
  Pfam annotation: Domain name=PPR; Domain location=39-73; Score=9.3; E_ value=0.71; Accession=PF01535.12; Description=PPR repeat
  Pfam annotation: Domain name=PPR; Domain location=4-38; Score=21.4; E_ value=0.0037; Accession=PF01535.12; Description=PPR repeat
  Pfam module annotation: Pfam domain module=PPR::PPR; Domain location =39-73::4-38
FEENLYHILICSCKEAGSYNDAVRIYNQMPKSGTQPNLRISCTMIDVFSMMERFSDAETIYLELKGSSSVLDMIAYSVIVRMYI

SEQ ID NO: 110924 - protein, 166 aa, Setaria italica
  misc_feature (148)..(148): Xaa can be any naturally occurring amino acid
  Transcript Sequence Number=SeqID_44950
  Gene Ontology: Mol. function=phosphoprotein phosphatase activity; Biological process=actin cytoskeleton organization and biogenesis
  Homolog annotation: Hit_ID=Q6K8Z4; Match level="QueryCoverage=96%, HitCoverage=11%, E-value=1e-83, Identity=86%"; Hit description =Formin-like protein 7
EAHIRGIAGDLLENFRDHSFMISNFGTRKEESPIYHILSDYGMTVLDYPGHYEGCPILTMEMIHCILKSSESWLSLGQHNLLLMHCEQGSWPVLAFMLAALLIYLGHYSDEQKTLDMLYKQSSLELLEMFSPLNPMPSQIRYLRYISXRNVMPEWPPADRAPIRLC

SEQ ID NO: 110925 - protein, 275 aa, Setaria italica
  Transcript Sequence Number=SeqID_44951
  Gene Ontology: Cellular component=membrane
  Homolog annotation: Hit_ID=B4FHB0; Match level="QueryCoverage=97%, HitCoverage=55%, E-value=1e-139, Identity=86%"; Hit description =Nucleoporin p58/p45
AELMLYTTDMKPAGYNTKWEELHAESQKALLQIEDKIREYKDESERLDQCSRLYDSSISNVNFELDASRIAQELGGTTTVMEREKASIQELMTVVNEMMWNTEFAMRSYLMLRPRFVRPGAGVANGGSSNPSAGAPPNQPVVDFYSGVPKRPSLFMQHTVNRFECYLAECCKWIGELEQLVQMENNKRSSDSLESLPKVMSNVHDYFIYVASKVENLHQYVESMKTEYLNEQRHMGNGNDPFLEANRREAAKQEAAAKRVHPTLHLPAPAPSQQD

SEQ ID NO: 110926 - protein, 235 aa, Setaria italica
  Transcript Sequence Number=SeqID_44952
  Gene Ontology: Cellular component=membrane
  Homolog annotation: Hit_ID=B4FHB0; Match level="QueryCoverage=73%, HitCoverage=34%, E-value=2e-30, Identity=45%"; Hit description =Nucleoporin p58/p45
MLFQMVWSIELIQMRQKGRLMENNKRSSDSLESLPKVMSNVHDYFIYVASKVENLHQYVESMKTEYLNEQRHMGNGNDPFLEANRREAAKQEAAAKRVHPTLHLPAPAQPTTQIAAPAASQPQQSFFPSGATSSSGFSAFSTPAAAPSSSSLFATPTTPAPSGGLFGASGSAQLTTPFGTASTPTLASTPAPGFGTSTSLGGTSLFSTPFGGGATASGSSFGGASKGRSKPRGRR

SEQ ID NO: 110927 - protein, 79 aa, Setaria italica
  Transcript Sequence Number=SeqID_44953
GRWRATRKEIRNRSTRKTPGCSMIEVDNVVREFVAGEDLGPELGGLAAVLDMLASELADDDEELIDSDCWVNANVFASD

SEQ ID NO: 110928 - protein, 66 aa, Setaria italica
  Transcript Sequence Number=SeqID_44954
RYIKIRTKNFGIPTDHNNFNSNAIYQKHILDSITLYSHKNLVFLRIIILYSHTYTRNHILDSSLFV

SEQ ID NO: 110929 - protein, 122 aa, Setaria italica
  misc_feature (109)..(109): Xaa can be any naturally occurring amino acid
  Transcript Sequence Number=SeqID_44955
  Gene Ontology: Mol. function=hydrolase activity; Cellular component =mitochondrion
  Homolog annotation: Hit_ID=Q2R391; Match level="QueryCoverage=98%, HitCoverage=48%, E-value=5e-36, Identity=65%"; Hit description=Nudix hydrolase 13, mitochondrial, putative, expressed
VLVQLTKRLFLWTRREKMAPPAVAAAPSTTTMVCARQGRLHQRYEGCYRLVSGCIPYMLREEDGERSCQDVLGRLQVLMISTPKRGDLIFPKGGWEDDESIDEAACREXFEEAGVKGIISVG

SEQ ID NO: 110930 - protein, 136 aa, Setaria italica
  Transcript Sequence Number=SeqID_44956
  Gene Ontology: Mol. function=metal ion binding; Cellular component =nucleus; Biological process=regulation of transcription, DNA -dependent
  Homolog annotation: Hit_ID=Q49I54; Match level="QueryCoverage=95%, HitCoverage=32%, E-value=2e-50, Identity=75%"; Hit description =Teosinte glume architecture 1
FDDTKRSCRKRLDGHNRRRRKPQPDTMASASFMASQQGTRFSPFAAPRLDANWPGVIKTEESPYYTHHQIPLGTSNRQHFVGASSAYAKEGRRFPFLQEGEISFATGVVLEAPASARQPVLKAAAPPESSSGSTGD

SEQ ID NO: 110931 - protein, 96 aa, Setaria italica
  Transcript Sequence Number=SeqID_44957
  Subcellular localization annotation: CTP_CleavageSite=69; ConfidenceScore=5.11e-01
GILDNLEGRSKIISQTIKMAPCQQPKSGTLVTITTDVRHNNGEQGCSNEASSKTLSRSASKRMTDPSPRSTRVVTFHDEKRKRLRLKKGLLLELVS

SEQ ID NO: 110932 - protein, 59 aa, Setaria italica
  Transcript Sequence Number=SeqID_44958
VRVLVYRSTATFTSSFVLVGFTVLAIMYAYDKLKGNSQQRSIILSIDAYNNLLLICKGS

SEQ ID NO: 110933 - protein, 122 aa, Setaria italica
  Transcript Sequence Number=SeqID_44959
LNNWISYPLKAALCSTSLCLSLYSNKVGDLDATHSDVCSSPDTTPCYLPFVFCSITGYHIPTSMPSVLCLFPSSSKRVIMMLPSFNMVLCMTTIVWYHLVANKYILSYDLCYDPLQISRRLL

SEQ ID NO: 110934 - protein, 51 aa, Setaria italica
  Transcript Sequence Number=SeqID_44960
KVCKLNKMITSLHHNMPCSTVFTSCLQFTEHTYNDTGKPRNHNLQTYLKAE

SEQ ID NO: 110935 - protein, 216 aa, Setaria italica
  Transcript Sequence Number=SeqID_44961
  Gene Ontology: Cellular component=mitochondrion
KEPKGRRNLGRRVEARRRPAARLAPLSRPICALSGGNNPISWNLRRFFSSNEKHLPAISDPEIECAFKDLLAASWNELPVSLVEEAKKAVSKATDDKAGQEALKNVFCAAEACEEFGGTLVTLRMALDDLCGLTGENVGPLPGYIEDAVKAAYNRYMTYLESFGPEENYLRKKVETELGTKMIHLKMRCSGIGSEWGKISLIGTSGISGSYVELRA

SEQ ID NO: 110936 - protein, 67 aa, Setaria italica
  Transcript Sequence Number=SeqID_44962
MTVGMINANPVVHERTERAAHPHAGDALDPLDVFDTVRDIKDPEHPYSLEQLSVLSQESISVDEKLG

SEQ ID NO: 110937 - protein, 192 aa, Setaria italica
  Transcript Sequence Number=SeqID_44963
EGARPAGPGDLSVRGVGSVTEAQETATGGGNGGAPSDGEVLKVQEVGEARNHSLGGLDSAVEVKEAAAQGSGGERLTKAKDLISERPNLAEDKNLSNETLGSAAASAEKLEVTGSSRDVNFSVQASGPAMNTRDEFLRGGHDDDGRNSSVHGAYASQKGGHWESSDNSTLGNNPGGAPVNPDEQERAKSSID

SEQ ID NO: 110938 - protein, 61 aa, Setaria italica
  Transcript Sequence Number=SeqID_44964
  Gene Ontology: Mol. function=magnesium ion binding; Cellular component=chloroplast; Biological process=photosynthesis, light harvesting
  Homolog annotation: Hit_ID=B7SB30; Match level="QueryCoverage=96%, HitCoverage=20%, E-value=2e-24, Identity=93%"; Hit description=LHCB4
ADRKKERLQLAEIKHARLAMVAFLGFAVQAAATGKGPLNNWATHLSDPLHTTIFDTFGGSS

SEQ ID NO: 110939 - protein, 135 aa, Setaria italica
  Transcript Sequence Number=SeqID_44965
HKNLKTIFLTPSWLTRWIWTPLVKIGCNPVHMFAFDVRVVRHTEFRATLSSSVHEAVATNQDYTSIGQDGYTILSTSQLEKCCSIHHTSASSFLPISVVGLSIKLQCPYWREGLHDYLITVLEMCCIHAPSQKGK

SEQ ID NO: 110940 - protein, 73 aa, Setaria italica
  Transcript Sequence Number=SeqID_44966
  Homolog annotation: Hit_ID=B6TUX5; Match level="QueryCoverage=69%, HitCoverage=22%, E-value=3e-17, Identity=83%"; Hit description=DNA binding protein
  Subcellular localization annotation: CTP_CleavageSite=35; ConfidenceScore=5.09e-01
AAAGGAGAGSSSPSSSSFSTVTHHPAALVGQFGVEAEEAADLTYMSEYAYNSYMNMMDLAPNYFGSSVYDQFN

SEQ ID NO: 110941 - protein, 126 aa, Setaria italica
  Transcript Sequence Number=SeqID_44967
  Gene Ontology: Mol. function=RNA binding; Cellular component =mitochondrion
  Homolog annotation: Hit_ID=B9R7P1; Match level="QueryCoverage=83%, HitCoverage=57%, E-value=3e-17, Identity=35%"; Hit description =Pentatricopeptide repeat-containing protein, putative
  Pfam annotation: Domain name=PPR; Domain location=31-65; Score=42.2; E_value=2e-09; Accession=PF01535.12; Description=PPR repeat
  Pfam annotation: Domain name=PPR; Domain location=66-100; Score=37.5; E_value=5.2e-08; Accession=PF01535.12; Description=PPR repeat
  Pfam module annotation: Pfam domain module=PPR::PPR; Domain location =31-65::66-100
ALDKYCKDGHITEAFKLKQRMIEDGIKPTVFTYSILIHGLCIHDYMEEAIKLLDQMIENNVDPNYVTYWTLIQGYIRCGNMKEISKLYDEMHIRGLLPTLVAGDVKQACPVIYNQNGKTSHMKMYC

SEQ ID NO: 110942 - protein, 72 aa, Setaria italica
  Transcript Sequence Number=SeqID_44968
  Gene Ontology: Mol. function=zinc ion binding
  Homolog annotation: Hit_ID=Q1EPH4; Match level="QueryCoverage=94%, HitCoverage=22%, E-value=2e-27, Identity=91%"; Hit description=Zinc finger (C3HC4 type RING finger) family protein
PSPELEQLLVTDLRSRALAISLPFSCVLGLLSSMIASTMVSKSYLWAYASFQFAIVILFAHIFYNVLRVNAV

SEQ ID NO: 110943 - protein, 152 aa, Setaria italica
  Transcript Sequence Number=SeqID_44969
  Gene Ontology: Mol. function=metal ion binding; Cellular component =intracellular
AHDKSVHNSSNSHVVSSSGNVGTKVTDPLKVNDYEEPVVSNSELERVVSDANVKDKEDAKRLQDTSSNVQGETSYSKKVATPERRNAGAKRPRSASIEAEGSAINSGKKVVTESWPAEVIPHENADPASKNGCTMASAAELKTNPSKKALIC

SEQ ID NO: 110944 - protein, 85 aa, Setaria italica
  Transcript Sequence Number=SeqID_44970
KKLLEALWKSMQVWLEPPSHSKTSSSASVDVLIGRDLSMSAWHGAFRDDADAFGEEVEAEILDELVDEMVWDVLLNVGTDRINVR

SEQ ID NO: 110945 - protein, 164 aa, Setaria italica
  Transcript Sequence Number=SeqID_44971
  Gene Ontology: Mol. function=metal ion binding
  Homolog annotation: Hit_ID=B6TA78; Match level="QueryCoverage=78%, HitCoverage=35%, E-value=3e-58, Identity=81%"; Hit description =Protein binding protein
  Pfam annotation: Domain name=zf-C3HC4; Domain location=115-155; Score= 33.0; E_value=1.2e-06; Accession=PF00097.17; Description=Zinc finger, C3HC4 type (RING finger)
QDPSGRFLSRSLLRHRSGLRRGPISSLEDSLDSSNDWRFDMDESEEVEDYYVFNDRHRGMRMDIDDMSYEELLALGERIGTVSTGLSDGALSECLKRSFYVPTDSTSHEDGDLKCIICQEEYFSGVEVAKMACKHYYHVTCIQQWLRQKNWCPICKSVASAVST

SEQ ID NO: 110946 - protein, 104 aa, Setaria italica
  Transcript Sequence Number=SeqID_44972
  Gene Ontology: Mol. function=catalytic activity; Biological process =metabolic process
  Homolog annotation: Hit_ID=Q6ZG49; Match level="QueryCoverage=96%, HitCoverage=32%, E-value=4e-47, Identity=90%"; Hit description =Phosphoglycerate mutase-like protein
FVSQGGGESLDQLSERCVSCLHNIVEKHKGERVIVVSHGGTIRELYRYASPTRPLHGKIHNTSVSVILVSGITGRCIVKMCGDISHLQETGVLENAFGGDKNSA

SEQ ID NO: 110947 - protein, 60 aa, Setaria italica
  Transcript Sequence Number=SeqID_44973
VSIFVLVFTFHTMWKVPHSIIFLQEMPYSLVISKYLHRLLCLQADHNGQSRIPCFPMQFL

SEQ ID NO: 110948 - protein, 97 aa, Setaria italica
  Transcript Sequence Number=SeqID_44974
  Gene Ontology: Mol. function=ammonia ligase activity; Cellular component=cytoplasm; Biological process=phenylpropanoid metabolic process
  Homolog annotation: Hit_ID=Q7F929; Match level="QueryCoverage=100%, HitCoverage=13%, E-value=4e-34, Identity=75%"; Hit description =Phenylalanine ammonia-lyase
AGVVTGRPNSVAVTADGKKVGAAEAFKAAGIQHGFFELQPKEGLAMVNGTAVGSGLASMVLFEANVLAVLAEVLSAVFCEVMNGKPEYTDHLTHKLK

SEQ ID NO: 110949 - protein, 90 aa, Setaria italica
  Transcript Sequence Number=SeqID_44975
  Subcellular localization annotation: CTP_CleavageSite=74; ConfidenceScore=5.82e-01
SGPASTPSPARDPAACPPRRPPHPPALSPGGRRGRGSGSRPARTRRSPRRQCAAPPWAAVRTPPADGPRCRRHCASSRPSSPPPASGPRP

SEQ ID NO: 110950 - protein, 161 aa, Setaria italica
  misc_feature (91)..(91): Xaa can be any naturally occurring amino acid
  misc_feature (120)..(120): Xaa can be any naturally occurring amino acid
  misc_feature (147)..(147): Xaa can be any naturally occurring amino acid
  Transcript Sequence Number=SeqID_44976
  Gene Ontology: Cellular component=integral to membrane
  Homolog annotation: Hit_ID=Q9LP26; Match level="QueryCoverage=42%, HitCoverage=26%, E-value=8e-23, Identity=75%"; Hit description =T9L6.9 protein
SRTQGLWSKNSVFSCCFVLLRWILHHYCAMLMALVSLTWEIKGQSQPDCPRKQRGVELFLCWAIMQGFVMMLQNRYQRQRLYTRIALGKPXRMDVVWGETAGVEGQLLLLCPLLFSLAGXFEGFMLGFLLLRTAHTGVIPEWQVVVXCGILLNCKWRIGKL

SEQ ID NO: 110951 - protein, 91 aa, Setaria italica
  misc_feature (30)..(30): Xaa can be any naturally occurring amino acid
  Transcript Sequence Number=SeqID_44977
  Gene Ontology: Cellular component=integral to membrane
  Homolog annotation: Hit_ID=Q9LP26; Match level="QueryCoverage=54%, HitCoverage=20%, E-value=3e-11, Identity=66%"; Hit description =T9L6.9 protein
GFEGYVGFLLLRTAHTGVIPEWQVRDFSCXCDKDCMVFDLCYKLCVLSQVVVCGILLIAMAIGNFANTVDTLMAKSRFKAKMKKSRSKRDL

SEQ ID NO: 110952 - protein, 47 aa, Setaria italica
  Transcript Sequence Number=SeqID_44978
  Gene Ontology: Cellular component=integral to membrane
MTIGNFANTVDTLMAKSRFKAKMKKSRSKRDLDTCPSPTGSSPTAKA

SEQ ID NO: 110953 - protein, 65 aa, Setaria italica
  Transcript Sequence Number=SeqID_44979
  Gene Ontology: Mol. function=metal ion binding
MDADEAAGSSRRMDLNLYLGLPRAPRPRRSDLGSDLALSTPMPSSPSSSAASVDAPPPPPEALHP

SEQ ID NO: 110954 - protein, 87 aa, Setaria italica
  Transcript Sequence Number=SeqID_44980
  Subcellular localization annotation: CTP_CleavageSite=68; ConfidenceScore=5.53e-01
RILLKSSNLVLYRSQPLNQHPNRHSGPRQSSTPPPPSLPNRLIPPPVAPPLPCLTAISFSNLPSNSSKADSLWNPEAPNPNPQAPKP

SEQ ID NO: 110955 - protein, 37 aa, Setaria italica
  Transcript Sequence Number=SeqID_44981
ILDYNQSHILENTVISNFLAAAQQIGPSLAGCLGPGR

SEQ ID NO: 110956 - protein, 133 aa, Setaria italica
  Transcript Sequence Number=SeqID_44982
MRIRRRPPGQPLGYLLPSDPPAAPRPSPAASVDHQERPAADKREEAGLHLHPFAAADLGEGHSSPARCPALLPLLPKDSVVERGRVLGAQQQVPADGRRSLENGHHHVPEPVIKAGVHLSNGGAGAAVSATTT

SEQ ID NO: 110957 - protein, 109 aa, Setaria italica
  Transcript Sequence Number=SeqID_44983
MRIRRRPPGQPLGYLLPSDPPAAPRPSPAASVDHQERPAADKREEAGLHLHPFAAADLGEGHSSPARCPALLPLLPKDSVVERGRVLGAQQQVPADGRRRYVMNCRTDA

SEQ ID NO: 110958 - protein, 70 aa, Setaria italica
  Transcript Sequence Number=SeqID_44984
  Gene Ontology: Mol. function=binding; Cellular component=mitochondrion
  Homolog annotation: Hit_ID=Q7XQN7; Match level="QueryCoverage=100%, HitCoverage=9%, E-value=2e-20, Identity=65%"; Hit description =OSJNBa0084A10.18 protein
  Pfam annotation: Domain name=PPR; Domain location=15-49; Score=24.9; E_value=0.00033; Accession=PF01535.12; Description=PPR repeat
AAWKLFQDMPDRDILAWNTMIGGFVMSERLDDALRLFADMPDRDLVSWNTILQRIRSNEGDMDSGNTWFR

SEQ ID NO: 110959 - protein, 47 aa, Setaria italica
  Transcript Sequence Number=SeqID_44985
CSSLMRGKHRYRIPYTLPVFASHDVVLSCVLMGVLNVCWGQHYFFLS

SEQ ID NO: 110960 - protein, 104 aa, Setaria italica
  Transcript Sequence Number=SeqID_44986
SIQNKSNRMNVTKRLPTITSCHTHTEAAPAHLLATNAATVTALCAMINGRYHPQQRQNFQPSSPATSQIPSQAQRWLLPPVGAPSLLDLFSVPCTLKPGRGRRR

SEQ ID NO: 110961 - protein, 253 aa, Setaria italica
  misc_feature (69)..(69): Xaa can be any naturally occurring amino acid
  misc_feature (217)..(217): Xaa can be any naturally occurring amino acid
  Transcript Sequence Number=SeqID_44987
  Gene Ontology: Cellular component=mitochondrion
  Homolog annotation: Hit_ID=A2Q460; Match level="QueryCoverage=98%, HitCoverage=45%, E-value=5e-51, Identity=42%"; Hit description =Pentatricopeptide repeat
  Pfam annotation: Domain name=PPR; Domain location=114-148; Score =31.7; E_value=3.1e-06; Accession=PF01535.12; Description=PPR repeat
  Pfam annotation: Domain name=PPR; Domain location=149-183; Score =27.9; E_value=4.1e-05; Accession=PF01535.12; Description=PPR repeat
  Pfam annotation: Domain name=PPR; Domain location=184-218; Score =26.8; E_value=8.8e-05; Accession=PF01535.12; Description=PPR repeat
  Pfam annotation: Domain name=PPR; Domain location=220-253; Score =12.1; E_value=0.33; Accession=PF01535.12; Description=PPR repeat
  Pfam annotation: Domain name=PPR; Domain location=4-38; Score=19.1; E_ value=0.019; Accession=PF01535.12; Description=PPR repeat
  Pfam annotation: Domain name=PPR; Domain location=79-113; Score=3.9; E_value=3.1; Accession=PF01535.12; Description=PPR repeat
  Pfam module annotation: Pfam domain module=PPR::PPR::PPR::PPR::PPR::PP R; Domain location=114-148::149-183::184-218::220-253::4-38::79-113
PSIHTCNIVIKALGRKKFFDFLDDALQIMRRNNVFPDLTTLEIIVDSLVAARHVSRAVEVLSTDQFGFXGIGKACHRKEAFAILIGCLCRRSHVGLANSLLQAARKELLGLDNHVYNDVMGGWARLGSVDKMQEVWTKMQEDGLVPDEVSHCHLIEALGRAGRTEDALRVFENMASERLGPTTMTYNALIFNFYSTGDLDRCIKYYKDMLDKNCPPXNINTYFKIIKAFLKERRVADALQMFENMLARGVLPN

SEQ ID NO: 110962 - protein, 45 aa, Setaria italica
  Transcript Sequence Number=SeqID_44988
SRTPYIAKQFTAFSLYSSIQLLIACNIQIHLLRDHLHVLIASLQP

SEQ ID NO: 110963 - protein, 133 aa, Setaria italica
  misc_feature (1)..(11): Xaa can be any naturally occurring amino acid
  Transcript Sequence Number=SeqID_44989
XXXXXXXXXXXFFFWSTKNMDHIEAHKIWQEPLENKSFTHKHRIQQSTKNHAGHNTMTTRKSQTLLIPLNNLPYNTPHSRVTKLYHLTHVPEPPTQPDSPATSLDLSLTASSPRRQQQPLHPHPRRGCRPRLP

SEQ ID NO: 110964 - protein, 512 aa, Setaria italica
  Transcript Sequence Number=SeqID_44990
MEFLASLDGEENDFFKDRRAKKLEKNKIYEVADATSKTSSQGSSKNPVGPNHKEEIELLAKEKLEEFDEQENKPSMMVQEETEESCSDQLSGIGNKSSTGGWFVSEGEAVLLAHGDGTCSYYDIANHEFKSEYKPPSMVSNNTWGDCWLIRAPGVDGCSGRYVVAASAGNALEPGFCSWDYYTREVKAFHIEEEASHDPAPPPRAVLGPLSNLGSSRSSSALSNGETQQWWYKPCGPLLLSTASKQRMVTAYDIRDGGVVMKWEVSSPVMGMEYSSPLQWRSRGKVVIAGIESIGLWDVNSLNPQPLLSVASSGKKVYCLHVNNTDAEVGGGVRQRVSSSEVEGNDGVFSTHESVNVFDFRVPAGIGLKIARHGGTANSIFSRGDSVFIGSTEGRLQIKGGLRSRVQQYSLRKGKLVATYELPEFNAHFHHSAITQVWGNSNLVLAACGMGLFAFDTFKEDIQPTYSFDRGNTIGVREAIGPDDLYCPTFDYSSSRVLLVSRDRPAQWRYLS

SEQ ID NO: 110965 - protein, 80 aa, Setaria italica
  Transcript Sequence Number=SeqID_44991
TVIFRNCFEHHIIACPQITHLAATLPLHSDPIRCTMPGSHGQSKDSFLYSTLVAMDLNYNIETLYCKAALNLSNMALFFL

SEQ ID NO: 110966 - protein, 66 aa, Setaria italica
  Transcript Sequence Number=SeqID_44992
RKKSKKRQELNKIILEIELVRISLIRDRVGLVRDRVLIRKDCVHGLSYTWCVKGHPHYKYKGSWPL

SEQ ID NO: 110967 - protein, 61 aa, Setaria italica
  Transcript Sequence Number=SeqID_44993
VPSMIVHNWRVVLGRWCQIPGDVYICSSQMQCPCHAKNPRKYFVSAIYFCVFHDARCALRS

SEQ ID NO: 110968 - protein, 136 aa, Setaria italica
  Transcript Sequence Number=SeqID_44994
  Homolog annotation: Hit_ID=B2ZAT1; Match level="QueryCoverage=99%, HitCoverage=16%, E-value=4e-34, Identity=43%"; Hit description =Putative pentatricopeptide repeat protein
GACAHVGMVSEGLRYFHSMSTSGIAPDIEHYGCIVDLLSRAGLLEEAFEFIMKMPMEPNPQIWGSLLSACRFHQKIDLVRRVGQHIIKLAPNDVGTHVLIANLHAEGGQWDDVQQIREQMGKRGIEKSPGHSSIQV

SEQ ID NO: 110969 - protein, 39 aa, Setaria italica
  Transcript Sequence Number=SeqID_44995
LVPWVAYYVGDPRNETKTKWLMHELTVPDPEKEKDLDSP

SEQ ID NO: 110970 - protein, 199 aa, Setaria italica
  misc_feature (49)..(49): Xaa can be any naturally occurring amino acid
  Transcript Sequence Number=SeqID_44996
MAVAEVVLEVHPQPPPPPREPAVALPDLAVPKLLQYLYLASAWVACAGXVAAATAARRALGDDSPVTYAFLKVSIGALAFPALLVLIVALRLLRAMCAAGFRLSLRTFAREIQIHSSKMFGALTWKVLLNPAVLVVLVSFLFFLLLGAGVLVLGGLLPVEESQREKIGSALFDTGVLGAMAMSCFVIIPSFALKLWRSK

SEQ ID NO: 110971 - protein, 180 aa, Setaria italica
  Transcript Sequence Number=SeqID_44997
  Gene Ontology: Mol. function=protein serine/threonine kinase activity; Cellular component=integral to membrane; Biological process=protein amino acid phosphorylation
  Homolog annotation: Hit_ID=Q2QUZ1; Match level="QueryCoverage=86%, HitCoverage=29%, E-value=4e-31, Identity=47%"; Hit description =Protein kinase domain containing protein
  Pfam annotation: Domain name=Pkinase; Domain location=1-173; Score= -45.3; E_value=8.5e-06; Accession=PF00069.17; Description=Protein kinase domain
HDLYFADPQFHWSSLFGIIEEPQFHWSSLFRIIEGIAQGMHCLHEQGIIHMDMKPSNVLLDSDMNPKIIDFGISEVLNDNQITRENVSDIILRNGSDDTYTNFRGTMGYVAPEYLAEGIVSKKNDVYAFGITLIQIVGSIRRFKPPEQYPFDEWAWRAWESGGIEELFDPALFDESQLME

SEQ ID NO: 110972 - protein, 524 aa, Setaria italica
  Transcript Sequence Number=SeqID_44998
  Gene Ontology: Mol. function=protein serine/threonine kinase activity; Cellular component=integral to membrane; Biological process=protein amino acid phosphorylation
  Homolog annotation: Hit_ID=Q2QUZ1; Match level="QueryCoverage=61%, HitCoverage=67%, E-value=5e-58, Identity=41%"; Hit description =Protein kinase domain containing protein
  Pfam annotation: Domain name=Pkinase; Domain location=204-485; Score =43.8; E_value=4.2e-11; Accession=PF00069.17; Description=Protein kinase domain
  Pfam annotation: Domain name=Pkinase_Tyr; Domain location=204-485; Score=-65.2; E_value=2.2e-09; Accession=PF07714.9; Description =Protein tyrosine kinase
  Pfam module annotation: Pfam domain module=Pkinase::Pkinase_Tyr; Domain location=204-485::204-485
MADPVAAVEKIVKLGLAIKEAVDTVRHNEEECREIRKRVLRFSAILSQLQQTGLMNDSPALSGALEDLEESLQHALELVMACQERSTVRRLISAGELSKQLRRVKDDILNKVMLASFAINAHTTILLLTIQAGGHPLLRQQEVTGVTEASHNRYSTNYARVFDGHGTSELNGGRNNVLAGSRVPLLPPFREYELSELRAATNNFAYDKIIGRGGHSTVYKGVLNDGNVVSIKTFLESPDLSWARSYDIHLLVSKLQNKNIAKILGHVAHEEVQTFSSRVWFFKWKEHRVIKNEYFWVEEYMPNGSLDNIIHPQFHWSSLFRIIEGIAQGMHCLHEQGIIHMDMKPSNVLLDSDMNPKIIDFGISEVLNDNQITRENVSDIILRNGSDDTYTNFRGTMGYNDVYAFVITLIQIVGSIRRFKPPEQYPFDEWAWRAWESGGIEELFDPALFDESQLMEIKRCVEVGLLCAQHDPANRPTMEDVVQMLCGLKELPTPKKPQYMEKKRSNWIPPDSPSALSDVSLSPR

SEQ ID NO: 110973 - protein, 194 aa, Setaria italica
  misc_feature (16)..(16): Xaa can be any naturally occurring amino acid
  misc_feature (18)..(18): Xaa can be any naturally occurring amino acid
  misc_feature (70)..(70): Xaa can be any naturally occurring amino acid
  misc_feature (89)..(89): Xaa can be any naturally occurring amino acid
  Transcript Sequence Number=SeqID_44999
  Gene Ontology: Mol. function=sequence-specific DNA binding; Cellular component=nucleus; Biological process=regulation of transcription, DNA-dependent
  Homolog annotation: Hit_ID=B6TIY4; Match level="QueryCoverage=100%, HitCoverage=54%, E-value=1e-71, Identity=71%"; Hit description=KNOX1 domain containing protein
  Pfam annotation: Domain name=Homeobox; Domain location=83-142; Score=- 3.3; E_value=0.025; Accession=PF00046.21; Description=Homeobox domain
TTVESQLNSIASTGTXGXPISADDKIGLDNLSDEDDQEEGSGMESEEALGIDPCSDDKELTRQGLAEAAXLVGSLRKELCKKRKKGKLXPKEARQKLLSWWELHYRWPYPSEMEKVALAESTGLEQKQINNWFINQRKRHWKPSEEMQFAVMDGFHPVPPNAAAALYVDARLVGAAPAMFYARPDHGAHDLWHN

SEQ ID NO: 110974 - protein, 99 aa, Setaria italica
  misc_feature (43)..(43): Xaa can be any naturally occurring amino acid
  misc_feature (68)..(68): Xaa can be any naturally occurring amino acid
  Transcript Sequence Number=SeqID_45000
MARVLPLSIDTGEMARGEDMVTDMPSSSAGASCAAVDHSEQNXKDDEYARLVTRAQHATSDVSATIFXEQPRSRSFIWWMKVLLGCFLLIIVGYVFVKW

SEQ ID NO: 110975 - protein, 80 aa, Setaria italica
  misc_feature (73)..(73): Xaa can be any naturally occurring amino acid
  Transcript Sequence Number=SeqID_45001
  Subcellular localization annotation: CTP_CleavageSite=45; ConfidenceScore=5.31e-01
MEVSSSRFARALPNLLDPVSRPLKPPHHHRRRRAVHTLASSPGPTADALAPSPSSAWPPPSLSRLLAAALRGXRAGGSSP

SEQ ID NO: 110976 - protein, 151 aa, Setaria italica
  Transcript Sequence Number=SeqID_45002
WHRRSRRRRRPRAGAVPRNRPSSSLARHGWGSERSAIAERAGGRHERLSGRGSRVGGRQRGWGIRVCRGFARFRLGPLHSGVRVGQQGRRMPFSYVNAVGRRIPSSPPFVRGSASVFSIPISKVLFDSETGWKNASWNSIVPNTNSFARNN

SEQ ID NO: 110977 - protein, 65 aa, Setaria italica
  Transcript Sequence Number=SeqID_45003
  Subcellular localization annotation: CTP_CleavageSite=26; ConfidenceScore=5.24e-01
ETLLVVSSKFNLLLMHPSKDQKEFSRGSHGSKASDSARQLLSCVSTPSSIAFFRADKFLSGMPHR

SEQ ID NO: 110978 - protein, 296 aa, Setaria italica
  Transcript Sequence Number=SeqID_45004
  Gene Ontology: Mol. function=cycloeucalenol cycloisomerase activity; Cellular component=integral to membrane
  Homolog annotation: Hit_ID=B6TK44; Match level="QueryCoverage=91%, HitCoverage=91%, E-value=1e-152, Identity=96%"; Hit description =Cycloeucalenol cycloisomerase
MAAARRPAAGAKPRGGGGGAGRRSAWLAADGSKRWGEAFFLLYTPFWLTLCLGVVVPFKLYERFTELEYLILGLVSTVPAFLIPLFLVGKADSVRSLKDRYWVKANIWIIIFSYVGNYFWTHYFFTVLGASYTFPSWRMNNVPHTTFLLTHACFLFYHMASNMTLRRLRHSTAHLPQSIRWLFEAAWILALSYFIAYLETLAIANFPYYEFIDRDIMYKVGSLFYAIYFIVSFPMFSRIDEKDEKWNLSRVAVDSLGAAMLVTIILDLWRIFLGPIVPIPESRRCGQPGLAWFQSI

SEQ ID NO: 110979 - protein, 101 aa, Setaria italica
  Transcript Sequence Number=SeqID_45005
FSWSRTYAEDTCSFKAQPHQSFLIIQLSTIFALHLLYFIPHARVRARSNQNPHSWLLHVRSRSILECSSSSPFLMYRSPCPSLPLSHLTVLPCNSRLPRGA

SEQ ID NO: 110980 - protein, 59 aa, Setaria italica
  Transcript Sequence Number=SeqID_45006
DLQFFFRSKPLRMRFTVHNPLVCYWINLSHFYSIVGFGHIANFLNCTGNIFFANCQHCV

SEQ ID NO: 110981 - protein, 81 aa, Setaria italica
  Transcript Sequence Number=SeqID_45007
HAHFYRNCQKCIVADLTYFFSCFDTYGSISGNILMRLLNHHWVMPRMLSDVNALRSSVINLSIYIGHLLKRFSYFIFSYIL

SEQ ID NO: 110982 - protein, 136 aa, Setaria italica
  misc_feature (59)..(59): Xaa can be any naturally occurring amino acid
  misc_feature (75)..(75): Xaa can be any naturally occurring amino acid
  Transcript Sequence Number=SeqID_45008
  Gene Ontology: Mol. function=protein serine/threonine kinase activity; Biological process=protein amino acid phosphorylation
  Homolog annotation: Hit_ID=Q10C64; Match level="QueryCoverage=100%, HitCoverage=32%, E-value=3e-59, Identity=68%"; Hit description =Protein kinase family protein, putative, expressed
SNQWISVYNARRPMKQRYHYNVADARLHQHIEKGNEDGLFISSVASSANLWALIMDAGXGFTSQVYELSPIFLHXRIWIMEQWENNYYISAIAGATNGSSLVVMSKGSRWGVVMSRNSGYSEQVVELDFLYPSEGI

SEQ ID NO: 110983 - protein, 54 aa, Setaria italica
  Transcript Sequence Number=SeqID_45009
  Gene Ontology: Mol. function=protein serine/threonine kinase activity; Biological process=protein amino acid phosphorylation
  Homolog annotation: Hit_ID=B6U8U2; Match level="QueryCoverage=100%, HitCoverage=7%, E-value=1e-24, Identity=96%"; Hit description=ATP binding protein
RETNGGHVDYDQRPDIFRGTIRYASVHAHLGRTGSRRDDLESLAYTLIFLIRGR

SEQ ID NO: 110984 - protein, 39 aa, Setaria italica
  Transcript Sequence Number=SeqID_45010
  Gene Ontology: Mol. function=protein serine/threonine kinase activity; Biological process=protein amino acid phosphorylation
  Homolog annotation: Hit_ID=B6U8U2; Match level="QueryCoverage=74%, HitCoverage=4%, E-value=4e-09, Identity=96%"; Hit description=ATP binding protein
HDYQGTPYTQQSYKVSESFPYKWINKKWKEGFMLHNYTP

SEQ ID NO: 110985 - protein, 62 aa, Setaria italica
  Transcript Sequence Number=SeqID_45011
LCLRRRLQAVYSCTAVRSEAKHADAKHLTPSASAPPLARSHPPSFLSLFGLVLLSTFLSWFL

SEQ ID NO: 110986 - protein, 71 aa, Setaria italica
  Transcript Sequence Number=SeqID_45012
  Gene Ontology: Mol. function=protein serine/threonine kinase activity; Biological process=protein amino acid phosphorylation
  Homolog annotation: Hit_ID=B6U8U2; Match level="QueryCoverage=92%, HitCoverage=9%, E-value=1e-25, Identity=81%"; Hit description=ATP binding protein
MALCSKRFFPFRYHYNVADARLHQHIEKGNEDGLFISSVASSANLWALIMDAGTGFTSQVYELSPIFLHKV

SEQ ID NO: 110987 - protein, 96 aa, Setaria italica
  Transcript Sequence Number=SeqID_45013
  Gene Ontology: Mol. function=protein serine/threonine kinase activity; Cellular component=cytoplasm; Biological process=protein amino acid phosphorylation
  Homolog annotation: Hit_ID=B6U8U2; Match level="QueryCoverage=94%, HitCoverage=12%, E-value=2e-49, Identity=94%"; Hit description=ATP binding protein
ALKFEHRNSKGCNYGPPYEWQVYNALNGCYGIPSVHYKGRQGDYYILVMDMLGPSLWDVWNSMGQAMSANMAACIAVEGISILEKLHSKGFHITMH

SEQ ID NO: 110988 - protein, 175 aa, Setaria italica
  Transcript Sequence Number=SeqID_45014
  Gene Ontology: Mol. function=protein serine/threonine kinase activity; Biological process=protein amino acid phosphorylation
  Homolog annotation: Hit_ID=B6U8U2; Match level="QueryCoverage=100%, HitCoverage=24%, E-value=5e-98, Identity=96%"; Hit description=ATP binding protein
YELSPVFLHKDWIMEQWEKSYYITAIAGSTNGSSLVVMSKGTPYTQQSYKVSESFPYKWINKKWKEGFHVTSMATAGNRWGVVMSRNSGSSNQVVELDFLYPSEGIHRRWETGYRITSTAATNDQAAFILSMPKRKPMDETQETLRTSAFPSGHVKEKWAKNLYIASICYGRTVC

SEQ ID NO: 110989 - protein, 140 aa, Setaria italica
  Transcript Sequence Number=SeqID_45015
  Gene Ontology: Mol. function=protein serine/threonine kinase activity; Biological process=protein amino acid phosphorylation
  Homolog annotation: Hit_ID=B6U8U2; Match level="QueryCoverage=89%, HitCoverage=17%, E-value=8e-62, Identity=91%"; Hit description=ATP binding protein
NKLGIIWLFIKFHICDDLKKMATSPEMLCCFCPAPFKQFLEIVTNMKFDEEPNYAKLISLFDGLIESPASRPIRIDGALKVGQKRGRLLVNLEEDEQPKKKVRLGSPAAQWISVYNARRPMKQRYHYNVADSRLSQPETG

SEQ ID NO: 110990 - protein, 665 aa, Setaria italica
  Transcript Sequence Number=SeqID_45016
  Gene Ontology: Mol. function=protein serine/threonine kinase activity; Biological process=protein amino acid phosphorylation
  Homolog annotation: Hit_ID=B6U8U2; Match level="QueryCoverage=97%, HitCoverage=91%, E-value=0.0, Identity=82%"; Hit description=ATP binding protein
  Pfam annotation: Domain name=Pkinase; Domain location=105-379; Score =65.6; E_value=1.8e-16; Accession=PF00069.17; Description=Protein kinase domain
  Pfam annotation: Domain name=Pkinase_Tyr; Domain location=105-364; Score=-162.6; E_value=0.0065; Accession=PF07714.9; Description =Protein tyrosine kinase
  Pfam module annotation: Pfam domain module=Pkinase::Pkinase_Tyr; Domain location=105-379::105-364
GGAAAGRVNKAAAKGRGRSSPEHRGKRLKAIDLQTDLRCKNLPEAVAVEAVIGTAQEGLCLSKVADRAASLRMDGDSADKFAAAEDDATATPVPERVQVGNSPEYLTGRKLGKGGFGQVCVGKRVSGGSSRMGSDAYEVALKFEHRSSKGCNYAPPYEWQVYQTLNGCYGIPSVHYKGRQGDYYILVMDMLGSSLWDLWNSVGQAMSPHMVACIAVEAISILEKLHSKGFVHGDVKPENFLLGQPGSPDEKKLFLIDLGLASKWKEAASGKHVQYDQRPDIFRGTIRYASVHAHLGRTGSRRDDLESLAYTLIFLIRGRLPWQGYQGDNKSFLVCKKKMATSPEILCCFCPAPFKHFLEMVTNMKFDEEPNYPKLVSLFDGLIEGPASRPIRIDGALKVGQKRGRTLANLEDDEQPKKKVRLGSPATQWISVYNARRPMKQRYHYNVADSRLHQHIEKGNQDGLYISSVASSANFWALIMDAGTGFCSQVYELSQMFLHKEWITEQWEKNYYITAIAGATNGSSLVVMSKGTPYTQQSYKVSESFPYKWINKKWKEGFHVTSMATAGNRWGVVMSRNSGYATQVVELDFLYPSEGIHHRWETGYRITSTAATPDQAAFILSIPKRKPMDETQETLRTSAFPSNHVKEKWVKNLYISSICYGRTVC

SEQ ID NO: 110991 - protein, 707 aa, Setaria italica
  Transcript Sequence Number=SeqID_45017
  Gene Ontology: Mol. function=protein serine/threonine kinase activity; Biological process=protein amino acid phosphorylation
  Homolog annotation: Hit_ID=B6U8U2; Match level="QueryCoverage=100%, HitCoverage=100%, E-value=0.0, Identity=85%"; Hit description=ATP binding protein
  Pfam annotation: Domain name=Pkinase; Domain location=148-421; Score =61.8; E_value=2.6e-15; Accession=PF00069.17; Description=Protein kinase domain
  Pfam annotation: Domain name=Pkinase_Tyr; Domain location=148-406; Score=-172.3; E_value=0.028; Accession=PF07714.9; Description =Protein tyrosine kinase
  Pfam module annotation: Pfam domain module=Pkinase::Pkinase_Tyr; Domain location=148-421::148-406
MPELRSSTRQARLRSKKLDEPQPGEPPVKPASPAPPRAGKRAPPRAARGRKVAAGRRAPPASKPRRKGVEIVDLEADPAFEDSPKAVAGLEVAGAAKNNLALNKVAGVGVNKGLKMDGESAEKIVGVEDDSAATPVPERVQVGNSPEYVTDRKLGKGGFGQVYVGRRVSGGAARTGPDAYEVALKFEHRNSKGCNYGPPYEWQVYNALNGCYGIPSVHYKGRQGDYYILVMDMLGPSLWDVWNSMGQAMSANMAACIAVEGISILEKLHSKGFVHGDVKPENFLLGQAGSPDDKKLYLIDLGLASKWRETNGGHVDYDQRPDIFRGTIRYASVHAHLGRTGSRRDDLESLAYTLIFLIRGRLPWQGYQGDTKSFLVCKKKMATSPEMLCCFCPAPFKQFLEIVTNMKFDEEPNYAKLISLFDGLIESPASRPIRIDGALKVGQKRGRLLVNLEEDEQPKKKVRLGSPAAQWISVYNARRPMKQRYHYNVADSRLSQHIEKGNEDGLYISCVASSANLWALIMDAGTGFCSQVYELSPVFLHKDWIMEQWEKSYYITAIAGSTNGSSLVVMSKGTPYTQQSYKVSESFPYKWINKKWKEGFHVTSMATAGNRWGVVMSRNSGYSNQVVELDFLYPSEGIHRRWETGYRITSTAATNDQAAFILSMPKRKPMDETQETLRTSAFPSGHVKEKWAKNLYIASICYGRTVC

SEQ ID NO: 110992 - protein, 56 aa, Setaria italica
  misc_feature (46)..(56): Xaa can be any naturally occurring amino acid
  Transcript Sequence Number=SeqID_45018
PETLQQLLTRMVCSMFLFLQLGKSHVHVLWHIFTKFRLLKRGLKKXXXXXXXXXXX

SEQ ID NO: 110993 - protein, 79 aa, Setaria italica
  Transcript Sequence Number=SeqID_45019
TLIEEHVSSTKVNDNLQPVRSAALQLPAAARQRAAQLQRQQQQAAGSSSIHRLNRLKFHHSYQQPRAPISQTSVNPLVA

SEQ ID NO: 110994 - protein, 98 aa, Setaria italica
  Transcript Sequence Number=SeqID_45020
HLHALELRQKGHVLAQGRRQIILSYLEPRWLRMSMHLTVSTTKVNVRSPRPRGREDDRGTAAGPIVTGSYHEPAAQGKRRRGRRNGQSAGPLGPGQHP

SEQ ID NO: 110995 - protein, 136 aa, Setaria italica
  misc_feature (64)..(64): Xaa can be any naturally occurring amino acid
  Transcript Sequence Number=SeqID_45021
  Subcellular localization annotation: CTP_CleavageSite=51; ConfidenceScore=5.75e-01
TTRAPPRTPRVSLSTIPPRFSAASCRPAPGTASPPGARRRASPSPACPRPRPASRRRRGRPPAXPGQLAPGPGTGTTSPPSAGPADRRCGPSSPASGTSRRPPASRPASSLDFEKSCVGGEQSTPPPGTSPAGAPV

SEQ ID NO: 110996 - protein, 145 aa, Setaria italica
  Transcript Sequence Number=SeqID_45022
  Gene Ontology: Mol. function=protein binding; Cellular component =intrinsic to membrane; Biological process=defense response
  Homolog annotation: Hit_ID=Q8L8J2; Match level="QueryCoverage=97%, HitCoverage=88%, E-value=8e-28, Identity=36%"; Hit description =NBS/LRR (Fragment)
  Pfam annotation: Domain name=LRR_1; Domain location=119-141; Score =7.9; E_value=9.4; Accession=PF00560.25; Description=Leucine Rich Repeat
  Pfam annotation: Domain name=LRR_1; Domain location=24-46; Score=8.1; E_value=8.4; Accession=PF00560.25; Description=Leucine Rich Repeat
  Pfam annotation: Domain name=LRR_1; Domain location=48-70; Score =12.3; E_value=1.3; Accession=PF00560.25; Description=Leucine Rich Repeat
  Pfam annotation: Domain name=LRR_1; Domain location=72-94; Score =11.3; E_value=2.1; Accession=PF00560.25; Description=Leucine Rich Repeat
  Pfam annotation: Domain name=LRR_1; Domain location=96-117; Score =12.1; E_value=1.4; Accession=PF00560.25; Description=Leucine Rich Repeat
  Pfam module annotation: Pfam domain module=LRR_1::LRR_1::LRR_1::LRR _1::LRR_1; Domain location=119-141::24-46::48-70::72-94::96-117
LNYLGLSDCSGISKLPVSFGDLKCMMHLDMSGCSGIRELPNSLGNLTNLHHLDLSECSGVKKIPESLCGLTHLQYLNLASCRYISRLPEAIGSLVNIQYLNMSCCGVREFPESFKRLHNLLHLDLTWCYIDKGLAGAFHGLTACD

SEQ ID NO: 110997 - protein, 45 aa, Setaria italica
  Transcript Sequence Number=SeqID_45023
ANLNEELKFNQSKFMNPASPEIYSILSYKSTHCHGMQNAIKMNVV

SEQ ID NO: 110998 - protein, 137 aa, Setaria italica
  Transcript Sequence Number=SeqID_45024
  Gene Ontology: Mol. function=nucleoside transmembrane transporter activity; Cellular component=membrane; Biological process=transport
  Homolog annotation: Hit_ID=B9INU8; Match level="QueryCoverage=75%, HitCoverage=25%, E-value=3e-37, Identity=65%"; Hit description =Equilibrative nucleoside transporter (Fragment)
YTDPHLTVPYPAIKVTTDMAYEKEDPALAANQGKYWGIFICWLLGNGCLFGFNSMLTIEDYYMYLFPKYHPTRVITLTYQPFVLATTAIFTYHEAKVNTRLRNLAGYTLFFLSSFAAIIMDVATSGRGGIAPFLAYV

SEQ ID NO: 110999 - protein, 60 aa, Setaria italica
  Transcript Sequence Number=SeqID_45025
VLSINVLAIMNQLSHGRPWTKDKMHLVLDFNTRPFSYYRFMLLPHNLFLTHFTTAHSDMN

SEQ ID NO: 111000 - protein, 190 aa, Setaria italica
  Transcript Sequence Number=SeqID_45026
  Gene Ontology: Cellular component=endoplasmic reticulum
  Homolog annotation: Hit_ID=B6UC93; Match level="QueryCoverage=100%, HitCoverage=100%, E-value=4e-66, Identity=68%"; Hit description =YGL010w-like protein
  Pfam annotation: Domain name=DUF962; Domain location=12-157; Score =216.8; E_value=5.6e-62; Accession=PF06127.3; Description=Protein of unknown function (DUF962)
MAKPRGGGGGGLLDLEGHYAFYGAYHSNPVNVGIHELFVWPIFLTALLLLHLTAPSAHAAGIGAAVYGAYYFLLDRRAGALAAFLCFLCWAASGALAARLGFSAGWKVVLVAQLFCWTMQFIGHGVFEKRAPALLDNLVQAFLMAPFFVLLEILHTFGGYEPYPGFHDKVSKLIEEARKEWEDNKSKKSS

SEQ ID NO: 111001 - protein, 279 aa, Setaria italica
  Transcript Sequence Number=SeqID_45027
  Gene Ontology: Mol. function=receptor activity; Cellular component =plasma membrane; Biological process=protein amino acid phosphorylation
  Homolog annotation: Hit_ID=Q69MS7; Match level="QueryCoverage=100%, HitCoverage=66%, E-value=5e-84, Identity=36%"; Hit description =CLAVATA1 receptor kinase( CLV1)-like protein
  Pfam annotation: Domain name=LRR_1; Domain location=101-123; Score =11.6; E_value=1.8; Accession=PF00560.25; Description=Leucine Rich Repeat
  Pfam annotation: Domain name=LRR_1; Domain location=125-147; Score =11.7; E_value=1.7; Accession=PF00560.25; Description=Leucine Rich Repeat
  Pfam annotation: Domain name=LRR_1; Domain location=149-171; Score =6.7; E_value=16; Accession=PF00560.25; Description=Leucine Rich Repeat
  Pfam annotation: Domain name=LRR_1; Domain location=173-195; Score =3.1; E_value=78; Accession=PF00560.25; Description=Leucine Rich Repeat
  Pfam annotation: Domain name=LRR_1; Domain location=197-219; Score =9.1; E_value=5.5; Accession=PF00560.25; Description=Leucine Rich Repeat
  Pfam annotation: Domain name=LRR_1; Domain location=221-243; Score =15.4; E_value=0.23; Accession=PF00560.25; Description=Leucine Rich Repeat
  Pfam annotation: Domain name=LRR_1; Domain location=245-267; Score =14.0; E_value=0.62; Accession=PF00560.25; Description=Leucine Rich Repeat
  Pfam annotation: Domain name=LRR_1; Domain location=29-51; Score =11.5; E_value=1.9; Accession=PF00560.25; Description=Leucine Rich Repeat
  Pfam annotation: Domain name=LRR_1; Domain location=3-26; Score=0.4; E_value=2.5e+02; Accession=PF00560.25; Description=Leucine Rich Repeat
  Pfam annotation: Domain name=LRR_1; Domain location=53-75; Score =14.5; E_value=0.45; Accession=PF00560.25; Description=Leucine Rich Repeat
  Pfam annotation: Domain name=LRR_1; Domain location=77-99; Score=4.4; E_value=43; Accession=PF00560.25; Description=Leucine Rich Repeat
  Pfam module annotation: Pfam domain module=LRR_1::LRR_1::LRR_1::LRR _1::LRR_1::LRR_1::LRR_1::LRR_1::LRR_1::LRR_1::LRR_1; Domain location =101-123::125-147::149-171::173-195::197-219::221-243::245-267::29 -51::3-26::53-75::77-99
  Subcellular localization annotation: CTP_CleavageSite=36; ConfidenceScore=5.15e-01
TGDIVGIDLSRRNLSGTVPATAARLLAPTLTSLNLSANAFSGELPTALFQLRRLEELDVSHNFFNGTFPDGIAELAALTVLEAFSNCFVGALPRGLGVLRRLERLNLGGSYFNGSIPSEIGQLRRLRFLHLAGNALKGRLPAELGELGSLEHLEIGYNAYDGGIPAALGNLTQLLYLDIAVANVAGPLPPELGELARLESLFLFKNRLAGAIPPRWSRLRALQVLDLSDNMLVGAIPGGLGELANLTTLNLMSNSLSGEIPAAIGALPSLEVLQLWNNS

SEQ ID NO: 111002 - protein, 42 aa, Setaria italica
  Transcript Sequence Number=SeqID_45028
NLHHYQCLKQSLLHQLSIPIIHMSYNSFFHCALFTAKTSELQ

SEQ ID NO: 111003 - protein, 54 aa, Setaria italica
  misc_feature (2)..(5): Xaa can be any naturally occurring amino acid
  misc_feature (10)..(10): Xaa can be any naturally occurring amino acid
  misc_feature (14)..(14): Xaa can be any naturally occurring amino acid
  Transcript Sequence Number=SeqID_45029
TXXXXILPFXFFFXFFFFFKTLNTALYHLFCNIHRIVNRIIHFQFYTEAPREEH

SEQ ID NO: 111004 - protein, 87 aa, Setaria italica
  Transcript Sequence Number=SeqID_45030
  Gene Ontology: Mol. function=translation initiation factor activity; Biological process=RNA metabolic process
  Homolog annotation: Hit_ID=B9SD55; Match level="QueryCoverage=81%, HitCoverage=8%, E-value=6e-14, Identity=53%"; Hit description =Regulator of nonsense transcripts, putative
SVVQHIWDDEDTKAFYESLPDLRAFVPAVLLGQAEPTLAEQHGKVHQQSNECTMQSETEVQDTEHQSGGKTNVEHKNRVNTEKRKSG

SEQ ID NO: 111005 - protein, 90 aa, Setaria italica
  misc_feature (63)..(63): Xaa can be any naturally occurring amino acid
  misc_feature (81)..(81): Xaa can be any naturally occurring amino acid
  Transcript Sequence Number=SeqID_45031
MASRATLTVLFGFYAVFCCLYLLKEATAALIPAVLITLALTPLLTYAHVWALGRANAGGAGAXVARLAEATLLAAVVALLXGAAVRLGLG

SEQ ID NO: 111006 - protein, 191 aa, Setaria italica
  Transcript Sequence Number=SeqID_45032
  Gene Ontology: Mol. function=unfolded protein binding; Cellular component=prefoldin complex; Biological process=protein folding
  Homolog annotation: Hit_ID=B6TKE7; Match level="QueryCoverage=94%, HitCoverage=95%, E-value=1e-96, Identity=96%"; Hit description =Prefoldin subunit 3
  Pfam annotation: Domain name=Prefoldin; Domain location=55-177; Score= 118.9; E_value=1.7e-32; Accession=PF02996.9; Description=Prefoldin subunit
MAAAAAAAASTPQGVAERRGIPAAAFVEDVEAYLRQAGLDVNSALAFLQERLQQYKIVEMKLLAQQRDLQAKIPDIEKCLDIVAALQAKKALGEALVADFELSEGIYSRAKIEDTDSVCLWLGANVMLEYSCDEANALLKKNLENAKASLEVLVADLQFLRDQQTITQVTIARVFNWDVHQRRSKQAVKET

SEQ ID NO: 111007 - protein, 160 aa, Setaria italica
  Transcript Sequence Number=SeqID_45033
  Gene Ontology: Mol. function=receptor activity; Cellular component =integral to membrane
  Homolog annotation: Hit_ID=B6TZF1; Match level="QueryCoverage=100%, HitCoverage=64%, E-value=1e-69, Identity=83%"; Hit description =Transmembrane BAX inhibitor motif-containing protein 4
MLLTVAVAAVVVYVRPVALFFVSTPGGFGLYIFLIILPFIVLCPLYYYYQHHPVNLLLLGLFTVAISFAVGLTCAFTKGQVILESAILTSVVVVSLTAYTFWAAKRGHDFSFLGPFLFAGVMILVVFSLIQLFFPLGRVSLMVYGGLAALIFCGYIIYDT

SEQ ID NO: 111008 - protein, 134 aa, Setaria italica
  misc_feature (18)..(18): Xaa can be any naturally occurring amino acid
  misc_feature (69)..(69): Xaa can be any naturally occurring amino acid
  Transcript Sequence Number=SeqID_45034
  Gene Ontology: Mol. function=aspartic-type endopeptidase activity; Cellular component=chromatin; Biological process=carbon utilization by fixation of carbon dioxide
  Homolog annotation: Hit_ID=Q8SA91; Match level="QueryCoverage=79%, HitCoverage=4%, E-value=4e-24, Identity=46%"; Hit description =Putative gag-pol polyprotein
  Pfam annotation: Domain name=RVP_2; Domain location=5-112; Score= -41.4; E_value=0.0019; Accession=PF08284.3; Description=Retroviral aspartyl protease
GCDAHVRSTILIDSGSTXSFISQHAVAKMPGLSLCPAHVQVKVANSDILSCSSAVPDAEWTIQGCQFKXQLKVLPLQSYDMILGMDWLESFSPMKVHWCHKWMVIPYQNSTPVLQGILPEFAEELLIQITSVQL

SEQ ID NO: 111009 - protein, 46 aa, Setaria italica
  Transcript Sequence Number=SeqID_45035
TWSRDLNCSGAFKFIITSYIILNQSFKLKDTTYILQIWELSAHASV

SEQ ID NO: 111010 - protein, 205 aa, Setaria italica
  misc_feature (7)..(7): Xaa can be any naturally occurring amino acid
  misc_feature (16)..(16): Xaa can be any naturally occurring amino acid
  misc_feature (25)..(25): Xaa can be any naturally occurring amino acid
  misc_feature (52)..(52): Xaa can be any naturally occurring amino acid
  Transcript Sequence Number=SeqID_45036
  Gene Ontology: Mol. function=protein prenyltransferase activity; Biological process=protein amino acid prenylation
  Homolog annotation: Hit_ID=B6U171; Match level="QueryCoverage=99%, HitCoverage=28%, E-value=2e-80, Identity=75%"; Hit description=Rab geranylgeranyl transferase like protein
LVTQALXFTDPSDQSXGWFYHLWLXLAQTSSPDNPQLIASWPCDGAKLSSSXVKENVEQNTLSSIWCHSLKEKTVPIVLYFNEPVKGLNQSSVKLKSDLDFGKDVHWRALSVTDSGYSNCWTTYLQITNECSSSQQYSVEVSIPSSDGIVSRSGSNYNCPVHFTFTIELISDDAQGIDLFDKPVAWNCSESLESHGNCKAIPFDP

SEQ ID NO: 111011 - protein, 718 aa, Setaria italica
  misc_feature (348)..(348): Xaa can be any naturally occurring amino acid
  Transcript Sequence Number=SeqID_45037
  Gene Ontology: Mol. function=protein prenyltransferase activity; Biological process=protein amino acid prenylation
  Homolog annotation: Hit_ID=B6U171; Match level="QueryCoverage=100%, HitCoverage=100%, E-value=0.0, Identity=77%"; Hit description=Rab geranylgeranyl transferase like protein
  Pfam annotation: Domain name=LRR_1; Domain location=573-593; Score =6.8; E_value=15; Accession=PF00560.25; Description=Leucine Rich Repeat
  Pfam annotation: Domain name=LRR_1; Domain location=595-615; Score =10.4; E_value=3.1; Accession=PF00560.25; Description=Leucine Rich Repeat
  Pfam annotation: Domain name=LRR_1; Domain location=620-650; Score =5.8; E_value=23; Accession=PF00560.25; Description=Leucine Rich Repeat
  Pfam annotation: Domain name=LRR_1; Domain location=681-701; Score =2.2; E_value=1.2e+02; Accession=PF00560.25; Description=Leucine Rich Repeat
  Pfam annotation: Domain name=PPTA; Domain location=125-154; Score =35.2; E_value=2.7e-07; Accession=PF01239.14; Description=Protein prenyltransferase alpha subunit repeat
  Pfam annotation: Domain name=PPTA; Domain location=160-190; Score =43.1; E_value=1.1e-09; Accession=PF01239.14; Description=Protein prenyltransferase alpha subunit repeat
  Pfam annotation: Domain name=PPTA; Domain location=206-236; Score =34.2; E_value=5.3e-07; Accession=PF01239.14; Description=Protein prenyltransferase alpha subunit repeat
  Pfam annotation: Domain name=PPTA; Domain location=43-73; Score=21.7; E_value=0.0031; Accession=PF01239.14; Description=Protein prenyltransferase alpha subunit repeat
  Pfam annotation: Domain name=PPTA; Domain location=88-118; Score =37.0; E_value=7.7e-08; Accession=PF01239.14; Description=Protein prenyltransferase alpha subunit repeat
  Pfam module annotation: Pfam domain module=LRR_1::LRR_1::LRR_1::LRR _1::PPTA::PPTA::PPTA::PPTA::PPTA; Domain location=573-593::595 -615::620-650::681-701::125-154::160-190::206-236::43-73::88-118
MHGRPRRPAKPEDEKAASAKAAKLRDLQAQVLQNHHSRTYTKEAIGLSFKLLEINPEAYTAWNYRKLAFQHNIKELSDPEAIRSAVDDELRVVEVALRQNPKSYGAWYHRKWLLNQKLAPVDSKREFGLLNKLLKVDARNFHGWNYRRFLARFMGVPDEEELKYTMDKISDNFSNYSAWHNRSILLSNLLIQQSKGFESKQKIFSEEFELVTQALFTDPSDQSGWFYHLWLLAQTSSPDNPQLIASWPCDGAKLSSSFVKENVEQNTLSSIWCHSLKEKTVPIVLYFNEPVKGLNQSSVKLKSDLDFGKDVHWRALSVTDSGYSNCWTTYLQITNEYCCELLLSFVIXRYVVQQLEYPECSSSQQYSVEVSIPSSDGIVSRSGSNYNCPVHFTFTIELISDDAQGIDLFDKPVAWNCSESLESHGNCKAIPFDPLKITSALVEDSNWHFERLTEEIDLFRELPDDKCKFVNLTLARLLLACAAIKSRGRSPIERKKYCEEALAHFSDLIHLDPSHKQYYEDERSLVLMDKLTCDMETFMKHCSVQVQNSVPLNHVQLCRLSLTCVGFVERLMWVQVLDLSHNSLRSIEGLEALQQLVSLNISNNHISNFTALEPLTKIMFLKVLDLSFNEIGAHSIDTTRYICSSPFSHKIEACEAFEECQKKNINVEEYWDAILFFKSLKLAQLDIKGNAVASKENFRTLIMTLIPSLKSINGECVN

SEQ ID NO: 111012 - protein, 192 aa, Setaria italica
  misc_feature (27)..(27): Xaa can be any naturally occurring amino acid
  Transcript Sequence Number=SeqID_45038
  Gene Ontology: Mol. function=serine-type endopeptidase inhibitor activity; Cellular component=extracellular region; Biological process=defense response
  Homolog annotation: Hit_ID=Q53MC8; Match level="QueryCoverage=96%, HitCoverage=13%, E-value=4e-28, Identity=40%"; Hit description =Transposon protein, putative, unclassified
RSAAPGFKVLRMAYINHKREHCFSMYXIYLPDDRDGLPDLVRELSSNPVALLHGKVVPDRKVLVGELQIPKFDVSLQADVSRLLADLGLDLTQFRPAGHSFSEMVALAEADDEDMLPPMAVPSIIQQCSVRVNERGTVAAAATELEILGFAMGKPEPVVDFVADHPFLFFIKEDHSRVVLFAGQVLDPSSPR

SEQ ID NO: 111013 - protein, 75 aa, Setaria italica
  misc_feature (28)..(28): Xaa can be any naturally occurring amino acid
  misc_feature (47)..(47): Xaa can be any naturally occurring amino acid
  Transcript Sequence Number=SeqID_45039
  Gene Ontology: Mol. function=hydrolase activity, hydrolyzing O -glycosyl compounds; Cellular component=extracellular region; Biological process=carbohydrate metabolic process
  Homolog annotation: Hit_ID=Q9LZV3; Match level="QueryCoverage=96%, HitCoverage=15%, E-value=2e-16, Identity=58%"; Hit description =Mannan endo-1,4-beta-mannosidase 6
FDRAHCDEHCTQGSSEMIRDEQWRMVKXQGSQFVIGDKPFYVNGFNXTYWLMILAVDPSTRGKVTEVFQQVAAVG

SEQ ID NO: 111014 - protein, 45 aa, Setaria italica
  Transcript Sequence Number=SeqID_45040
LLRRGKSLLPVQRRGRSLLPDTLNKIRINHSNSKLVSCSQPRMLW

SEQ ID NO: 111015 - protein, 73 aa, Setaria italica
  Transcript Sequence Number=SeqID_45041
LSNLCFTVLFARFSALYKLHLELAKCTVSISTLLKTEFLQHNEISCKTEIYLKYCMYFAIFIAHQCPESLYCT

SEQ ID NO: 111016 - protein, 65 aa, Setaria italica
  Transcript Sequence Number=SeqID_45042
  Gene Ontology: Mol. function=violaxanthin de-epoxidase activity
  Homolog annotation: Hit_ID=B6SUQ7; Match level="QueryCoverage=64%, HitCoverage=9%, E-value=5e-15, Identity=90%"; Hit description =Violaxanthin de-epoxidase
IKEVKEKGGEIEEEVEELEKEEVTLFQKLAEGLIEVKQDLMNFLQGLSKEEMELLDQMNMEATEV

SEQ ID NO: 111017 - protein, 83 aa, Setaria italica
  misc_feature (65)..(65): Xaa can be any naturally occurring amino acid
  Transcript Sequence Number=SeqID_45043
GLALAGIIFTDDLRSLTEIMEKKEDKQKEQKRTSLPAGTRMMLTRPVEKVTPPPPASPSRPAAKXAFDPSRCSFLDLLYAQYP

SEQ ID NO: 111018 - protein, 100 aa, Setaria italica
  Transcript Sequence Number=SeqID_45044
MVQIPAMTKRGNGRAPLSVVVAIIGGLALAGIIFTDDLRSLTEIMEKKEDKQKEQKRTSLPAGTRMMLTRPVEKVTPPPPVEKVTPAAAAAKGRRRAGAA

SEQ ID NO: 111019 - protein, 125 aa, Setaria italica
  misc_feature (116)..(116): Xaa can be any naturally occurring amino acid
  Transcript Sequence Number=SeqID_45045
  Homolog annotation: Hit_ID=B6SXI1; Match level="QueryCoverage=84%, HitCoverage=79%, E-value=1e-30, Identity=63%"; Hit description=CP12-1
  Pfam annotation: Domain name=CP12; Domain location=55-125; Score =141.2; E_value=3.2e-39; Accession=PF02672.7; Description=CP12 domain
  Subcellular localization annotation: CTP_CleavageSite=35; ConfidenceScore=5.57e-01
MASTVASLSTTATFAAAADVLPMRRKAAAGRVWFPAAARRGFAVRSSGPATPPGISDQVSESIKKAEQTCEGEEGSGECAAAWDEVEELSAAASHARDKLKEDNDPLEKYCKENPXTDECRTYDN

SEQ ID NO: 111020 - protein, 743 aa, Setaria italica
  misc_feature (126)..(126): Xaa can be any naturally occurring amino acid
  Transcript Sequence Number=SeqID_45046
  Gene Ontology: Mol. function=binding; Cellular component=nucleus; Biological process=cell cycle
  Homolog annotation: Hit_ID=Q69WR1; Match level="QueryCoverage=98%, HitCoverage=95%, E-value=0.0, Identity=71%"; Hit description =Putative IDN3 protein isoform A
NILVYFSLLPSFFGSTKATGINLSMVASLRKRCELICKRLLERILQVEEGAANEMEIHALPYIIALQAFCIVDPTLCIPVTDPSKFVVTLQPYLKIQIDNKSAAQLLESIIFVIDAVLPLIRKPPXVVVELEQDLKQMIVRHSYLTVVHACIKCLCSLSKSAGRGPGLLEYLVNVFYKHLSGTNTDSQLLGRSLFCLGLLLRYGYQLMLTSENQLDFPKIINLLQRRYLLRDDFNLKVRALQTLGYILIAKPEFMLQKEIMNLIEATLSSAVDHRLKIQGLQNLYEYLRDAESQLTAESTGKPPVQSAINGGSEVPVAAGAGDTNICGGIIQLYWSSILERCLDTNDQVRQSALKIVEVVLRQGLVHPITCVPHLIALEMDPLEGNSKLAHHLLMNMNEKYPSFFESRLGDGLQMSFIFFETTVSNHKLAANVKSNPIAFVKPGITRIYRLIRANRNSRNKFVHSIVRKFEPDGRNRSTVSFLVYCAEVLASLPFTCPDEPLYLIYDINRVIHLRAGAIEANLKRWTSMDQPQDAAGMATLPGESHVVMHEPGGYYDHNEGYIPVRVNNNPCSTSDVDMAKVQEDCHDAIALQLLLKLKRHLKIVYSLTDARCQAFSLKEPPKTGETLSKQNVPFNIGNNNISLPSCLQDVASVYQDFKTVLREDSMDFGMYTPSVQRKRPTPRSTSRVRRTAATSVTRARGGGRGGDDDDTDDDDWTGGPRVLDFSAQASNGGRVTRQRVQV

SEQ ID NO: 111021 - protein, 89 aa, Setaria italica
  misc_feature (12)..(12): Xaa can be any naturally occurring amino acid
  misc_feature (64)..(64): Xaa can be any naturally occurring amino acid
  Transcript Sequence Number=SeqID_45047
DEPSGYLKEETXLMEIYHYLFLGRDPGLIARASNKGSKEQVNGDIDSSVDSLRLMMEEEERKKXLFRQRNSEHNYTQWDVLLRFLVEWS

SEQ ID NO: 111022 - protein, 86 aa, Setaria italica
  Transcript Sequence Number=SeqID_45048
LSQVHAPFIIISQSKYRCLAILQPPILNTILIIFWNSIKHGRNLLLINLVNTISSQYKLDGTSMCIQQDSMVRTLAIQTATLVFNM

SEQ ID NO: 111023 - protein, 93 aa, Setaria italica
  Transcript Sequence Number=SeqID_45049
  Gene Ontology: Mol. function=hydrolase activity, acting on carbon -nitrogen (but not peptide) bonds; Cellular component=chloroplast; Biological process=nitrogen compound metabolic process
  Homolog annotation: Hit_ID=Q69NN3; Match level="QueryCoverage=49%, HitCoverage=19%, E-value=5e-15, Identity=78%"; Hit description =Putative Nit protein 2
PNSKSDFMIWGHSSLIGPFGEVLAAAGHEEATAIGEIDLSMIQSTRENLPLEMQSRGDLYRLVDVQRQREPATASNGAGRLEGEDALVNDTVL

SEQ ID NO: 111024 - protein, 271 aa, Setaria italica
  Transcript Sequence Number=SeqID_45050
  Gene Ontology: Mol. function=hydrolase activity, acting on carbon -nitrogen (but not peptide) bonds; Cellular component=chloroplast; Biological process=nitrogen compound metabolic process
  Homolog annotation: Hit_ID=Q69NN3; Match level="QueryCoverage=81%, HitCoverage=93%, E-value=1e-113, Identity=84%"; Hit description =Putative Nit protein 2
  Pfam annotation: Domain name=CN_hydrolase; Domain location=2-145; Score=91.2; E_value=3.6e-24; Accession=PF00795.14; Description =Carbon-nitrogen hydrolase
MLIVMPEIWSCPYSMETLPSYAEDIDGGGSPSISMLSEVAASRKITIVGGSIPEKASGKVFNTCCVVGPDGQILAKHRKLHLFEINIPGDIRLKESDTFTGGQEPTVVDTDVGRIGIGICHDIRFPELAMLYRSRGAHLICYPSAFNMSTGELLWDLMQKSRAVDNQLFVATCSPARDPNSKSDFMIWGHSSLIGPFGEVLAAAGHEEATAIGEIDLSMIQSTRENLPLEMQSRGDLYRLVDVQRQREPATASNGAGRLEGEDALVNDTVL

SEQ ID NO: 111025 - protein, 201 aa, Setaria italica
  Transcript Sequence Number=SeqID_45051
  Gene Ontology: Mol. function=protein phosphatase type 2A regulator activity; Cellular component=protein phosphatase type 2A complex; Biological process=signal transduction
  Homolog annotation: Hit_ID=Q6H976; Match level="QueryCoverage=65%, HitCoverage=14%, E-value=4e-19, Identity=44%"; Hit description =STYLOSA protein
  Pfam annotation: Domain name=SSDP; Domain location=1-201; Score= -104.7; E_value=0.1; Accession=PF04503.5; Description=Single-stranded DNA binding protein, SSDP
AAATLSLKHGAATQSQQQVEVQQLLLQRHVQQQQQHSQEQQQQQHPQLQQRQQKQQQRNENTDFSTSAQNGTVAADPPARQNAAAASGLSAKLYEDRTKITAQRDVSDEASMKQRLAERTGPLLEANPTSMLKSPARSALASGQIFHRSTGGLSGSLQQAQARSQPLLGSTQDMKAETNVALNLRAGADGSLFGVPGSNQA

SEQ ID NO: 111026 - protein, 46 aa, Setaria italica
  Transcript Sequence Number=SeqID_45052
ITKSHLCKTIIHQVHSKAQILHFTGLHCNFRLQLTYDLKKATPLFP

SEQ ID NO: 111027 - protein, 36 aa, Setaria italica
  Transcript Sequence Number=SeqID_45053
CRIGSGSPIQITLKSMIRLNFSLPRKETLSGILFRK

SEQ ID NO: 111028 - protein, 121 aa, Setaria italica
  misc_feature (107)..(107): Xaa can be any naturally occurring amino acid
  Transcript Sequence Number=SeqID_45054
  Gene Ontology: Mol. function=lipid binding; Biological process=lipid transport
  Homolog annotation: Hit_ID=B6U968; Match level="QueryCoverage=77%, HitCoverage=63%, E-value=2e-14, Identity=46%"; Hit description=Non -specific lipid-transfer protein
  Pfam annotation: Domain name=Tryp_alpha_amyl; Domain location=32-117; Score=65.6; E_value=1.9e-16; Accession=PF00234.14; Description =Protease inhibitorseed storageLTP f
MKKTSAFAALLLAMLAVHQLMAVPPVRAAVSCSGVMNHLSLCLEFLQGDADEPGDRCCKGVKAIYAAADTAAERQATCKCLKSAYNLVDADLYATQTLTGLCGVPVXPYTISPDTDCSEIE

SEQ ID NO: 111029 - protein, 104 aa, Setaria italica
  Transcript Sequence Number=SeqID_45055
QLQASCSLPHSTTDDESAQQLQASCSLPRSTTDDESGLHLQASCLVPRNATSIVSSHGRKICLMDDNGGQLLKSLAPSLGFLMSEAITSNAATECRPSERKPAD

SEQ ID NO: 111030 - protein, 63 aa, Setaria italica
  Transcript Sequence Number=SeqID_45056
QIIASRSLQRLGQHQENLQASSPFSRPLKIKISNHHLISFFSSFEKSNCPTIITEDKSHGLLL

SEQ ID NO: 111031 - protein, 142 aa, Setaria italica
  Transcript Sequence Number=SeqID_45057
  Gene Ontology: Mol. function=protein binding
  Homolog annotation: Hit_ID=B6U1G7; Match level="QueryCoverage=80%, HitCoverage=36%, E-value=3e-51, Identity=67%"; Hit description =Regulatory subunit
  Pfam annotation: Domain name=LRR_1; Domain location=113-135; Score =8.4; E_value=7.7; Accession=PF00560.25; Description=Leucine Rich Repeat
  Pfam annotation: Domain name=LRR_1; Domain location=16-39; Score=5.6; E_value=26; Accession=PF00560.25; Description=Leucine Rich Repeat
  Pfam annotation: Domain name=LRR_1; Domain location=41-63; Score =14.3; E_value=0.51; Accession=PF00560.25; Description=Leucine Rich Repeat
  Pfam annotation: Domain name=LRR_1; Domain location=65-87; Score=6.2; E_value=20; Accession=PF00560.25; Description=Leucine Rich Repeat
  Pfam annotation: Domain name=LRR_1; Domain location=89-111; Score =4.6; E_value=39; Accession=PF00560.25; Description=Leucine Rich Repeat
  Pfam module annotation: Pfam domain module=LRR_1::LRR_1::LRR_1::LRR _1::LRR_1; Domain location=113-135::16-39::41-63::65-87::89-111
CPKIHGGLVHLKGLKKLEKLNMRYCNCITDSDMKYLSDLTNLRELQLSSCKISDFGVSYLRGLHKLAHLNLEGCAVTAACLEVISGLASLVLLNLSRCGICDEGCENLEGLVKLKALNLGFNHITDACLIHLKVFTVSSMHK

SEQ ID NO: 111032 - protein, 124 aa, Setaria italica
  Transcript Sequence Number=SeqID_45058
  Gene Ontology: Mol. function=protein binding
  Homolog annotation: Hit_ID=Q7XQW8; Match level="QueryCoverage=97%, HitCoverage=21%, E-value=6e-41, Identity=72%"; Hit description =OSJNBa0014K14.7 protein
  Pfam annotation: Domain name=LRR_1; Domain location=10-32; Score=5.9; E_value=22; Accession=PF00560.25; Description=Leucine Rich Repeat
  Pfam annotation: Domain name=LRR_1; Domain location=34-56; Score=2.9; E_value=86; Accession=PF00560.25; Description=Leucine Rich Repeat
  Pfam annotation: Domain name=LRR_1; Domain location=58-81; Score=7.5; E_value=11; Accession=PF00560.25; Description=Leucine Rich Repeat
  Pfam annotation: Domain name=LRR_1; Domain location=83-108; Score =4.3; E_value=47; Accession=PF00560.25; Description=Leucine Rich Repeat
  Pfam module annotation: Pfam domain module=LRR_1::LRR_1::LRR_1::LRR _1; Domain location=10-32::34-56::58-81::83-108
NHLVNAGLTGLTHLDLFGARITDAGTNCFRFFKNLQSLEVCGGLITDAGVKNIKDLKALTLLNLSQNGNLTDKTLELISGLTALVSLNVSNSRVSNSGLHHLKPLQNLRSLSLEVVPCSGLYVL

SEQ ID NO: 111033 - protein, 67 aa, Setaria italica
  Transcript Sequence Number=SeqID_45059
SILMWYSIKPDQYHIRKITRAILINQCSLFLPCTSNADKMKADASLEGIKEGVVIFGMIFFARAINL

SEQ ID NO: 111034 - protein, 132 aa, Setaria italica
  Transcript Sequence Number=SeqID_45060
  Gene Ontology: Mol. function=protein binding
  Homolog annotation: Hit_ID=Q7XQW8; Match level="QueryCoverage=84%, HitCoverage=20%, E-value=4e-40, Identity=77%"; Hit description =OSJNBa0014K14.7 protein
  Pfam annotation: Domain name=LRR_1; Domain location=26-48; Score=2.9; E_value=86; Accession=PF00560.25; Description=Leucine Rich Repeat
  Pfam annotation: Domain name=LRR_1; Domain location=50-73; Score=7.5; E_value=11; Accession=PF00560.25; Description=Leucine Rich Repeat
  Pfam annotation: Domain name=LRR_1; Domain location=75-97; Score=4.2; E_value=47; Accession=PF00560.25; Description=Leucine Rich Repeat
  Pfam annotation: Domain name=LRR_1; Domain location=99-123; Score =9.1; E_value=5.5; Accession=PF00560.25; Description=Leucine Rich Repeat
  Pfam module annotation: Pfam domain module=LRR_1::LRR_1::LRR_1::LRR _1; Domain location=26-48::50-73::75-97::99-123
VVNRPSSPILHESKFKHSKLIKSFKNLQSLEVCGGLITDAGVKNIKDLKALTLLNLSQNGNLTDKTLELISGLTALVSLNVSNSRVSNSGLHHLKPLQNLRSLSLESCRVTPTEIKKLRLAALPNLISVRPE

SEQ ID NO: 111035 - protein, 139 aa, Setaria italica
  Transcript Sequence Number=SeqID_45061
  Gene Ontology: Mol. function=protein binding
  Homolog annotation: Hit_ID=B6U1G7; Match level="QueryCoverage=95%, HitCoverage=22%, E-value=2e-51, Identity=80%"; Hit description =Regulatory subunit
  Pfam annotation: Domain name=LRR_1; Domain location=15-37; Score=7.4; E_value=12; Accession=PF00560.25; Description=Leucine Rich Repeat
  Pfam annotation: Domain name=LRR_1; Domain location=39-62; Score=5.6; E_value=26; Accession=PF00560.25; Description=Leucine Rich Repeat
  Pfam annotation: Domain name=LRR_1; Domain location=64-86; Score =14.3; E_value=0.51; Accession=PF00560.25; Description=Leucine Rich Repeat
  Pfam annotation: Domain name=LRR_1; Domain location=88-110; Score =6.2; E_value=20; Accession=PF00560.25; Description=Leucine Rich Repeat
  Pfam module annotation: Pfam domain module=LRR_1::LRR_1::LRR_1::LRR _1; Domain location=15-37::39-62::64-86::88-110
AVTAEGAKAFANLVNLVNLDLERCPKIHGGLVHLKGLKKLEKLNMRYCNCITDSDMKYLSDLTNLRELQLSSCKISDFGVSYLRGLHKLAHLNLEGCAVTAACLEVISGLASLVLFNLSRCGICDEGCENLEGNHDVDY

SEQ ID NO: 111036 - protein, 581 aa, Setaria italica
  Transcript Sequence Number=SeqID_45062
  Gene Ontology: Mol. function=protein binding
  Homolog annotation: Hit_ID=B6U1G7; Match level="QueryCoverage=100%, HitCoverage=100%, E-value=0.0, Identity=81%"; Hit description =Regulatory subunit
  Pfam annotation: Domain name=LRR_1; Domain location=136-158; Score =0.6; E_value=2.3e+02; Accession=PF00560.25; Description=Leucine Rich Repeat
  Pfam annotation: Domain name=LRR_1; Domain location=210-232; Score =7.4; E_value=12; Accession=PF00560.25; Description=Leucine Rich Repeat
  Pfam annotation: Domain name=LRR_1; Domain location=234-257; Score =5.6; E_value=26; Accession=PF00560.25; Description=Leucine Rich Repeat
  Pfam annotation: Domain name=LRR_1; Domain location=259-281; Score =14.3; E_value=0.51; Accession=PF00560.25; Description=Leucine Rich Repeat
  Pfam annotation: Domain name=LRR_1; Domain location=283-305; Score =6.2; E_value=20; Accession=PF00560.25; Description=Leucine Rich Repeat
  Pfam annotation: Domain name=LRR_1; Domain location=307-329; Score =4.6; E_value=39; Accession=PF00560.25; Description=Leucine Rich Repeat
  Pfam annotation: Domain name=LRR_1; Domain location=331-353; Score =9.3; E_value=5.1; Accession=PF00560.25; Description=Leucine Rich Repeat
  Pfam annotation: Domain name=LRR_1; Domain location=355-377; Score =8.0; E_value=8.8; Accession=PF00560.25; Description=Leucine Rich Repeat
  Pfam annotation: Domain name=LRR_1; Domain location=379-401; Score =8.5; E_value=7.2; Accession=PF00560.25; Description=Leucine Rich Repeat
  Pfam annotation: Domain name=LRR_1; Domain location=403-425; Score =9.6; E_value=4.4; Accession=PF00560.25; Description=Leucine Rich Repeat
  Pfam annotation: Domain name=LRR_1; Domain location=427-449; Score =8.1; E_value=8.4; Accession=PF00560.25; Description=Leucine Rich Repeat
  Pfam annotation: Domain name=LRR_1; Domain location=451-473; Score =5.9; E_value=22; Accession=PF00560.25; Description=Leucine Rich Repeat
  Pfam annotation: Domain name=LRR_1; Domain location=475-497; Score =2.9; E_value=86; Accession=PF00560.25; Description=Leucine Rich Repeat
  Pfam annotation: Domain name=LRR_1; Domain location=499-522; Score =7.5; E_value=11; Accession=PF00560.25; Description=Leucine Rich Repeat
  Pfam annotation: Domain name=LRR_1; Domain location=524-546; Score =4.2; E_value=47; Accession=PF00560.25; Description=Leucine Rich Repeat
  Pfam annotation: Domain name=LRR_1; Domain location=548-572; Score =9.1; E_value=5.5; Accession=PF00560.25; Description=Leucine Rich Repeat
  Pfam module annotation: Pfam domain module=LRR_1::LRR_1::LRR_1::LRR _1::LRR_1::LRR_1::LRR_1::LRR_1::LRR_1::LRR_1::LRR_1::LRR_1::LRR _1::LRR_1::LRR_1::LRR_1; Domain location=136-158::210-232::234 -257::259-281::283-305::...
  Pfam module annotation: Domain location=307-329::331-353::355 -377::379-401::403-425::427-449::451-473::475-497::499-522::524 -546::548-572
MGSACSRKRGQLVHEDDLYSARFSKSGSFKWLLHTLPRSNSADVHRRGQGPAPGRCPSLMELCVAKVREDMNRYSDFSQLPRDLSQQIFNELVESGYLTEASLGAFHDCDLQDICLGEYPGVTDAWMEVVASQGQSLLSVDISCSDVTDSGLNLLKDCSSMQSLACDYCDRISEHGLKTLSGFSNLTSLSIKKCAAVTAEGAKAFANLVNLVNLDLERCPKIHGGLVHLKGLKKLEKLNMRYCNCITDSDMKYLSDLTNLRELQLSSCKISDFGVSYLRGLHKLAHLNLEGCAVTAACLEVISGLASLVLLNLSRCGICDEGCENLEGLVKLKALNLGFNHITDACLIHLKDLINLECLNLDSCKIGDEGLFHLKGLVQLKSLELSDTEVGSNGLRHLSGLRNLQSINLSFTLVTDIGLKKISGLSSLKSLNLDNRQITDTGLAALTSLTGLTHLDLFGARITDAGTNCFRFFKNLQSLEVCGGLITDAGVKNIKDLKALTLLNLSQNGNLTDKTLELISGLTALVSLNVSNSRVSNSGLHHLKPLQNLRSLSLESCRVTPTEIKKLRLAALPNLISVRPE

SEQ ID NO: 111037 - protein, 54 aa, Setaria italica
  Transcript Sequence Number=SeqID_45063
MSSEQKLHMDEALLEQPVNQPELENHDGRRPSLLTVIGFIFLTFNSVMAVYRSN

SEQ ID NO: 111038 - protein, 173 aa, Setaria italica
  misc_feature (107)..(107): Xaa can be any naturally occurring amino acid
  Transcript Sequence Number=SeqID_45064
  Gene Ontology: Mol. function=hydrolase activity, acting on ester bonds; Cellular component=nucleus; Biological process=RNA splicing, via transesterification reactions
  Homolog annotation: Hit_ID=B6U6X4; Match level="QueryCoverage=100%, HitCoverage=42%, E-value=2e-91, Identity=89%"; Hit description =Lariat debranching enzyme
HGELDIVYDTLRRLEEAEGIKIDLLLCCGDFQAVRNTDDLRCVNVPLKYRNMNSFWKYYSGQAVAPYPTIFIGGNHEASNYLWELYYGGWAAPNIYFLGFAGVVKFXNIRIGGLSGIHKQHNYHSGHYERPPYNEQTIRSVYHVRHYDVLKLMHVKEPLDIFLSHDWPLGITE

SEQ ID NO: 111039 - protein, 78 aa, Setaria italica
  Transcript Sequence Number=SeqID_45065
WQWVHIIAVSRQLYAARVSETNQCIFQQDSTRYLCVLMNAVQSAELPFIGWVSSRDGGVQTNSAELTFQRASSRSCNV

SEQ ID NO: 111040 - protein, 77 aa, Setaria italica
  misc_feature (50)..(50): Xaa can be any naturally occurring amino acid
  misc_feature (54)..(54): Xaa can be any naturally occurring amino acid
  misc_feature (71)..(71): Xaa can be any naturally occurring amino acid
  Transcript Sequence Number=SeqID_45066
  Gene Ontology: Mol. function=phosphatase activity; Biological process= metabolic process
  Homolog annotation: Hit_ID=B6UCU8; Match level="QueryCoverage=71%, HitCoverage=15%, E-value=2e-21, Identity=90%"; Hit description=4 -nitrophenylphosphatase
LFKRKSYNWLRVFRFLPFSFTYANRFGITTSQICMVGDRLDTDILFGQNXGCKXLLVLSGVTSLQTLQSPXNSIQPD

SEQ ID NO: 111041 - protein, 236 aa, Setaria italica
  Transcript Sequence Number=SeqID_45067
  Gene Ontology: Mol. function=phosphatase activity; Biological process= metabolic process
  Homolog annotation: Hit_ID=B6UCU8; Match level="QueryCoverage=100%, HitCoverage=65%, E-value=1e-118, Identity=88%"; Hit description=4 -nitrophenylphosphatase
  Pfam annotation: Domain name=Hydrolase; Domain location=8-202; Score =10.4; E_value=0.0056; Accession=PF00702.18; Description=haloacid dehalogenase-like hydrolase
QYGKKFETLGLSVDEEEIFASSFAAAAYLQSIDFPKDKKVYVIGEEGILKELELAGFQHLGGPTDGDKKIELKPGFYMEHDKDVGAVVVGFDRYFNYYKVQYGTLCIRENPGCLFIATNRDAVTHLTDAQEWAGGGSMVGAVLGSTKQEPLVVGKPSTFMMDYLAKKFGITTSQICMVGDRLDTDILFGQNGGCKTLLVLSGVTSLQTLQSPDNSIQPDFYTNQISDFLTLKAATV

SEQ ID NO: 111042 - protein, 92 aa, Setaria italica
  Transcript Sequence Number=SeqID_45068
KGLPSRRSTCTRNDQGYYYYHRLRSRVLCHGEGSLPSLHCSLRSKSYATSRSTPDAALPFDGVRSGFRHAGAPRTRYATHACPAAVRSGTKT

SEQ ID NO: 111043 - protein, 56 aa, Setaria italica
  Transcript Sequence Number=SeqID_45069
HAAPRHKYKTPSQTLLCANFMKLERGKREREICLLSYMALKGSLRLRHFYVQTSCN

SEQ ID NO: 111044 - protein, 365 aa, Setaria italica
  misc_feature (126)..(126): Xaa can be any naturally occurring amino acid
  Transcript Sequence Number=SeqID_45070
  Gene Ontology: Mol. function=nucleotide binding; Cellular component =nucleus; Biological process=regulation of transcription
  Homolog annotation: Hit_ID=Q2R8K0; Match level="QueryCoverage=97%, HitCoverage=32%, E-value=1e-106, Identity=57%"; Hit description =Nitrate-induced NOI protein, expressed
PKGFIQKDKSANEIAECYFDELVSRGLVQTNHINLADDVMFYTVHSTVFEVIRRKSVEENFTTVIDYSETIPKLSAKVRRLSLSFSNAKYATKPEGFTPLPVRSLTFYGLVECLPTIMEFKLLRVXLILEFWGDREVFDLSGINILLQLRYIKITTDSIIKLPVKMQGLTYLETLEIFARVLTVPSDIVLLPKLLHLHLQGDIKLPDYVGQLRSLRALQSFDLSSNSEDNVQSLGEMTNLHDLHISCSTAVPDRLERNFIALASSIGKLDKLKSLTLAPDVSCRSIIYTDCSSIVSAPPVSLEKLELLPPICIFSRLPQWIGQLQKLCILKIVVRELNMDDVNRISGLQELTLLQLYVRQPSAQS

SEQ ID NO: 111045 - protein, 76 aa, Setaria italica
  Transcript Sequence Number=SeqID_45071
  Subcellular localization annotation: CTP_CleavageSite=37; ConfidenceScore=5.20e-01
MATISAAVATTVVARAAIARPNALGLPQLRARSERVRCGYSKDGRNAAAVSAKGAGASLLAAAGAVTASAGPALAL

SEQ ID NO: 111046 - protein, 62 aa, Setaria italica
  Transcript Sequence Number=SeqID_45072
  Subcellular localization annotation: CTP_CleavageSite=51; ConfidenceScore=5.00e-01
FELASLPKIVSPHDALLVSLVPHNSCSVHGHFLLFFFLGFSFIASFSACVYAASISALTLSL

SEQ ID NO: 111047 - protein, 155 aa, Setaria italica
  Transcript Sequence Number=SeqID_45073
  Gene Ontology: Mol. function=ubiquitin thiolesterase activity; Cellular component=integral to membrane; Biological process =ubiquitin-dependent protein catabolic process
  Homolog annotation: Hit_ID=Q9FPS9; Match level="QueryCoverage=30%, HitCoverage=5%, E-value=8e-15, Identity=72%"; Hit description =Ubiquitin carboxyl-terminal hydrolase 15
  Pfam annotation: Domain name=zf-HIT; Domain location=35-65; Score =7.6; E_value=0.066; Accession=PF04438.8; Description=HIT zinc finger
  Pfam annotation: Domain name=zf-MYND; Domain location=39-76; Score =43.7; E_value=7e-10; Accession=PF01753.10; Description=MYND finger
  Pfam module annotation: Pfam domain module=zf-HIT::zf-MYND; Domain location=35-65::39-76
EAFRVETMACPDVMPPGPSLRTMPYFRPAPSLRQEFHECATCHAPAKTRCSRCKSVRYCSGKCQIIHWRQGHKESCQKWIGSGSSSFGGSGTEASEQMPFLTNLNSPLPGGGIHLRDMNFDTLSEPSFPTTDGFNLDTDPFPADKSNMNKSNQGL

SEQ ID NO: 111048 - protein, 89 aa, Setaria italica
  Transcript Sequence Number=SeqID_45074
  Gene Ontology: Mol. function=sequence-specific DNA binding; Cellular component=nucleus; Biological process=regulation of transcription, DNA-dependent
  Homolog annotation: Hit_ID=B6SS40; Match level="QueryCoverage=42%, HitCoverage=10%, E-value=7e-16, Identity=94%"; Hit description=GATA transcription factor 20
  Pfam annotation: Domain name=GATA; Domain location=22-57; Score=66.8; E_value=8.1e-17; Accession=PF00320.19; Description=GATA zinc finger
  Subcellular localization annotation: CTP_CleavageSite=56; ConfidenceScore=5.21e-01
RTKNESQQQLQQQQAMGVVRVCSDCNTTKTPLWRSGPCGPKSLCNACGIRQRKARRAMAAAAAAAAAAASNGGTPQAASVAVQAKAPKK

SEQ ID NO: 111049 - protein, 71 aa, Setaria italica
  Transcript Sequence Number=SeqID_45075
STSAVVNSSSAGAKSTSAGAESSSDSDAVWACFLPGDLPPLADRELSPAPPSKKELFMRLSDSDSAILLAD

SEQ ID NO: 111050 - protein, 145 aa, Setaria italica
  Transcript Sequence Number=SeqID_45076
  Gene Ontology: Mol. function=ligase activity, forming aminoacyl-tRNA and related compounds; Cellular component=cytoplasm; Biological process=alanyl-tRNA aminoacylation
  Homolog annotation: Hit_ID=B6TID1; Match level="QueryCoverage=100%, HitCoverage=55%, E-value=2e-67, Identity=84%"; Hit description =Alanyl-tRNA synthetase
RAKDGVVFHYGRFESAGEGCGLGFKEGESVSLEVDAERRSLNSRLHSAGHLLDICVSNVGLSHLQPGKGYHFPDGPFVEYKGVIPQDQIQDKKNELEREAKKLISEGAKVLASVFPYEEAAKLCGGSLPNYISKDSNPRIIKFGE

SEQ ID NO: 111051 - protein, 80 aa, Setaria italica
  Transcript Sequence Number=SeqID_45077
  Subcellular localization annotation: CTP_CleavageSite=35; ConfidenceScore=5.25e-01
SCPFLPKTTDDVSSPTSTFSRTRKEHPYFLHMKTMAPQKSSPRALVAILHIENSMLLSQRVIGRMENNDNQRGIIARSVT

SEQ ID NO: 111052 - protein, 274 aa, Setaria italica
  Transcript Sequence Number=SeqID_45078
  Gene Ontology: Mol. function=flavin-containing monooxygenase activity; Cellular component=intrinsic to endoplasmic reticulum membrane; Biological process=oxidation reduction
  Homolog annotation: Hit_ID=B9SMR1; Match level="QueryCoverage=98%, HitCoverage=52%, E-value=2e-82, Identity=52%"; Hit description =Dimethylaniline monooxygenase, putative
NVAHFVKGKHVTIVGSGKSAFDIAAEVAKVNGADQPCTIIYRTKHWLVHKSSIWGVDLSYFYLNRISQLLLHKPGEGFLRYMLATALSPLRWAISKVIETYFKWSIPLQKHGMVPDYSFSFAMSSCSIAMLPEGFYDRVDDGSIILKKSKAFNFSNDGIILQDKKESIKSDIVILATGFRGDQKLRDIFTANWCRKIVAGSPDTVAPLYRECIHPRIPQLAIVGYSESLTNIYASERMANWVAHFLAGGFKLPSIACMEKSVAEWAKYKNIYNG

SEQ ID NO: 111053 - protein, 68 aa, Setaria italica
  Transcript Sequence Number=SeqID_45079
APAGVPQRQQRRGKALRRATSEPNKGSTPRSAIGGRAAAAVHAVGDVENGDGDEMVRWDRLFQDLKPN

SEQ ID NO: 111054 - protein, 222 aa, Setaria italica
  misc_feature (21)..(21): Xaa can be any naturally occurring amino acid
  Transcript Sequence Number=SeqID_45080
  Gene Ontology: Mol. function=transferase activity, transferring glycosyl groups; Cellular component=integral to membrane; Biological process=protein amino acid glycosylation
  Homolog annotation: Hit_ID=B6SJ23; Match level="QueryCoverage=98%, HitCoverage=32%, E-value=1e-120, Identity=94%"; Hit description =Galactosyltransferase/ transferase, transferring hexosyl groups
  Pfam annotation: Domain name=Gal-bind_lectin; Domain location=16-221; Score=130.3; E_value=6.3e-36; Accession=PF00337.14; Description =Galactoside-binding lectin
VLPFSVHREQLPHGGVRVVEXPCGLAVGSHVTVVARPRPARPEYDPKIAERKDGEAAVMVSQFMVELVGTKAVDGEAPPRILHFNPRIRGDYSRRPVIEMNSCYRMQWGQSQRCEGFASRPAEDTVDGQLKCEKWIRDDDNKSEESKMKWWVKRLIGRPKDVHISWPYPFAEGKLFVMTLTAGLEGYHVNVDGRHVASFPYRTGYSLEDATALSLNGDIDIE

SEQ ID NO: 111055 - protein, 84 aa, Setaria italica
  Transcript Sequence Number=SeqID_45081
AIQEGALLLTTDIPPYQINTWIRGTRSTKSCLYHRQLCEAIKQMIPPQSSTHTSSNCQNKNFVSEYCRMKVKWIGRLDNQLMQD

SEQ ID NO: 111056 - protein, 68 aa, Setaria italica
  Transcript Sequence Number=SeqID_45082
  Subcellular localization annotation: CTP_CleavageSite=61; ConfidenceScore=5.26e-01
YVIVIPVRSQFKEKVSFLRLSTPAVFRSGKPNARGIIHPPRELLFSRRLASSSIPRRPSPSSAPVRSP

SEQ ID NO: 111057 - protein, 97 aa, Setaria italica
  Transcript Sequence Number=SeqID_45083
  Gene Ontology: Mol. function=ubiquitin-protein ligase activity; Cellular component=ubiquitin ligase complex; Biological process =ubiquitin-dependent protein catabolic process
VMSHGAELAARASAAVVLRELASSADGHTLDAVARTPGMCDALVHLVQHPVSTPATKAALVTAYYLASASDRAAARLAEYGAVPALVELLVDADKGT

SEQ ID NO: 111058 - protein, 87 aa, Setaria italica
  Transcript Sequence Number=SeqID_45084
  Subcellular localization annotation: CTP_CleavageSite=35; ConfidenceScore=5.13e-01
HARAPRRNTPLILAHYFVYQQKFVTDVLTLSIFCRAPRGGRRERSRRPWRWRWARRLCSPRSRMPDALSLTTGIAAAVAAIHSVPPP

SEQ ID NO: 111059 - protein, 98 aa, Setaria italica
  Transcript Sequence Number=SeqID_45085
SDSNRIINIKVNTSKEAHVRAVFTEKSPLGMVPATCLSGHEWQSGFFSWTRIQNQKKEKRNQRKISTASVGVAPLVGSKVCTAQHIVCDSLYQHGKLR

SEQ ID NO: 111060 - protein, 104 aa, Setaria italica
  misc_feature (55)..(55): Xaa can be any naturally occurring amino acid
  Transcript Sequence Number=SeqID_45086
  Gene Ontology: Mol. function=oxidoreductase activity
  Homolog annotation: Hit_ID=B6ST02; Match level="QueryCoverage=43%, HitCoverage=13%, E-value=9e-16, Identity=88%"; Hit description =Oxidoreductase, 2OG-Fe oxygenase family protein
  Subcellular localization annotation: CTP_CleavageSite=41; ConfidenceScore=5.21e-01
RRKTTPSLTDIILIKDLKGNTAYQRAIPSALTMRSALPVPRGSRSRKASWPRSLXKGHMVNVVKGLKIYEDVFTTSEIMKVADFINEIRQAGRNGELSGRAKTF

SEQ ID NO: 111061 - protein, 54 aa, Setaria italica
  Transcript Sequence Number=SeqID_45087
HRTHNLGLLLFGFGRNHHRQVSCLVLEMTNFLVNSGQCLYLFYHLKCDFMLNVS

SEQ ID NO: 111062 - protein, 540 aa, Setaria italica
  Transcript Sequence Number=SeqID_45088
  Gene Ontology: Mol. function=oxidoreductase activity
  Homolog annotation: Hit_ID=B6ST02; Match level="QueryCoverage=62%, HitCoverage=97%, E-value=1e-149, Identity=78%"; Hit description =Oxidoreductase, 2OG-Fe oxygenase family protein
  Pfam annotation: Domain name=2OG-FeII_Oxy; Domain location=303-399; Score=30.0; E_value=9.6e-06; Accession=PF03171.12; Description=2OG -Fe(II) oxygenase superfamily
MIDALCGHLAQIGGGGGAEYEAAFAALHRRRANWFPVLHMQKFYPVADVTAELRRVADARAAAAAGSCCYSDEAASTVIHEPMEDLPAEPEPEPEQEQDPVQQDPAPAAEEADGGAVASPAAEYHEPDAEVDSSGDSSERKAASTEDDTVADGHHTDQGSQGEHSLPESYPICSDHEECIARPERIKIQKGFVAKESVKGHMVNVVKGLKIYEDVFTTSEIMKVADFINEIRQAGRNGELSGETFIFFNKQIKGNKREIIQLGVPLFQPTTEEANCHIEPIPLVLQAVIDHLVLWRLIPESRKPNSVIINFFDEDEHSQPYFKPPHLDNPISTLLLSETTMAFGRSLVTDSNGNYKGPLTLSLKQGSLLVMRGNSADMARHVVCPSSNRRVSITFARVRPSTPVDLSPLPSPTKAMTPWQPQPAVAAQVTAPGCMAQKAPVGGAIIGYATAPQAVLTPAAWGMAVRAPVMMVAAAPGRPMVMASSGSGGGGGNVGKRMGRSGTGVFLPWTVGPKRYNKHLPPRIQKRRFSAMMSPIEAQG

SEQ ID NO: 111063 - protein, 118 aa, Setaria italica
  Transcript Sequence Number=SeqID_45089
  Subcellular localization annotation: CTP_CleavageSite=19; ConfidenceScore=5.09e-01
NLQLATTCCCSCKGPCRTRTARRVSGRQQGKKGHSGVMEGRLPGKQGISLRLTPFLIIPQVNSNLSLSTDRLQSCSSGSSSVLVVRILQAWPQFSFLLCPMNCPSNLALWTLQRKGSG

SEQ ID NO: 111064 - protein, 93 aa, Setaria italica
  misc_feature (1)..(12): Xaa can be any naturally occurring amino acid
  Transcript Sequence Number=SeqID_45090
XXXXXXXXXXXXVQHRLLRRDYMCKEHSSSKQLNQAQKRKRDYSLMMVQPKLQGTSLAPARHQVLASCSEVPLQDDHDGTNLQIPYPNCFLVL

SEQ ID NO: 111065 - protein, 120 aa, Setaria italica
  Transcript Sequence Number=SeqID_45091
  Gene Ontology: Mol. function=RNA-directed DNA polymerase activity; Biological process=RNA-dependent DNA replication
DGEAGNEYHNHLASFKHGLNSPRATVIRIEALVAIATCLSFFLLIFGSWRRWCKHWFIQNGVLAAYTLSFSLVTYTMGSMQSSAARNEMFPVWALSLFPVLGCTNSITAYSLDDNKQYMS

SEQ ID NO: 111066 - protein, 373 aa, Setaria italica
  Transcript Sequence Number=SeqID_45092
  Gene Ontology: Mol. function=DNA-directed RNA polymerase activity; Cellular component=nucleus; Biological process=transcription
  Homolog annotation: Hit_ID=B9FFW1; Match level="QueryCoverage=98%, HitCoverage=27%, E-value=1e-175, Identity=84%"; Hit description=DNA -directed RNA polymerase
  Pfam annotation: Domain name=RNA_pol_Rpb1_5; Domain location=8-310; Score=209.1; E_value=1.1e-59; Accession=PF04998.9; Description=RNA polymerase Rpb1, domain 5
GFSLVLPCFSRYNSKAIEAGASIGAIGAQSIGEPGTQMTLKTFHFAGVASMNVTLGVPRIKEIINAAKKISTPIITTELLSRKDVLSARIVKGAMEKAVLGEVASAIKIVLKSSQPNLVVKLDMQLIEALHMGISADSVQLSILNHPKIKLKSEHVRVIDRAKLRIYPAGTDKSKLQLELHNLKAMLPKVIVKGIPTVERVVIDERKKEGKLEKYNLLVEGTNLLAVMGTPGVDARNTKSNHIMEMNSTLGIEAARRSIIDEIQYTMKSHGMNIDVRHMMLLADLMTYKGEVLGITRYGIAKMKTSVLMLASFEKTSEHLFNASYSGREDEIEGVSECIIMGIPMQLGTGILKVRQRLDHLPELKYQPDPILS

SEQ ID NO: 111067 - protein, 143 aa, Setaria italica
  Transcript Sequence Number=SeqID_45093
  Subcellular localization annotation: CTP_CleavageSite=40; ConfidenceScore=5.33e-01
PAEKFSPSTVLPRQVLPAIALTCTNYSVTFAMFLLSTSAKAAEKGGVRLNVVASWRDVRLKNYSRRSCPTLCMYAPAIYVQSSSFRSTRMDHDNIGSGWYFNSGRWSSLCLTLRIPVPSCMGMPMIMHSLTPSISSSRPLYEA

SEQ ID NO: 111068 - protein, 54 aa, Setaria italica
  Transcript Sequence Number=SeqID_45094
FFFIHTRVLINVIYILEDRISDDTQLVEKAELPEKLKTHTLKEREVWYITSNPT

SEQ ID NO: 111069 - protein, 33 aa, Setaria italica
  Transcript Sequence Number=SeqID_45095
YPRALEATSLLKALFEKLKPIFFSYKLKLAVIM

SEQ ID NO: 111070 - protein, 50 aa, Setaria italica
  Transcript Sequence Number=SeqID_45096
MKRRASGVHEKYNLQPGKPKLPGSSMFRLGIKTRNIKKLLHSRERNLGEI

SEQ ID NO: 111071 - protein, 130 aa, Setaria italica
  Transcript Sequence Number=SeqID_45097
MAEGSKPDVPLFQLLTDLLQQVESMSNQEEVELRAKIEALGLEVTKVPEQAPKHLDELEIAAELDKLSSRLDNVDKMISSAMASDPEVKSLLSSTADIWMPVITASADERRGFAGTSSEGSQDEEESSKQ

SEQ ID NO: 111072 - protein, 105 aa, Setaria italica
  Transcript Sequence Number=SeqID_45098
FFCTRNAEQVPHNCRREKKPASGTAAGVFHGSVSLSTLSSPLSYFDLQRLLSCAKGFNTFFFENRPPFWHQGLHNSPTYSLTLYVDMFATCILRTNLLWGLKQLN

SEQ ID NO: 111073 - protein, 59 aa, Setaria italica
  Transcript Sequence Number=SeqID_45099
  Homolog annotation: Hit_ID=B9S9T4; Match level="QueryCoverage=100%, HitCoverage=8%, E-value=3e-09, Identity=49%"; Hit description =Transporter, putative
  Pfam annotation: Domain name=DEK_C; Domain location=1-51; Score=38.5; E_value=2.6e-08; Accession=PF08766.3; Description=DEK C terminal domain
ELQNTIVGILKKVDFNTATYSDIIKMLDEHYKIDLSSRKEAIKLMVYDELMKISEADED

SEQ ID NO: 111074 - protein, 91 aa, Setaria italica
  Transcript Sequence Number=SeqID_45100
  Subcellular localization annotation: CTP_CleavageSite=74; ConfidenceScore=5.48e-01
CLPFRLTQRPPNMLLSRSVRKSLLPAASYSPSPHLMVKHLPVAFGQASIRFHFELTALRSLPTQFVAAFLLCVRCSFFTLVIKLLGNSFNR

SEQ ID NO: 111075 - protein, 136 aa, Setaria italica
  Transcript Sequence Number=SeqID_45101
  Homolog annotation: Hit_ID=B9SA05; Match level="QueryCoverage=90%, HitCoverage=62%, E-value=6e-26, Identity=47%"; Hit description=Small heat-shock protein, putative
  Pfam annotation: Domain name=HSP20; Domain location=37-135; Score= -4.2; E_value=0.0058; Accession=PF00011.13; Description=Hsp20alpha crystallin family
PRSVKFFVPADAFPLWEFEPEVLLAALRRSAARTTVDWAETDAEYYLRADIPGGRKCDVEVSGDAMKVIDISGLWRVPPADGRDWRAGRWWEHGFVRRVELPEDAEWRKVEAYFDDGEGSLEIKVPKAVDAHQATA

SEQ ID NO: 111076 - protein, 97 aa, Setaria italica
  Transcript Sequence Number=SeqID_45102
  Gene Ontology: Mol. function=electron carrier activity; Biological process=oxidation reduction
  Homolog annotation: Hit_ID=B6SSW8; Match level="QueryCoverage=92%, HitCoverage=16%, E-value=1e-30, Identity=70%"; Hit description =Cytochrome P450 CYP714B3
LKIDDDIRAYSADVISRTCFGSSYVKGKEIFAMIRELQKTVSKPNLLAEMTGLSSLPTRANRAAWRLNRQVSRLVLDVVRESGNDDRNLLSAMLRSA

SEQ ID NO: 111077 - protein, 74 aa, Setaria italica
  Transcript Sequence Number=SeqID_45103
  Gene Ontology: Cellular component=nucleus; Biological process =response to DNA damage stimulus
  Homolog annotation: Hit_ID=Q2HRV5; Match level="QueryCoverage=90%, HitCoverage=13%, E-value=1e-23, Identity=75%"; Hit description=DNA repair metallo-beta-lactamase
  Pfam annotation: Domain name=DRMBL; Domain location=3-53; Score=15.7; E_value=5e-05; Accession=PF07522.6; Description=DNA repair metallo -beta-lactamase
LTLKATGKQLDLIKPSSNGSVTIYGVPYSEHSSFTELRDFVMFLRPQVIRSVNVGNAASRDKMQAYFREWLKGS

SEQ ID NO: 111078 - protein, 87 aa, Setaria italica
  Transcript Sequence Number=SeqID_45104
QQKQLINWGQAFPNYFNKFKFESLCKRYAVCYFWSHWCILSCAECNGQFTDSSIEFWTKLGIRMTQLNYNYFFHSRIHYNLGKWKAL

SEQ ID NO: 111079 - protein, 115 aa, Setaria italica
  Transcript Sequence Number=SeqID_45105
  Gene Ontology: Mol. function=protein binding; Cellular component =cytoskeleton; Biological process=regulation of actin filament polymerization
  Homolog annotation: Hit_ID=B6TUY1; Match level="QueryCoverage=96%, HitCoverage=29%, E-value=5e-53, Identity=85%"; Hit description=ARPC2B
DQSRTSFFQELRELGSSFARAPECSWSPIPPPELRGEYVHRLTTNGGFVSFGVLSRHVRGKRAAKTAWILLNFQAYVKYHIKCTRRHIQSRMRERLEALTEVIHDARLRGNDDKR

SEQ ID NO: 111080 - protein, 292 aa, Setaria italica
  misc_feature (16)..(16): Xaa can be any naturally occurring amino acid
  misc_feature (31)..(31): Xaa can be any naturally occurring amino acid
  misc_feature (42)..(42): Xaa can be any naturally occurring amino acid
  Transcript Sequence Number=SeqID_45106
  Gene Ontology: Mol. function=protein binding; Cellular component =cytoskeleton; Biological process=regulation of actin filament polymerization
  Homolog annotation: Hit_ID=B6TUY1; Match level="QueryCoverage=99%, HitCoverage=77%, E-value=1e-103, Identity=67%"; Hit description =ARPC2B
  Pfam annotation: Domain name=P34-Arc; Domain location=2-210; Score= -46.6; E_value=3.6e-07; Accession=PF04045.6; Description=Arp23 complex, 34 kD subunit p34-Arc
HRFAEVVEPPREGYVXLTLKLNFSGLNRPKXDRVKAINQVSXLLQSVVLSSQLRDMLGSLVPSGTMRLVYNQRDPFFVSKTAERINAVFPMRFRDDTDLAIATSFFQELRELGSSFARAPECSWSPIPPPELRGEYVHRLTTNGGFVSFGVLSRHVRGKRAAKTAWILLNFQAYVKYHIKCTRRHIQSRMRERLEALTEVIHDARLRGNDDKRKSQAVAKKRRNNKRRLISFAKASKRLQKGFRAVLDKIKRLRLRIRVRGLDRLRRQCRCFAVPKLPPRRKEHGYHKLTEQ

SEQ ID NO: 111081 - protein, 106 aa, Setaria italica
  Transcript Sequence Number=SeqID_45107
  Gene Ontology: Mol. function=protein dimerization activity
  Homolog annotation: Hit_ID=B6SWU7; Match level="QueryCoverage=83%, HitCoverage=11%, E-value=7e-30, Identity=69%"; Hit description =Transposon protein
  Pfam annotation: Domain name=hATC; Domain location=4-89; Score=110.1; E_value=7.3e-30; Accession=PF05699.6; Description=hAT family dimerisation domain
PKSELDQYLEEAPLPRIPEFDILKWWKLNALKYPTLSRMARDVLAIPVSTVGRGSVFSSARSEARMLDDYLSSLHPETLEALFCAKDWLQNSPPAPKPPSSTSAKK

SEQ ID NO: 111082 - protein, 67 aa, Setaria italica
  Transcript Sequence Number=SeqID_45108
MFDYFLREVTKEHISLLQGENNAHILHLQLNNPSKIPLPYSIAANVHMLRSAINIQVISNGEIISEP

SEQ ID NO: 111083 - protein, 71 aa, Setaria italica
  Transcript Sequence Number=SeqID_45109
  Subcellular localization annotation: CTP_CleavageSite=58; ConfidenceScore=5.30e-01
ECTCHGGVSAWAGALAQLSGAAAPAATLPRRGSRLSQAPGFSLAASLLAAAQSEDAVTAAAAAAEYGEGIN

SEQ ID NO: 111084 - protein, 158 aa, Setaria italica
  misc_feature (23)..(23): Xaa can be any naturally occurring amino acid
  misc_feature (66)..(66): Xaa can be any naturally occurring amino acid
  Transcript Sequence Number=SeqID_45110
  Gene Ontology: Mol. function=protein binding; Biological process =metabolic process
  Homolog annotation: Hit_ID=Q6Z1B8; Match level="QueryCoverage=95%, HitCoverage=45%, E-value=1e-53, Identity=67%"; Hit description =Putative N7 protein
  Pfam annotation: Domain name=F-box; Domain location=4-52; Score=33.4; E_value=9.1e-07; Accession=PF00646.25; Description=F-box domain
TPVRDWSQLPLDPLSSIFMKLGXIEILMSAGLVCRSWLAAARTPELWRFVDMTRHKLVFLKNVGTXSCAMAKVAIDRSGGRMESFWAQQFVTSELLDYIASRANSLKSIRLIACLYISDTSLVRVAEKCPLLEEIECSYHARPAEFYGYVGNVRVERP

SEQ ID NO: 111085 - protein, 153 aa, Setaria italica
  Transcript Sequence Number=SeqID_45111
  Subcellular localization annotation: CTP_CleavageSite=55; ConfidenceScore=5.20e-01
MRKTGVTSASTGTATGGGAGWPCGGGLNLGVRLNVLLLLSVVATNLVSLYHLSLRAATVPPLLLQQQHQQGGDQEELALIRQLDAIHAGVSQLNHLRSSSPPPPPPPPELLLYSRLAPVASACSAHPDLLHRYMSYTPFAPCPDDALLLAASS

SEQ ID NO: 111086 - protein, 277 aa, Setaria italica
  Transcript Sequence Number=SeqID_45112
  Gene Ontology: Mol. function=hydrolase activity, hydrolyzing O -glycosyl compounds; Cellular component=anchored to membrane; Biological process=cell wall organization and biogenesis
  Homolog annotation: Hit_ID=B6TX61; Match level="QueryCoverage=99%, HitCoverage=56%, E-value=1e-137, Identity=88%"; Hit description =Glucan endo-1,3-beta-glucosidase 5
  Pfam annotation: Domain name=Glyco_hydro_17; Domain location=1-248; Score=80.4; E_value=6.6e-21; Accession=PF00332.10; Description =Glycosyl hydrolases family 17
YAFDGGVNIRFVAVGNEPFLRAYNGSFDRVTVPALRNIQRALDEAGHGGAVKATVPVNADVYDSPPGNPVPSAGRFRADVAGVMTEMVRLLNRSGAPLTVNIYPFLSLYGNDDFPLDYAFFDDAGAGKAKPVVDGRVNYTNVFDANFDTLVSALKRVGFGRLPVMIGEVGWPTDGDKHATAALAERFYKGLLRRLAARKGTPLRPNARIEVYLFGLMDEDAKSVAPGNFERHWGLFTSDGRPKFPLDLRGGGRPAMPVPARGVEYLPRRWCVLNPDA

SEQ ID NO: 111087 - protein, 42 aa, Setaria italica
  Transcript Sequence Number=SeqID_45113
GNLVPHFFYTCGRLISTFNFNEISKIINRNIQNKHLTEVKLS

SEQ ID NO: 111088 - protein, 37 aa, Setaria italica
  Transcript Sequence Number=SeqID_45114
ILKDQSTLIMFLYIIIYSFYIRIISPDPSITPALWDY

SEQ ID NO: 111089 - protein, 58 aa, Setaria italica
  Transcript Sequence Number=SeqID_45115
CRVRNCWFNSLKFSFNSKCKSCCMHISFCLLYCLFCVDHFSSLNMYKAKATTLNLCLM

SEQ ID NO: 111090 - protein, 126 aa, Setaria italica
  Transcript Sequence Number=SeqID_45116
RECVLVSMRMLTERLQRESEIATSATNRSRSLEADNARLYEELENGRADNQALISDIVEKSDELATLKYHCDMFESDKRDLENQVEDLMKELEYAKKEHARYVRQVLDAARAIPNNLEAIHTDAQH

SEQ ID NO: 111091 - protein, 39 aa, Setaria italica
  Transcript Sequence Number=SeqID_45117
HLRIDLDSFWSIDHMPSLVNMNLAKEDSISWACFVRVRN

SEQ ID NO: 111092 - protein, 68 aa, Setaria italica
  Transcript Sequence Number=SeqID_45118
LLLSESWLLASRPKMLAFRKLTFRKLWSVWQPSFSENESGWKRCTISLLPYVYVVIVFVSCTIIYRLC

SEQ ID NO: 111093 - protein, 544 aa, Setaria italica
  Transcript Sequence Number=SeqID_45119
  Gene Ontology: Mol. function=nucleotide binding
  Homolog annotation: Hit_ID=B6SXX1; Match level="QueryCoverage=99%, HitCoverage=93%, E-value=0.0, Identity=85%"; Hit description=Auxin -independent growth promoter
  Pfam annotation: Domain name=DUF246; Domain location=93-433; Score =776.6; E_value=1.7e-230; Accession=PF03138.6; Description=Plant protein family
VALLYVSPPPVSDHPVLASSRRRRSAHALLNSSDGGGTDESERREIFRVPTNGSNVRDGLWGSKLASKFYGCSNSSSKFLDSNITTQPDCYLMIVTSGGLNQQRTGIIDAVVAARILNATLVVPKLDQASFWKDSSNFSEIFDANWFISSLSKDVKIVKELPEIGGKLRAPHRMRVPRKCTERCYLNRVLPALLKKHVIRLTKFDYRLANRLQTDLQKLRCRVNYHALRFTAPIQEMGEKLIQRMRERSKHFIALHLRFEPDMLAFSGCYYGGGEKERRELGAIRKRWKGLHPNPEKGRRQGRCPLTPEEVGLLLRALGYSMDVHIYVASGEIYGGPRTLAPLKALFPNLHTKETISSKEELAPFSKYSSRMAALDFIVCDESDAFVANNNGNMAKILAGRRRYFGHKRTIRPNAKRLYPLFLNRGNMSWDAFSSKVHMVQKGFMGEPKELRPGRGEFHENPSTCICERTDGKVKPRNDQVLDSSSDRGKAIGEPAVPNYTAEEVGESDDDEDAPAEKEMFDMEMDDDVLVRPEDPELEQILSD

SEQ ID NO: 111094 - protein, 293 aa, Setaria italica
  misc_feature (256)..(256): Xaa can be any naturally occurring amino acid
  Transcript Sequence Number=SeqID_45120
  Pfam annotation: Domain name=Remorin_C; Domain location=204-291; Score=-17.2; E_value=0.032; Accession=PF03763.5; Description=Remorin, C-terminal region
MDGDLKKLRVRFSGVGKGNKVGRQTSAIPPQENAALGRAEMSSGGEYDAAFAATIAAATFAIAAREEKLAAQKKPVPIEAVPPALSPVKRAGSMKKPGGGSKISRWFSGKEPVEDDDDGPVNVSVRKPLKPAPGKPEDIAPDHKVTPKTLETSLSVKKGSGSSNKAADRKGSKKFEQEQAIQKVPSAVRPATSYHSRRNGEGTAGVTGTGSKADDWEKAKLARVREEYEKMIETIAEWETEKKVKARRQKTRKRPXARQKRAKALEEYNQEMTRINKIAGGARSMAEERKYND

SEQ ID NO: 111095 - protein, 116 aa, Setaria italica
  Transcript Sequence Number=SeqID_45121
  Gene Ontology: Mol. function=oxidoreductase activity; Cellular component=chloroplast
RKAVIAFARHFGCVLCRKRADLLAEKQDVMQAAGVALVLIGPEVYADPTHSSYDALEFAFGLFSTFTPAAGLKIIQLYREGYRQDWELSFERTPGRKGSGSQGDVLVAGPWYRHHL

SEQ ID NO: 111096 - protein, 180 aa, Setaria italica
  Transcript Sequence Number=SeqID_45122
  Gene Ontology: Mol. function=oxidoreductase activity; Cellular component=chloroplast
  Pfam annotation: Domain name=AhpC-TSA; Domain location=1-118; Score= -22.1; E_value=0.053; Accession=PF00578.13; Description=AhpCTSA family
RKLQGVEVFDLSGKAVPIVDLWKDRKAVIAFARHFGCVLCRKRADLLAEKQDVMQAAGVALVLIGPGSVEQANAFCEQTKFKGEVYADPTHSSYDALEFAFGLFSTFTPAAGLKIIQLYREGYRQDWELSFEKNTRTKGGWYQGGLLVAGPGIDTILYIHKDKEAGDDPDMQDVLRTCCS

SEQ ID NO: 111097 - protein, 53 aa, Setaria italica
  Transcript Sequence Number=SeqID_45123
VHAILSLCNYSVDRHRKMKGMQTNIYARALQIPYFRLPVIASCMKIYTSVISD

SEQ ID NO: 111098 - protein, 97 aa, Setaria italica
  misc_feature (78)..(78): Xaa can be any naturally occurring amino acid
  Transcript Sequence Number=SeqID_45124
  Gene Ontology: Mol. function=binding
  Homolog annotation: Hit_ID=Q9SGH8; Match level="QueryCoverage=100%, HitCoverage=27%, E-value=4e-10, Identity=38%"; Hit description =T13O15.4 protein
FSECGSDDLSFTPAAAAGIHRLLLSCAAEASEDAISSLVAELESPSPSLDSLRRAAMELRLLAKHNPDNRVRIAAAGXVRPLVKLLSHADPLLQEHG

SEQ ID NO: 111099 - protein, 126 aa, Setaria italica
  Transcript Sequence Number=SeqID_45125
MGNQKGETEQEPVNPSPRRQGQHNTSYHRGGGAHRGRGGYDAGRPSHGTNAERRRGGSHLEYQPVGSHSKATDFQQNPSVEERTEVPPASGPAFRERGHNRGPRPAGHFVRRNPAPAPAADSYQDE

SEQ ID NO: 111100 - protein, 136 aa, Setaria italica
  Transcript Sequence Number=SeqID_45126
ALERWCDVTASDNLIVLPPPNDPKHTVVHVQPQTTALSHTSDGGKDPAAHSTSSSVRNTQINMNHVGQKSISQSHDTSVPKPKQGYRKRHVVSEEKNSSEKPIVSISTGNAKKNAEGYLVGTTRQTRLVRQPTISN

SEQ ID NO: 111101 - protein, 966 aa, Setaria italica
  misc_feature (16)..(16): Xaa can be any naturally occurring amino acid
  Transcript Sequence Number=SeqID_45127
  Gene Ontology: Mol. function=ATP-dependent helicase activity
DQQPVIKKNTALEEVXKQTNDKARNVDARNVPEPASSKEFKKQQKSTDISSTAVITGACTSDRVTSVSHISPVVQRLPNVPSEGAVVGPAHSQLTEFSKAGKLGDSINDRAHRRGDSLRNSHHGPSKDRLANKLASHGRGESSTADSLPVADLRNNIQHGQPAESASQLQPVILPDDMPASLDYESQRAKMKELAAERAKKLKAEEEERIKNQKAKALAKLEELNRRSSVLQKKSNDTKVETDDAHDDKQKAGPDMTAKLATSVAEPCDVTASDNLIVLPPPNDPKHTVVHVQPQTTALSHTSDGGKDPAAHSTSSSVRNTQINMNHVGQKSISQSHDTSVPKPKQGYRKRHVVSEEKNSSEKPIVSISTGNAKKNAEVPVDTATAVAPHDDPPAQNKKGARHLRNKKKVDDAPVTSKHPPTVFNEQNTMKVPSEPKTHTGGVIISSSIVPTEGTIVTVGSITVGGISLASLNQNRVKSPDGPHNTESSRPRPQQAKRSGKHQHGVRAVEKPLGNEGVLWAPIKPPVQNEQSDGAMRNAAAADPTAGKTSNDGENVTRTKRAEMERYVPKPMSKELQQQNLGHDKEAIDNSSAAKLDAAAEPKKLEDKKTSKGHGKSNPSWRRRNTDESSLVVPNSIEQADNSHESKEVQKSTNQNQPVEPGKQEDKQLKSKADAAAESNSARAQTVPLSVNAVKEHSAANRQRRQHVKAQRNEASSYSNESKDREGRTDFVYQSTTPAMDSNSSEHRSMPRSDVKSSGSVSHSRTHWKPKSNSHPQNSSDGNNAVEGQVGTHGARVEVNSFKGPDSSTCQDSRSSKPTERNDGIDEKFTHSEQENLTRVDGNQKGETEQEPVNPSPRRQGQHNTRYHRGGGAHRGRGGYDAGRPSHGTNAERRRGGSHLEYQPVGSHSKATDFQQNPSVEERTEVPPASGPAFRERGHNRGPRPAGHFVRRNPAPAPAADSYQDE

SEQ ID NO: 111102 - protein, 30 aa, Setaria italica
  Transcript Sequence Number=SeqID_45128
VICAIILLIAEGGLKKQFSNWSLTGSLTAS

SEQ ID NO: 111103 - protein, 325 aa, Setaria italica
  Transcript Sequence Number=SeqID_45129
  Gene Ontology: Mol. function=sugar:hydrogen symporter activity; Cellular component=integral to membrane; Biological process =carbohydrate transport
  Homolog annotation: Hit_ID=B6T3E1; Match level="QueryCoverage=95%, HitCoverage=95%, E-value=1e-147, Identity=86%"; Hit description =Nucleotide-sugar transporter/ sugar porter
  Pfam annotation: Domain name=DUF6; Domain location=27-156; Score =21.1; E_value=0.0045; Accession=PF00892.12; Description=Integral membrane protein DUF6
  Pfam annotation: Domain name=Nuc_sug_transp; Domain location=74-306; Score=-40.7; E_value=1.3e-10; Accession=PF04142.7; Description =Nucleotide-sugar transporter
  Pfam module annotation: Pfam domain module=DUF6::Nuc_sug_transp; Domain location=27-156::74-306
MGSSSTPAAAAVPSRRKVALYLTLLTLQYGAQPLISKRFVRQDTIVTSLVLATEGAKVICAIILLIAEGGLKKQFSNWSLTGSLTASGLPAAIYALQNSLLQISYKNLDSLTFSILNQTKLLWTAFFTYLILGQKQSSKQILALTLLISAAVLLSVGESSSKGSKGGSSDYVLLYGIIPVTVASMLSGLASSLCQWASQVKKHTSYMMTIEMSFIGSLCLLASTYRSPDGEAIRKYGFFHEWTLWTTVPVLMNAVGGILVGLVTTYAGGVRKGFVIVSALLVTALLQFIFDGKPPSHYCLMALPLVMTSIFIYQKYPYADRKKKD

SEQ ID NO: 111104 - protein, 135 aa, Setaria italica
  Transcript Sequence Number=SeqID_45130
LGFALDELPLTHICSCFLSIHVFSQSFCNQNHIFRCLFSLNHVTLFTWIDKPWGNTLKENLQLIRALAVQTSALTAVNKDTDFYIETVNKDTNFYIETKKATTRCGDLHYITESTTTWDMSCLLFHVYIWLAKEH

SEQ ID NO: 111105 - protein, 62 aa, Setaria italica
  Transcript Sequence Number=SeqID_45131
RQWRSRLLSLFLNNQDIVNCMLPWQKVFNFAKLNLHFMSWDHHLLLLTWQCDNRNLEIRNII

SEQ ID NO: 111106 - protein, 227 aa, Setaria italica
  Transcript Sequence Number=SeqID_45132
  Gene Ontology: Mol. function=nutrient reservoir activity; Cellular component=extracellular region
  Homolog annotation: Hit_ID=B4FUT3; Match level="QueryCoverage=89%, HitCoverage=90%, E-value=1e-102, Identity=88%"; Hit description =Germin-like protein subfamily 1 member 17
  Pfam annotation: Domain name=Cupin_1; Domain location=65-215; Score =166.9; E_value=5.8e-47; Accession=PF00190.14; Description=Cupin
  Pfam annotation: Domain name=Cupin_2; Domain location=100-177; Score =26.6; E_value=0.0001; Accession=PF07883.3; Description=Cupin domain
  Pfam module annotation: Pfam domain module=Cupin_1::Cupin_2; Domain location=65-215::100-177
MASSSSSKLLLITALFALTSWQAVAFDPSPLQDFCVADLKSPVRVNGFPCKDPMAVTPDDFFNAARLDQPRNTMNKFGSVVTNINVTQFPGLNTLGISYARIDYAPLGVNTPHLHPRATELLTVLEGTLYLGFVTSNPNRLFSKVVKKGDVFVFPKAMIHFQMNLDHEKPAAALSSLSSQNPGVITIASAVFGSKPPISDDVLAKAFQVEKKLIDWLQNQFWENNNY

SEQ ID NO: 111107 - protein, 40 aa, Setaria italica
  Transcript Sequence Number=SeqID_45133
  Gene Ontology: Cellular component=plasma membrane
  Homolog annotation: Hit_ID=Q68Y48; Match level="QueryCoverage=95%, HitCoverage=10%, E-value=2e-14, Identity=97%"; Hit description=Tubby- like F-box protein 9
RDRFGKIEDDAFTMDYRQPLSAFQAFAICLTSFGTKLACE

SEQ ID NO: 111108 - protein, 83 aa, Setaria italica
  Transcript Sequence Number=SeqID_45134
  Homolog annotation: Hit_ID=Q68Y48; Match level="QueryCoverage=96%, HitCoverage=21%, E-value=5e-34, Identity=87%"; Hit description=Tubby- like F-box protein 9
  Subcellular localization annotation: CTP_CleavageSite=23; ConfidenceScore=5.03e-01
MPIFSFSFAQPGPRDAPMHCFIRRDKKNSTFSLYLSLTQALTDKGKFLLAARRFRQGAHTEYIISYDYDDLHPGSTSYVGKLR

SEQ ID NO: 111109 - protein, 56 aa, Setaria italica
  Transcript Sequence Number=SeqID_45135
  Homolog annotation: Hit_ID=Q68Y48; Match level="QueryCoverage=85%, HitCoverage=12%, E-value=3e-12, Identity=72%"; Hit description=Tubby- like F-box protein 9
  Subcellular localization annotation: CTP_CleavageSite=50; ConfidenceScore=5.16e-01
FDRVPSACRSDFLGTKFIIYDSQAPYNGAKPSRSRSSRRFTSKQISPQVSGGNYEV

SEQ ID NO: 111110 - protein, 281 aa, Setaria italica
  Transcript Sequence Number=SeqID_45136
  Gene Ontology: Cellular component=plasma membrane
  Homolog annotation: Hit_ID=Q68Y48; Match level="QueryCoverage=100%, HitCoverage=75%, E-value=1e-140, Identity=85%"; Hit description =Tubby-like F-box protein 9
  Pfam annotation: Domain name=Tub; Domain location=25-275; Score =363.1; E_value=5.2e-106; Accession=PF01167.10; Description=Tub family
DAAFSVVRPPLEGGRITFPSSLKQPGPRDAPMHCFIRRDKKNSTFSLYLSLTQALTDKGKFLLAARRFRQGAHTEYIISYDYDDLHPGSTSYVGKLRSDFLGTKFIIYDSQAPYNGAKPSRSRSSRRFTSKQISPQVSGGNYEVGQVTYKFNFLKSRGPRRMQCSIQCPVGQDTASDPSKEKTPAPCSLDLKNKAPRWHEHLQCWCLNFHGRVTVASVKNFQLVATAGSGGPWGVGDEETVILQFGKIEDDAFTMDYRQPLSAFQAFAICLTSFGTKLACE

SEQ ID NO: 111111 - protein, 461 aa, Setaria italica
  misc_feature (112)..(112): Xaa can be any naturally occurring amino acid
  Transcript Sequence Number=SeqID_45137
  Gene Ontology: Mol. function=transporter activity; Cellular component= integral to membrane; Biological process=transport
  Homolog annotation: Hit_ID=B4FA49; Match level="QueryCoverage=97%, HitCoverage=88%, E-value=0.0, Identity=78%"; Hit description =Carbohydrate transporter/ sugar porter/ transporter
  Pfam annotation: Domain name=MFS_1; Domain location=15-407; Score =109.7; E_value=1e-29; Accession=PF07690.8; Description=Major Facilitator Superfamily
  Pfam annotation: Domain name=Sugar_tr; Domain location=8-451; Score= -159.5; E_value=0.01; Accession=PF00083.16; Description=Sugar (and other) transporter
  Pfam module annotation: Pfam domain module=MFS_1::Sugar_tr; Domain location=15-407::8-451
SLISINTVCCIFTVCNFLLSFSALPISSLFPFLYFMIRDLNVAKRTEDIGFYAGFLGASFMFARCLTSTAWGIAADRIGRKPVVIFGIFSVVVFNTLFGLSVTYWMAIATRXFLLGALNGLLGPIKAYAIEVCRPEHEALALSLVSTAWGIGLIIGPALGGYLALPAENFPNVFSPESLFGRFPYFLPCLCTSVFAAAVLISCIWMPETLHKHKGSENENQSIEALEAHLIDPKEKVEESGSLNTKKSLFKNWPLMSSIVIYCIFSFHDMAYTEVFSLWAESDKKYGGLSLSSEDVGQVLAVTGASLLVYQLFLYPRINKVLGPINSSRIAAILCIPILFAYPYMTYLSEPGLSIVLNVASVIKNNLAVTIITGTFILQNNAVPQDQRGAANGLSMTGMSFFKAVAPAGAGIVFSWAQKRQHGFFFPGDQMVFFLLNVIELLGLILTFKPFLAVPEQYNRN

SEQ ID NO: 111112 - protein, 251 aa, Setaria italica
  Transcript Sequence Number=SeqID_45138
  Gene Ontology: Mol. function=DNA binding
DHARPSPRRAPSSASSEGYYRQGGGAYDRSYPDEPPLGYTPSRSDRYWVEDDGGGYKSFGRYGGGGGGRRDGREVRGSYRRSPFRGYGSDFSRNHPEQPPPPPPRRSPLRSVAVPICYDPPGNRVDRGDRDNLPRVTPWRRRESRSEAADAAGAGPVSLGQTTRPASSEKEASAQPPAGSAPLGTEDEAPRKKARLGWGQGLAKYEKQKVHGPADPAEAVADGSPAEAEQKTAFPVPVLPAPPASAPAPDA

SEQ ID NO: 111113 - protein, 106 aa, Setaria italica
  Transcript Sequence Number=SeqID_45139
  Homolog annotation: Hit_ID=B6TSC4; Match level="QueryCoverage=69%, HitCoverage=22%, E-value=2e-09, Identity=48%"; Hit description =Ubiquitin-protein ligase
LKRLEVGKYIPSPCGFVIDHEDNSDCDEARGIATMHGLRSLKIYHNKLNNKALAAILDNCPHLESLDLQWRFNIFVDGAMRAKYAGIKKVVQPDFDQVISWAMTQV

SEQ ID NO: 111114 - protein, 336 aa, Setaria italica
  Transcript Sequence Number=SeqID_45140
  Gene Ontology: Mol. function=protein serine/threonine phosphatase activity; Cellular component=protein serine/threonine phosphatase complex; Biological process=protein amino acid dephosphorylation
  Homolog annotation: Hit_ID=Q6L4R7; Match level="QueryCoverage=99%, HitCoverage=75%, E-value=1e-167, Identity=85%"; Hit description =Probable protein phosphatase 2C 53
  Pfam annotation: Domain name=PP2C; Domain location=16-319; Score =258.6; E_value=1.5e-74; Accession=PF00481.13; Description=Protein phosphatase 2C
IAGAGARSVFAVDYVPRWGLESICGRRPEMEDAAIVLPRFVDVPLWMVAGDAPVDGLDRASFRLPAHFFGVYDGHGGVQVANYCRERIHSVLIEELSKAEESVSGADLSGLESKKQWEKAFVDCFSRVDSEVGGNATTAGKPVGPDTVGSTAVVAVVCSSHIIVANCGDSRAVLCRGKQPLALSVDHKPNREDEYARIEAQGGKVIQWNGYRVLGVLAMSRSIGDRYLKPYIIPVPEVTIVARAKEDECLILASDGLWDVMSNEEVCDAARKRILLWHKKNADASSSAQRSGDSPDQAAQAAAEYLSKLALQKGSKDNITVVVVDLKSHRKFKSKT

SEQ ID NO: 111115 - protein, 62 aa, Setaria italica
  Transcript Sequence Number=SeqID_45141
LKENWAVWVFSLFCFLQQSFFLSCDYICSLVCHSLNVDIASLAKYVQHLNGFLLLYLHSCRE

SEQ ID NO: 111116 - protein, 103 aa, Setaria italica
  Transcript Sequence Number=SeqID_45142
  Gene Ontology: Mol. function=serine-type endopeptidase activity; Biological process=negative regulation of catalytic activity
  Homolog annotation: Hit_ID=B9RHC5; Match level="QueryCoverage=99%, HitCoverage=13%, E-value=1e-28, Identity=60%"; Hit description=Xylem serine proteinase 1, putative
  Subcellular localization annotation: CTP_CleavageSite=92; ConfidenceScore=5.26e-01
PSITIPELRGKLTVSRTVTNVGSVMSKYRAHVEPPPGVDVAVSPSLLTFNSTVRRLTFKVTFQAKLKVQGRYTFGSLTWEDGAHTVRIPLVVRTMISKFYVDA

SEQ ID NO: 111117 - protein, 139 aa, Setaria italica
  misc_feature (22)..(22): Xaa can be any naturally occurring amino acid
  misc_feature (96)..(96): Xaa can be any naturally occurring amino acid
  Transcript Sequence Number=SeqID_45143
AGRASTRDSSPVRRTLPSKQEXERSYDGDRARSPPRKRRSRSRERDHDSERDRSDRDRGRYKDRDYDRRARDHSDRDHHRSSYSDRDGERRGREKXDRDSDRSGRSSTRRSRSRSPVRGRTEGDKHTTTSPFGILELRR

SEQ ID NO: 111118 - protein, 114 aa, Setaria italica
  Transcript Sequence Number=SeqID_45144
  Gene Ontology: Mol. function=identical protein binding; Cellular component=spliceosome; Biological process=mRNA processing
  Homolog annotation: Hit_ID=B6TSE1; Match level="QueryCoverage=78%, HitCoverage=22%, E-value=2e-42, Identity=86%"; Hit description=PRP38 pre-mRNA processing factor 38 domain containing B
  Pfam annotation: Domain name=PRP38; Domain location=1-112; Score= -45.8; E_value=0.0013; Accession=PF03371.7; Description=PRP38 family
PAHASPAAAAPHRSRYPSSAFCLLYKFFTMKLTVNQMHGLLKHPDSPYIRAIGFLYLRYVAEPKTLWAWYEPYIKDDEEFSPGSNGKMTTMGVYVRDLLLGQVYLLNLFDISAI

SEQ ID NO: 111119 - protein, 239 aa, Setaria italica
  misc_feature (208)..(208): Xaa can be any naturally occurring amino acid
  Transcript Sequence Number=SeqID_45145
  Gene Ontology: Mol. function=identical protein binding; Cellular component=spliceosome; Biological process=mRNA processing
  Homolog annotation: Hit_ID=B6TSE1; Match level="QueryCoverage=98%, HitCoverage=60%, E-value=1e-127, Identity=93%"; Hit description =PRP38 pre-mRNA processing factor 38 domain containing B
  Pfam annotation: Domain name=PRP38; Domain location=1-169; Score =95.8; E_value=1.5e-25; Accession=PF03371.7; Description=PRP38 family
MEIQSSGRSIDVLMEKVLSVNILSSDYFKELYKFKTYHEVVDEIYHQVDHVEPWMTGNCRGPSSAFCLLYKFFTMKLTVNQMHGLLKHPDSPYIRAIGFLYLRYVAEPKTLWAWYEPYIKDDEEFSPGSNGKMTTMGVYVRDLLLGQYYFDSLLPRVPLPILRQVTSHLEKLKLPTKQSGMTGDSNRHESNDTARRPPSVKASLSVSXFGQRAPHRASTRDSSPVRRTLPSKQEKERSY

SEQ ID NO: 111120 - protein, 252 aa, Setaria italica
  Transcript Sequence Number=SeqID_45146
  Homolog annotation: Hit_ID=B6TSE1; Match level="QueryCoverage=99%, HitCoverage=63%, E-value=1e-42, Identity=93%"; Hit description=PRP38 pre-mRNA processing factor 38 domain containing B
YLLFFWQYYFDSLLPRVPLPILRQVTSHLEKLKLPTKQSGMTGDSNRHESNDTARRPPSVKASLSVSFGQRAPHRASTRDSSPVRRTLPSKQEKERSYDGDRARSPPRKRRSRSRERDHDSERDRSDRDRGRYKDRDYDRRARDHSDRDHHRSSYSDRDGERRGREKRDRDSDRSGRSSTRRSRSRSPVRGRTEGDKHRSSPFGKAPESSNLAKLKDLYGDATNTKNDSGDDRAHRDSGTEEVIRLGGARWR

SEQ ID NO: 111121 - protein, 83 aa, Setaria italica
  Transcript Sequence Number=SeqID_45147
  Pfam annotation: Domain name=zf-C3HC4; Domain location=34-68; Score =4.9; E_value=0.028; Accession=PF00097.17; Description=Zinc finger, C3HC4 type (RING finger)
LHISSNQSDAPGSGNEASSVVRTAAETTKIDLICKVCNFGLACMLLLPCQHLCACNPCGVRLAACPICGAVKGGAVEARFVEK

SEQ ID NO: 111122 - protein, 85 aa, Setaria italica
  Transcript Sequence Number=SeqID_45148
  Gene Ontology: Mol. function=nucleic acid binding
  Homolog annotation: Hit_ID=Q0JP11; Match level="QueryCoverage=100%, HitCoverage=50%, E-value=5e-09, Identity=44%"; Hit description=Zinc finger CCCH domain-containing protein 3
  Subcellular localization annotation: CTP_CleavageSite=43; ConfidenceScore=5.31e-01
SCRYFHPKPDGANPSLAAPGPGPGAMVHQSNFLVSQPNLVGYQAAERNSFSGNVLGAHSSWGNLPPSLQPPPEGGYPPLPFVDWG

SEQ ID NO: 111123 - protein, 64 aa, Setaria italica
  Transcript Sequence Number=SeqID_45149
RSFHRCPNYTNNRRSSDSLEGNQNKGTFTFHQTLARSQTNLAHCLQQNTLVTYDKSQDQAKAFT

SEQ ID NO: 111124 - protein, 59 aa, Setaria italica
  misc_feature (17)..(17): Xaa can be any naturally occurring amino acid
  Transcript Sequence Number=SeqID_45150
MAPLLRPLVLALLIASXCAAQQAPPAQPPQTPPSNSPPTTPPPAPTTPPPAPTTPPPAP

SEQ ID NO: 111125 - protein, 82 aa, Setaria italica
  Transcript Sequence Number=SeqID_45151
  Gene Ontology: Mol. function=aspartyl esterase activity; Cellular component=cell wall; Biological process=cell wall modification
  Pfam annotation: Domain name=Pectinesterase; Domain location=3-82; Score=-196.1; E_value=1e-06; Accession=PF01095.11; Description =Pectinesterase
ERRTTETNTAGHFVIAVAAGTYKENVVIPYEKTNILLVGEGRGATVITASRSVGIDGLGTFDTATVAVIGDGFRARDITFEN

SEQ ID NO: 111126 - protein, 110 aa, Setaria italica
  misc_feature (45)..(45): Xaa can be any naturally occurring amino acid
  misc_feature (67)..(67): Xaa can be any naturally occurring amino acid
  Transcript Sequence Number=SeqID_45152
  Gene Ontology: Mol. function=structural constituent of ribosome; Cellular component=ribonucleoprotein complex; Biological process =translation
  Homolog annotation: Hit_ID=B4F9G6; Match level="QueryCoverage=85%, HitCoverage=42%, E-value=4e-32, Identity=74%"; Hit description=60S ribosomal protein L6
  Pfam annotation: Domain name=Ribosomal_L6e; Domain location=17-106; Score=127.6; E_value=4.2e-35; Accession=PF01159.11; Description =Ribosomal protein L6e
CSPSFNVSVVLAGPFKINGVPIRRVNQTYVIATSTKVDISGVDVXKFDDKYFAREKKQKVKKTEGEXFETEKEASKSLPDFKKDDQKAVDAALIKAIEGCPKKLKEPNLR

SEQ ID NO: 111127 - protein, 117 aa, Setaria italica
  misc_feature (31)..(31): Xaa can be any naturally occurring amino acid
  misc_feature (98)..(98): Xaa can be any naturally occurring amino acid
  Transcript Sequence Number=SeqID_45153
MHVRMYCNDVRELDDVIYSPPPMPPPPPAPXPPPPKPPPAPPPPTPPPPPPPDPPPKPPPLPPPKPPPAPAPPPAPPPRPPPPPAPPPSPPPAPPPAXPTQQQPPPPPRPNTWRPLA

SEQ ID NO: 111128 - protein, 211 aa, Setaria italica
  Transcript Sequence Number=SeqID_45154
  Subcellular localization annotation: CTP_CleavageSite=16; ConfidenceScore=5.02e-01
MAPLLRPLVLALLIASCAAQQAPPAQPPQTPPSNSPPQAPPAGNPPPAPQAPPAGNPPPAPTNPPPAPTTPPPAPTTPPPAPTTPPPAPTTPPPAPTTPPPSPPASPPPAPTTPPPSPPMSPPPAPMTPPPSPPMAPPPATPPPPATPPPAAPTPAPSTAPTLPPVATPSASPKSPKTPSPAAATSPSPALSPAGTTPNEDSGAGARAAGF

SEQ ID NO: 111129 - protein, 243 aa, Setaria italica
  Transcript Sequence Number=SeqID_45155
  Gene Ontology: Mol. function=O-methyltransferase activity; Biological process=lignin biosynthetic process
  Homolog annotation: Hit_ID=Q75RZ2; Match level="QueryCoverage=98%, HitCoverage=90%, E-value=9e-94, Identity=73%"; Hit description =Putative caffeoyl CoA O-methyltransferase (Fragment)
  Pfam annotation: Domain name=Methyltransf_3; Domain location=30-242; Score=406.5; E_value=4.5e-119; Accession=PF01596.9; Description=O -methyltransferase
MAADGEVKNIHTNDSTKTLLKNEALYEYMLNTMVYPRENEHLRELRHITEQHAYGFMLSPPDEEQLLSLLLKVMGARNTIEVGVFTGGSVLAAALAIPDDGRIVAIDVSREYYDLGRPVIEKAGVAHKVDFREGPALGHLDALLADEGNAGAFDFAFVDADKGNYGNYHEQLLRLVRVGGVIAYDNTLWGGSVAMPDDAPLTEGDRKVREAIRAFNARIAADTRVEAVQLPVADGITLCRRVV

SEQ ID NO: 111130 - protein, 260 aa, Setaria italica
  misc_feature (60)..(60): Xaa can be any naturally occurring amino acid
  misc_feature (104)..(104): Xaa can be any naturally occurring amino acid
  misc_feature (207)..(207): Xaa can be any naturally occurring amino acid
  misc_feature (215)..(215): Xaa can be any naturally occurring amino acid
  Transcript Sequence Number=SeqID_45156
  Gene Ontology: Mol. function=O-methyltransferase activity; Biological process=lignin biosynthetic process
  Homolog annotation: Hit_ID=B6UF45; Match level="QueryCoverage=89%, HitCoverage=93%, E-value=1e-108, Identity=84%"; Hit description =Caffeoyl-CoA O-methyltransferase 1
  Pfam annotation: Domain name=Methyltransf_3; Domain location=45-259; Score=385.5; E_value=9.2e-113; Accession=PF01596.9; Description=O -methyltransferase
VGGVGGGFGGGKGGGFGGGSGGGFGGGDSSNKTLLKSEALYKYVLDTSVLPHEPECMREXLRLVTDKHRWGFMQSSPDEAQLLRMLIKLTGARNTLEVGVFTGXTPLLATALALPDDGKVIAIDVDREYYEIGRPFIEKAGVAHKVDFREGPALDHLDKLLADEANVGAFDFAFVDADKPNYVKYHEQLLRLVKVGGTIVYDNTLWXGTVAMPPXTPMSDLDRRFSAAIRDLNVRLSADERIEVCQLAIADGVTICRRLV

SEQ ID NO: 111131 - protein, 85 aa, Setaria italica
  Transcript Sequence Number=SeqID_45157
  Subcellular localization annotation: CTP_CleavageSite=42; ConfidenceScore=5.03e-01
MFLLSQATQRVQNFRLQTKHLKSCCHNKPTTIYNTVSPKLKVQQTEATISHLSSFKAQTVHQLLQRHNSTSLAMKVKDIHLHNIH

SEQ ID NO: 111132 - protein, 64 aa, Setaria italica
  Transcript Sequence Number=SeqID_45158
  Gene Ontology: Biological process=response to stress
  Homolog annotation: Hit_ID=B6TCZ7; Match level="QueryCoverage=100%, HitCoverage=34%, E-value=5e-27, Identity=95%"; Hit description =Pathogen induced protein 2-4
DLAIEAFKTLLVRTKARIVEGDAGKVICREADRLKPAAVILGTRGRGLIQSVLQGSVSEYCFLN

SEQ ID NO: 111133 - protein, 147 aa, Setaria italica
  Transcript Sequence Number=SeqID_45159
  Homolog annotation: Hit_ID=Q9SRT1; Match level="QueryCoverage=85%, HitCoverage=41%, E-value=2e-24, Identity=44%"; Hit description =F21O3.6 protein
  Pfam annotation: Domain name=DUF506; Domain location=1-126; Score =114.8; E_value=2.9e-31; Accession=PF04720.4; Description=Protein of unknown function (DUF506)
AESLRAAGHDAAVCLSRWDKSSSHLAGEHAYLDVLLPAGSDRAERERVLVDVDFRSAFEVARPTKAYRAVLQRLPSVFVGREDRLRLLVAAAADAARASLKKRGLHLPPWRKPEYMRAKWLSPYDRETPPPPPPAAAAAAAARGLHR

SEQ ID NO: 111134 - protein, 41 aa, Setaria italica
  Transcript Sequence Number=SeqID_45160
  Gene Ontology: Mol. function=oxidoreductase activity, acting on the CH-OH group of donors, NAD or NADP as acceptor; Cellular component =chloroplast; Biological process=malate metabolic process
  Homolog annotation: Hit_ID=Q0JJQ7; Match level="QueryCoverage=97%, HitCoverage=6%, E-value=2e-13, Identity=87%"; Hit description=Malic enzyme (Fragment)
LQAGTGIAELIALQISKQTKAPIEECRQKVWLVDSKGLIVS

SEQ ID NO: 111135 - protein, 141 aa, Setaria italica
  misc_feature (119)..(119): Xaa can be any naturally occurring amino acid
  Transcript Sequence Number=SeqID_45161
  Homolog annotation: Hit_ID=B6SQA7; Match level="QueryCoverage=99%, HitCoverage=45%, E-value=1e-69, Identity=93%"; Hit description=Plant viral-response family protein
MGGTPRNSIGHILPGAGFLAVGLWHLFNHIRLFSLRPDAYVAPVWFPAPGVRHLELILVIVGSAVEFAMEMFVDHSTFLPFDADGSIPSDRLHNHEHAIICLALLVYAGSALHLDRVRXRCRDAISLLLVAVVFAQELLVF

SEQ ID NO: 111136 - protein, 114 aa, Setaria italica
  Transcript Sequence Number=SeqID_45162
RSVYKQNTHIIYIAYMQTKEASLSFRNIHVIALCFPLFILLLLQLQHSPLICPKLQTEIITVRSTMIGTCRCIAKCYQKLKGINIGERTHVLFCLFLFDCEGACSLVVAVTLVA

SEQ ID NO: 111137 - protein, 247 aa, Setaria italica
  Transcript Sequence Number=SeqID_45163
MIKIKLTFDYPVEVVSPKPKGLRELEEYLKEHTFDSVEDAFEYLWNNQKDALAAMSQQSSLDNYEFGSESKVAPEQEEAGSVPASEQAPSVPEQGRCSEASYKEIAQNGKKWMREEVMVAFNKYIEDKDDFEDIQYEFDELQHQCFSVENYHKIFHHFNFTVKMKVNGSADWTSALFFAEVKEIFRQKIYFCTPLELYENGHCDACKKQGMDDLRHPIIGVYDRGNPDTEFPFMYGCDADGFLYDSE

SEQ ID NO: 111138 - protein, 75 aa, Setaria italica
  Transcript Sequence Number=SeqID_45164
MEGYAAGLVGAGEVEAKVRLVMDAEQGRELRARVAARREEAEVGLMLGGSSQRAFAQFLSDAETIRESRALGQVK

SEQ ID NO: 111139 - protein, 120 aa, Setaria italica
  misc_feature (18)..(18): Xaa can be any naturally occurring amino acid
  Transcript Sequence Number=SeqID_45165
  Gene Ontology: Mol. function=protein tyrosine kinase activity; Biological process=protein amino acid phosphorylation
  Homolog annotation: Hit_ID=Q4U3Z8; Match level="QueryCoverage=87%, HitCoverage=14%, E-value=4e-18, Identity=42%"; Hit description=Wall -associated kinase 2
ATVIGDMSYVDPIYMQSXYLTNKSDVYSFGVLLLELITRKSASHPGNGNLIANFCDAYTDNRVIEFVDSEIAVEENFQLLNRLSGMIKKCLDLDVNQRPGMTVVEDKSSRHDEDSTGQLK

SEQ ID NO: 111140 - protein, 74 aa, Setaria italica
  Transcript Sequence Number=SeqID_45166
  Gene Ontology: Mol. function=transcription regulator activity; Cellular component=nucleus; Biological process=regulation of transcription
RFKKMKHFPGNCSVFNGSMENITHEKIRNMVAVLRGIIPGGDQLDAPDVLEEAVRYLKFLKVEAEKLGVAGFNA

SEQ ID NO: 111141 - protein, 151 aa, Setaria italica
  Transcript Sequence Number=SeqID_45167
  Gene Ontology: Mol. function=DNA binding; Cellular component=nucleus; Biological process=regulation of transcription, DNA-dependent
  Homolog annotation: Hit_ID=Q7XIX9; Match level="QueryCoverage=100%, HitCoverage=36%, E-value=6e-30, Identity=56%"; Hit description =Putative transcription factor PCF6
PHLANIAPIAMAPAQHFGLASGAVTVASGGGEPHAEMTQFSFLQDHYMPVHAAPASGPAGDYNLNFSMSSGLVGVNSRGTLQSNSQPHISGHHHQHHQLQRLSTPLDAPNIPFLFSPAAAVTTPATAESQFAAFQLWNGFQHADMKEKGKN

SEQ ID NO: 111142 - protein, 126 aa, Setaria italica
  Transcript Sequence Number=SeqID_45168
  Gene Ontology: Mol. function=acyltransferase activity; Cellular component=plastoglobule; Biological process=metabolic process
  Homolog annotation: Hit_ID=B9REV2; Match level="QueryCoverage=100%, HitCoverage=18%, E-value=4e-23, Identity=43%"; Hit description =Catalytic, putative
NVLQLLCTFDDIRNAPFGKEMMQAYSDHLKLRDDVDHEVFFPGLYMKIPGRFYYQFGKPIPTKDKQDILTDKQAANDLYMHVKSEVERIISNLLEKRVEDKYRSLIPRMLYQAARGPTCEVPAFDP

SEQ ID NO: 111143 - protein, 89 aa, Setaria italica
  Transcript Sequence Number=SeqID_45169
RLWHSAVGHTLQPPPHLRPEMHPQISAPYELKKTTQQRINQSDPPQIRQNHQETVRKPARLGAEAELRSHRRGSNRPQIREAGDGKSAR

SEQ ID NO: 111144 - protein, 112 aa, Setaria italica
  misc_feature (31)..(31): Xaa can be any naturally occurring amino acid
  misc_feature (52)..(52): Xaa can be any naturally occurring amino acid
  misc_feature (75)..(75): Xaa can be any naturally occurring amino acid
  Transcript Sequence Number=SeqID_45170
  Gene Ontology: Mol. function=nucleotide binding; Biological process =defense response
  Homolog annotation: Hit_ID=Q69U98; Match level="QueryCoverage=91%, HitCoverage=7%, E-value=4e-13, Identity=41%"; Hit description =Putative Pi-b protein
AFLPYGHYLVKKLNLCGIKVPKEIGRLKALXAYPIARAKLMLKEIEKLTQLXQMLFALTEVRDCEELEFAIFNSXIHSSSMCAEVKDGLDGCLDGMSPLEHIEILQLYSSRV

SEQ ID NO: 111145 - protein, 58 aa, Setaria italica
  Transcript Sequence Number=SeqID_45171
ALLNPKNPCNGLVTFRILEMLSTTNRAAYNCIAAGAGLLKTEKTWERGNGRGQKRKLN

SEQ ID NO: 111146 - protein, 166 aa, Setaria italica
  Transcript Sequence Number=SeqID_45172
  Gene Ontology: Mol. function=ATP-dependent helicase activity; Cellular component=intracellular
  Homolog annotation: Hit_ID=B9S9D0; Match level="QueryCoverage=99%, HitCoverage=10%, E-value=1e-47, Identity=53%"; Hit description=ATP -dependent RNA helicase, putative
SLHREAATALDHLQGNVLPCCLPWQIIQCQHVFHSTVSCPTRIYNVISQAVGSLLESFRSQKGVSYNLEKNENGSFRVKLTANATKTIADLRRPLELLMEGKTINHPDLTLSAVQLLFSRDGLAHLRSVEQETGTYIHYDRQSLNVKVFGHTDQVAAAEEKLVHAV

SEQ ID NO: 111147 - protein, 61 aa, Setaria italica
  Transcript Sequence Number=SeqID_45173
PARPGGGSEVAGGEGRRRGLAGRREKSAGEERGGGAKGNWSGGPVLVSFSYLQVTKGLWGC

SEQ ID NO: 111148 - protein, 52 aa, Setaria italica
  Transcript Sequence Number=SeqID_45174
NSISDFLCLEFTKHLYWLPPQPIYLSNQCCGLSAALCIIPACTWLWCPYELA

SEQ ID NO: 111149 - protein, 158 aa, Setaria italica
  misc_feature (19)..(19): Xaa can be any naturally occurring amino acid
  misc_feature (56)..(56): Xaa can be any naturally occurring amino acid
  misc_feature (109)..(109): Xaa can be any naturally occurring amino acid
  misc_feature (131)..(131): Xaa can be any naturally occurring amino acid
  Transcript Sequence Number=SeqID_45175
  Gene Ontology: Mol. function=nucleic acid binding; Cellular component= chromatin; Biological process=DNA integration
  Homolog annotation: Hit_ID=Q2RBA0; Match level="QueryCoverage=95%, HitCoverage=15%, E-value=5e-64, Identity=75%"; Hit description =Retrotransposon protein, putative, Ty1-copia subclass
  Pfam annotation: Domain name=RVT_2; Domain location=1-158; Score =136.6; E_value=8e-38; Accession=PF07727.6; Description=Reverse transcriptase (RNA-dependent DNA pol
VVEFKALVDNDTWHLVPRXPGANVVIGKWIYKHKFHSDGSLARHKARWVVRGFSQXHGVDYDKTFSPVVKLGTIRTVLSIAASCEWPIHQLDVKNAFLHGHLDETVYCXQPQGFVDPVHPDHVCLLQKSLXLEQVPRAWYQRFANLYTTIGLVLGFRH

SEQ ID NO: 111150 - protein, 84 aa, Setaria italica
  Transcript Sequence Number=SeqID_45176
IIIIEKKKLVEDIWKEKTKPFRMVVANKTVKPTRTSYKTIMYSNLLPLTRWNKQFHDIVQQLLTLKACLDTLRLDQFSSDWQGN

SEQ ID NO: 111151 - protein, 60 aa, Setaria italica
  Transcript Sequence Number=SeqID_45177
TNLPRQVRGPAVVTSGRAAAAVQLGTSDLHLGSASAAAPNLYSGASAPLILGGLGYGNTP

SEQ ID NO: 111152 - protein, 227 aa, Setaria italica
  Transcript Sequence Number=SeqID_45178
  Gene Ontology: Cellular component=chloroplast
  Homolog annotation: Hit_ID=B6T2W9; Match level="QueryCoverage=69%, HitCoverage=61%, E-value=2e-74, Identity=84%"; Hit description =Thylakoid lumenal 19 kDa protein
  Subcellular localization annotation: CTP_CleavageSite=25; ConfidenceScore=5.12e-01
TASQQQQQALRLPPSKQPPLATTLVAAAAAGLLLLSPAPAPSRADPEFKVYYGTAASAANYGGYGGNASKKDTAEYVYDVPEGWKERLVSKVEKGTNGTDSEFFNPRKRSEKEYLTFLSGIRALAPLNAVLNNLALSDVGLQDQIATADDVRSAERADGDGQVYYEYEVAGAGAHSLISVTCARNKLYAHFVTAPNAEWGRDEAVLRRLHESFRTIQPGAPPPATES

SEQ ID NO: 111153 - protein, 117 aa, Setaria italica
  Transcript Sequence Number=SeqID_45179
  Gene Ontology: Mol. function=binding; Cellular component=phagocytic vesicle; Biological process=intracellular signaling cascade
  Homolog annotation: Hit_ID=B6U6S4; Match level="QueryCoverage=95%, HitCoverage=86%, E-value=9e-47, Identity=59%"; Hit description=Heat shock protein STI
  Pfam annotation: Domain name=TPR_1; Domain location=2-35; Score=25.9; E_value=0.00017; Accession=PF00515.20; Description=Tetratricopeptide repeat
  Pfam annotation: Domain name=TPR_1; Domain location=36-69; Score =11.2; E_value=0.27; Accession=PF00515.20; Description=Tetratricopepti de repeat
  Pfam annotation: Domain name=TPR_1; Domain location=70-103; Score =35.5; E_value=2.2e-07; Accession=PF00515.20; Description =Tetratricopeptide repeat
  Pfam annotation: Domain name=TPR_2; Domain location=2-35; Score=28.8; E_value=2.2e-05; Accession=PF07719.9; Description=Tetratricopeptide repeat
  Pfam annotation: Domain name=TPR_2; Domain location=36-69; Score =18.6; E_value=0.027; Accession=PF07719.9; Description=Tetratricopepti de repeat
  Pfam annotation: Domain name=TPR_2; Domain location=70-103; Score =33.2; E_value=1e-06; Accession=PF07719.9; Description=Tetratricopepti de repeat
  Pfam module annotation: Pfam domain module=TPR_1::TPR_1::TPR_1::TPR _2::TPR_2::TPR_2; Domain location=2-35::36-69::70-103::2-35::36 -69::70-103
MADEAKAKGNAAFSAGRFEEAARHFSDAIALAPGNHVLYSNRSAALASLHRYSDALADAQKTVELKPDWAKGYSRLGAAHLGLGDAASAVAAYEKGLALDPSNGGLKAGLEDAKKAA

SEQ ID NO: 111154 - protein, 87 aa, Setaria italica
  Transcript Sequence Number=SeqID_45180
SSEQGKRSTMGTRVADSSSPASSCVSSDAEEEVVQAAKPMVVVGCPQCLMYVMLSGEEKQPKCPRCKSPVLLHFLRADDASSNTRRR

SEQ ID NO: 111155 - protein, 213 aa, Setaria italica
  misc_feature (45)..(45): Xaa can be any naturally occurring amino acid
  Transcript Sequence Number=SeqID_45181
  Pfam annotation: Domain name=NOI; Domain location=1-73; Score=-5.7; E_ value=0.097; Accession=PF05627.3; Description=Nitrate-induced NOI protein
MAAAGNAVVPKFGSWDAENIGYTVFFEKVRDNKPAPAPATTASPXPPTSGNGGGGGGGYDFDPYEHYENLSRKVPSRPPSSHGSHAPAPAPKAPAGGYDYDPYEHYESISRKVPSRPPSSHGGPKAPGGGGGYDPYEHYDNLSSRNVPSRPPSSHGHGHPPAGYDFDPYEHYENISSRNVPSRPPSSHGHGHAPPQPHHRPQNHQQQHQHPGP

SEQ ID NO: 111156 - protein, 43 aa, Setaria italica
  Transcript Sequence Number=SeqID_45182
THKISFRQKNFAPPIDIPIVTNICNTEALNLGYAASPSPVQCN

SEQ ID NO: 111157 - protein, 137 aa, Setaria italica
  Transcript Sequence Number=SeqID_45183
  Homolog annotation: Hit_ID=B4FDM5; Match level="QueryCoverage=94%, HitCoverage=34%, E-value=5e-57, Identity=71%"; Hit description=ENT domain containing protein
FYEAVITDYDAAKDLYALVYDMNTAHETWEWVDFKEMAPEDVRWEGAGRGRGPQKNSFKKDYPPSQNGVGKKSSDYIEILHTETLIKEVERVFTAGNPDPLEMERAKKVLKEHEQSLIDAIARLAEASDVEGGKCSA

SEQ ID NO: 111158 - protein, 54 aa, Setaria italica
  Transcript Sequence Number=SeqID_45184
  Homolog annotation: Hit_ID=B4FDM5; Match level="QueryCoverage=100%, HitCoverage=11%, E-value=8e-18, Identity=83%"; Hit description=ENT domain containing protein
MDYGGAVDSSGTDDDLPPSYQNSRGMKGSGRMTGNGRDTIAAGPYTRVQPQTDM

SEQ ID NO: 111159 - protein, 459 aa, Setaria italica
  Transcript Sequence Number=SeqID_45185
  Homolog annotation: Hit_ID=B4FDM5; Match level="QueryCoverage=98%, HitCoverage=98%, E-value=0.0, Identity=75%"; Hit description=ENT domain containing protein
  Pfam annotation: Domain name=ENT; Domain location=54-127; Score =162.1; E_value=1.6e-45; Accession=PF03735.6; Description=ENT domain
  Pfam annotation: Domain name=LBR_tudor; Domain location=241-295; Score=21.6; E_value=0.00087; Accession=PF09465.2; Description=Lamin -B receptor of TUDOR domain
  Pfam module annotation: Pfam domain module=ENT::LBR_tudor; Domain location=54-127::241-295
LCLKVPVDSSGTDDDLPPSYQNSRGMKGSGRMTGNGRDTIAAGPYTRVQPQTDMETQIHQLEQEAYCSVLRAFKAQSDAITWEKESLITELRKELRVSDKEHRELLNRVNSDDIIRRIREWRESTGGLQMNSVNNAQRLHDPMPSPTTSARKRQKISQPIPSASVPAPSAMHSQPLAAPMQPSSSGAKKAAPPGTKVKKTKPGQKIPVGPAVKPMPTSTGPSGRGPAINRNTSAGLPPEGPQLNPLIGRKVMTRWPDDNSFYEAVITDYDAAKDLYALVYDMNTAHETWEWVDFKEMAPEDVRWEGEEPDLNLLGRGAPIHGIKKSTSRGGHMSGAGRGRGPQKNSFKKDYPPSQNGVGKKSSDYIEILHTETLIKEVERVFTAGNPDPLEMERAKKVLKEHEQSLIDAIARLAEASDVEGDDHARPLEYNRGWRNQHGGRYADDMGIDGLMAGDADAM

SEQ ID NO: 111160 - protein, 73 aa, Setaria italica
  Transcript Sequence Number=SeqID_45186
  Gene Ontology: Mol. function=metal ion binding
  Homolog annotation: Hit_ID=B6T6D5; Match level="QueryCoverage=79%, HitCoverage=22%, E-value=2e-22, Identity=87%"; Hit description =Protein binding protein
  Pfam annotation: Domain name=zf-C3HC4; Domain location=6-45; Score =34.7; E_value=3.8e-07; Accession=PF00097.17; Description=Zinc finger, C3HC4 type (RING finger)
SRKGSVICQMEYRRGNLQMTLPCKHVYHASCVTRWLSINKVCPVCFAEVPGEGTQEAMSYPSCGLHEVVSLQS

SEQ ID NO: 111161 - protein, 78 aa, Setaria italica
  Transcript Sequence Number=SeqID_45187
ILHMPFVVIDQRLLWNSLKLTQICGLQFAWAHFVCELKISVEKKTIDVEHVMMYGFPIFLCKHTIIPASCAKKTHAHL

SEQ ID NO: 111162 - protein, 130 aa, Setaria italica
  Transcript Sequence Number=SeqID_45188
FTIISGGSCWPTTSATAYSCFEWKGKGAILVSLISADIVPMPIHRKLVLVLLKEVYDGPRLYPKHFLGHFCALKGPCMNMNPQFHSRLPCSSQYHCTGPPKMRFLLFSGVLGPPGPALCFHLVPLWHLCF

SEQ ID NO: 111163 - protein, 96 aa, Setaria italica
  Transcript Sequence Number=SeqID_45189
  Pfam annotation: Domain name=DUF538; Domain location=25-77; Score= -34.2; E_value=0.011; Accession=PF04398.4; Description=Protein of unknown function, DUF538
MSSQAIEDRSGSVVVEGRRELCAQKSREFMVELGLPDGLLPLPALDEVGYNRSTGFVWLRQAAGLGRAFPVTAFQLNPPAEGDKKEEGDAGAATNN

SEQ ID NO: 111164 - protein, 157 aa, Setaria italica
  Transcript Sequence Number=SeqID_45190
  Gene Ontology: Mol. function=protein binding; Cellular component =apoplast
  Pfam annotation: Domain name=DUF538; Domain location=25-140; Score =175.1; E_value=2e-49; Accession=PF04398.4; Description=Protein of unknown function, DUF538
MSSQAIEDHRSGAEVHAGRELCAQKSREFMVELGLPDGLLPLPALDEVGYNRSTGFVWLRQAAGVTHTFDTIGKQVWYDKEVTAFVEPGRMSGLTGVKSKELLIWVTISEIVVSPSGTKVVFRTPAGLGRAFPVTAFQLNPPAEGDQEGGGRRRCRH

SEQ ID NO: 111165 - protein, 81 aa, Setaria italica
  misc_feature (18)..(18): Xaa can be any naturally occurring amino acid
  Transcript Sequence Number=SeqID_45191
  Gene Ontology: Mol. function=protein serine/threonine kinase activity; Biological process=protein amino acid phosphorylation
  Homolog annotation: Hit_ID=B6TP94; Match level="QueryCoverage=88%, HitCoverage=13%, E-value=6e-22, Identity=68%"; Hit description =Serine/threonine-protein kinase RIO1
GVPVMPVIDLFNFVVDQXIADEDVDAYLEKVQQKIVENGGAVPNDDEITPTVMVQVRLICHLHSCSMNLVSIINILSGRSC

SEQ ID NO: 111166 - protein, 576 aa, Setaria italica
  Transcript Sequence Number=SeqID_45192
  Gene Ontology: Mol. function=protein serine/threonine kinase activity; Biological process=protein amino acid phosphorylation
  Homolog annotation: Hit_ID=B6TP94; Match level="QueryCoverage=80%, HitCoverage=86%, E-value=0.0, Identity=86%"; Hit description =Serine/threonine-protein kinase RIO1
  Pfam annotation: Domain name=RIO1; Domain location=187-375; Score =377.5; E_value=2.3e-110; Accession=PF01163.14; Description=RIO1 family
MQLTSSPPSSSIPMAHVKSDAEEHVKSDAEEWSDSDLDDASDSEVGDALDWLDAVEGPDGSARPAGAFSASGCGAVARRPNAHGGVLSRPFQPLSNRTQKLASHIRAAPLEEWEGRMNVGMSNSVTTAIRDSIRGTAIGKIRNTEKADRATVEQAIDPRTRMVLFKMLNRGVFDNINGCISTGKEANVYHATKTDGQELAIKVYKTSVLVFKDRDRYVQGDYRFRYGYCKHNPRKMVKTWAEKEMRNLMRVRAADIRCPKPLLLRLHVLVMEFIGKGGWAAPRLKDAALSDDKLRESYFEIITIMRTLYQKCKLVHGDLSEYNVLYFEGHLYIIDVSQSVDLDHPSALDFLKEDCLHVSDFFKKRGVPVMPVIDLFNFVVDQNIADEDVDAYLEKVQQKIVENGGAVPNDDEITPTVMVQTLDYMKQCEADIVNMSMMQRSSSGYEPPADKLYDQPLLGFVRTKNVHTEKQQDRLPQNTAEAHLDLQNKCALELQNRCSLENLAEGEEDDSESCSSSDEDDSWHEADPKLGPEERKAARKANKKKVKEEKREARKTKKPKAEKKKRKKMAKAKCKR

SEQ ID NO: 111167 - protein, 188 aa, Setaria italica
  Transcript Sequence Number=SeqID_45193
  Gene Ontology: Mol. function=zinc ion binding; Cellular component =integral to membrane
  Pfam annotation: Domain name=zf-RanBP; Domain location=127-156; Score= 30.0; E_value=9.5e-06; Accession=PF00641.10; Description=Zn-finger in Ran binding protein and others
HHVVGFSGVLFGMKAVLGTWPDSFMWIPGMVIPAKYAVWAELFLTRALIPKSSFLGHLGGLLAGYVYIWLKRAFKGRDPFTLLISGGARVVTSQVRFAQKLLRSVLPQGHKTGGGRVGCHSSARECPPGLWRCSTCTNYNSLATDVCEMCSTMREDRAFPQGQHHQAWRNGELSVEEMRRRRLDRLDR

SEQ ID NO: 111168 - protein, 109 aa, Setaria italica
  Transcript Sequence Number=SeqID_45194
  Gene Ontology: Mol. function=DNA binding; Cellular component=nucleus; Biological process=regulation of transcription
  Homolog annotation: Hit_ID=B6T3P6; Match level="QueryCoverage=100%, HitCoverage=36%, E-value=2e-59, Identity=97%"; Hit description=P -type R2R3 Myb protein
  Pfam annotation: Domain name=Myb_DNA-binding; Domain location=14-61; Score=50.6; E_value=6e-12; Accession=PF00249.23; Description=Myb -like DNA-binding domain
  Pfam annotation: Domain name=Myb_DNA-binding; Domain location=67-109; Score=34.1; E_value=5.7e-07; Accession=PF00249.23; Description=Myb -like DNA-binding domain
  Pfam module annotation: Pfam domain module=Myb_DNA-binding::Myb_DNA -binding; Domain location=14-61::67-109
GRAPCCDRTKGLKKGPWTPEEDKLLVDYIQANGHGSWRLLPKLAGLNRCGKSCRLRWTNYLRPDIKRGPFSPEEQKSIVQLHAIVGNKWSMIAAQLPGRTDNEIKNYWN

SEQ ID NO: 111169 - protein, 36 aa, Setaria italica
  Transcript Sequence Number=SeqID_45195
KLTSVMVPMLQIHVHWVTLVQWFPCLMHINCTNKEG

SEQ ID NO: 111170 - protein, 68 aa, Setaria italica
  Transcript Sequence Number=SeqID_45196
  Subcellular localization annotation: CTP_CleavageSite=28; ConfidenceScore=5.05e-01
LRLCNSFGLALSSYISFIFTYSQLISVSVMALRSTLLILQSMKIELCREVWVLCKTRLFGLINVEAVC

SEQ ID NO: 111171 - protein, 237 aa, Setaria italica
  Transcript Sequence Number=SeqID_45197
LISTSTSRIMEPTSFPYCSRGGRGRQRSLGTSDADPGRGVRPPWIHAEKIALLGPKLQSFMASHAAADFGPFVVVCLLSNRDQIIQYDLLQLRRLGEYVRGELLRGAYAPLDLNSSSDKCNLQVRLAAGDYKEIVVSEGDGSIRLPLVQTSPFLRTPTKIFSQRQASTTHSTEHEFTNQEACRSGRGQRTAPNMNSRIRKPVDLAGDSEGSRLVEGSSSTGSSRAWPCGAPWPSRPA

SEQ ID NO: 111172 - protein, 84 aa, Setaria italica
  misc_feature (35)..(35): Xaa can be any naturally occurring amino acid
  Transcript Sequence Number=SeqID_45198
  Gene Ontology: Mol. function=oxidoreductase activity; Cellular component=peroxisome; Biological process=metabolic process
  Homolog annotation: Hit_ID=B6TQ98; Match level="QueryCoverage=85%, HitCoverage=62%, E-value=2e-25, Identity=81%"; Hit description =Peroxisomal multifunctional enzyme type 2
HPPDVPYGGGFKQKLSVDKEIFVGDLKKGEVTKGXPDATISFSDNDFLVIASGKTNPQIAFIRGAIKIKGSISAAQKFTPDIFP

SEQ ID NO: 111173 - protein, 88 aa, Setaria italica
  Transcript Sequence Number=SeqID_45199
RPHQKAGSTFAAVIQLVLGHFFISPHINNSNHAPISLCKHLKSGTGNILPTPILFFLNIGDLWSLRQQLPCLHEMLLLCTTFCVCVIL

SEQ ID NO: 111174 - protein, 82 aa, Setaria italica
  Transcript Sequence Number=SeqID_45200
HICVLAITLHIIDCNLLCLLCHYLPEPYSRQNSCQNLPDHSFPLLCYELIMELKYKGKATLLMESSSVLLLCKLIRKQCFEV

SEQ ID NO: 111175 - protein, 96 aa, Setaria italica
  Transcript Sequence Number=SeqID_45201
RGCWLLILLIPDVRWWSAATVALSCKESGVARRKGRVAAAASGGMEWVCTGEIKLGYKREGLSASAGLSGHLKQKADGLLIPNFLQFSFFFSFTVY

SEQ ID NO: 111176 - protein, 68 aa, Setaria italica
  misc_feature (40)..(68): Xaa can be any naturally occurring amino acid
  Transcript Sequence Number=SeqID_45202
QKIRGALGTLEILGQAPLLLRTTLAHTTHTKLPTKKGKPXXXXXXXXXXXXXXXXXXXXXXXXXXXXX

SEQ ID NO: 111177 - protein, 513 aa, Setaria italica
  Transcript Sequence Number=SeqID_45203
  Gene Ontology: Biological process=culmination during sorocarp development
VQTSIFPYSLVDELVAEDYRALAGSGPAEAVYIYLLDLGSQPRPYGYTAAASGTDASSPGYSRCLGPMWAGKDRYIWIDLGAGPVNYGPALSGDGVLPRGEFHPLATLHGRPKAEKALLADLASLVLGAYKSLLVPSLRIPVYYENSLLIRRVHIYGDRKEPEGLDFHVIEQSIRDGDLPYSGQSLKFDLHTVRYSECPICSFAIARSTNSFTSRFLFANYTLIVNEYLDSKRLRQVLSDSSDEIHRLAGVHDNDEHDKVVPVFVFDLDYDKLLPLDRYHQAVAFGDMVVAVRTRSSQTVSDYTCNGRHVLTMTRNLERPIIGSVLQSMWGVSPTHQSWSPDHNATVVDYTWSTGHTPFGPFSETKSLSFVQKDAARRNVLLTTLNFTITSTINVLESMAAHGGENILLRKKRHVEFIQRWNLLTYKLEKVVSAMSRLDYEKAMYLLRSSDHDLYEIHSLVYQASQELEATLVCFKDPPFPWVSVSMSGVFVFGFFYVYSKRDKLFRSKRKQF

SEQ ID NO: 111178 - protein, 40 aa, Setaria italica
  Transcript Sequence Number=SeqID_45204
LDVRWRVLKDKSSEDSKLVLSKAVAIFHVSFCHFILDINL

SEQ ID NO: 111179 - protein, 87 aa, Setaria italica
  Transcript Sequence Number=SeqID_45205
  Gene Ontology: Mol. function=ligase activity
  Homolog annotation: Hit_ID=Q9LMC5; Match level="QueryCoverage=67%, HitCoverage=11%, E-value=3e-11, Identity=51%"; Hit description =F14D16.17
MMLTPSAGAVMFLFEGSFGAVLHTGDCRLTLDYLSALMPLLACRIDYLFLDCTFARCPLQFPTRRTPSALPEVPRRCFHGSSGGSIY

SEQ ID NO: 111180 - protein, 72 aa, Setaria italica
  Transcript Sequence Number=SeqID_45206
  Gene Ontology: Mol. function=metal ion binding
  Homolog annotation: Hit_ID=Q5VMF2; Match level="QueryCoverage=95%, HitCoverage=6%, E-value=8e-24, Identity=71%"; Hit description=PHD zinc finger protein-like
CSNTVVSAGLFRIMGSEIAELPLVATSRDSQGLGYFQALFACIERLLASLEVKHFVLPAAEEAESIWTERLG

SEQ ID NO: 111181 - protein, 159 aa, Setaria italica
  misc_feature (25)..(25): Xaa can be any naturally occurring amino acid
  Transcript Sequence Number=SeqID_45207
  Gene Ontology: Mol. function=ligase activity
  Homolog annotation: Hit_ID=Q9LMC5; Match level="QueryCoverage=61%, HitCoverage=17%, E-value=2e-18, Identity=49%"; Hit description =F14D16.17
TQLHRVAFVELEAGAPPLRVPPTRXNFTVTAFDANHFLGAVMFLFEGSFGAVLHTGDCRLTLDYLSALMPLLACRIDYLFLDCTFARCPLQFPTKKDSICKAALQAPRIMSLNNNPYFSGPYRKNIVVVVLSDLHELDRTYTIWILYFSGPVLFGYCRT

SEQ ID NO: 111182 - protein, 254 aa, Setaria italica
  Transcript Sequence Number=SeqID_45208
  Gene Ontology: Mol. function=ligase activity
  Homolog annotation: Hit_ID=Q9LMC5; Match level="QueryCoverage=53%, HitCoverage=26%, E-value=2e-26, Identity=45%"; Hit description =F14D16.17
  Subcellular localization annotation: CTP_CleavageSite=19; ConfidenceScore=5.24e-01
PSPAGAPFTPSGPTPPFALAAAAHSPRCPLLLPLPPSDPPPLPPPPTSLGQGSLPWSTYERCNPGRPHIHPAPWGKATVSSSGSSLRVVDLSRSWGFSTPTSSLKCHRFLTHALVYASLLTILIALRIFPQLHRVAFVELEAGAPPLRVPDPDSDFTVTAFDANHFLGAVMFLFEGSFGAVLHTGDCRLTLDYLSALMPLLACRIDYLFLDCTFARCPLQFPTKKDSICKAALQAPRIMSLNNNPYFSGPYRIA

SEQ ID NO: 111183 - protein, 462 aa, Setaria italica
  misc_feature (8)..(8): Xaa can be any naturally occurring amino acid
  Transcript Sequence Number=SeqID_45209
  Gene Ontology: Mol. function=metal ion binding
  Homolog annotation: Hit_ID=B9S0A5; Match level="QueryCoverage=98%, HitCoverage=53%, E-value=1e-145, Identity=55%"; Hit description=DNA binding protein, putative
  Pfam annotation: Domain name=PHD; Domain location=101-144; Score =55.2; E_value=2.6e-13; Accession=PF00628.21; Description=PHD-finger
  Pfam annotation: Domain name=PHD; Domain location=189-247; Score=7.2; E_value=0.0043; Accession=PF00628.21; Description=PHD-finger
  Pfam module annotation: Pfam domain module=PHD::PHD; Domain location =101-144::189-247
TRKDKGLXHRWFSMSGVLPEGTNVGYFVGGKRLLEGYIKELGIYCHCCDTVVSPSQFEAHAGRAARRKPYHNIYMSNGVSLHELSISLLKGQKTNRQSDDLCSICSDGGQLLLCDTCPRAFHRECVSLFANPKGTWCCRYCENRQQRESCLAYNNNAIAAGRIEGADPLAEIFTRSIRVATSLATGFGGCALCKLHDFSKKKFSTRTVLLCDQCGREYHVGCLKEHNMADLTALPEGAWYCSTDCVRINQKLQDLLNRGGEPVPTMDLDVIKKKREEKGLDEDADLDVRWRVLKDKSSEDSKLVLSKAVAIFHETFDPIIQIATGRDLIPAMVYGRSARDQDYTGMYCAVLTVRNTVVSAGLFRIMGSEIAELPLVATSRDSQGLGYFQALFACIERLLASLEVKHFVLPAAEEAESIWTERFGFTKISQDELREYLKGGRTTVFQGTSTLHKLVPLPEREC

SEQ ID NO: 111184 - protein, 66 aa, Setaria italica
  Transcript Sequence Number=SeqID_45210
GIELSDEEVEDPMLIEPHAIRSGSETRRPCHGWLTESEDEEEQTSEQHELHLPESRRRLDLQKKVA

SEQ ID NO: 111185 - protein, 140 aa, Setaria italica
  Transcript Sequence Number=SeqID_45211
  Gene Ontology: Mol. function=protein kinase activity; Cellular component=integral to membrane; Biological process=protein amino acid phosphorylation
  Homolog annotation: Hit_ID=Q9LN98; Match level="QueryCoverage=99%, HitCoverage=36%, E-value=1e-27, Identity=37%"; Hit description =F5O11.21
  Pfam annotation: Domain name=LRR_1; Domain location=115-137; Score =10.8; E_value=2.7; Accession=PF00560.25; Description=Leucine Rich Repeat
  Pfam annotation: Domain name=LRR_1; Domain location=18-40; Score =10.2; E_value=3.5; Accession=PF00560.25; Description=Leucine Rich Repeat
  Pfam annotation: Domain name=LRR_1; Domain location=42-64; Score =10.4; E_value=3.1; Accession=PF00560.25; Description=Leucine Rich Repeat
  Pfam annotation: Domain name=LRR_1; Domain location=66-89; Score =11.9; E_value=1.6; Accession=PF00560.25; Description=Leucine Rich Repeat
  Pfam annotation: Domain name=LRR_1; Domain location=91-113; Score =8.0; E_value=9.1; Accession=PF00560.25; Description=Leucine Rich Repeat
  Pfam module annotation: Pfam domain module=LRR_1::LRR_1::LRR_1::LRR _1::LRR_1; Domain location=115-137::18-40::42-64::66-89::91-113
SSNDFDGEIPSITTCGSKFSYLDASGNRLTGPVPESVVNCRNLRVLDLGANALAGVVPPVIGTLRSLSVLRLAGNADISGSIPAELGGIEMLVTLDLAGLNLTGEVPGSLSQCKFLLELNLSGNKLQGAIPGTLDTSATE

SEQ ID NO: 111186 - protein, 172 aa, Setaria italica
  Transcript Sequence Number=SeqID_45212
  Gene Ontology: Mol. function=transferase activity, transferring glycosyl groups; Cellular component=integral to membrane; Biological process=cell wall organization and biogenesis
  Homolog annotation: Hit_ID=Q67VS7; Match level="QueryCoverage=100%, HitCoverage=32%, E-value=8e-90, Identity=88%"; Hit description =Probable mannan synthase 9
DFLQRAVPFLVHNPDLALVQARWKFVNADECLMTRMQEISLDYHFTVEQEVGSSTYAFFGFNGTAGVWRISALNEAGGWKDRTTVEDMDLAVRASLKGWKFVFLGDLMVKNELPSTLKAYRYQQHRWSCGPANLFRKMLMEIVRNKKVTLWKKIHVIYNFFLVRKIIAHIVT

SEQ ID NO: 111187 - protein, 57 aa, Setaria italica
  Transcript Sequence Number=SeqID_45213
SVLLKHLDDILQTGYPDMGNHAVASSSQAISFVGSQHPDHTTQAGAVAQTTNGLMGL

SEQ ID NO: 111188 - protein, 299 aa, Setaria italica
  Transcript Sequence Number=SeqID_45214
  Gene Ontology: Mol. function=zinc ion binding; Cellular component =nucleus; Biological process=regulation of transcription, DNA -dependent
  Homolog annotation: Hit_ID=Q7XTS2; Match level="QueryCoverage=90%, HitCoverage=28%, E-value=3e-49, Identity=36%"; Hit description =OSJNBa0008M17.13 protein
  Pfam annotation: Domain name=SWIM; Domain location=125-172; Score =27.5; E_value=5.5e-05; Accession=PF04434.9; Description=SWIM zinc finger
VAQQAVHGKEKWALPYQRTIFSADMLTTLQKDNMINELKRELSEQEDILQFFRRYEAILEEHRSKKLHADVDGNQVTLPIPSLRMLKQSSNAYTPEAFKMFQGEFEAYMNCMSFPCGVVGTISEYKIVLDEKPSESIVKFDALDGSASCSCKKFEAVGIQCCHVLKVLDLKNIKELPEQYILKRWRKDARSVQIGEEPTYGSGSVMRSPSEARFNNMCRLASLIASRAAKSEEAMSYIESQSSVLLKHLDDILQTGYPDMGNHAVASSSQAISFVGSQHPDHTTQAGAVAQTTNGLMGL

SEQ ID NO: 111189 - protein, 45 aa, Setaria italica
  Transcript Sequence Number=SeqID_45215
  Gene Ontology: Mol. function=binding
  Homolog annotation: Hit_ID=B9REU1; Match level="QueryCoverage=100%, HitCoverage=2%, E-value=2e-13, Identity=84%"; Hit description =Guanine nucleotide-exchange, putative
MAFTAALEADLRALSAEARRRHPAVKDAAEHAILKLRSLSGPSEI

SEQ ID NO: 111190 - protein, 135 aa, Setaria italica
  Transcript Sequence Number=SeqID_45216
  Gene Ontology: Mol. function=transferase activity, transferring glycosyl groups; Cellular component=cell wall
  Homolog annotation: Hit_ID=B9RDP9; Match level="QueryCoverage=91%, HitCoverage=11%, E-value=5e-27, Identity=47%"; Hit description =Synaptotagmin, putative
  Pfam annotation: Domain name=C2; Domain location=4-83; Score=16.9; E _value=0.0043; Accession=PF00168.22; Description=C2 domain
  Subcellular localization annotation: CTP_CleavageSite=55; ConfidenceScore=5.28e-01
FPFPADKGPLAIGRFPELFVRAQVGNQIMRTRPAPMVSTRGPSSPFWNEDLMFVVAEPFEEFLVLSVEDRVSPGRDELLGRLVVPVSTIERRWDWKPVVSRWFGLDRGTGGGNVSGSNVHRFGSRRMHLRLSLDG

SEQ ID NO: 111191 - protein, 151 aa, Setaria italica
  Transcript Sequence Number=SeqID_45217
  Gene Ontology: Mol. function=nucleic acid binding
  Homolog annotation: Hit_ID=B6TT30; Match level="QueryCoverage=69%, HitCoverage=52%, E-value=9e-44, Identity=83%"; Hit description=RNA -binding region RNP-1
GSAQTSRLRSIRRLRSPRLGLLTSADPLHSISPYHSLRLLFYGNIQEQAPKNYADFEEKVKRTIYVEHLSPQVTIQVIKAALAQCANVVNVEFIVNYTIPYDIPYAALVELDDHMQAKAAVELMGDFPFIIGGMPRPVKATHAKAEMFRDP

SEQ ID NO: 111192 - protein, 84 aa, Setaria italica
  Transcript Sequence Number=SeqID_45218
QLVIIVLVLCLQLPGLKEYSAFIGEVFDGPVKKIIEAGGLLQIPDQRYLLQMLGAECRLGCRRSSLCSGYDFFQYPASLPEDGT

SEQ ID NO: 111193 - protein, 194 aa, Setaria italica
  Transcript Sequence Number=SeqID_45219
TARIESYAVSGRHILLSAAAGCPVAGTVAFDASAEEWHFVDRERSLPFVGEAVPYGRLFLGRSRSKDSKDLTAYDIAVTKKGTDRTLAIVEVPLTFVMAGDSPVMSGQFFSCLGNGVVCAMGCLTEGTSRDVEIDDDELYIHLYSPVSAEEGEAEAQQGVTVLSSKGSRYHLRLHEPLCRLVAPTLVAAPCVAI

SEQ ID NO: 111194 - protein, 413 aa, Setaria italica
  Transcript Sequence Number=SeqID_45220
  Gene Ontology: Mol. function=hydrolase activity; Cellular component =membrane; Biological process=auxin mediated signaling pathway
  Homolog annotation: Hit_ID=B6SKJ2; Match level="QueryCoverage=95%, HitCoverage=95%, E-value=1e-160, Identity=77%"; Hit description =Nodulin-like protein
  Pfam annotation: Domain name=DUF6; Domain location=247-374; Score =50.2; E_value=7.8e-12; Accession=PF00892.12; Description=Integral membrane protein DUF6
  Pfam annotation: Domain name=DUF6; Domain location=55-188; Score =38.4; E_value=2.8e-08; Accession=PF00892.12; Description=Integral membrane protein DUF6
  Pfam module annotation: Pfam domain module=DUF6::DUF6; Domain location=247-374::55-188
MGRGAEAEDDAAGEGKPTLLQRWSSSVWAVSGSGRLMWARNEAWQAHAGMAFVQVSYGGYHVLTKSVLNVGMNQIVFCVYRDLVALALLAPIAFLRERNVRRPVTRQLLALFALLGFTGIFGNQLLFLLGLSFTNASYAAAFQPAIPVFTFLLAAIVGVEVINIFTKDGFVKVLGTAVCVSGAVLMAIYRGPSLIGMVSTIAADGNALAGTRSSNAYSAQWLTTAMLRYGVETWHLGVVCLIGNCFLMGAYLVIQAPVLIKYPASLSLTAYSYSFATLFMVLTGAFATNGLHEWALTTTEVIAVLYAGIIASCVNYAIMTWANKILGPSLVALYNPLQPACSTLLSTIFLGTPIYVGSVAGGLFIIAGLYLVTWARYNEAQRVLTASYLRPLLVEDPPTAKAEGGSFSGSIDP

SEQ ID NO: 111195 - protein, 72 aa, Setaria italica
  Transcript Sequence Number=SeqID_45221
FSLGKSLMVTLLIIKTVRQMILQMRCKKQLVNLKSSYVMSCAICFPWTISKLISQSSVFISVASFHFDPVSA

SEQ ID NO: 111196 - protein, 142 aa, Setaria italica
  misc_feature (92)..(92): Xaa can be any naturally occurring amino acid
  Transcript Sequence Number=SeqID_45222
  Gene Ontology: Mol. function=hydrolase activity, hydrolyzing O -glycosyl compounds; Biological process=carbohydrate metabolic process
  Homolog annotation: Hit_ID=B4FSU9; Match level="QueryCoverage=97%, HitCoverage=24%, E-value=3e-37, Identity=55%"; Hit description =Hydrolase, hydrolyzing O-glycosyl compounds
  Subcellular localization annotation: CTP_CleavageSite=37; ConfidenceScore=5.10e-01
PVGAIAGMVVSLGFNCVRLTYPIALATNASLSSLTVRQSLLAHGLAETAGGVEVNNPGFLDLTLMESLKAVVNTLGEKDVMVILDNHVSKPXWCCGDDDGNGFFGDRDFDPDVWVDGLASMATIFADVPSVIGMSLRNERLP

SEQ ID NO: 111197 - protein, 99 aa, Setaria italica
  misc_feature (29)..(29): Xaa can be any naturally occurring amino acid
  misc_feature (55)..(55): Xaa can be any naturally occurring amino acid
  Transcript Sequence Number=SeqID_45223
  Homolog annotation: Hit_ID=Q5SMS6; Match level="QueryCoverage=91%, HitCoverage=21%, E-value=9e-35, Identity=80%"; Hit description =Fimbriata-like
MLAIRQECENPLSSLDAVVPDDILERIFXTFLPIASMIRATAVCKRWYGIIYSRXRFLWTHMMPQRPWYFMFTSNETAAGYAFDPILRKWYDLELLLSI

SEQ ID NO: 111198 - protein, 114 aa, Setaria italica
  Transcript Sequence Number=SeqID_45224
  Gene Ontology: Mol. function=sequence-specific DNA binding; Cellular component=nucleus; Biological process=regulation of transcription, DNA-dependent
  Homolog annotation: Hit_ID=B6U143; Match level="QueryCoverage=89%, HitCoverage=21%, E-value=5e-54, Identity=98%"; Hit description=BEL1 -related homeotic protein 13
  Pfam annotation: Domain name=Homeobox; Domain location=32-90; Score= -1.5; E_value=0.016; Accession=PF00046.21; Description=Homeobox domain
TLADRERSWESAFIQKHWALRQLRRGDQQSWRPQRGLPEKSVAVLKAWMFENFLRPYPKDNEKEMLAARSGLSRSQVSNWFINARVRLWKPMIEEMYEDLKKASGSGGDEGVAA

SEQ ID NO: 111199 - protein, 226 aa, Setaria italica
  Transcript Sequence Number=SeqID_45225
  Gene Ontology: Mol. function=sequence-specific DNA binding; Cellular component=nucleus; Biological process=regulation of transcription, DNA-dependent
  Homolog annotation: Hit_ID=B6T709; Match level="QueryCoverage=96%, HitCoverage=96%, E-value=1e-94, Identity=81%"; Hit description=MADS -box transcription factor 56
  Pfam annotation: Domain name=K-box; Domain location=72-172; Score =70.9; E_value=4.7e-18; Accession=PF01486.9; Description=K-box region
  Pfam annotation: Domain name=SRF-TF; Domain location=9-59; Score =113.0; E_value=9.6e-31; Accession=PF00319.10; Description=SRF-type transcription factor (DNA-binding and dimerisation domain)
  Pfam module annotation: Pfam domain module=K-box::SRF-TF; Domain location=72-172::9-59
MVRGKTQMKRIENPTSRQVTFSKRRNGLLKKAFELSVLCDAEVALVVFSPRGKLYEFANGSVQKTIERYRAYTKDNVSSKTVQQDIEQVKADAEGLAKKLEALEAYKRKLLGEKLEECSIEELHSLEVKLEKSLHCIRGRKTQLLEEQVNKLKEKELTLRKNNEDLREKCKNQPPLQPTPPARAVITVEDDHPEQNDDAMDVETELYIGLPGMDHRRNKAAAVRSA

SEQ ID NO: 111200 - protein, 69 aa, Setaria italica
  Transcript Sequence Number=SeqID_45226
DIRSADKSSNSSLFVGSKLTERLILPTENSSDAQATSRAPILNTYPKLNITIQKFKFQHGLPRMATVSL

SEQ ID NO: 111201 - protein, 53 aa, Setaria italica
  Transcript Sequence Number=SeqID_45227
  Gene Ontology: Mol. function=catalytic activity
  Homolog annotation: Hit_ID=Q10AR1; Match level="QueryCoverage=81%, HitCoverage=3%, E-value=1e-11, Identity=74%"; Hit description =Pentatricopeptide, putative, expressed
KEAGESWIEVKNEVHTFVARDTSHPDSASIYQMLAELVDVMQDAGLDVRMQVL

SEQ ID NO: 111202 - protein, 51 aa, Setaria italica
  Transcript Sequence Number=SeqID_45228
VQSQDPDSPKEKERLCWSSLSNQDEFRNLNTIKFSSFQIKPNRSTKCMYIS

SEQ ID NO: 111203 - protein, 107 aa, Setaria italica
  Transcript Sequence Number=SeqID_45229
CHLWPPSLPWSYICSEGNQAEQAGGLPTRSKMTSTVSLGRFLACNEVCYDVTSIQNWANVSGHSEFQTCSAPTKSVDWAPNFSVGLQRYIFVMLRGFYCPVLQRNQL

SEQ ID NO: 111204 - protein, 134 aa, Setaria italica
  Transcript Sequence Number=SeqID_45230
  Gene Ontology: Mol. function=protein serine/threonine kinase activity; Cellular component=plasma membrane; Biological process =protein amino acid phosphorylation
  Homolog annotation: Hit_ID=Q7XL24; Match level="QueryCoverage=100%, HitCoverage=16%, E-value=3e-31, Identity=48%"; Hit description =OSJNBa0079M09.4 protein
SAYVKVQMLPPSSSKKINPTAYNIGVPVLVAVVCLLILMIRRIIVKRMEEDDPFKGVAGMPTRFSYKQLREATNNFSKKLGQGGFGPVYEGKLGNVKIAVKCLRDIGHGKEEFMAEVITIGSIHHINLVRLIGY

SEQ ID NO: 111205 - protein, 137 aa, Setaria italica
  Transcript Sequence Number=SeqID_45231
  Subcellular localization annotation: CTP_CleavageSite=33; ConfidenceScore=5.28e-01
SLCLPCLRHSSLPKVVLKKELSPSTSSIYQRMPSSSGQKKKLQPMEVTNASNMEDTGSTAKSQVSRKRSSDYLQQKAERNGAGKVEDNDSEDSGTSISKDQSKKKTRLKTVTYNRTNGIISKILVNKENTLDRTTKL

SEQ ID NO: 111206 - protein, 85 aa, Setaria italica
  misc_feature (44)..(44): Xaa can be any naturally occurring amino acid
  Transcript Sequence Number=SeqID_45232
  Gene Ontology: Mol. function=DNA photolyase activity; Biological process=DNA repair
  Homolog annotation: Hit_ID=Q70YK6; Match level="QueryCoverage=89%, HitCoverage=15%, E-value=2e-18, Identity=50%"; Hit description =Cryptochrome 2
NFGQKFLRAESSFLILSSCTRVVYNRLYDPISLVHDDKIKNELXENGQAFTTFNMYWEKCMNLPLDISQPLAPVRLVPVPGNFWP

SEQ ID NO: 111207 - protein, 101 aa, Setaria italica
  Transcript Sequence Number=SeqID_45233
  Homolog annotation: Hit_ID=Q2I7K8; Match level="QueryCoverage=99%, HitCoverage=40%, E-value=5e-16, Identity=41%"; Hit description =Cryptochrome 2 (Fragment)
  Subcellular localization annotation: CTP_CleavageSite=29; ConfidenceScore=5.24e-01
NNIRSFDIPKVVLKKELSPSTSSIYQRMPSSSGQKKKLQPMEVTNASNMEDTGSTAKSQVSRKRSSDYLQQKAERNGAGKVEDNDSEDSGTSISRPSKRAA

SEQ ID NO: 111208 - protein, 560 aa, Setaria italica
  Transcript Sequence Number=SeqID_45234
  Gene Ontology: Mol. function=DNA photolyase activity; Cellular component=nucleus; Biological process=DNA repair
  Homolog annotation: Hit_ID=A9Q6J0; Match level="QueryCoverage=100%, HitCoverage=87%, E-value=0.0, Identity=76%"; Hit description =Cryptochrome 2
  Pfam annotation: Domain name=DNA_photolyase; Domain location=1-95; Score=-5.8; E_value=2.1e-05; Accession=PF00875.10; Description=DNA photolyase
  Pfam annotation: Domain name=FAD_binding_7; Domain location=131-408; Score=368.5; E_value=1.2e-107; Accession=PF03441.6; Description=FAD binding domain of DNA photolyase
  Pfam module annotation: Pfam domain module=DNA_photolyase::FAD _binding_7; Domain location=1-95::131-408
TLAALLESVHSTGATRVVYNRLYDPISLVHDDKIKNELSALGISVQSFNGDLLYEPWEVYDENGQAFTTFNMYWEKCMNLPLDISQPLAPVRLVPVPGIDNVRGCSIDDLGLESSKDEESSNALLSRAWSPGWCNAENTLQEFVSYGLLEYSKHGMKVGGTTTSLLSPYLHFGELSVRKVYQLVKMHQVKCENEGKSEAEESVQLFLRSIGFREYSRYLCFNFPFTHERSLLGNLKHYPWRSDEDRFKSWRQGMTGYPLVDAGMRELWATGWTHNRIRVIVSSFAVKFLQIPWIWGMKYFWDVLLDADLESDILGWQYISGSLPDGHELSRLDNPEVQGQKYDPDGEYIRTWIPELARMPTEWIHCPWDAPSSILEVAGVELSFNYPKPIVELHMARECLDDAISTMWQLDTAAKLAELDGEVVEDNMNNIRSFDIPKVVLKKELSPSTSSIYQRMPSSSGQKKKLQPMEVTNASNMEDTGSTAKSQVSRKRSSGDSAFNVPSCSSSLIMHSRIPDPDSCFVLYSDYLQQKAERNGAGKVEDNDSEDSGTSISRPSKRAA

SEQ ID NO: 111209 - protein, 414 aa, Setaria italica
  Transcript Sequence Number=SeqID_45235
  Gene Ontology: Mol. function=transcription regulator activity; Cellular component=nucleus; Biological process=regulation of transcription
  Homolog annotation: Hit_ID=B9R996; Match level="QueryCoverage=91%, HitCoverage=94%, E-value=8e-96, Identity=48%"; Hit description =Activating signal cointegrator, putative
  Pfam annotation: Domain name=zf-C2HC5; Domain location=162-214; Score= 117.7; E_value=3.7e-32; Accession=PF06221.5; Description=Putative zinc finger motif, C2HC5-typ
MATSASTSGEWLKGALQELRERKGSELDFDADLVSSLVSFCELASPPDAASYLENFIGKEAAQDIIQEYLRRRGHIGSSNGTESSQSSNLQPYVKPSADAPTAQTKKQTRIQKDAASSSNQSSKSQPETGESRLASKRGPKKKAAKAISLAEAAKGSIVFKQGKPCSCQARQHNLVSNCLSCGKIVCEQEGEGPCSFCGALVLKEGSTYAGLSDVGLPLSEAEAAAEAYAKRLVDYDRNAAARTKVYDDQSDYFEMEGNSWLSSKEKSVLQKQQEEAQEAAENQKGKVVVTFDLVGRKVIMNKDGATELETEHPIMRPPEEKDQSHRIQPNPSIREQPVFIETGPVKPKTDRARQSKRLAKNGLCLEVTGRLQHDDKDLQSILSGKVKKGDHLAYSSFGQAREGNDVECSQDFD

SEQ ID NO: 111210 - protein, 67 aa, Setaria italica
  Transcript Sequence Number=SeqID_45236
ILVVPTFILPLDQKDRLFSLCCVQILTAEQVFMLRIQQRLLFCSATEILILFPLNFCSSRSLLVLEL

SEQ ID NO: 111211 - protein, 139 aa, Setaria italica
  misc_feature (88)..(88): Xaa can be any naturally occurring amino acid
  misc_feature (106)..(106): Xaa can be any naturally occurring amino acid
  misc_feature (129)..(129): Xaa can be any naturally occurring amino acid
  Transcript Sequence Number=SeqID_45237
  Gene Ontology: Mol. function=aspartic-type endopeptidase activity; Cellular component=chromatin; Biological process=RNA-dependent DNA replication
  Homolog annotation: Hit_ID=Q8S653; Match level="QueryCoverage=81%, HitCoverage=10%, E-value=3e-21, Identity=46%"; Hit description =Putative retroelement
  Pfam annotation: Domain name=Retrotrans_gag; Domain location=62-138; Score=23.8; E_value=0.00029; Accession=PF03732.9; Description =Retrotransposon gag protein
MSHTLPPRPPDPSCDARQSPIHFAHVPKLEFPKFNGENPRFWKDRCELYFDVCSVSDALKPHFVALNFDGPTAAWLQTFKVRGRVQSXEALHTVVCDRFDHDQYQXSKEHLDNLKQIGSVEEYHAKFEXLAHNILLYNS

SEQ ID NO: 111212 - protein, 127 aa, Setaria italica
  Transcript Sequence Number=SeqID_45238
LQNLSKEEAALLARMRRRTQFSRRGVRNLIALSVLGEVGAVVYAIIMTKSEDLDWQMRAIRVLPIFLLPALSSMIYSILVSFTRMCKYLRTLVGTFHIYPELFQICYSQSLNCNTFDDFHLHKVVRN

SEQ ID NO: 111213 - protein, 50 aa, Setaria italica
  Transcript Sequence Number=SeqID_45239
LVTSVILFLFISEYDERKLSILVVFTLVRTDATVFLEDYFLPSSFENSVK

SEQ ID NO: 111214 - protein, 150 aa, Setaria italica
  Transcript Sequence Number=SeqID_45240
  Gene Ontology: Mol. function=aspartyl esterase activity; Cellular component=cell wall; Biological process=cell wall modification
  Homolog annotation: Hit_ID=C1KET9; Match level="QueryCoverage=96%, HitCoverage=41%, E-value=3e-25, Identity=47%"; Hit description=Sal k 1 pollen allergen (Fragment)
  Pfam annotation: Domain name=Pectinesterase; Domain location=10-148; Score=-107.4; E_value=1.9e-13; Accession=PF01095.11; Description =Pectinesterase
AAEAGAVRYVVSADGKGKFRTINDAIKAVPENNKKRVILDIRPGTYKEKVLVPYTKHFITFLGDPKQPPVIMWDDTAATRGKDGLPVGTVGSATVAVESDYFLASGIVFRNHAPMAAPGAKGGQAVALRVFGTKAAFYNCTIDGGQGHPL

SEQ ID NO: 111215 - protein, 84 aa, Setaria italica
  Transcript Sequence Number=SeqID_45241
KFKEIFRYRPPHHVYVRAVRAPFSQSTLLDIVHRLTRLLKISYFLEFFYDFSFLKTHSTCSAMLAYYYCCCFPFLLCLLLPPSW

SEQ ID NO: 111216 - protein, 83 aa, Setaria italica
  Transcript Sequence Number=SeqID_45242
MGEFDDYWARAYRGDSGVPHSDPQRLVSTWTGAFALGAAACVHHHASALASNIKSLPATWQNMTMMLDQKRWKKVLEKKQQQA

SEQ ID NO: 111217 - protein, 66 aa, Setaria italica
  Transcript Sequence Number=SeqID_45243
  Gene Ontology: Mol. function=small conjugating protein ligase activity; Cellular component=cytoplasm; Biological process=ubiquitin- dependent protein catabolic process
  Homolog annotation: Hit_ID=Q337R4; Match level="QueryCoverage=98%, HitCoverage=35%, E-value=9e-32, Identity=96%"; Hit description =Ubiquitin carrier protein
  Pfam annotation: Domain name=UQ_con; Domain location=3-65; Score=3.3; E_value=2.2e-05; Accession=PF00179.18; Description=Ubiquitin -conjugating enzyme
FVEFKGPTESIYQGGVWKVRVELPDAYPYKSPSIGFINKIYHPNVDEMSGSVCLDVINQTWSPMFG

SEQ ID NO: 111218 - protein, 79 aa, Setaria italica
  Transcript Sequence Number=SeqID_45244
  Gene Ontology: Mol. function=small conjugating protein ligase activity; Cellular component=cytoplasm; Biological process=ubiquitin- dependent protein catabolic process
  Homolog annotation: Hit_ID=Q337R4; Match level="QueryCoverage=100%, HitCoverage=43%, E-value=1e-24, Identity=73%"; Hit description =Ubiquitin carrier protein
VFLPHLLLYPNPSDPLNGEAAALMMRDRPAYEQKVKEYCEKYAKPEDAGITPEDKSSDEELSEEEDDSGDEAILGNPDP

SEQ ID NO: 111219 - protein, 53 aa, Setaria italica
  Transcript Sequence Number=SeqID_45245
PWKKFAISATSQIMIVTWKSLSNQCMPIVLVVHCNSTQLRHIYAAMRIVECGC

SEQ ID NO: 111220 - protein, 283 aa, Setaria italica
  misc_feature (75)..(75): Xaa can be any naturally occurring amino acid
  Transcript Sequence Number=SeqID_45246
  Gene Ontology: Mol. function=DNA ligase (ATP) activity; Cellular component=intracellular; Biological process=response to DNA damage stimulus
  Homolog annotation: Hit_ID=Q01KE4; Match level="QueryCoverage=100%, HitCoverage=22%, E-value=1e-132, Identity=79%"; Hit description=DNA ligase
  Pfam annotation: Domain name=BRCT; Domain location=105-180; Score =48.2; E_value=3.1e-11; Accession=PF00533.18; Description=BRCA1 C Terminus (BRCT) domain
KSVIMSITSDIRTIKSEVFAAPYCLRFPRIQRLRYDKPWHECLDVQAFVDIVHSSNGTTQRVADDNSLENDNMKXLKNNQKGEKKKSVSIIPSHLMKTDVSGLKGETLIFANMIFYFVNIPSSYNLEYFHKLVVENGGSFSMNLNDSVTHCIAAEKKGIKYQAAIRQGRIIHYDWILDCCKEKRPLHLQPKYILYLADFARHKFPEEIDSYADYYYWDIDIADLKQIFSNIDKVAGDSNMVNQYKRKHCIDERFCFFQGCCVYLHNAPLVNVDYNLISDIALK

SEQ ID NO: 111221 - protein, 45 aa, Setaria italica
  Transcript Sequence Number=SeqID_45247
MAEEARRRAELARLRELHTLKGKVESVVKLKGLDLDDINNQHYTV

SEQ ID NO: 111222 - protein, 164 aa, Setaria italica
  Transcript Sequence Number=SeqID_45248
LNAVMEDTTGTMDVMTFDGLAWKLVGAAAEELAGEVTGKKISAVLRSRQSHSFVIDAANRCFVVKHIPNEDELQLIGSADVAAGGDPLLSEEEGSSVSYDSSPVKIVKKEKMVVKEESEVESGCESPQGGGSPASYSSSSPAKKEKVEIKEVRDPKKAEDHQRQ

SEQ ID NO: 111223 - protein, 108 aa, Setaria italica
  Transcript Sequence Number=SeqID_45249
  Gene Ontology: Cellular component=nucleus; Biological process =regulation of transcription, DNA-dependent
MSKWESVTFEESLSFVKKVKARDYMLYLSLLDVLNRTDQIPLEAYSELSLLFRHHEDLLAELSKFRPLPCPNSIYTHGSIWMIIFLMPFLLLSLVLAFQKPLKCFLLQ

SEQ ID NO: 111224 - protein, 85 aa, Setaria italica
  Transcript Sequence Number=SeqID_45250
IKGMEHVCPCFHNVSRILISTFLNIIGTHNGSAMTNCKFTSALEIVIRLPRIFAQLICIPKMHIHIYWFIIFQHLKKENLSLKKE

SEQ ID NO: 111225 - protein, 59 aa, Setaria italica
  Transcript Sequence Number=SeqID_45251
LPAPTNEMLLHKTHLLVFYFPCKLNTKVGTFYILLWGNWCVFGRQVVVHFKTFLIKTAS

SEQ ID NO: 111226 - protein, 130 aa, Setaria italica
  misc_feature (116)..(116): Xaa can be any naturally occurring amino acid
  Transcript Sequence Number=SeqID_45252
  Gene Ontology: Mol. function=signal transducer activity; Cellular component=plasma membrane; Biological process=response to light stimulus
  Homolog annotation: Hit_ID=B9SGZ1; Match level="QueryCoverage=99%, HitCoverage=26%, E-value=7e-49, Identity=71%"; Hit description =Signal transducer, putative
HVDDARFYLHKFPLLSKSSLLQRLIIEASQNGTDEVVIQDIPGGVKTFEICAKFCYGMVVTLNAYNVVATRCAAEYLGMTEDVEKSNLIFKMEVFLNSGIFRSWKDSIIALQTTDXALLPWSEELKLVGR

SEQ ID NO: 111227 - protein, 74 aa, Setaria italica
  Transcript Sequence Number=SeqID_45253
SKVRSPYCLADFIKCSSVSQQVGRVPYWQISVGTIIPWSSCPPGVVQLFYAREVLDAKLLSKLKDEVPCNQFVN

SEQ ID NO: 111228 - protein, 101 aa, Setaria italica
  Transcript Sequence Number=SeqID_45254
RSRCLSCHSVPQYRMQRDIRPGQGPFLLSMLLTCLRMWTWTWTYADAVAHHAGLPCARVRILASCLHVGLAFHAFSVRVSASLCWLLLIAECDLKPKNIKK

SEQ ID NO: 111229 - protein, 106 aa, Setaria italica
  Transcript Sequence Number=SeqID_45255
IHRKETTVAKSASLRFASPTMGRHSVEQGTLLGEGRFPGEIHRSDRGSRPVRCRRRRRGRTRRKMTAWIQRNQQWRSQSPCVAPTAGDTGGAIVAAANPSTPRAHL

SEQ ID NO: 111230 - protein, 57 aa, Setaria italica
  Transcript Sequence Number=SeqID_45256
MPSPRQFLQLLLPILLATCCVDGANGPDALATARRQLHQPFFPDQPAQPAAPPPFFP

SEQ ID NO: 111231 - protein, 174 aa, Setaria italica
  Transcript Sequence Number=SeqID_45257
  Gene Ontology: Mol. function=sucrose-phosphate synthase activity; Cellular component=plasma membrane; Biological process=sucrose metabolic process
  Homolog annotation: Hit_ID=Q6EZE8; Match level="QueryCoverage=92%, HitCoverage=15%, E-value=4e-79, Identity=88%"; Hit description =Sucrose-phosphate synthase
  Pfam annotation: Domain name=Glycos_transf_1; Domain location=1-139; Score=18.7; E_value=2.6e-05; Accession=PF00534.12; Description =Glycosyl transferases group 1
WGLYDLLLGAGDHYLGGVATVLTAVLKLIDRYDLYGQVAYPKHHNQTDVPHIYRLAAKTKGVFINPALVEPFGLTLIEAAAYGLPVVATKNGGPVDIIEALHNGLLVDPHDAAAITDALLSLLADKARWLECRRAGLRNIHRFSWPHHCRLYLSHVAASCDHPAPHQLLRVPAA

SEQ ID NO: 111232 - protein, 82 aa, Setaria italica
  Transcript Sequence Number=SeqID_45258
  Subcellular localization annotation: CTP_CleavageSite=35; ConfidenceScore=5.26e-01
NLEGQSTSTLPGQVAMHPSMKDTHCRNQHSNAFSLAMLVSVEGISARQDAFTVRNLLPVNVCPLGCYVVCTYYLCVAHLIQI

SEQ ID NO: 111233 - protein, 69 aa, Setaria italica
  Transcript Sequence Number=SeqID_45259
LVRTKGRIPDFMPCGQLALGFTFHLSAVVLRYKVSIQLVVLYWLWTWCVVWLMVLLVTNSTNCSGDAVT

SEQ ID NO: 111234 - protein, 74 aa, Setaria italica
  Transcript Sequence Number=SeqID_45260
  Gene Ontology: Mol. function=structural constituent of ribosome; Cellular component=ribonucleoprotein complex; Biological process =translation
  Homolog annotation: Hit_ID=B4FCG9; Match level="QueryCoverage=74%, HitCoverage=30%, E-value=7e-24, Identity=100%"; Hit description=60S ribosomal protein L11-1
  Pfam annotation: Domain name=Ribosomal_L5; Domain location=4-47; Score=23.5; E_value=6.4e-05; Accession=PF00281.11; Description =Ribosomal protein L5
LPTQLLEHLGGASEAITALAAKVLEQLSGQSPVFSKARYTVRSFGIRRNEKIACYVTVRGEKAMQLLESGLKVK

SEQ ID NO: 111235 - protein, 132 aa, Setaria italica
  Transcript Sequence Number=SeqID_45261
  Gene Ontology: Mol. function=structural constituent of ribosome; Cellular component=intracellular; Biological process=translation
  Homolog annotation: Hit_ID=B4FCG9; Match level="QueryCoverage=61%, HitCoverage=43%, E-value=2e-19, Identity=59%"; Hit description=60S ribosomal protein L11-1
  Pfam annotation: Domain name=Ribosomal_L5_C; Domain location=32-117; Score=26.3; E_value=8.7e-06; Accession=PF00673.13; Description =ribosomal L5P family C-terminus
KDDVEVHAVDTSRWVILDAKINVLLDTKPNKPVSLKFLLSSSYSLTFKPLSSSCIAFSPLTCHIARNLLITPDAGIYGMDFYVVLERAGYRVARRRRCKSRVGIQHRVTKEDAMKWFQVKYEGVILNKAQAN

SEQ ID NO: 111236 - protein, 180 aa, Setaria italica
  Transcript Sequence Number=SeqID_45262
  Gene Ontology: Mol. function=structural constituent of ribosome; Cellular component=ribonucleoprotein complex; Biological process =translation
  Homolog annotation: Hit_ID=B4FCG9; Match level="QueryCoverage=100%, HitCoverage=98%, E-value=1e-90, Identity=91%"; Hit description=60S ribosomal protein L11-1
  Pfam annotation: Domain name=Ribosomal_L5; Domain location=9-62; Score=99.7; E_value=9.7e-27; Accession=PF00281.11; Description =Ribosomal protein L5
  Pfam annotation: Domain name=Ribosomal_L5_C; Domain location=66-165; Score=217.5; E_value=3.5e-62; Accession=PF00673.13; Description =ribosomal L5P family C-terminus
  Pfam module annotation: Pfam domain module=Ribosomal_L5::Ribosomal_L5_ C; Domain location=9-62::66-165
MASEKKQSNPMREIKVQKLVLNISVGESGDRLTRAAKVLEQLSGQSPVFSKARYTVRSFGIRRNEKIACYVTVRGEKAMQLLESGLKVKEYELLRRNFSDTGCFGFGIQEHIDLGIKYDPSTGIYGMDFYVVLERAGYRVARRRRCKSRVGIQHRVTKEDAMKWFQVKYEGVILNKAQAN

SEQ ID NO: 111237 - protein, 93 aa, Setaria italica
  Transcript Sequence Number=SeqID_45263
QHQVDSRNLNLKWGILFPVLYVLITINIKRVCEINIRNECLQNFSLNTMTNHDQPTIHTPIVFVKPFVSLGLGVSRNTIHLFIYTLSSSACLI

SEQ ID NO: 111238 - protein, 276 aa, Setaria italica
  misc_feature (270)..(270): Xaa can be any naturally occurring amino acid
  Transcript Sequence Number=SeqID_45264
  Gene Ontology: Mol. function=hydrolase activity, hydrolyzing O -glycosyl compounds; Cellular component=cell wall; Biological process= carbohydrate metabolic process
  Homolog annotation: Hit_ID=B6THX1; Match level="QueryCoverage=99%, HitCoverage=47%, E-value=1e-135, Identity=86%"; Hit description=1,4 -beta-xylanase
  Pfam annotation: Domain name=Glyco_hydro_10; Domain location=112-274; Score=-87.9; E_value=2.4e-07; Accession=PF00331.12; Description =Glycosyl hydrolase family 10
LAWLPVGDGSADVRAVVKTVGDFVHAGGVVAKAGCWSMLKGGLTAASSGPAELYFESNATVDLWVDSVSLNPFSKVEWEAHRAESVVSARKKTVRLQATDSAGKPLAGAAVSLDAVRTSFPLGAAMSSHILTNSAYQAWFASRFAVATFENEMKWYSTEPAPGREDYTVPDAMMAFAKSNGIAVRGHNVFWDQPSQQPKWVQSLPYPQLLAAASRRIRSVVSRYAGQVIGWDVVNENLHFSFYEGRFGWDASTAFYAAARLLDTGNALMXMNEFNT

SEQ ID NO: 111239 - protein, 124 aa, Setaria italica
  Transcript Sequence Number=SeqID_45265
  Gene Ontology: Mol. function=phosphotransferase activity, alcohol group as acceptor
  Homolog annotation: Hit_ID=B9RLG3; Match level="QueryCoverage=100%, HitCoverage=19%, E-value=1e-37, Identity=63%"; Hit description =Inositol or phosphatidylinositol kinase, putative
MPWNTDSPVKTHMAVAVLDHSLSTDYPSKNISEGRPLSWKRVFVQTDNGSVLGIELEPGENAHTVKKKMQIALNVSTEESSLTFGDQVLNNDLSYVRNDSPLLLTRNHMHRSYSTPCLSPNTCD

SEQ ID NO: 111240 - protein, 73 aa, Setaria italica
  Transcript Sequence Number=SeqID_45266
RRPRNRRIHRNIDAIAVKGWGRLCSHRSAMGARHDLQSKPRQEARPDLTTGLLCSRTVSGLLLSGSCNKVCQQ

SEQ ID NO: 111241 - protein, 163 aa, Setaria italica
  Transcript Sequence Number=SeqID_45267
  Gene Ontology: Mol. function=transporter activity; Cellular component= membrane; Biological process=oligopeptide transport
  Homolog annotation: Hit_ID=Q7X619; Match level="QueryCoverage=93%, HitCoverage=25%, E-value=1e-44, Identity=61%"; Hit description =P0076O17.8 protein
ELAGLILLSVQAHLPQLKSAPCNMLTMVGSCERARGFKATIFFVALYLVALGSGCVMPNMTTYGADQFSGGGAFEKDAKRLSTYFNLSYFGFCAGELVALTAMVWAQTRYGMDVGFGLAAAALGAGLISLVSGVVFYRNKPPRGSIFTPICLRVFSFCSCSFL

SEQ ID NO: 111242 - protein, 257 aa, Setaria italica
  Transcript Sequence Number=SeqID_45268
  Gene Ontology: Mol. function=nucleic acid binding; Cellular component= ribonucleoprotein complex; Biological process=nuclear mRNA splicing, via spliceosome
  Homolog annotation: Hit_ID=Q41498; Match level="QueryCoverage=89%, HitCoverage=91%, E-value=7e-75, Identity=62%"; Hit description =U1snRNP-specific protein, U1A
  Pfam annotation: Domain name=RRM_1; Domain location=185-250; Score =43.3; E_value=9.8e-10; Accession=PF00076.14; Description=RNA recognition motif. (a.k.a. RRM, RBD, o
  Pfam annotation: Domain name=RRM_1; Domain location=29-100; Score =42.6; E_value=1.6e-09; Accession=PF00076.14; Description=RNA recognition motif. (a.k.a. RRM, RBD, o
  Pfam module annotation: Pfam domain module=RRM_1::RRM_1; Domain location=185-250::29-100
MSGEAPAGGGGGGGGTGGEANGAPPNVTIYINNLNEKIKLEELKKSLNAVFSQFGKILDVLAFKTLKHKGQAWVVFEDVASATEAIKRMQDFPFYGKPMRIQYAKTKSDIVAKADGTFVPRERRKRIDEKPEKKQKREQHHEATQIGIGVNAYPGVYGAPQLTQLPIAGGQRVMMPEIIVPNNILFVQNLPHETTPMMLQMLFCQYPGFKEVRMVEAKPGIAFVEYGDEQQATAAMTPLQGFKITKENQMVITYAKK

SEQ ID NO: 111243 - protein, 73 aa, Setaria italica
  Transcript Sequence Number=SeqID_45269
TTRHGSGVTKARSMGTRTRCREADRRNNPGLFTNTSVHPIPTRAHLTAAESLPQWTEITALGHVKRTKKREAA

SEQ ID NO: 111244 - protein, 66 aa, Setaria italica
  Transcript Sequence Number=SeqID_45270
  Gene Ontology: Mol. function=transposase activity; Biological process= transposition, DNA-mediated
  Homolog annotation: Hit_ID=B8GX98; Match level="QueryCoverage=87%, HitCoverage=35%, E-value=2e-19, Identity=81%"; Hit description =Transposase
AWLDGQADAQALGRSRGGFGTKLHVCVDALGLPVRLALGPGQQSDMTPACDLIHGLAAQALIVSAR

SEQ ID NO: 111245 - protein, 54 aa, Setaria italica
  Transcript Sequence Number=SeqID_45271
LEQIAGHNLMQDNQDKSVYLSQKCNRLFCRHFNIPRFVVHSEHGFSVDGMPSSC

SEQ ID NO: 111246 - protein, 121 aa, Setaria italica
  Transcript Sequence Number=SeqID_45272
  Gene Ontology: Mol. function=protein dimerization activity; Cellular component=nucleus; Biological process=regulation of transcription, DNA-dependent
  Homolog annotation: Hit_ID=Q5JK20; Match level="QueryCoverage=74%, HitCoverage=11%, E-value=3e-44, Identity=93%"; Hit description=Auxin response factor 4
GLVFVYLRLRFSYLSSKVVALGRSVDLSKFSDYDELKAELDKMFEFEGELVSANKNWQIVYTDNEGDMMLVGDDPWEEFCSIVRKIYIYTKEEVQKMNSKSSAPRKEEPPAAGEVCAATNE

SEQ ID NO: 111247 - protein, 48 aa, Setaria italica
  Transcript Sequence Number=SeqID_45273
DLSIYFSAVCSWQKVEGPRFLLLFLLLICLSHPFGCKYLSTQSSSSKQ

SEQ ID NO: 111248 - protein, 809 aa, Setaria italica
  Transcript Sequence Number=SeqID_45274
  Gene Ontology: Mol. function=protein dimerization activity; Cellular component=nucleus; Biological process=regulation of transcription, DNA-dependent
  Homolog annotation: Hit_ID=Q5JK20; Match level="QueryCoverage=96%, HitCoverage=96%, E-value=0.0, Identity=77%"; Hit description=Auxin response factor 4
  Pfam annotation: Domain name=AUX_IAA; Domain location=600-789; Score=- 73.5; E_value=0.00038; Accession=PF02309.8; Description=AUXIAA family
  Pfam annotation: Domain name=Auxin_resp; Domain location=255-336; Score=185.8; E_value=1.2e-52; Accession=PF06507.5; Description=Auxin response factor
  Pfam annotation: Domain name=B3; Domain location=128-233; Score =114.6; E_value=3.4e-31; Accession=PF02362.13; Description=B3 DNA binding domain
  Pfam module annotation: Pfam domain module=AUX_IAA::Auxin_resp::B3; Domain location=600-789::255-336::128-233
MPPAIMAPPPTPQAPSNSGDPLYPELWRACAGPLVTVPRPGDLVFYFPQGHIEQVEASMNQVAGNQMRLYDLPSKLLCRVLNVELKAETDTDEVYAQIMLMPEPEQNEVAAEKASSGSAATPRPAVRSFCKTLTASDTSTHGGFSVLRRHADECLPPLDMTQSPPTQELVAKDLHGMEWRFRHIFRGQPRRHLLQSGWSVFVSSKRLVAGDAFIFLRGENGELRVGVRRAMRQLSNIPSSVISSQSMHLGVLATAWHAINTKSMFTVYYKPRTSPSEFIIPYDQYMESLKNNYSIGMRFRMRFEGEEAPEQRFTGTIVGCENLDPLWPDSSWRYLKVRWDEPSTIPRPERVSPWKIEPASSPPVNPLPVSSRVKRPRQNAPQPSPESSVLTKEGASKVDIGSAQTQHQNSVLQGQEQMTLRNNMNESTDSDATVQKPMMWSPSPNGKTHTSFQQRPSMDNWMPLGRRETDFKDNRSAFKDARTSSQSFGDTQGFFMQTFDDNQHRLSFNNQFQDQGSAHRFADPYFFMPQQPSLTVESSTRTQTANNELRFWSDQNTVYGNTTDQQGFRYGQNPSNWLNQPFPLVEQPRVVRPHASVAPFDLEKTREGSGFKIFGFKVDTASASPIQLSSPMSAMREHVVQTQPSASVNELQPVQTECLPEGSVSTAGTSTENEKSIQQATQSSKDIQSKSQGASTRSCTKVHKQGVALGRSVDLSKFSDYDELKAELDKMFEFEGELVSANKNWQIVYTDNEGDMMLVGDDPWEEFCSIVRKIYIYTKEEVQKMNSKSSAPRKEEPPAAGEVCAATNE

SEQ ID NO: 111249 - protein, 100 aa, Setaria italica
  Transcript Sequence Number=SeqID_45275
  Gene Ontology: Mol. function=protein serine/threonine kinase activity; Biological process=protein amino acid phosphorylation
  Homolog annotation: Hit_ID=C4P7S5; Match level="QueryCoverage=100%, HitCoverage=22%, E-value=1e-41, Identity=88%"; Hit description=CBL -interacting protein kinase 17
  Pfam annotation: Domain name=KA1; Domain location=32-77; Score=7.5; E_ value=0.022; Accession=PF02149.11; Description=Kinase associated domain 1
IGSIVEEGFQVHKSNGKLKVIQDCKGSANSRGKESLLISAEVFEINESLYVVELKKSSGDCSLYRKLCETLSEDLGICKSQQLLKQDSIKQEIGRYNSSF

SEQ ID NO: 111250 - protein, 413 aa, Setaria italica
  misc_feature (380)..(380): Xaa can be any naturally occurring amino acid
  Transcript Sequence Number=SeqID_45276
  Gene Ontology: Mol. function=protein serine/threonine kinase activity; Cellular component=plasma membrane; Biological process =protein amino acid phosphorylation
  Homolog annotation: Hit_ID=C4P7S5; Match level="QueryCoverage=100%, HitCoverage=84%, E-value=0.0, Identity=80%"; Hit description=CBL -interacting protein kinase 17
  Pfam annotation: Domain name=NAF; Domain location=226-286; Score =82.5; E_value=1.5e-21; Accession=PF03822.6; Description=NAF domain
  Pfam annotation: Domain name=Pkinase; Domain location=1-190; Score =151.4; E_value=2.7e-42; Accession=PF00069.17; Description=Protein kinase domain
  Pfam annotation: Domain name=Pkinase_Tyr; Domain location=1-188; Score=-127.2; E_value=2.8e-05; Accession=PF07714.9; Description =Protein tyrosine kinase
  Pfam module annotation: Pfam domain module=NAF::Pkinase::Pkinase_Tyr; Domain location=226-286::1-190::1-188
VSASKTKIYMVLEYVNGGELFDKIALKGKLTEKEGRKLFQQLIDAVGYCHEKGVYHRDLKPENVLVDAKGNIKVSDFGLSALPQNQRKDGLLHTTCGSPNYIAPEVLLNKGYDGSMADIWSCGVILYVMLTGNLPFDDQNVVVLYQKILKGNAHIPKWLSQGAQDILRKILDPNPITRIDVDGIRAHDWFKQGYTPAVPFTDDEDISMDEGSLNVTEHNGIQDNIAINQINAFQLIGMSSCLDLSGFFEKEDASERKIRFASNHSPAYLFEKIGSIVRKMGFQVHKSNGKLKVIQDCKGSANSRGKESLLISAEVFEINESLYVVELKKSSGDCSLYRKLLLPPLTILYLKGLNLLLVISFLSNYFILLCLSSCFNDASXCETLSEDLGICKSQQLLKQDSIKQEIGRYNSSF

SEQ ID NO: 111251 - protein, 149 aa, Setaria italica
  misc_feature (53)..(53): Xaa can be any naturally occurring amino acid
  misc_feature (90)..(90): Xaa can be any naturally occurring amino acid
  Transcript Sequence Number=SeqID_45277
  Gene Ontology: Mol. function=hydrolase activity, acting on acid anhydrides, in phosphorus-containing anhydrides
  Homolog annotation: Hit_ID=B9S2H8; Match level="QueryCoverage=98%, HitCoverage=12%, E-value=3e-34, Identity=54%"; Hit description =Helicase, putative
EKMNRKLRMSNFQNLASPKNDFYYVKGKRRLRANKNEQGNRSPLDISKQVQLXSKHELSNMRRSQVPLIRDTLSQLWESDMLPAIWFIFXSRRGCDAAVEYLEDCRLLHDCEASEVELELRRFKMQYPDAVRESAVKGLLRGVAAHHAG

SEQ ID NO: 111252 - protein, 96 aa, Setaria italica
  misc_feature (16)..(16): Xaa can be any naturally occurring amino acid
  misc_feature (71)..(71): Xaa can be any naturally occurring amino acid
  Transcript Sequence Number=SeqID_45278
  Gene Ontology: Mol. function=hydrolase activity
  Homolog annotation: Hit_ID=B6T470; Match level="QueryCoverage=98%, HitCoverage=25%, E-value=4e-26, Identity=63%"; Hit description =Catalytic/ hydrolase
CTGSLAGMSRSTGEAXRRVGAASFAEFLLPGDAAGLRSLLSTGTHRKWWFPDFVLKDYLKLAFLQMMFNRXERSELLEGLVISDEDAAAAAPCFGQ

SEQ ID NO: 111253 - protein, 50 aa, Setaria italica
  Transcript Sequence Number=SeqID_45279
HPPHTDAHLAETNAAAQCTSIIHCKLVHGQKDLQCRKPNPHLATQAPENT

SEQ ID NO: 111254 - protein, 284 aa, Setaria italica
  misc_feature (258)..(258): Xaa can be any naturally occurring amino acid
  Transcript Sequence Number=SeqID_45280
  Gene Ontology: Mol. function=binding
  Homolog annotation: Hit_ID=UPI0001A7B1EE; Match level="QueryCoverage =98%, HitCoverage=12%, E-value=2e-93, Identity=60%"; Hit description =SWEETIE (SWEETIE); binding
  Pfam annotation: Domain name=HEAT; Domain location=161-198; Score =7.6; E_value=5.8; Accession=PF02985.14; Description=HEAT repeat
  Pfam annotation: Domain name=HEAT; Domain location=205-240; Score =16.1; E_value=0.15; Accession=PF02985.14; Description=HEAT repeat
  Pfam module annotation: Pfam domain module=HEAT::HEAT; Domain location=161-198::205-240
PWWASAKQKPPDALLCFDLLSELSSAIDEASKETIQLWQRKCEDALQSLLVLGARRPVRRLASSAMGRIIEKGDAISVYSRASTLQGWLVDTKRAEPMACAGAAQCLGEIYRLFGRKITAGLIETSSIVAKLMKYHEDFVRQDALLLLENALEGSGGGGGAAAYQDAFRIIMRGGVSDRSFIVRVVAARCMKAFANIGGPGLGMAEFDTSMSYCVKGLEDSVSSVRDSFAEALGALLALSVNPDAQVKKGGKKQTASXKKFEDGVQKHLIVPFVKANGANAKKL

SEQ ID NO: 111255 - protein, 140 aa, Setaria italica
  Transcript Sequence Number=SeqID_45281
  Pfam annotation: Domain name=PPR; Domain location=108-140; Score=9.4; E_value=0.68; Accession=PF01535.12; Description=PPR repeat
  Pfam annotation: Domain name=PPR; Domain location=37-71; Score=13.5; E_value=0.23; Accession=PF01535.12; Description=PPR repeat
  Pfam module annotation: Pfam domain module=PPR::PPR; Domain location =108-140::37-71
SAHAASGDRDGSGAGAERALHLLDEMRSLLGRRPDTACFTTAAAALSSASQPGAALAVLNAMAADGVAPDAAACTVLVGVYACHLRWFDAAYEVLRWMAANGMAPDVVTYSTLISGLCSAGRVAEALGVLDLMLEEGCQP

SEQ ID NO: 111256 - protein, 218 aa, Setaria italica
  misc_feature (30)..(30): Xaa can be any naturally occurring amino acid
  misc_feature (112)..(112): Xaa can be any naturally occurring amino acid
  misc_feature (181)..(181): Xaa can be any naturally occurring amino acid
  Transcript Sequence Number=SeqID_45282
  Gene Ontology: Mol. function=nucleotide binding
PIEEQIRQLSLLYISFSITSSRTALTQLNXVILKILHLYIFVKKLHISDCPELVFFNSMEHRIPKLLISMVHENKIYQKFLFPPLLIQFEANHFLQMLWCATFQGNHMSLRXSLRNNPRLESLNLHYSNNLVQTAVFNYVHLAALELPYLNSLHELAKNPKLSTVTHELYYQAQGSGEDQXGGLNLYPRLGWLDTDDISLLSLSFCKHLFALPSGSGT

SEQ ID NO: 111257 - protein, 93 aa, Setaria italica
  Transcript Sequence Number=SeqID_45283
  Subcellular localization annotation: CTP_CleavageSite=90; ConfidenceScore=5.66e-01
PPPSPPPPPAPPPKPPPAPPTRPPPPPSPPPFPPPNPPPRPPPFPPPNPPPRPPPWPIPPLRLSTPLPPPPAPLPAPNSHLDPSDLSSPRLSP

SEQ ID NO: 111258 - protein, 170 aa, Setaria italica
  Transcript Sequence Number=SeqID_45284
  Gene Ontology: Mol. function=ubiquitin protein ligase binding; Cellular component=cullin-RING ubiquitin ligase complex; Biological process=ubiquitin-dependent protein catabolic process
  Homolog annotation: Hit_ID=B6T5W1; Match level="QueryCoverage=100%, HitCoverage=59%, E-value=5e-80, Identity=80%"; Hit description =Cullin-1
YYDCSYRMAVQKQHYCHEMYNGFKTTLADCVRAMILPHLMHKQNDYFFRELVKMWSNYAIMVRCVIGFFSYLDRCYVEQYKLPSLSDTAATSFFGPVFSYFSDEARTALLTLIRQERDGSTMDSGFLDVMHGICRSEVKTLMQNAVLEDTYAYYSMRSSEWIMQYSLPDY

SEQ ID NO: 111259 - protein, 159 aa, Setaria italica
  Transcript Sequence Number=SeqID_45285
  Gene Ontology: Mol. function=ubiquitin protein ligase binding; Cellular component=cullin-RING ubiquitin ligase complex; Biological process=ubiquitin-dependent protein catabolic process
  Homolog annotation: Hit_ID=B6T5W1; Match level="QueryCoverage=94%, HitCoverage=52%, E-value=1e-61, Identity=76%"; Hit description =Cullin-1
VFSYFSDEARTALLTLIRQERDGSTMDSGFLDVMHGICRSEVKTLMQNAVLEDTYAYYSMRSSEWIMQYSLPDYLSKVQESMEKETNRLAYYLNISRDESIDLCLQAVNAPLMETYDSYASEKQIGGQLLLQTYKTVEEELLGRCSSLTLGGSDSNSFN

SEQ ID NO: 111260 - protein, 133 aa, Setaria italica
  Transcript Sequence Number=SeqID_45286
  Gene Ontology: Mol. function=nuclease activity
  Homolog annotation: Hit_ID=A3W024; Match level="QueryCoverage=76%, HitCoverage=5%, E-value=8e-10, Identity=43%"; Hit description =Extracellular nuclease
YAKGILAIFTSSKALVFSSAQFANLHLLLFLQFIEVVIHTSLDAKDLMLTLYNGANGRMYRSLNLADREVFTVTEGSSGYLLYTVCTPLQNGPADGIALIYCRDMRKAKVLDFLSYEGRLRAQDGPAKGVIST

SEQ ID NO: 111261 - protein, 90 aa, Setaria italica
  Transcript Sequence Number=SeqID_45287
IKKCPACCQIYSNGTYTGFIYKNIIKFVRNMIDHGHADFAAINNGSWTDMDLYNKINDLFAGFMSLAYSVSKATAKDRDLLRKGVQRLPY

SEQ ID NO: 111262 - protein, 180 aa, Setaria italica
  Transcript Sequence Number=SeqID_45288
LCGAAYINASSGCDWQGFSYLINSHAMCQKYTWAQAVLNHPILLDPALRIQSYIALYEWADSLPFGVLKKFCNDLYCLMPQYYGDNLWNLIKKCPACCQIYSNGTYTGFIYKNIIKFVRNMIDHGHADFAAINNGSWTDMDLYNKINDLFAGFMSLAYSVSKATAKDRDLLRKGVQRLPY

SEQ ID NO: 111263 - protein, 65 aa, Setaria italica
  Transcript Sequence Number=SeqID_45289
VDSDCGSMLMVIGALVLLRLLLMLHVVSKEPEMQHPVCMDWGTCPFHKQSIWMCFFNFIGYLVNI

SEQ ID NO: 111264 - protein, 111 aa, Setaria italica
  Transcript Sequence Number=SeqID_45290
  Gene Ontology: Cellular component=plasma membrane
  Homolog annotation: Hit_ID=A8YKF5; Match level="QueryCoverage=61%, HitCoverage=19%, E-value=1e-15, Identity=57%"; Hit description =Similar to tr|Q8YYR0|Q8YYR0
  Subcellular localization annotation: CTP_CleavageSite=34; ConfidenceScore=5.68e-01
MVLLFSPPFLAARFTPSQAAAPRRRTRARAFSPSADARAPCFRRPYTSVLIVPTGVGAAVGGFAGDALPVARTLAAVSDCVISHPNVLNAAMLYWPMPNTLYVEGYALDRF

SEQ ID NO: 111265 - protein, 182 aa, Setaria italica
  Transcript Sequence Number=SeqID_45291
  Gene Ontology: Mol. function=transporter activity; Cellular component= mitochondrial membrane; Biological process=transport
  Homolog annotation: Hit_ID=B9T601; Match level="QueryCoverage=93%, HitCoverage=31%, E-value=1e-60, Identity=68%"; Hit description=Inner membrane transport protein yjjL, putative
WRSWEGGEAGRGQEEDKEEAGGAARRPSWWEGLPERYKLIGATSLAFAICNMDKVNLSVAIIPMAHQYGWDSSTAGLVQSSFFLGFALSQLPGGWLAKLFGGRKVLVAGIVAWSLAISIIPFVAGFLPGLVLSRILVGIGEGLSPSSAADLIARFIPLQERSRAVSVVYDGSSFGSVLGLLF

SEQ ID NO: 111266 - protein, 217 aa, Setaria italica
  Transcript Sequence Number=SeqID_45292
  Gene Ontology: Mol. function=electron carrier activity; Biological process=metabolic process
  Homolog annotation: Hit_ID=Q2QY23; Match level="QueryCoverage=98%, HitCoverage=38%, E-value=1e-104, Identity=34%"; Hit description =Cytochrome P450 family protein
  Pfam annotation: Domain name=PPR; Domain location=1-35; Score=34.9; E_ value=3.3e-07; Accession=PF01535.12; Description=PPR repeat
  Pfam annotation: Domain name=PPR; Domain location=106-140; Score =46.9; E_value=8.1e-11; Accession=PF01535.12; Description=PPR repeat
  Pfam annotation: Domain name=PPR; Domain location=141-175; Score =52.4; E_value=1.7e-12; Accession=PF01535.12; Description=PPR repeat
  Pfam annotation: Domain name=PPR; Domain location=176-210; Score =25.4; E_value=0.00023; Accession=PF01535.12; Description=PPR repeat
  Pfam annotation: Domain name=PPR; Domain location=36-70; Score=42.5; E_value=1.7e-09; Accession=PF01535.12; Description=PPR repeat
  Pfam annotation: Domain name=PPR; Domain location=71-105; Score=43.5; E_value=8.1e-10; Accession=PF01535.12; Description=PPR repeat
  Pfam module annotation: Pfam domain module=PPR::PPR::PPR::PPR::PPR::PP R; Domain location=1-35::106-140::141-175::176-210::36-70::71-105
NIYNVLISGLCKKRMLPAAKNLLAEMLEQNVQPDKFVYTTLIDGFIRSENLSDARKIFEFMEEKGVCPDVVGYNAMVKGYCKFGMMNEAIMCMSSMRKVGCIPDEFTYTTLIDGYAKQGNISAALRFLCDMMKRRCNPNVVTYSSLISGYCKINDMDSAEDLFEKMQSEGLSANVIHYTIIIGSLFKKDEVIKAAAYFESMLLNHCSPNEVTLSIYS

SEQ ID NO: 111267 - protein, 112 aa, Setaria italica
  misc_feature (34)..(34): Xaa can be any naturally occurring amino acid
  misc_feature (81)..(81): Xaa can be any naturally occurring amino acid
  Transcript Sequence Number=SeqID_45293
  Gene Ontology: Mol. function=hydrolase activity
  Homolog annotation: Hit_ID=B6TCN5; Match level="QueryCoverage=92%, HitCoverage=34%, E-value=1e-40, Identity=80%"; Hit description=Nudix type motif 22
EENSTTLSEQVSQEMFEGIIREVVEETGVPAASXDPVFIGVSCREMNVRPTAFFFTKCDIDSRGVNELYSKAQDGYESTKXLYAVSVEELRGMGQRMPGCHNGGFPHQFIKS

SEQ ID NO: 111268 - protein, 155 aa, Setaria italica
  misc_feature (13)..(13): Xaa can be any naturally occurring amino acid
  misc_feature (99)..(99): Xaa can be any naturally occurring amino acid
  misc_feature (105)..(105): Xaa can be any naturally occurring amino acid
  Transcript Sequence Number=SeqID_45294
  Gene Ontology: Mol. function=hydrolase activity
  Homolog annotation: Hit_ID=B6TCN5; Match level="QueryCoverage=94%, HitCoverage=58%, E-value=2e-60, Identity=66%"; Hit description=Nudix type motif 22
  Pfam annotation: Domain name=NUDIX; Domain location=12-147; Score =10.1; E_value=0.016; Accession=PF00293.20; Description=NUDIX domain
LYSLLRCQHMSNXTGNGAIVETSDQKIIVLQRSHNVGEFPGYYVFPGGHSEPQEIGIVGHQTDEENSTTLSEQVSQEMFEGIIREVVEETGVPAASLGXVNELYXKAQDGYESTKLYAVSVEELRGMGQRMPGCHNGGFALYELMRNDAKSLCRC

SEQ ID NO: 111269 - protein, 36 aa, Setaria italica
  Transcript Sequence Number=SeqID_45295
  Gene Ontology: Cellular component=integral to membrane; Biological process=photosynthesis
  Homolog annotation: Hit_ID=P12186; Match level="QueryCoverage=100%, HitCoverage=100%, E-value=6e-11, Identity=97%"; Hit description =Photosystem I reaction center subunit VIII
  Pfam annotation: Domain name=PSI_8; Domain location=6-30; Score=53.6; E_value=7.3e-13; Accession=PF00796.10; Description=Photosystem I reaction centre subunit VIII
MTDFNLPSIFVPLVGLVFPAIAMASLFLYVQKNKIV

SEQ ID NO: 111270 - protein, 77 aa, Setaria italica
  Transcript Sequence Number=SeqID_45296
FGKECNNGVLIHWIKLYAKILSLMFQSHFVSVLFKFCLEVIRFLPMHCFIVMIIKCIIMAILLLVATILYIFGYTIY

SEQ ID NO: 111271 - protein, 161 aa, Setaria italica
  misc_feature (137)..(137): Xaa can be any naturally occurring amino acid
  Transcript Sequence Number=SeqID_45297
  Gene Ontology: Cellular component=intracellular; Biological process =signal transduction
  Homolog annotation: Hit_ID=B6T5X9; Match level="QueryCoverage=98%, HitCoverage=32%, E-value=2e-63, Identity=85%"; Hit description=Rac GTPase activating protein
  Pfam annotation: Domain name=RhoGAP; Domain location=1-96; Score =12.1; E_value=1e-06; Accession=PF00620.19; Description=RhoGAP domain
DDIDVHCLASLIKAWFRELPVRLVDSLSPEQVLHCNTEEQCIELVELLPPTQAALLHWVVELMADVVEEEESNKMNARNVAMVFAPNMTQMSDPLTALMHAVQVMNLLKTLILKTLRERDDDDDAGAYSSFSSSSSXSEELDEEGHDQQDDENDSGSENCN

SEQ ID NO: 111272 - protein, 124 aa, Setaria italica
  Transcript Sequence Number=SeqID_45298
GDPHGAWKSKSIWTVMEMVSVESSGMEASRVGALGAGSERLGGVGSLMEAGHLSTSMSHVGCDMQEGLTILASKPKVSHACRVCKEGLTGIASKLGDESGVAGWRRVGGCVAPSRSLRRGEAKS

SEQ ID NO: 111273 - protein, 76 aa, Setaria italica
  Transcript Sequence Number=SeqID_45299
  Subcellular localization annotation: CTP_CleavageSite=64; ConfidenceScore=5.13e-01
QLGLLDRITRTNRSNPFSFLLLSYNLFLFQEQLSLFLMDLSSRSNRVCSSWICLPARSPFASFSLEAIVGYVISFL

SEQ ID NO: 111274 - protein, 98 aa, Setaria italica
  Transcript Sequence Number=SeqID_45300
  Gene Ontology: Cellular component=mitochondrion
MGVGESPASEERSVTNCESNSQGQVHNSVPAAPLLPQIKEGRDFIPVPPEPNEPPQSGVGSSTIPTPTSTACLEIVKAFVNGAARGCTGTLSLCSSLG

SEQ ID NO: 111275 - protein, 99 aa, Setaria italica
  misc_feature (2)..(2): Xaa can be any naturally occurring amino acid
  Transcript Sequence Number=SeqID_45301
  Homolog annotation: Hit_ID=B6TDK0; Match level="QueryCoverage=96%, HitCoverage=37%, E-value=4e-10, Identity=40%"; Hit description=B3 DNA binding domain containing protein
PXLNPGEQQPWSPMCYSTSGSSYPTSPASPYAYHSDMAHAGEADAKSSGTPTAPSRKLRLFGVNLDCGPEPEPEAAMYGYMHQSPYAAVSTVPNYWGSS

SEQ ID NO: 111276 - protein, 154 aa, Setaria italica
  misc_feature (14)..(14): Xaa can be any naturally occurring amino acid
  Transcript Sequence Number=SeqID_45302
  Gene Ontology: Mol. function=nucleic acid binding; Cellular component= intracellular
  Homolog annotation: Hit_ID=B9RAP0; Match level="QueryCoverage=75%, HitCoverage=6%, E-value=2e-31, Identity=58%"; Hit description =Nucleic acid binding protein, putative
EYLIHSGFSHGFNXGEASNIATPEWLRAAKEAAVRRASINRPPMVSHYQLLYELALSMCLRDPSGGAMEPRSSRLKEKKKGEGEQLVKKIFVRNVIEDNKLLNHFLSDGSSCIILPTSSNNGSALSTLLSKSQSTTSRVSDVQCSSTETPKDSG

SEQ ID NO: 111277 - protein, 174 aa, Setaria italica
  Transcript Sequence Number=SeqID_45303
  Gene Ontology: Mol. function=quinolinate synthetase A activity; Biological process=NAD biosynthetic process
  Homolog annotation: Hit_ID=A6GBP5; Match level="QueryCoverage=92%, HitCoverage=30%, E-value=1e-27, Identity=41%"; Hit description =Quinolinate synthetase complex, A subunit
DEHLQFVLGTESGMITSIVAAVRELFDLYSSSQEIANIEVEIVFPVSSDAVSKTSTNGSHHLGSSVASDLDNLTVVPGVSSSEGCSIHGGCASCPYMKMNTLGSLLKICHQLPDRDNKLSLYEARRFNVKTPLGKSVAEVGCEPILHMRHFQATKRLSDKLVHQVVHGNGEEPS

SEQ ID NO: 111278 - protein, 148 aa, Setaria italica
  Transcript Sequence Number=SeqID_45304
  Pfam annotation: Domain name=RnaseH; Domain location=22-144; Score= -16.4; E_value=0.0067; Accession=PF00075.16; Description=RNase H
DLHSSQAWQPLFLAYADAALDPDGPGSASRTAVLGLVVDLRSTILSCRLQVLGLARVESVVMAELAALLLAGKIFSILQVNAGGLGSDCLLAVRYLLKAPLQSPWQLRPWISQFQELRLQDEVQVIKISRSQNEAAHCLAVRARTVSS

SEQ ID NO: 111279 - protein, 142 aa, Setaria italica
  misc_feature (20)..(20): Xaa can be any naturally occurring amino acid
  Transcript Sequence Number=SeqID_45305
  Homolog annotation: Hit_ID=Q7XS46; Match level="QueryCoverage=98%, HitCoverage=37%, E-value=6e-61, Identity=73%"; Hit description =OSJNBa0035M09.18 protein
  Pfam annotation: Domain name=DUF266; Domain location=1-133; Score =35.6; E_value=3.3e-18; Accession=PF03267.6; Description=Arabidopsis protein of unknown function, DUF266
WFAVTRRHALMILADSLYYXKFKLYCKPAEGRNCIADEHYLPTLFNMVDPGGISNWSITHVDWSEGKWHPRSYSAADVTYELLKNITSVSENFHITSDDKKVATVAPCMWNGTKRPCYLFARKFYPETLNNLLKLFSSYTSA

SEQ ID NO: 111280 - protein, 32 aa, Setaria italica
  Transcript Sequence Number=SeqID_45306
AIFALYYSCVPLHSFDYVYNYLMGTNVSFVDW

SEQ ID NO: 111281 - protein, 66 aa, Setaria italica
  Transcript Sequence Number=SeqID_45307
RLNTESQIQGQRHLVILSPLVGLRCSLFSIDTALPVIRGALCMFLLALHFTFHLLSHILRFLATIS

SEQ ID NO: 111282 - protein, 383 aa, Setaria italica
  Transcript Sequence Number=SeqID_45308
  Homolog annotation: Hit_ID=Q7XS46; Match level="QueryCoverage=98%, HitCoverage=96%, E-value=1e-147, Identity=64%"; Hit description =OSJNBa0035M09.18 protein
  Pfam annotation: Domain name=DUF266; Domain location=69-374; Score =698.9; E_value=4.2e-207; Accession=PF03267.6; Description =Arabidopsis protein of unknown function, DUF266
WGGKDMTVMMPQRHRAAAKKPMWIIVLLSMVCLVLIGAYVFPPRRYSKCYLFASSVCTPSFKDWLPNGARERTDEEIVSSVVNRDLLSMPMPVSKNPKIAFMFLTPGSLPFEKLWEKFLQGHEGRYSIYVHASREKPVHSSSLFVGREIRSEKVVWGRISMVDAEKRLLANALEDVDNQFFILLSDSCVPLHTFDYIYNYLMGTNVSFIDCFLDPGPHGTGRYSTEMLPEIEQRDFRKGAQWFAITRRHALLILADNLYYNKFKLYCKPAEGRNCIADEHYLPTLFNMVDPGGISNWSITHVDWSEGKWHPRSYSAADVTYDLLKNITAIDENFHVTSDDKKVAIQKPCMWNGSKRPCYLFARKFNPEALNNLLKLFTSYTSV

SEQ ID NO: 111283 - protein, 254 aa, Setaria italica
  Transcript Sequence Number=SeqID_45309
  Gene Ontology: Mol. function=metal ion binding
  Homolog annotation: Hit_ID=B9RMQ0; Match level="QueryCoverage=94%, HitCoverage=95%, E-value=9e-75, Identity=55%"; Hit description =Protein binding protein, putative
  Pfam annotation: Domain name=zf-C3HC4; Domain location=158-195; Score= 21.5; E_value=0.00035; Accession=PF00097.17; Description=Zinc finger, C3HC4 type (RING finger)
MATKRGELGRQLPLRGPLKALETDIHHANAMADAIQRNYGGACVQMRLSFSSLAPFFLYLIQWLDCGCCYALPSYLGLFHILICKVYADGDSSVSTYERRASLREFYAIIYPILQQLESSLIERDLKGKGRCKDIVSRRRMDDWKKLSGKDVEREDECGICMETCTKMVLPNCSHAMCIKCYRDWYKRSESCPFCRGSLKRIRSRDLWVLTNYNDVIDPANLERENVRHFYSYIDSLPLILPDNIFFFYYDYLL

SEQ ID NO: 111284 - protein, 167 aa, Setaria italica
  misc_feature (90)..(90): Xaa can be any naturally occurring amino acid
  Transcript Sequence Number=SeqID_45310
  Gene Ontology: Mol. function=protein binding; Biological process =ubiquitin-dependent protein catabolic process
  Homolog annotation: Hit_ID=B6SW30; Match level="QueryCoverage=82%, HitCoverage=22%, E-value=3e-33, Identity=53%"; Hit description =Coronatine-insensitive protein 1
LTKLISCFLVVLLVIFFSCTDLRASPEYLTLLVRNCQMLKTLKISECLMPDLTGLFRTAQTLQEFAGGAFEEPGQQVANRNYENYYFPPXLHRLGLHYMGANEMQILFPYSAALKKLDLQFTLLNTEDHCQIVQRCPNLEVLEVFQIIVVHTFCFPDLKVAKLICYF

SEQ ID NO: 111285 - protein, 195 aa, Setaria italica
  misc_feature (12)..(12): Xaa can be any naturally occurring amino acid
  misc_feature (169)..(169): Xaa can be any naturally occurring amino acid
  Transcript Sequence Number=SeqID_45311
  Gene Ontology: Mol. function=catalytic activity; Cellular component =chloroplast; Biological process=metabolic process
  Homolog annotation: Hit_ID=B6TZX1; Match level="QueryCoverage=98%, HitCoverage=38%, E-value=6e-77, Identity=73%"; Hit description=Male sterility protein 2
  Pfam annotation: Domain name=Sterile; Domain location=92-195; Score =48.6; E_value=2.5e-11; Accession=PF03015.11; Description=Male sterility protein
NLDLIMDVVPGXDMVVNAMMVAMAAHSEEQAQRIFHLTSSLRNPAPYAVLAESGHLYFLHNPPRSGKNGEPVRLSRMRFFRTLPGFRAYMAVKFRLPLEILRLLNIAGCGAFSRRYHELSRKYRYVMHIAELYAPYALFKGCFDDTNTERLRAVMVNNQQDKSRGYDFXFDPKSIDWDDYFYRVHIPGVVKYLLD

SEQ ID NO: 111286 - protein, 234 aa, Setaria italica
  Transcript Sequence Number=SeqID_45312
  Gene Ontology: Mol. function=nucleotide binding; Biological process =defense response
  Homolog annotation: Hit_ID=B9SUF5; Match level="QueryCoverage=98%, HitCoverage=27%, E-value=2e-48, Identity=43%"; Hit description =Leucine-rich repeat containing protein, putative
  Pfam annotation: Domain name=NACHT; Domain location=34-186; Score= -38.7; E_value=0.078; Accession=PF05729.4; Description=NACHT domain
  Pfam annotation: Domain name=NB-ARC; Domain location=12-234; Score =52.3; E_value=1.8e-12; Accession=PF00931.14; Description=NB-ARC domain
  Pfam module annotation: Pfam domain module=NACHT::NB-ARC; Domain location=34-186::12-234
NCFISEPNIIGRDGAKSEIVAKILTAADSAGPLSVLPIVGLGGIGKTALAKLIYNDVQITNKFEMKLWACVSDVFDLNKILDDIIQSSTGESHKQLNLDVLQRILCELLREKRYFLVLDDMWNDKASDWEELRSILSSSGRGSVIIVTTRRSDVASVVKTMEPYDVAKLPLDMCMQIFVRHAFKGEEHKDPQLLKVGNSIAEKCCGIPLAAKTLGSLLSSSRDVEEWQSIEEDR

SEQ ID NO: 111287 - protein, 166 aa, Setaria italica
  misc_feature (55)..(55): Xaa can be any naturally occurring amino acid
  misc_feature (123)..(123): Xaa can be any naturally occurring amino acid
  Transcript Sequence Number=SeqID_45313
  Gene Ontology: Mol. function=sequence-specific DNA binding; Cellular component=nucleus; Biological process=regulation of transcription, DNA-dependent
  Homolog annotation: Hit_ID=Q41813; Match level="QueryCoverage=100%, HitCoverage=16%, E-value=1e-35, Identity=50%"; Hit description=Hox2b protein
  Subcellular localization annotation: CTP_CleavageSite=71; ConfidenceScore=5.19e-01
MVRKGSEVSASKSYPLRSSHSSGRVLRSALTKDNKACSDPQNDSAAAQSAVKKRXNGSPSVSPNNSVRMLRSASKNKNDACSEPLNDKTTAKPAAKKRKNASPLQVGSPSNTVRVLRSALKIXDEACSERTTNRTAGDPAANKRKNVSPSKLGSPGSSTRVLRSAS

SEQ ID NO: 111288 - protein, 61 aa, Setaria italica
  Transcript Sequence Number=SeqID_45314
FYSVLSSSKQFQRRSSRNGKTSNTLFKTMYKISWITYIHDSATADELRGTKPLISRVCEQS

SEQ ID NO: 111289 - protein, 63 aa, Setaria italica
  Transcript Sequence Number=SeqID_45315
LCMPYHKDYYGQHLLCYIYLRLTMLLSLNAYVCRADKCILAYAYPIFFWLMSSSFMISGAALM

SEQ ID NO: 111290 - protein, 150 aa, Setaria italica
  misc_feature (42)..(42): Xaa can be any naturally occurring amino acid
  Transcript Sequence Number=SeqID_45316
  Homolog annotation: Hit_ID=B6TRE3; Match level="QueryCoverage=46%, HitCoverage=25%, E-value=1e-21, Identity=77%"; Hit description =Protein kinase Kelch repeat:Kelch
MGTRRGWREVGPYPPGLKADTACAVYVGGGEKVVVTGALDGXVFDVKTKQWIVVGRRPEFAGFVFSVTSSPRVAGPVIHARVPVPAAPSACSSSVLNPRALVEVPQTPVPAVRFGRILEGLRAAAEMRCGPVLSSEEGQVWYSNQTAVTL

SEQ ID NO: 111291 - protein, 105 aa, Setaria italica
  Transcript Sequence Number=SeqID_45317
DKNSKKIVCVLHLGQKHHHTNLSSPPATKEESFFAFLHPWLQDLASIGSPSFFSSFDGTGILVADRCADLRSSNGGHGAGIITLLSLVSPLYFFPFFFLLVLWLF

SEQ ID NO: 111292 - protein, 120 aa, Setaria italica
  misc_feature (77)..(77): Xaa can be any naturally occurring amino acid
  Transcript Sequence Number=SeqID_45318
  Gene Ontology: Mol. function=helicase activity
NQEATSYNCNQEATSYNCNQEPSDSGYRGDNDAKSAATNNRTKWSEELPEDENQPFNNAEADPEEEMPKQRVEEGLXQGDVQPNDQCSTNDDQVHDAYPAKYTFPPGWCDISGIPASGWD

SEQ ID NO: 111293 - protein, 305 aa, Setaria italica
  Transcript Sequence Number=SeqID_45319
  Gene Ontology: Mol. function=helicase activity; Cellular component =cytoplasm; Biological process=gene silencing by RNA
  Homolog annotation: Hit_ID=B9REU6; Match level="QueryCoverage=73%, HitCoverage=26%, E-value=9e-88, Identity=70%"; Hit description=ATP -dependent helicase NAM7, putative
PNYVTKLVRNYRCHPAILELPSELFYGGELIACKEDEASPAYDCIGLPNKSFPVLFVGIQGCDEREGTNPSWFNRIEVSKVVSIIRNLTKGGTVSEADIGVITPYRQQVAKIKKALEAFEMPDLKVGSVEQFQGQEREVIIISTVRSTVKHNEFDKFFNLGFLSNYKRFNVAITRAKSLLVIVGNPHIITKDRHWDRLLRYCADNGSYQGCPLPPPESYSYSDETKYDEDQGGPAGWDYNQEATSYNCNQEATSYNCNQEPSDSGYRGDNDAKSAATNNRTKWSEELPEDENQPFNNAEASTPCR

SEQ ID NO: 111294 - protein, 59 aa, Setaria italica
  Transcript Sequence Number=SeqID_45320
NVDGSQTNIYIILCTQERERERDEIWRAQIIRFCIILVCWDSLQRIPTHQYYLFVRWLF

SEQ ID NO: 111295 - protein, 60 aa, Setaria italica
  Transcript Sequence Number=SeqID_45321
SDVLYSYVLPLCVFFLKKRRNKLTMCAFKVVIDLVIVTVDNVSLIVSKSLVINKLKYDQL

SEQ ID NO: 111296 - protein, 125 aa, Setaria italica
  Transcript Sequence Number=SeqID_45322
  Gene Ontology: Mol. function=3-hydroxyacyl-CoA dehydrogenase activity; Cellular component=cytoskeleton; Biological process=fatty acid metabolic process
  Homolog annotation: Hit_ID=B6SXV4; Match level="QueryCoverage=100%, HitCoverage=17%, E-value=8e-49, Identity=72%"; Hit description =Peroxisomal fatty acid beta-oxidation multifunctional protein
QSKFITAKEGKERGLIDALCSGDELIKMSRHWALEIASCRRTWTKSLGRTDKLGSPSEARALLSTTRQQVKKISTNMPQYQACLDVIEEGVLFGGHAGVLKEYKVFKELVPSQTSRSLVHVFLAQ

SEQ ID NO: 111297 - protein, 232 aa, Setaria italica
  Transcript Sequence Number=SeqID_45323
  Homolog annotation: Hit_ID=O64609; Match level="QueryCoverage=81%, HitCoverage=37%, E-value=2e-52, Identity=57%"; Hit description =F17O7.19 protein
  Pfam annotation: Domain name=NHL; Domain location=118-145; Score =38.5; E_value=2.8e-08; Accession=PF01436.13; Description=NHL repeat
VKQLSSVVKWPRGAASPHGAAKQPAHSQYADVHVGVALQFESGYFVETLVEGDKLGVTPHTIRVSPVEGGELLAVDSAHSNIVRITPPLSEYSRGRLVAGSFQGHSGHIDGKPSDARFKRPTGVAVDDMGNVYVADTANLAIRKIGESGVTTIAGGKSNIPGYRDGPSEDAKFSTDFDVVYVKKMCSLLVIDRGNAALRKIALPQEDCTYQDSSLLSSDIILFHFSINCAVY

SEQ ID NO: 111298 - protein, 118 aa, Setaria italica
  Transcript Sequence Number=SeqID_45324
SFVLYTDIILVIGAVVAGYIFSGFQHGFGFSSSEKVEAPENEQHESSTLGKPPLVVESLKEEPGAGWPSLGTLISDLLKLAIEGVGKLLLSIVPKRKTDLTPLKDRLVMPEDREETST

SEQ ID NO: 111299 - protein, 331 aa, Setaria italica
  Transcript Sequence Number=SeqID_45325
  Homolog annotation: Hit_ID=O64609; Match level="QueryCoverage=22%, HitCoverage=15%, E-value=2e-20, Identity=68%"; Hit description =F17O7.19 protein
GKISYLISLVLYTANLAIRKIGESGVTTIAGGKSNIPGYRDGPSEDAKFSTDFDVVYVKKMCSLLVIDCGNAALRKIALPQEDCTYQDSSLLSSDIILVIGAVVAGYIFSGFQHGFGFSSSEKVEAPENEQHESSTLGKPPLVVESLKEEPGAGWPSLGTLISDLLKLAIEGVGKLLLSIVPKRKTDLTPLKDRLVMPEDREETSTAQKLSSTPMRPETLHAPNAVTETAPKAQKSIKPSKFRDSTLSSKHRSSKRQEYADFYGTSEPAAASAKLPKDRLRHRHREKSGEVPYGTAHPEPRPAEAKPADYSDPKYDHYVRSKYAAESGYRY

SEQ ID NO: 111300 - protein, 158 aa, Setaria italica
  Transcript Sequence Number=SeqID_45326
  Homolog annotation: Hit_ID=B6SS40; Match level="QueryCoverage=72%, HitCoverage=33%, E-value=8e-17, Identity=48%"; Hit description=GATA transcription factor 20
CGIRQRKARRAMMASAGGSGPAPADGAKAATATPRDAMAASVHHPKVKKEKRIDVDRSLPFKKRCKVVQDHAPVAAPPAAAHKAAAVPPTGEVVDASGLSSRDLVDDIGLISWSRSPAPPSSAASCSFRSSPGLPVQQDEVTDAAMLLMTLSCGLVRS

SEQ ID NO: 111301 - protein, 653 aa, Setaria italica
  Transcript Sequence Number=SeqID_45327
  Gene Ontology: Mol. function=nucleic acid binding; Cellular component= cytoplasm; Biological process=mRNA polyadenylation
  Homolog annotation: Hit_ID=B9RHF9; Match level="QueryCoverage=19%, HitCoverage=27%, E-value=5e-22, Identity=42%"; Hit description=Poly -A binding protein, putative
  Pfam annotation: Domain name=RRM_1; Domain location=521-590; Score =62.6; E_value=1.4e-15; Accession=PF00076.14; Description=RNA recognition motif. (a.k.a. RRM, RBD, o
MGREATELDAEQQQLLLRRCRRLFTVEDRSFRMDRRSQAAAALRAAVADVLPRFLGSYTDDTLEEYIVILVCNGKNQYQARDDLEAFLGDDSAKFVAWLWSYLGKQALASADNCNFQHGMDNESENLNDKKKHLVAKAHHGDAHVVNSKVTVPETYHGLHKLDSTIGQNVPQRCINSTVIISPEKLGCNQFIRENQHHKNGQNVARSRSFSERTTEILTQDELHGEHLGRNASTRWLPESVGIDDERVPVSLKRRRNVWDRLGKPVVEDRGLVGQTHDIPVQNGVHKVAKLMVAEHEPRYHVTSNAQHDAFDKAGSRKFTNCFTDVNTIAKGRSSNAGKANRSRLIGRLSFGEGNVFHGDVGRNNLQDRDVISQKSSLSLPIKNIQSQSLNEFTSDMKGSPLAVSEPICNTFRPSKGLASASKKLPLLTVPRNSETEVSHGEQVSSPAYSKIPSSVHEDGNSCRNKLVKEEILDVKLKLKQMEQDVLKLRNKQAQINNGKQAALSLGPHANSEDDADSRTIFVTNVHFAATKEALSMHFMKCGTVLKVNILTDAITGHPKGAAYVTFADRECIEKAVSFSGTSFLARVLTVMRKADAPPGFLASVQQTGRPLQPWKSPPFKTASTPKQTSGYHLQWKRDQSVLEKSPASCATN

SEQ ID NO: 111302 - protein, 75 aa, Setaria italica
  misc_feature (6)..(6): Xaa can be any naturally occurring amino acid
  misc_feature (19)..(19): Xaa can be any naturally occurring amino acid
  Transcript Sequence Number=SeqID_45328
  Gene Ontology: Mol. function=copper ion binding; Cellular component =mitochondrial inner membrane; Biological process=cell redox homeostasis
  Homolog annotation: Hit_ID=Q8VYP0; Match level="QueryCoverage=98%, HitCoverage=22%, E-value=5e-23, Identity=67%"; Hit description =Putative SCO1 protein
DLIGLXGPTDEIRQVSTCXRVYYMKTVEEGSDYLVDHSIVMYLMNPKMEFVKFYGKNYDTDSLADGIIKEIKEHK

SEQ ID NO: 111303 - protein, 191 aa, Setaria italica
  misc_feature (46)..(46): Xaa can be any naturally occurring amino acid
  Transcript Sequence Number=SeqID_45329
  Gene Ontology: Mol. function=copper ion binding; Cellular component =mitochondrial inner membrane; Biological process=respiratory chain complex IV assembly
  Homolog annotation: Hit_ID=Q8VYP0; Match level="QueryCoverage=95%, HitCoverage=53%, E-value=3e-62, Identity=62%"; Hit description =Putative SCO1 protein
  Pfam annotation: Domain name=AhpC-TSA; Domain location=61-189; Score =13.7; E_value=6.4e-05; Accession=PF00578.13; Description=AhpCTSA family
  Pfam annotation: Domain name=SCO1-SenC; Domain location=20-186; Score= 136.5; E_value=8.7e-38; Accession=PF02630.6; Description=SCO1SenC
  Pfam module annotation: Pfam domain module=AhpC-TSA::SCO1-SenC; Domain location=61-189::20-186
EQGDAGKSVRGGPVSWLSFLLLLVTGGGIIVYYDQEKKRHIEGRLXELKNRTTAVKPGQSVGTAAIGGPFKLLNHDGKPVTEKDFLGKWTLLYFGFTHCPDICPDELQKMAAAIDKIKEKAKLDIVPVFITVDPERDTVEQVRDYVKEFHPDLIGLTGPTDEIRQVARAYRVYYMKTVEEGSDYLVEPTTN

SEQ ID NO: 111304 - protein, 132 aa, Setaria italica
  Transcript Sequence Number=SeqID_45330
  Homolog annotation: Hit_ID=A5Z1R3; Match level="QueryCoverage=31%, HitCoverage=47%, E-value=4e-09, Identity=54%"; Hit description =Ethphon-induced protein
  Pfam annotation: Domain name=DUF581; Domain location=23-82; Score =61.7; E_value=2.7e-15; Accession=PF04570.6; Description=Protein of unknown function (DUF581)
MPVPETMEEERYVQVASRFFRVKPGGGGGGDGCTASLHYLGSCFLCKESIACNRDVFMYKGDAAFCSDDCRQEQMAMDEALDAVARRHRLLRAPPPPSSSPAGEAPSSSRPLVMRRRPTIANLAARNHPVAA

SEQ ID NO: 111305 - protein, 98 aa, Setaria italica
  Transcript Sequence Number=SeqID_45331
VITKSDVHSLVIPSCSRGSLPTVLNCSLDSLLYTRYHTEEVTHPCMNSVLQDPQRRTITHAYKANHQPVLILLVDCNSSTIRRRKQQSPTDPATNTTA

SEQ ID NO: 111306 - protein, 64 aa, Setaria italica
  Transcript Sequence Number=SeqID_45332
MPVPETMEEERYVQVASRFFRVKPGGGGGGDGCTASLHYLGSCFLCKESIACNRDVFMYKYAHA

SEQ ID NO: 111307 - protein, 55 aa, Setaria italica
  Transcript Sequence Number=SeqID_45333
  Gene Ontology: Mol. function=protein tyrosine/serine/threonine phosphatase activity; Biological process=protein amino acid dephosphorylation
  Homolog annotation: Hit_ID=B6TA53; Match level="QueryCoverage=100%, HitCoverage=14%, E-value=2e-23, Identity=94%"; Hit description=Dual -specificity protein-like phosphatase 4
HRNEMQGGSTYVHCKAGRGRSTTIVLCFLIKYRNMTPETALDHARSVRPRVLLAP

SEQ ID NO: 111308 - protein, 101 aa, Setaria italica
  Transcript Sequence Number=SeqID_45334
  Gene Ontology: Mol. function=protein tyrosine/serine/threonine phosphatase activity; Biological process=protein amino acid dephosphorylation
  Homolog annotation: Hit_ID=B6T896; Match level="QueryCoverage=78%, HitCoverage=37%, E-value=1e-30, Identity=83%"; Hit description =Protein-tyrosine phosphatase mitochondrial 1
RDGLEVEASGGGEVVAVVRLKAKCALVGAGARFLLYPTLLYNVVRNRFEPESPWWDSVDQYVLLGAVLFPSDVPRLKQLGVRGVVTLNEPYETLVPTFYTR

SEQ ID NO: 111309 - protein, 61 aa, Setaria italica
  Transcript Sequence Number=SeqID_45335
GDELIPRPVSDIRTLIDAIGYVIAWPHSHVKKATSTNLKQLGDITFQGRSEAAMERGKNGQ

SEQ ID NO: 111310 - protein, 364 aa, Setaria italica
  Transcript Sequence Number=SeqID_45336
  Gene Ontology: Mol. function=protein tyrosine/serine/threonine phosphatase activity; Cellular component=mitochondrial inner membrane; Biological process=protein amino acid dephosphorylation
  Homolog annotation: Hit_ID=B6TA53; Match level="QueryCoverage=90%, HitCoverage=88%, E-value=1e-148, Identity=82%"; Hit description=Dual- specificity protein-like phosphatase 4
  Pfam annotation: Domain name=DSPc; Domain location=66-206; Score =36.0; E_value=1.5e-07; Accession=PF00782.12; Description=Dual specificity phosphatase, catalytic domain
LRDGLEVEDDEREEEARGGGEVVAVVRLKAKRALVGAGARFLFYPTLLYNVVRNRFEPEFRWWDSVDQYVLLGAVPFPSDVPRLKQLGVRGVVTLNEPYETLVRTSLYQSHGINHLEIPTRDYLFAPSLEHICRAVDFIHRNEMQGGSTYVHCKAGRGRSTTIVLCFLIKYRNMTPETALDHARSVRPRVLLAPAQWEAVKTFSTLNARCLAIQSSNPTCSALSYEESSEQSSMLTSRCLSIRSTDEDFSVTSDEESCEASVADPEVYGYATTEFDSEHFVLPRCRSLLPRPASPTGCNDLVFVTEADLEGYETFTGAGKGDVEVEVVVRQKPIMRKLSCFLGSLKLTSNCEPPPSRLTEVRAC

SEQ ID NO: 111311 - protein, 163 aa, Setaria italica
  misc_feature (115)..(115): Xaa can be any naturally occurring amino acid
  Transcript Sequence Number=SeqID_45337
  Gene Ontology: Mol. function=protein tyrosine/serine/threonine phosphatase activity; Biological process=protein amino acid dephosphorylation
  Homolog annotation: Hit_ID=B6T896; Match level="QueryCoverage=71%, HitCoverage=70%, E-value=6e-49, Identity=67%"; Hit description =Protein-tyrosine phosphatase mitochondrial 1
MRIRELRDGLEVEDDEREEEARGGGEVVAVVRLKAKRALVGAGARFLFYPTLLYNVVRNRFEPEFRWWDSVDQYVLLGAVLFPSDVPRLKQLGVRGVVTLNEPYETLVPTSLYQXNEMQGGSTYVHYKAGRGRRTTIVLCFLIKYMNMTPETALDHAWEESCG

SEQ ID NO: 111312 - protein, 94 aa, Setaria italica
  Transcript Sequence Number=SeqID_45338
KSSLSTICSWLSIPEQDNQENESTNKLILRIADTNYIHFTMQFRQGTEMRRPTRMHRPSVPTPSRDHAPLSLLSFGEELLRPATDLAYRWFPAG

SEQ ID NO: 111313 - protein, 72 aa, Setaria italica
  Transcript Sequence Number=SeqID_45339
FIVLLQFNKNNSYNRTQHLTYRLLRGYIFYKYRSLQLKSNLLFSDGTSSLGAGDVGSEAYIRTTSRTPVPYS

SEQ ID NO: 111314 - protein, 169 aa, Setaria italica
  misc_feature (78)..(78): Xaa can be any naturally occurring amino acid
  misc_feature (94)..(94): Xaa can be any naturally occurring amino acid
  Transcript Sequence Number=SeqID_45340
  Gene Ontology: Mol. function=RNA-directed DNA polymerase activity; Biological process=RNA-dependent DNA replication
  Homolog annotation: Hit_ID=Q7XNY0; Match level="QueryCoverage=54%, HitCoverage=9%, E-value=5e-11, Identity=41%"; Hit description =OSJNBa0035M09.1 protein
MARVSYYEVRALCCSLVGDSFSIEIYQFSSKNNFTLWLLGRLNNVVLEDQEDRFEWIWNKNGNFLVKSVYEHLAKYDXEKNLKQNWKAKVLQKXKIFVWLHMAILTKDNMLKRKWQGDPSCNFCDQEETADHLSWLCCDEWHVLLLLPVLGLILNPTATNSFVAGLKQF

SEQ ID NO: 111315 - protein, 65 aa, Setaria italica
  Transcript Sequence Number=SeqID_45341
AISSAANIYFIYQRVRTQKWMVSILLWVMFLFILFVLCLSYVKDIAALICDLVLIVLQNLFLGLL

SEQ ID NO: 111316 - protein, 511 aa, Setaria italica
  Transcript Sequence Number=SeqID_45342
  Gene Ontology: Mol. function=hydrolase activity, acting on acid anhydrides, in phosphorus-containing anhydrides; Cellular component =vacuole; Biological process=metabolic process
  Homolog annotation: Hit_ID=B9S370; Match level="QueryCoverage=97%, HitCoverage=36%, E-value=0.0, Identity=67%"; Hit description =Helicase, putative
  Pfam annotation: Domain name=Helicase_C; Domain location=71-153; Score=45.2; E_value=2.6e-10; Accession=PF00271.23; Description =Helicase conserved C-terminal domain
QKVYLIIEIGPLQVVIFCFSKNRCDRSADSMFGADLTSSSEKSEIRVFCDKVFSRLKGSDRNLPQVVGIQSLLRRGIGVHHAGLLPIVKEVVEMLFCRGVIKVLFSTETFAMGVNAPARTVVFDSLRKFDGKEHRKLLPGEYIQMAGRAGRRGLDNIGTVIIMCRDEIPEESDLKNLIVGKPTRLESQFRLTYTMILHLLRVEELKVEDMLKRSFAEFHAQKNLPEKEKLLLQMLRQPTKTIDCIKGEPSIEEYYEMALEAEAHRESITEAIMQLPSTQQFLMPGRLVVVKSESDDDHLLGVILKCPSQTLNKYIVLVLTGDCTSSALSPVLSNKTEKEPGDFQQGHFIIPKGKRGMEDEYFSSGSSRKGSVVIKIPLPYKGDASGMGFEVRAIEKKEIMSICTCKIKIDQVKLLEDCSKAAYSKTVQLLIKEQPDGTKYPPALDAIKDLKLRDMHFVERYIAYHRLLQKMSENKCHGCIKLKEHISLMREQKMYKDQLNELKFQMSDAET

SEQ ID NO: 111317 - protein, 163 aa, Setaria italica
  misc_feature (151)..(151): Xaa can be any naturally occurring amino acid
  Transcript Sequence Number=SeqID_45343
  Gene Ontology: Mol. function=aspartic-type endopeptidase activity; Biological process=DNA integration
  Homolog annotation: Hit_ID=O23864; Match level="QueryCoverage=93%, HitCoverage=11%, E-value=3e-70, Identity=79%"; Hit description =Polyprotein
PSILVYYCRPLSMTSRHQSDPGESHWTAVKNILKYLRRTKDMFLVYGGQEELVVTGYTDASFQTDRDDSKSQSGFVFTLNGGAVSWKSSKQETVADSTTEAEYIAASEAAKEGVWIRNFLIELGVFPNASSPLNLYCDNNGAIAQAKEPKXHQKNKHVMRRFH

SEQ ID NO: 111318 - protein, 43 aa, Setaria italica
  Transcript Sequence Number=SeqID_45344
LGLIDLSRELATAYPISFIISSRLVLLIGIQISDVIRTKKLNP

SEQ ID NO: 111319 - protein, 80 aa, Setaria italica
  Transcript Sequence Number=SeqID_45345
LIFTGIGKQTLFASNDVTSICLEVTLVHYYQGKVAAGPTITTHNNTIVLCCLQYVIIFLVTPSVYFYKHVARSPKLYFDH

SEQ ID NO: 111320 - protein, 68 aa, Setaria italica
  Transcript Sequence Number=SeqID_45346
  Gene Ontology: Mol. function=catalytic activity; Biological process =metabolic process
  Homolog annotation: Hit_ID=Q01L27; Match level="QueryCoverage=83%, HitCoverage=20%, E-value=9e-16, Identity=61%"; Hit description =OSIGBa0147J02.3 protein
LYAPYVFFKGCFDDTNLRMLRGTTGKEHGDGSVFNFDPNCINWRMYMFNTHIPAVLKVAAHMKKEGTA

SEQ ID NO: 111321 - protein, 234 aa, Setaria italica
  misc_feature (88)..(88): Xaa can be any naturally occurring amino acid
  Transcript Sequence Number=SeqID_45347
  Gene Ontology: Mol. function=hydrolase activity, acting on glycosyl bonds; Cellular component=vacuole; Biological process=cell wall organization and biogenesis
  Homolog annotation: Hit_ID=Q6L5C5; Match level="QueryCoverage=100%, HitCoverage=49%, E-value=1e-109, Identity=82%"; Hit description =Putative polygalacturonase
  Pfam annotation: Domain name=Glyco_hydro_28; Domain location=2-234; Score=-69.2; E_value=1.2e-05; Accession=PF00295.9; Description =Glycosyl hydrolases family 28
VFQDSPFWNIHPVYCSNVVIRNVTVLAPHDSPNTDGIDPDSSSNVCIEDCYISTGDDAVAIKSGWDEYGIAYGRPSSDITVRRITGSXPFAGFAVGSETSGGVQNVLAEHLNFFSSGFGIHIKTNTGRGGFIRNITVSDVTLDNVRYGLRITGDVGDHPDDSYNRSALPVVDTLTIKNVQGQNIREAGLIKGITNSAFSRICLSNVKLSGGTPVRPWKCEAVTGGALDVQPSPC

SEQ ID NO: 111322 - protein, 89 aa, Setaria italica
  Transcript Sequence Number=SeqID_45348
  Gene Ontology: Mol. function=methyltransferase activity; Cellular component=plasma membrane
  Homolog annotation: Hit_ID=B9SRZ1; Match level="QueryCoverage=76%, HitCoverage=11%, E-value=2e-20, Identity=60%"; Hit description=ATP binding protein, putative
RPRRRRRRPLQRERFMRGSRMNPGDRRTRSTMTIVIVMGLCCFFYILGAWQKSGTGRGDSIALRVNQETDCTILPNLHFETHHSLSGAN

SEQ ID NO: 111323 - protein, 58 aa, Setaria italica
  misc_feature (42)..(42): Xaa can be any naturally occurring amino acid
  Transcript Sequence Number=SeqID_45349
  Homolog annotation: Hit_ID=B4FSQ8; Match level="QueryCoverage=93%, HitCoverage=13%, E-value=3e-19, Identity=77%"; Hit description =Lysine ketoglutarate reductase trans-splicing related 1
FLFKQPAHEKIGVVDAQWIVHQAVPSLGNQGKSDNGRAPWEXVRARCRKEWGIVSNKV

SEQ ID NO: 111324 - protein, 91 aa, Setaria italica
  Transcript Sequence Number=SeqID_45350
  Subcellular localization annotation: CTP_CleavageSite=54; ConfidenceScore=5.79e-01
SSSSRPTPVARLASPASSAPPPPPHRPPPPRRRAVGRLPSLKPWRRLPCRRPTRAAVLVLFGQPLPTFCGGERSGDPAASRRISWSDCCSA

SEQ ID NO: 111325 - protein, 72 aa, Setaria italica
  Transcript Sequence Number=SeqID_45351
  Homolog annotation: Hit_ID=B6TPP1; Match level="QueryCoverage=100%, HitCoverage=17%, E-value=8e-34, Identity=94%"; Hit description =Lysine ketoglutarate reductase trans-splicing related 1
MAKPGILGRSSVPRSNESMRIIFSAVVGVMLGYLFGISFPTVNITKLHFPSSIISYIEDRNSGITTQTLLNH

SEQ ID NO: 111326 - protein, 134 aa, Setaria italica
  Transcript Sequence Number=SeqID_45352
  Homolog annotation: Hit_ID=B6TPP1; Match level="QueryCoverage=100%, HitCoverage=33%, E-value=7e-73, Identity=94%"; Hit description =Lysine ketoglutarate reductase trans-splicing related 1
  Pfam annotation: Domain name=DUF707; Domain location=1-120; Score =62.8; E_value=1.1e-18; Accession=PF05212.4; Description=Protein of unknown function (DUF707)
KVTEERPGWCTDPHLPPCAAFVEIMATVFSRDAWRCVWHMIQNDLVHGWGLDFALRKCVEPAHEKIGVVDSQWIVHQVIPSLGNQGKAENGKAPWEGVRARCRKEWGIFQTRLADAEKAYYLDHGITPPNLTGA

SEQ ID NO: 111327 - protein, 95 aa, Setaria italica
  misc_feature (16)..(16): Xaa can be any naturally occurring amino acid
  misc_feature (21)..(21): Xaa can be any naturally occurring amino acid
  Transcript Sequence Number=SeqID_45353
  Homolog annotation: Hit_ID=B6TPP1; Match level="QueryCoverage=89%, HitCoverage=21%, E-value=8e-42, Identity=90%"; Hit description =Lysine ketoglutarate reductase trans-splicing related 1
  Pfam annotation: Domain name=DUF707; Domain location=2-95; Score= -90.3; E_value=2.2e-08; Accession=PF05212.4; Description=Protein of unknown function (DUF707)
LAEKYIELVRKHGLEXSQPGXQPDRGLTWQMTKRRGDQEVHKVTEERPGWCTDPHLPPCAAFVEIMATVFSRNAWRCVWHMIQNDLPWLPSEGTA

SEQ ID NO: 111328 - protein, 127 aa, Setaria italica
  Transcript Sequence Number=SeqID_45354
  Gene Ontology: Mol. function=histone-lysine N-methyltransferase activity; Cellular component=nucleus; Biological process=chromatin modification
  Homolog annotation: Hit_ID=Q9ZUM9-2; Match level="QueryCoverage=65%, HitCoverage=23%, E-value=7e-21, Identity=56%"; Hit description =Isoform 2 of Histone-lysine N-methyltransferase ASHR2
YSLPDPSIHTILSLSSVPPPPPGAQDAAGLHAAVTALAPPQMLPQGFSPDLTAALLAKDRGNSFAIMEPYRPGMSLELLKARAYAVYSQASLFNHDCLPNACHFDYPDRPGPGNTDIVVRALHDIQR

SEQ ID NO: 111329 - protein, 153 aa, Setaria italica
  Transcript Sequence Number=SeqID_45355
  Gene Ontology: Mol. function=zinc ion binding; Cellular component =cytoplasm; Biological process=apoptosis
  Homolog annotation: Hit_ID=B6TEZ7; Match level="QueryCoverage=100%, HitCoverage=36%, E-value=2e-79, Identity=90%"; Hit description =Programmed cell death protein 2
  Pfam annotation: Domain name=zf-MYND; Domain location=116-152; Score =16.9; E_value=0.00053; Accession=PF01753.10; Description=MYND finger
SKAGGIPAWLDPVNLPSGKSSCCGFCGEPLQFVLQIYAPIEDNAAAFHRTLFVFMCPSMACLLRDQHEQWSHKHGNPCRSVKVFRCQLPRTNAFYSTEPPKHDGSDKPLFPGAPVCHWCGTWKGDKICSSCKKAGSGPEKHQALHWRTGHKND

SEQ ID NO: 111330 - protein, 97 aa, Setaria italica
  Transcript Sequence Number=SeqID_45356
  Gene Ontology: Mol. function=methyltransferase activity; Cellular component=ribonucleoprotein complex; Biological process=porphyrin biosynthetic process
  Homolog annotation: Hit_ID=B9T2G3; Match level="QueryCoverage=98%, HitCoverage=98%, E-value=8e-32, Identity=72%"; Hit description=Snrnp sm protein, putative
  Pfam annotation: Domain name=LSM; Domain location=14-92; Score=78.8; E_value=2e-20; Accession=PF01423.14; Description=LSM domain
MAAEEDMAVKEPLDLIRLSLDERIYVKLRSERELRGKLHAYDQHLNMILGDVEETVTTVEIDDETYEEIVRTSKRTIPFLFVRGDGVILVSPPLRTV

SEQ ID NO: 111331 - protein, 110 aa, Setaria italica
  Transcript Sequence Number=SeqID_45357
RRGGGASGGARGRRRGGIRRLRGAGGGGGGGAGWGAARGTAGRGCRGRGARRGGRRRRRGAGGEAGRCGGRPAAGGGSAAGAASRRRGRSRSRRPWRTGWVRWGTDESET

SEQ ID NO: 111332 - protein, 293 aa, Setaria italica
  Transcript Sequence Number=SeqID_45358
  Gene Ontology: Mol. function=methyltransferase activity; Cellular component=cellular_component; Biological process=metabolic process
  Homolog annotation: Hit_ID=Q9LVD0; Match level="QueryCoverage=99%, HitCoverage=98%, E-value=1e-95, Identity=58%"; Hit description =Protein carboxyl methylase-like
  Pfam annotation: Domain name=Methyltransf_11; Domain location=55-158; Score=54.5; E_value=3.9e-13; Accession=PF08241.4; Description =Methyltransferase domain
  Pfam annotation: Domain name=Methyltransf_12; Domain location=55-156; Score=32.2; E_value=2.1e-06; Accession=PF08242.4; Description =Methyltransferase domain
  Pfam module annotation: Pfam domain module=Methyltransf _11::Methyltransf_12; Domain location=55-158::55-156
MPRPEFQAPPDVFYNESEARKYTTSSRIIEIQSRISERALELLSLPNDGVPKLLLDIGCGSGLSGETLTEHGHHWIGYDISKSMLDVALERETEGDLLLADMGQGLGLRPGVIDGAISISAVQWLCNADKSSHDPRLRLKAFFGSLYRCLARGARAVLQFYADNVKQSEMIVTFAMRAGFAGGVVVDWPHSSKAKKSYLVLTCGPPSINTLLPKGKGENGEMCSDDEDDGSSDEDGDKTVGIYERNRSKKRQKTKKNGKGKDWLLKKKEQMRRRGHDVPADTKYTGRKRKTYF

SEQ ID NO: 111333 - protein, 72 aa, Setaria italica
  Transcript Sequence Number=SeqID_45359
VVPLCHCTVHGLLVPSHLDCSLHAKCQLVSQLQDNYALIMCLKSRVSVRKRKICSCFNSGTCSNFRLMSVIY

SEQ ID NO: 111334 - protein, 404 aa, Setaria italica
  Transcript Sequence Number=SeqID_45360
  Gene Ontology: Mol. function=binding
  Homolog annotation: Hit_ID=B9SBI2; Match level="QueryCoverage=94%, HitCoverage=21%, E-value=1e-101, Identity=47%"; Hit description =Eukaryotic translation initiation factor 3 subunit, putative
MAPKAGKAKPKPKGDKKKKEEKVLPIVLDVTVETPDYTQLTLKGISTDRILDIRKLLAVHVDTCHLTSYSLSHEVRGAQLKDTVEVASLKPCHLSIVEEDYTEELAVAHVRRLVDIVACTTAFGAKKPEQKPASPDAAAAAAEAAKPGSPGKTAPGGGGGGEEPMYPPPKLGQFYDFFTFSHLTPPLHYIRRSTRPFVDDKREDDFFQIDVRVCNGKPVTIVASQAGFYPAGKRALISRSLVGLLQQTSRAFDGAYKALMKAFVEHNKFGNLPYGFRSNTWVVPPVVADSPSVFPPLPTEDETWGGNGGGQGRDGKHDHRPWVKEFAILAAMPCKTTEDRQVRDRKAFLLHSLFVDVAVLKAVASIQQLISNHRSSHETENGTTGPVLYTEQVGDMKIMITKDK

SEQ ID NO: 111335 - protein, 34 aa, Setaria italica
  Transcript Sequence Number=SeqID_45361
YLKLFLFCLDDTSSLATYPLDEQSLGQDLWIQQK

SEQ ID NO: 111336 - protein, 123 aa, Setaria italica
  misc_feature (98)..(98): Xaa can be any naturally occurring amino acid
  Transcript Sequence Number=SeqID_45362
  Homolog annotation: Hit_ID=Q9FZ66; Match level="QueryCoverage=76%, HitCoverage=28%, E-value=3e-15, Identity=43%"; Hit description =F11A6.1 protein
GNGDTAAAAPSAKAACREGKAEEEALLPRRPQFPLASVAGALQRRINARYDDLARASEARCLTIEQVNEFLNCLIDARNELLQRCENVQRSFKIKKAXLLSNHRNYRSSYDRLFEQVCRLEAE

SEQ ID NO: 111337 - protein, 211 aa, Setaria italica
  Transcript Sequence Number=SeqID_45363
  Homolog annotation: Hit_ID=A6M8U7; Match level="QueryCoverage=72%, HitCoverage=50%, E-value=1e-23, Identity=38%"; Hit description=CA -responsive protein
MEKSSDHFLLAFVTALIIQRRRRNRESGEPSIPLGSKSGKKGRKAMKKQMSEEPPFPLSMLSCAMKRRIRDIYAEFCCAPITGDLVNEFLNCLIDARNELLQRCENVQRSFKIKKAMLSNHRNYRSSYDRLFEQVCRLEAERDNLKKDAAIYNYIQERLQKSLPYKMIMELSAMEMEAPEISFEELLAKEKEDTAFWQPNGKMRSISSNPK

SEQ ID NO: 111338 - protein, 57 aa, Setaria italica
  Transcript Sequence Number=SeqID_45364
LGADIILSDGTSGSQSVFVSLSSQPREDYIQTRQRFYLHCDNNCVSLRRCCYPNKTT

SEQ ID NO: 111339 - protein, 63 aa, Setaria italica
  misc_feature (55)..(55): Xaa can be any naturally occurring amino acid
  Transcript Sequence Number=SeqID_45365
  Gene Ontology: Mol. function=metal ion binding
  Homolog annotation: Hit_ID=B9SEI4; Match level="QueryCoverage=100%, HitCoverage=13%, E-value=5e-26, Identity=92%"; Hit description =Protein binding protein, putative
MCRALMPGDEESMSDEAIWETLPHFWVAISMVFLIAATTFTLLKLSGDVGALGWXWDLFINYG

SEQ ID NO: 111340 - protein, 473 aa, Setaria italica
  Transcript Sequence Number=SeqID_45366
  Gene Ontology: Mol. function=metal ion binding
  Homolog annotation: Hit_ID=UPI00001632AD; Match level="QueryCoverage =92%, HitCoverage=93%, E-value=1e-179, Identity=67%"; Hit description= zinc finger (C3HC4-type RING finger) family protein
  Pfam annotation: Domain name=Tmemb_185A; Domain location=34-298; Score=492.9; E_value=4.2e-145; Accession=PF10269.1; Description =Transmembrane Fragile-X-F protein
  Pfam annotation: Domain name=zf-C3HC4; Domain location=426-460; Score= 17.8; E_value=0.00093; Accession=PF00097.17; Description=Zinc finger, C3HC4 type (RING finger)
  Pfam module annotation: Pfam domain module=Tmemb_185A::zf-C3HC4; Domain location=34-298::426-460
MQRRRGQTWAGVGKTAQAAAAHAALFCFTLLLALRVDGRTTYSWWIIFIPLWLFHGIVARGRFSMPAPSLPHGRHWAPCHSIVAAPLLIAFELLLCIYLESLRVRNHPSVNLKIVFLPLLAFEAIILIDNFRMCRALMPGDEESMSDEAIWETLPHFWVAISMVFLIAATTFTLLKLSGDVGALGWWDLFINYGIAECFAFLVCTRWFNPMIHKPPTNGEASSSSAAIRYRDWESGLVLPSLEDHEQEGLCGLPDIGGHVMKIPLVVFQVFLCMRLEGTPPSARYIPIFAVFSPLFILQGAGVLFSLARLAEKVVLLLRNGPVSPNYLTASSKVRDCFAFLHHGSRLLGWWSIDEGSKEEQARLFYAESTGYNTFCGYPPEVVRKMPKKDLAEEVWRLQAALGEQSEITKCTKQEYERLQNEKVLCRICYEGEICMVLLPCRHRTLCKSCSDKCKKCPICRVPIEERMPVYDV

SEQ ID NO: 111341 - protein, 209 aa, Setaria italica
  misc_feature (91)..(91): Xaa can be any naturally occurring amino acid
  misc_feature (104)..(104): Xaa can be any naturally occurring amino acid
  Transcript Sequence Number=SeqID_45367
  Subcellular localization annotation: CTP_CleavageSite=50; ConfidenceScore=5.32e-01
QICYSLDKLWHNNIQTRNLQTIGFIFVPKTRKRRGSYLLFFLPSGSSPPSAPATSSSSPADAPSALLSPVVLGLPSSSPSPTKTPFKNSSXPRPPLPRSRSPPXRNFSTSPNPSRRPSPGANSSRDAPATASGAGSGANTAAGSPEKEARTASTSSRGRSYSPPPLNPAAAMATLARRGGYGRDVAAECWARWRARISSLLRSGKKNTR

SEQ ID NO: 111342 - protein, 40 aa, Setaria italica
  Transcript Sequence Number=SeqID_45368
NGSSKYIALDYNVNFSYIYLITHIQQFEKVDTLFPSIWQE

SEQ ID NO: 111343 - protein, 91 aa, Setaria italica
  Transcript Sequence Number=SeqID_45369
FFFFRKRQQQTTCLFYSYLSTTTERCSGFWVQYKAWYNLRNRMGVLCLQVIHKGSCCSYKEFLVGYSERNNYGKGRTCGTMADQYLRRKSL

SEQ ID NO: 111344 - protein, 73 aa, Setaria italica
  Transcript Sequence Number=SeqID_45370
  Gene Ontology: Cellular component=plasma membrane
VLLYSQYQYECSFLLHSLQLFVHGEKFNQPIFHCNNISGFVEPVVPENQNRALYSTHTFKILFKEGGCGTFVP

SEQ ID NO: 111345 - protein, 205 aa, Setaria italica
  Transcript Sequence Number=SeqID_45371
  Gene Ontology: Cellular component=plasma membrane
  Homolog annotation: Hit_ID=Q7RGU5; Match level="QueryCoverage=87%, HitCoverage=44%, E-value=4e-14, Identity=32%"; Hit description =Arabinogalactan protein
MAENPQLFGNGMPVPFYGEMFVLARDGVEFHVDKIPSAPGGQVKTKGTIYLSNIRMVFVPNKPVGNFFAFDMPLLFVHGEKFNQPIFHCNNISGFVEPVVPENQNRALYSTHTFKILFKEGGCGTFVPLFLNLIASVRRYNQFEAQSAANMAPRVDPLQAAQTPVDEMMRRAYVDPNDPTKIFLQQPAPESQLRRRNYHGPADNA

SEQ ID NO: 111346 - protein, 225 aa, Setaria italica
  misc_feature (19)..(19): Xaa can be any naturally occurring amino acid
  misc_feature (211)..(211): Xaa can be any naturally occurring amino acid
  Transcript Sequence Number=SeqID_45372
  Gene Ontology: Mol. function=protein binding; Cellular component =postsynaptic membrane
  Homolog annotation: Hit_ID=Q84S70; Match level="QueryCoverage=100%, HitCoverage=30%, E-value=1e-111, Identity=82%"; Hit description =Kelch-like protein
  Pfam annotation: Domain name=Kelch_1; Domain location=118-165; Score =41.9; E_value=2.5e-09; Accession=PF01344.17; Description=Kelch motif
  Pfam annotation: Domain name=Kelch_1; Domain location=167-213; Score =11.0; E_value=0.16; Accession=PF01344.17; Description=Kelch motif
  Pfam annotation: Domain name=Kelch_1; Domain location=24-69; Score =43.3; E_value=9.6e-10; Accession=PF01344.17; Description=Kelch motif
  Pfam annotation: Domain name=Kelch_1; Domain location=71-116; Score =52.2; E_value=2e-12; Accession=PF01344.17; Description=Kelch motif
  Pfam annotation: Domain name=Kelch_2; Domain location=118-165; Score =22.0; E_value=0.0024; Accession=PF07646.7; Description=Kelch motif
  Pfam annotation: Domain name=Kelch_2; Domain location=167-213; Score =6.2; E_value=6.5; Accession=PF07646.7; Description=Kelch motif
  Pfam annotation: Domain name=Kelch_2; Domain location=24-69; Score =13.2; E_value=0.76; Accession=PF07646.7; Description=Kelch motif
  Pfam annotation: Domain name=Kelch_2; Domain location=71-116; Score =20.8; E_value=0.0058; Accession=PF07646.7; Description=Kelch motif
  Pfam module annotation: Pfam domain module=Kelch_1::Kelch_1::Kelch _1::Kelch_1::Kelch_2::Kelch_2::Kelch_2::Kelch_2; Domain location=118 -165::167-213::24-69::71-116::118-165::167-213::24-69::71-116
WFDTVDCYDRSRDDWITCXSLTHEKGSLAGVSVNGRIYAFGGGDGSQCFSDVEIFDPTHGKWIKNQPMLEKRFALAGVALNGAIYAVGGFNGVQYLSSAERLDPREPNWKMLPMMSAGRGCHTLAVLNEKIFSIGGYDTGAKAMVATVEVYEPRMPSWVMVEPMNCTRGYHSSAVLGGSIFTFGGVKAEADTILDVVERYKEGCGWVTTGXKSIGRRCYCSAIVL

SEQ ID NO: 111347 - protein, 201 aa, Setaria italica
  misc_feature (183)..(183): Xaa can be any naturally occurring amino acid
  misc_feature (195)..(195): Xaa can be any naturally occurring amino acid
  Transcript Sequence Number=SeqID_45373
  Gene Ontology: Mol. function=protein dimerization activity; Cellular component=nucleus; Biological process=regulation of transcription, DNA-dependent
  Homolog annotation: Hit_ID=Q3LAG0; Match level="QueryCoverage=97%, HitCoverage=24%, E-value=3e-79, Identity=72%"; Hit description =Transposase-related protein w-gary2
  Pfam annotation: Domain name=zf-BED; Domain location=129-175; Score =43.3; E_value=9.7e-10; Accession=PF02892.7; Description=BED zinc finger
  Pfam annotation: Domain name=zf-BED; Domain location=30-76; Score =51.7; E_value=2.9e-12; Accession=PF02892.7; Description=BED zinc finger
  Pfam module annotation: Pfam domain module=zf-BED::zf-BED; Domain location=129-175::30-76
EEEDASMRVEGAFGGVHSHSTFRFKHKKRSKVWEEYKPIFLNGKVQFAECLYCRSRMSCKDSNGTSHLWRHQKICPGKEDVVRRRLKDSYFPCVLVNENEPVTPGDPVNQIISETLDDINSVIPGRFKSKVWKEFSPIYVEGKLQAADCVHCHKRLSANKYGGRSHLSRHLQTCQARSQKGVXYPSSLPSLKSRXQDELSP

SEQ ID NO: 111348 - protein, 67 aa, Setaria italica
  Transcript Sequence Number=SeqID_45374
  Subcellular localization annotation: CTP_CleavageSite=57; ConfidenceScore=5.23e-01
MRRPSAVATVVLLWLAVLTVAFHGCGRRLGCGGFLVRRTGSVAVPARKMLLAVTSFDAAASSSTDHH

SEQ ID NO: 111349 - protein, 53 aa, Setaria italica
  misc_feature (51)..(51): Xaa can be any naturally occurring amino acid
  Transcript Sequence Number=SeqID_45375
MYWLPVLVVRCWLIDVAKSLIMRMVLSFSMKRTPLLTHGALCYLYDLLKKXKK

SEQ ID NO: 111350 - protein, 254 aa, Setaria italica
  Transcript Sequence Number=SeqID_45376
  Gene Ontology: Mol. function=metal ion binding; Cellular component =intracellular; Biological process=regulation of transcription, DNA -dependent
  Homolog annotation: Hit_ID=B9SKQ1; Match level="QueryCoverage=52%, HitCoverage=18%, E-value=3e-29, Identity=45%"; Hit description=Brca1 associated ring domain, putative
  Pfam annotation: Domain name=C1_3; Domain location=99-127; Score=6.4; E_value=0.1; Accession=PF07649.4; Description=C1-like domain
KHVLSEDIGGTTELKRLQTPINLFEDECIFCHSFRTDEEIHGPMVCYLKGRLVFIEEGNLSKAIYVHKKCLMWAPEVCWDFESNIVENLESEIRRASRLRCARCGLPGAALGCYYKHCRKSFHIPCAVQIIDCRWDVDKRNVLCPKHVSKTLPCDKLSTHTKENDHSSSLRQSQCSQEDYPFTDFEEEGQQSDQLKTTCSFLPVGQCTDKEGKIDDHHREKQQTDQLNTSNVPQSTYIDKEADNHQKEKSNKQI

SEQ ID NO: 111351 - protein, 70 aa, Setaria italica
  Transcript Sequence Number=SeqID_45377
  Gene Ontology: Mol. function=DNA binding
  Homolog annotation: Hit_ID=B6T9W0; Match level="QueryCoverage=75%, HitCoverage=16%, E-value=6e-21, Identity=94%"; Hit description=6b -interacting protein 1
RMEAAKQRHAEEMERQRIKFLKDLELKRMQAFVDMQLQLARAKHARKGDASSEMLMSLAALPFLSSPSYL

SEQ ID NO: 111352 - protein, 184 aa, Setaria italica
  Transcript Sequence Number=SeqID_45378
  Gene Ontology: Mol. function=DNA binding
  Homolog annotation: Hit_ID=B6T9W0; Match level="QueryCoverage=80%, HitCoverage=46%, E-value=2e-31, Identity=53%"; Hit description=6b -interacting protein 1
VDRQIRPTDRLTQWTLPLTNYHRGSNLPSANLIHKAAAAAAAAATESESEDGYNNDYDDDDGYQQSPSRSVSSRSGGGATAAAPAVGSKRKMSSGSGGFGELARAIETFADMYERMEAAKQRHAEEMERQRIKFLKDLELKRMQAFVDMQLQLARAKHARKGDASSEMLMSLAALPFLSSPSYL

SEQ ID NO: 111353 - protein, 63 aa, Setaria italica
  Transcript Sequence Number=SeqID_45379
HQQNHKTLYHCIEWCYFCINQRPYPKINMWPMSMLTMSTDNVFSLNFEALASTNQHISRRPTN

SEQ ID NO: 111354 - protein, 155 aa, Setaria italica
  misc_feature (13)..(13): Xaa can be any naturally occurring amino acid
  misc_feature (58)..(58): Xaa can be any naturally occurring amino acid
  misc_feature (133)..(133): Xaa can be any naturally occurring amino acid
  misc_feature (144)..(144): Xaa can be any naturally occurring amino acid
  misc_feature (148)..(148): Xaa can be any naturally occurring amino acid
  misc_feature (150)..(150): Xaa can be any naturally occurring amino acid
  Transcript Sequence Number=SeqID_45380
  Gene Ontology: Mol. function=nucleic acid binding
  Homolog annotation: Hit_ID=B6TD71; Match level="QueryCoverage=100%, HitCoverage=39%, E-value=3e-48, Identity=66%"; Hit description=THO complex subunit 4
  Pfam annotation: Domain name=RRM_1; Domain location=31-133; Score =8.8; E_value=0.03; Accession=PF00076.14; Description=RNA recognition motif. (a.k.a. RRM, RBD, o
KQKDFVWRHDLFXEDSMVAAGLSGIESGTKLYISNLHYGVTREDIKVAGSSSSYYDIXQSHPCSAFLKPDVCLSTILLQELFSEMGHLKHCAVHYDNNRHPTGSAEVIFTRRSEALAALKRYNNVRLDGKAMXIEVIGADLGLXAAAXPXISVVP

SEQ ID NO: 111355 - protein, 139 aa, Setaria italica
  Transcript Sequence Number=SeqID_45381
  Gene Ontology: Mol. function=nucleic acid binding
  Homolog annotation: Hit_ID=B6TD71; Match level="QueryCoverage=100%, HitCoverage=45%, E-value=3e-41, Identity=65%"; Hit description=THO complex subunit 4
  Subcellular localization annotation: CTP_CleavageSite=14; ConfidenceScore=5.07e-01
MATSLDVPLDDLIKSRNGRGRGRGRGQGGGRGRGDGQRLARGSWRGRGTGTFRGRGLGVPSRRPLGVNTRSSSFAIAKSFNKAKDFVWRHDLFEDSMVAAGLSGIESGTKLYISNLHYGVTREDIKELFSEMGHLKHCA

SEQ ID NO: 111356 - protein, 82 aa, Setaria italica
  Transcript Sequence Number=SeqID_45382
  Subcellular localization annotation: CTP_CleavageSite=63; ConfidenceScore=5.11e-01
AIVQNRHRAKQTSASPAAFPPSQAKQAPNQAAAAEPGPQIKTQAEAGIAAGGSKKASSQDRIPGSAARPWRIRTRRRRRGPL

SEQ ID NO: 111357 - protein, 107 aa, Setaria italica
  Transcript Sequence Number=SeqID_45383
DVDPSQCSWLWMEVLKHNPDAFKVKAPAPPPSLQGPHEGPEYQNQSEMHFEYLTSNMNKARKEPVFPLDDINSRREHLRNELTPDSVASKKPKVRKKENGNSVSSSG

SEQ ID NO: 111358 - protein, 40 aa, Setaria italica
  Transcript Sequence Number=SeqID_45384
LLESLISYTTATAPSLTTANDTKGRNLKPACAYSCKSLTT

SEQ ID NO: 111359 - protein, 45 aa, Setaria italica
  misc_feature (37)..(37): Xaa can be any naturally occurring amino acid
  Transcript Sequence Number=SeqID_45385
  Subcellular localization annotation: CTP_CleavageSite=20; ConfidenceScore=5.02e-01
MPSSTPTYSVQPAPSVQPVPSSAGQSTRIDVREIKSXVIFKRIGP

SEQ ID NO: 111360 - protein, 120 aa, Setaria italica
  Transcript Sequence Number=SeqID_45386
  Homolog annotation: Hit_ID=B6U2N6; Match level="QueryCoverage=69%, HitCoverage=17%, E-value=3e-27, Identity=80%"; Hit description=Amino acid/polyamine transporter II
PGLEHPLLHAYEARKEAEAADDDHEAQCFGSEPDAGGASFVRTCFNGLNALSGVGLLSIPYALSEGGWLSLALLLVVAAVCCYTGLLLQRCMAASPAAARGYPEIGDLAFGRGGRLAASA

SEQ ID NO: 111361 - protein, 59 aa, Setaria italica
  Transcript Sequence Number=SeqID_45387
EWKIYMVIHRLHMGRIMVLGLIWQNDFHQICLGIFGQNFMSRGLSQYLLLYILLVCTFI

SEQ ID NO: 111362 - protein, 90 aa, Setaria italica
  Transcript Sequence Number=SeqID_45388
  Subcellular localization annotation: CTP_CleavageSite=47; ConfidenceScore=5.03e-01
LPRVAHIAYIRTSASLIAPLLLSLHATAAAMTALLSSPTQFTVSHHRLAKRVAHACLISPVPLDFCALLRPRPLSKLSPIRWTYQQVSRK

SEQ ID NO: 111363 - protein, 589 aa, Setaria italica
  Transcript Sequence Number=SeqID_45389
  Homolog annotation: Hit_ID=B9RMD8; Match level="QueryCoverage=44%, HitCoverage=45%, E-value=3e-92, Identity=60%"; Hit description=Yth domain-containing protein, putative
  Pfam annotation: Domain name=YTH; Domain location=397-487; Score =201.7; E_value=2e-57; Accession=PF04146.7; Description=YT521-B-like family
  Subcellular localization annotation: CTP_CleavageSite=32; ConfidenceScore=5.16e-01
MATAPQQQAQGSADSMISLQSEAVLENNPSKSASSKEQVISGTENMAAGNARGASSLKSPKGAPEKASSVGKGGEQPFLYQHNVYAPQPQALYPGGYMNPSGQWEEYPHYVNMEGLHSVSPGIYNDMLSPGYANNPQMMYGAYSPVSTVGDGQQYLPVHFPFSSSYYQPPASPSMGYSNSVTGMSQGDHMLQPEYFLPDGLLYSPTPGYHQPFSSFDRAPTQPNNTPGLFGQGNMPLASGMHHGSPYGPGSYKARQQGGKLGGTAPSWNSGRRFGAFDLSANQQRPFGSHNGSLEFMNEQNRGPRATKPKIQDTENSSADEKSEKTVPLIDSELYNRPDFITEYKDAKFFVIKSYTEDHVHRSIKYSVWASTASGNRKLDSAYRAAKEKEDHCPIFLFFSVNGSGQFCGVAEMIGPVDFDRSVDYWQQDKWSGQFPVKWHIIKDVPNNLLRHIILENNDNKPVTNSRDTQEVKLEQGLQMLTIFKNHEAETTILEDFDFYEQREKALQENRRQQQPGITIPQKPADTKAQALVADMSDAFAKAVQLEEAENSGKPLKAESASAENGSTATAKVEEGDTNVKADPVEGSG

SEQ ID NO: 111364 - protein, 95 aa, Setaria italica
  Transcript Sequence Number=SeqID_45390
  Gene Ontology: Mol. function=hydrolase activity; Cellular component =extracellular region
  Homolog annotation: Hit_ID=B6SXU7; Match level="QueryCoverage=71%, HitCoverage=12%, E-value=2e-24, Identity=79%"; Hit description =Heparanase-like protein 3
GRTTDKESYGHSHAPGLAAAAAAGATRDEYHLTPKGGDLRSQVMLLNGRALATGADGSIPRLEPVKVGAAEPIAVAPYSIVFARIPHFNAPACRS

SEQ ID NO: 111365 - protein, 63 aa, Setaria italica
  Transcript Sequence Number=SeqID_45391
PTRILYLVLLITQDELNTIVENLLWVLWMQDTVLILLLPATEEFIHPACIIAFTHSCLMYEFL

SEQ ID NO: 111366 - protein, 74 aa, Setaria italica
  Transcript Sequence Number=SeqID_45392
RRPHVVAGEVGEVAGGRRRIYVVGAGLDVAVGTVSAAAAAGAPGVEEEVVEWEVVKGPAEFAGLAPCNAQVLYA

SEQ ID NO: 111367 - protein, 48 aa, Setaria italica
  Transcript Sequence Number=SeqID_45393
YFQVNHSITVKGKCVPPSYHTFLLCSHILVCTLINPGVLLMLALLKPT

SEQ ID NO: 111368 - protein, 82 aa, Setaria italica
  Transcript Sequence Number=SeqID_45394
EVAGEGHPRCHEGRRLVLVVLRVVHVNTCGHAPCRHARGLCYLVAPPLPSPELAPVSALILCASQAAWRSREELASTLHSGL

SEQ ID NO: 111369 - protein, 160 aa, Setaria italica
  Transcript Sequence Number=SeqID_45395
  Gene Ontology: Mol. function=adenosylhomocysteinase activity; Cellular component=cytoplasm; Biological process=one-carbon compound metabolic process
  Homolog annotation: Hit_ID=B6EBE6; Match level="QueryCoverage=93%, HitCoverage=50%, E-value=2e-48, Identity=67%"; Hit description=S -adenosyl homocysteine hydrolase (Fragment)
  Pfam annotation: Domain name=AdoHcyase; Domain location=13-149; Score= -115.9; E_value=3.4e-10; Accession=PF05221.9; Description=S-adenosyl -L-homocysteine hydrolase
ITIKPQTDRWVFPETKTGIIVLAEGRLMNLGCATGHPSFVMSCSFTNQVNLSANTHLVLPMLADTLAVEIIQVIAKSLLTHHTKSWCLIQVIAQLELWKEKSSGKYEKKVYVLPKHLDEKVAALHLGKLGARLTKLSKSQADYISVPSELLVVLPSTGSE

SEQ ID NO: 111370 - protein, 383 aa, Setaria italica
  Transcript Sequence Number=SeqID_45396
  Homolog annotation: Hit_ID=Q9LNS7; Match level="QueryCoverage=31%, HitCoverage=17%, E-value=1e-10, Identity=37%"; Hit description =T20H2.23 protein
MAKGGEGGAAAPPRDPLVYLPQWRRLYDRLLKMLREEHALAEELSVERAHLIAELEFQRNGRREREEIFRTRIEQIWRDEERRKRVEKAERAVLIGGKDLESRCYQKLAELADSDTEDLRSFISTLTAENSELKAKVKEAESQAQLNENNVDHQHSGKDLRVELRKLKQAYKTLSSEKDRQISALTAEKDFVWNQFKTMEQEYIVTIKNKNIEAKQANEAAQKLQHNVDELQEAAQEKDDEIARLQAEVTNAKEKMLILEDELQQMHSLVKARDAEAGKNKDDQPETSRKSKKDIKGTNRKSKSEGPLSKEKSRTSQVTPDRRDVKTSRTRASESSQKRKRGSSISCGSRRCSTRPLQVKAAVSPMLLPPSFTVPKLKTPTPP

SEQ ID NO: 111371 - protein, 112 aa, Setaria italica
  misc_feature (12)..(12): Xaa can be any naturally occurring amino acid
  misc_feature (34)..(34): Xaa can be any naturally occurring amino acid
  misc_feature (61)..(61): Xaa can be any naturally occurring amino acid
  Transcript Sequence Number=SeqID_45397
  Gene Ontology: Mol. function=nucleotide binding; Biological process =defense response
  Homolog annotation: Hit_ID=Q9MB02; Match level="QueryCoverage=85%, HitCoverage=44%, E-value=2e-26, Identity=68%"; Hit description=RPM1 like protein (Fragment)
MDITTGAMNTPXPKLTELVVGEYNLQKGVKGEIXELEKELTCITAALRKVSKVPADQLDEXSRYWAGDARELSYDIEDAVDTFMLRGKGHEHTKSFSFKELIAKTTNCTRGR

SEQ ID NO: 111372 - protein, 78 aa, Setaria italica
  Transcript Sequence Number=SeqID_45398
  Subcellular localization annotation: CTP_CleavageSite=30; ConfidenceScore=5.56e-01
FSYRSALKDGPQLCPYCTQPFSVQGNKFVRESARFSSGRGATATNGQVFNELFNRGMRGTAPSGTIVGSAEISFNILD

SEQ ID NO: 111373 - protein, 104 aa, Setaria italica
  Transcript Sequence Number=SeqID_45399
ILALGAFFFFAGQDILQGDCPNCGKSFQILKSALKDGPQLCPYCTQPFSVQGNKFVRESARFSSGRGSTATNGQVFNELFNRGMRGTAPSGTIVDIEAEVKDVE

SEQ ID NO: 111374 - protein, 75 aa, Setaria italica
  Transcript Sequence Number=SeqID_45400
MRTLGHTLSCLARMLNVLNTICSNLPPSYHRNKRNAVRRLRRQPYYSHICIYWTAKIKIGALTAHNHNMQPTNKL

SEQ ID NO: 111375 - protein, 233 aa, Setaria italica
  Transcript Sequence Number=SeqID_45401
  Gene Ontology: Mol. function=metal ion binding
  Homolog annotation: Hit_ID=B4FKR4; Match level="QueryCoverage=98%, HitCoverage=78%, E-value=1e-79, Identity=68%"; Hit description=FYVE zinc finger family protein
  Pfam annotation: Domain name=Ank; Domain location=170-202; Score =34.8; E_value=3.6e-07; Accession=PF00023.22; Description=Ankyrin repeat
  Subcellular localization annotation: CTP_CleavageSite=51; ConfidenceScore=5.17e-01
VCYNCFNKKSSSQGRAGNAGSAGSISGAADSFSGLSLGKEDASSPMKNLTVQSMTPVIECKCGMPLCICEAPKPEPAPVKNISTVPSSTTQSNPKPKKPASSQQKASATSSSNSSPFLNIGLMSNDSNDKGLSDYEVTGEGLREAIKSGDVKGVKKLLSQGVDSNYCDKQGFTLLHLAALFNQTEIALILMDHGANVQSKNGQGETPLDCAPAMLQYKMRQRMEELAASQRPT

SEQ ID NO: 111376 - protein, 57 aa, Setaria italica
  Transcript Sequence Number=SeqID_45402
CSSSIHGQPQDRGTAVLSPMNDTTCYSTDSSVTVLLYYTLKYRTLNGDNFHSPLTPK

SEQ ID NO: 111377 - protein, 114 aa, Setaria italica
  misc_feature (85)..(85): Xaa can be any naturally occurring amino acid
  Transcript Sequence Number=SeqID_45403
  Gene Ontology: Mol. function=nucleic acid binding
  Homolog annotation: Hit_ID=Q2QTR1; Match level="QueryCoverage=78%, HitCoverage=18%, E-value=3e-25, Identity=54%"; Hit description =Transposon protein, putative, Mutator sub-class, expressed
  Pfam annotation: Domain name=MuDR; Domain location=26-102; Score =80.8; E_value=4.8e-21; Accession=PF03108.7; Description=MuDR family transposase
ASNTSCDYIPDTDEEDNDDCVVDDQKGCELVGVTFEDRDTFMRAIRQYAILNEIEIAAPYNEAKRFTGYYKSSKCKWRIHASQLXDERTWMIKKMPNKHYCKSTSKVQNNCMAN

SEQ ID NO: 111378 - protein, 139 aa, Setaria italica
  Transcript Sequence Number=SeqID_45404
  Gene Ontology: Mol. function=ceramidase activity; Cellular component =extracellular region; Biological process=sphingolipid metabolic process
  Homolog annotation: Hit_ID=A9YFM2; Match level="QueryCoverage=100%, HitCoverage=17%, E-value=2e-70, Identity=92%"; Hit description =Neutral ceramidase
  Pfam annotation: Domain name=Ceramidase_alk; Domain location=1-139; Score=-446.2; E_value=0.0093; Accession=PF04734.5; Description =Neutralalkaline non-lysosomal ceramidase
RAFIVAEPDGKRVAFVNLDACMASQLVTIKALERLKARYGGLYNENNVAISGIHTHAGPGGYLQYVVYIVTSLGFVRQSFDVIVNGIEQSIVEAHNNLRPGKIYVNKGDLLDAGVNRSPSAYLNNPADERSKYQYNVDK

SEQ ID NO: 111379 - protein, 138 aa, Setaria italica
  misc_feature (37)..(37): Xaa can be any naturally occurring amino acid
  misc_feature (69)..(69): Xaa can be any naturally occurring amino acid
  misc_feature (93)..(93): Xaa can be any naturally occurring amino acid
  Transcript Sequence Number=SeqID_45405
  Gene Ontology: Mol. function=carbohydrate binding; Biological process= carbohydrate metabolic process
  Homolog annotation: Hit_ID=A2Q396; Match level="QueryCoverage=88%, HitCoverage=38%, E-value=2e-49, Identity=77%"; Hit description =Galactose mutarotase-like
KQRTKRNPKNRSRITSEQGDAIVFESELDRIYLGTPXKIAIIDHEKKRTFVVRKGGLPDAVVWNPWDKXAKAMPDFGDDEYKRMVCVEAATIXPVTLKPGEEWTGKLELSAVPSSYYSGQLDPDRVIQITSVPEDSIS

SEQ ID NO: 111380 - protein, 93 aa, Setaria italica
  Transcript Sequence Number=SeqID_45406
  Gene Ontology: Mol. function=carbohydrate binding; Biological process= carbohydrate metabolic process
  Homolog annotation: Hit_ID=B9RGR6; Match level="QueryCoverage=52%, HitCoverage=13%, E-value=7e-13, Identity=69%"; Hit description =Aldose 1-epimerase, putative
MSASASSPAAEEKQEAAPVTHCKGVNDLDKVVLREVLSHCFQVYLYGGHVTSWKDEHGDELLFVSNKVHVFFCLIIFQQYISYSEHFLGIQFN

SEQ ID NO: 111381 - protein, 93 aa, Setaria italica
  Transcript Sequence Number=SeqID_45407
MSASASSPAAEEKQEAAPVTHCKGVNDLDKVVLREVRGSSVEVLCYTHPLLRLLSVPAARSRRRSVALCHGSVRYGEGWTQLLLQSRSRYSAE

SEQ ID NO: 111382 - protein, 333 aa, Setaria italica
  Transcript Sequence Number=SeqID_45408
  Gene Ontology: Mol. function=carbohydrate binding; Biological process= carbohydrate metabolic process
  Homolog annotation: Hit_ID=A2Q396; Match level="QueryCoverage=91%, HitCoverage=96%, E-value=1e-141, Identity=77%"; Hit description =Galactose mutarotase-like
  Pfam annotation: Domain name=Aldose_epim; Domain location=29-305; Score=295.8; E_value=9.6e-86; Accession=PF01263.12; Description =Aldose 1-epimerase
MSASASSPAAEEKQEAAPVTHCKGVNDLDKVVLREVRGSSVEVYLYGGHVTSWKDEHGDELLFVSNKAIFKPPKAIRGGIPICFPQFSNFGNLEQHGFARNRFWTIDTDPPPFPVPTTNTAYVDLILKPTEEDLKIWPHSFEYRLRVALSPGGDLMLTSRIRNTNADGKSFSFTFAYHTYFKISDISEVRVEGLETLDYLDNLQDRARFTEQGDAIVFESELDRIYLGTPSKIAIIDHEKKRTFVVRKGGLPDAVVWNPWDKKAKAMPDFGDDEYKRMVCVEAATIEKPVTLKPGEEWTGKLELSAVPSSYYSGQLDPDRVIQDSSVPEDSIS

SEQ ID NO: 111383 - protein, 58 aa, Setaria italica
  Transcript Sequence Number=SeqID_45409
KNLNSPPCIIVHIYSRLLFTLIIFLPSTGSGLSIWFRRMPPDSSPGLFGKTPSDSNSL

SEQ ID NO: 111384 - protein, 186 aa, Setaria italica
  misc_feature (117)..(117): Xaa can be any naturally occurring amino acid
  misc_feature (132)..(132): Xaa can be any naturally occurring amino acid
  Transcript Sequence Number=SeqID_45410
HLIDQKVHIKVKAKFQPESKNGATTFELDNGRASKVQPIDSTDAPVPLATKMYHSQGNYRLRLELGQLYRESCMEHLSSHTTLNLSHGNGLMASQFTPCDNSSLPASQKNLVPQTKXIPQQLSASTPNHSLXPKTERADTQASTVSNEGSRSRCNKAAVPHSRNKGSKKAQQQANGHVHVIKSSVE

SEQ ID NO: 111385 - protein, 319 aa, Setaria italica
  misc_feature (122)..(122): Xaa can be any naturally occurring amino acid
  Transcript Sequence Number=SeqID_45411
MVCMPGHFKMASVLKLVMTENHTAPDDVMHEMTAAQVLQKQLFDAHEPNLLDENDMHIFGSKPMADPLDLVCCSTCKKPVKASQYAVHTEQCSSGKVNTNDSMGVDHESPTKPRKKGRKIKXISNGNQKVHIKVKAKFQPESKNGATTFELDNGRASKVQPIDSTDAPVPLATKMYHSQGNYRLRLELGQLYRESCMEHLSSHTTLNLSHGNGLMASQFTPCDNSSLPASQKNLVPQTKLIASTSESCSGIPQQLSASTPNHSLITKTERADTQASTVSNEGSRSRCNKAAVPHSRNKGSKKAQQQANGHVHVIKSSVE

SEQ ID NO: 111386 - protein, 69 aa, Setaria italica
  Transcript Sequence Number=SeqID_45412
  Gene Ontology: Mol. function=catalytic activity; Biological process =cellular metabolic process
  Homolog annotation: Hit_ID=C5MRG2; Match level="QueryCoverage=86%, HitCoverage=18%, E-value=3e-14, Identity=58%"; Hit description =Cinnamoyl-CoA reductase
MPRWNGYAGELGKYPNTTIGFVHVDDVVLCHVLAMEDARASGRLICSCDVAHWSEILSSLRERYPQYPT

SEQ ID NO: 111387 - protein, 209 aa, Setaria italica
  Transcript Sequence Number=SeqID_45413
  Gene Ontology: Mol. function=catalytic activity; Biological process =cellular metabolic process
  Homolog annotation: Hit_ID=C5MRG2; Match level="QueryCoverage=91%, HitCoverage=60%, E-value=9e-73, Identity=63%"; Hit description =Cinnamoyl-CoA reductase
RSLCSCVRYCHAATLNESHWSDADYCKSYNLWYAYAKTVAEKEAWRLAKEHGLDLVVVNPSFVIGPALGPRPTSTILIVLAMLKGELGKYPNTTIGFVHVDDVVLCHVLAMEDARASGRLICSCDVAHWSEILSSLRERYPQYPIPTECSAQKGDDRPHRMDTTKIRALGFPPFLSVQQMFDDCIKSFQDKGPPPVVQRHIPPLIASLA

SEQ ID NO: 111388 - protein, 187 aa, Setaria italica
  misc_feature (88)..(88): Xaa can be any naturally occurring amino acid
  Transcript Sequence Number=SeqID_45414
KTEVGNLQGCMFGRCSLIFKLMPRSVARLSGSEMRAAGHGVDAQFQVPISVNDFMQTGHSVDQLFPKDDEPSPHAEQDSATFNSANEXKRNRKVTKKQKTNYPNLTKNIADKKGIKLRFCNIKECESHIRSLDSPCENIRTEIGWPQGVPFVHPHDLPNKAKLGFLEAYEPGWTASQQETELSFTEP

SEQ ID NO: 111389 - protein, 167 aa, Setaria italica
  Transcript Sequence Number=SeqID_45415
SAAVIQLPPSESALLRSGLDSARLFFHQRGYNPSEAVHSDDAREWCKTSGYYVDPQMWLETYDYRPGVTVTDRSGAMELPPSGLPDIFAVLGKVSRDILDAISFSLNLRSCAFTDILDNIPLRSQEVSSSVLSACCHSRPSFEVQQHSIASQDDGQLLIFSDQDQQA

SEQ ID NO: 111390 - protein, 473 aa, Setaria italica
  Transcript Sequence Number=SeqID_45416
MEDAAGSILASLGRVRLVDLAACEGLPTENYKICVSTLMQSLAQYSAAVIQLPPSESALLRSGLDSARLFFHQRGYNPSEAVHSDDAREWCKTSGYYVDPQMWLETYDYRPGVTVTDRSGAMELPPSGLPDINAQLLKGMLSSMSVNAQLLKFNEKLIASKISLRSQEVSSSVLSACCHSRPSFEVQQHSIASQDDGQLLIFSDQDQQADKTLLTLVKSDRSGLYVKDMHGHWILLDGDLGPNDVVVYPGLALYQETAGYVNPAVYKTEVGNLQGCMFGRCSLIFKLMPRSVARLSGSEMRAAGHGVDAQFQVPISVNDFMQTGHSVDQLFPKDDEPSPHAEQDSATFNSAMKKKNGSTRTKPLPPSKRLRLEAQRVLKERVQDIADKKGIKLRFCNIKECESHIRSLDSPCENIRTEIGWPQGVPFVHPHDLPNKAKLGFLEAYEPGWTASQQETEEPASVNFDVLPTLDMF

SEQ ID NO: 111391 - protein, 100 aa, Setaria italica
  Transcript Sequence Number=SeqID_45417
QHWQLVCCCDWCPPSWCHPAQLLCCRPQGLDWATSSSQLSKSLELLSTLVSALHLLKAQSNGSNLSGGAAHSHGATHLSPCMLLVLLSYLLDGQSNSSHQ

SEQ ID NO: 111392 - protein, 85 aa, Setaria italica
  Transcript Sequence Number=SeqID_45418
  Gene Ontology: Mol. function=nucleic acid binding
RPRPWALHLPSGAGARDIAGLISRELRLRPGEVSVTLHQPEPYLIHFDSTTQAAEAWRRGRFTGGGIDICLRPWRSLTHALGFRI

SEQ ID NO: 111393 - protein, 113 aa, Setaria italica
  Transcript Sequence Number=SeqID_45419
  Gene Ontology: Mol. function=protein serine/threonine kinase activity; Biological process=protein amino acid phosphorylation
  Homolog annotation: Hit_ID=B6U5V2; Match level="QueryCoverage=52%, HitCoverage=15%, E-value=9e-25, Identity=89%"; Hit description =Serine/threonine-protein kinase receptor
KEERLEEIIDIDVGDDLDVEEACRFMKIGLLCTQDAMARRPNMTNVVRMLTGEKRINVDKITRPAMITDFADLKVSNKGQRSSETRSPATTAPTTFTTTEPFSSSETPTQSSM

SEQ ID NO: 111394 - protein, 90 aa, Setaria italica
  misc_feature (54)..(54): Xaa can be any naturally occurring amino acid
  Transcript Sequence Number=SeqID_45420
  Gene Ontology: Mol. function=protein serine/threonine kinase activity; Biological process=protein amino acid phosphorylation
  Homolog annotation: Hit_ID=B6SGP4; Match level="QueryCoverage=97%, HitCoverage=22%, E-value=1e-31, Identity=71%"; Hit description =Serine/threonine-protein kinase receptor
DQFLLERTWGLYEEGRLEEIIDTDIGDDLDVEEACRFMKIGLLCAQDAMARRPXMTKVVQMLTGEKRIPVGKIFRPTMFTDVVDLSKSLS

SEQ ID NO: 111395 - protein, 516 aa, Setaria italica
  Transcript Sequence Number=SeqID_45421
  Gene Ontology: Mol. function=protein serine/threonine kinase activity; Biological process=protein amino acid phosphorylation
  Homolog annotation: Hit_ID=B6U5V2; Match level="QueryCoverage=64%, HitCoverage=89%, E-value=1e-162, Identity=82%"; Hit description =Serine/threonine-protein kinase receptor
  Pfam annotation: Domain name=Pkinase; Domain location=205-476; Score =119.9; E_value=8.5e-33; Accession=PF00069.17; Description=Protein kinase domain
  Pfam annotation: Domain name=Pkinase_Tyr; Domain location=205-476; Score=81.1; E_value=4.1e-21; Accession=PF07714.9; Description =Protein tyrosine kinase
  Pfam module annotation: Pfam domain module=Pkinase::Pkinase_Tyr; Domain location=205-476::205-476
MISGIEHLLNLQEIAVRIGSAPGAEDSDRTAVESVFRNTTSKHSRHLSISIRMADSVDEVIPQFSDPAASSSRLDDLLHKPSTVADVTSQSNEIELAEVEVVSVHMTTSDPNIQTDQPIATSTFPRQTPPEASVSVAHNLLVVAGKSPTMKPSKSCGQIASSIKRETACCFMFGKKAKQAVEHDDDVHSVKVFSYSELRKATQDFSGANKIGEGGFGSVFRGVLKDETVVAVKVLSATSRQGIREFLTELTAISDIKHENLVTLVGCCAEGFHRILIYNYLENNSLAQTLLGTRYSNIRFNWCARVNIAVGVARGLAFLHEEIRPPIIHRDIKASNILLDKDLTPKISDLGLAKLLPPNATYVSIQVAGTLGYLAPEYAIRGQVTKKSDIYSYGVLLLEIVSGRCNTNTRLPSEDQFLLERTWGLYEEERLEEIIDIDVGDDLDVEEACRFMKIGLLCAQDAMARRPNMTNVVQMLTGEKRINVGKITRPAMITDVVDLSKSFHDILILSTKKSLS

SEQ ID NO: 111396 - protein, 323 aa, Setaria italica
  misc_feature (131)..(131): Xaa can be any naturally occurring amino acid
  Transcript Sequence Number=SeqID_45422
  Gene Ontology: Mol. function=transcription regulator activity; Cellular component=nucleus; Biological process=regulation of transcription
  Homolog annotation: Hit_ID=Q7FAG1; Match level="QueryCoverage=100%, HitCoverage=82%, E-value=3e-87, Identity=65%"; Hit description =OSJNba0093F12.24 protein
  Pfam annotation: Domain name=HLH; Domain location=216-265; Score =34.5; E_value=4.3e-07; Accession=PF00010.18; Description=Helix-loop -helix DNA-binding domain
MIPGDGYFEGSHDQCLMAGPFIHDSSQIPKGNGDTSIELQKFKVPSFSTEALSSPTNFSSEDVGGTNLLQHQLGIDLEQEAPPGETASWDPSVCTIQDQSINHQFGGYSENMLVEPEIQQYDAALYPNGAXAIPDNGLMFTGDSSVHLGYHATQPHLANDICHSLPQNYGLFPGEDEREVMIGAGSLGDLFQEVDDRQFDSVLECRRGKGEFSKGKGKANFATERERREQLNVKYRTLRMLFPNPTKNDRASIVGDAIEYIDELNRTVKELKILVEQKRHGNNREKRIKLDHQAAADGESSSVKPIRDDQDNQLIGAIRSSWV

SEQ ID NO: 111397 - protein, 60 aa, Setaria italica
  Transcript Sequence Number=SeqID_45423
LDNTSKRPGGVSYKMHVYNISGHGNTTALNDRNEQLSPYLVSKHNDGHRIEQGTPICTNN

SEQ ID NO: 111398 - protein, 69 aa, Setaria italica
  Transcript Sequence Number=SeqID_45424
  Gene Ontology: Mol. function=adenosine kinase activity; Biological process=purine ribonucleoside salvage
  Homolog annotation: Hit_ID=Q7X905; Match level="QueryCoverage=71%, HitCoverage=12%, E-value=3e-21, Identity=89%"; Hit description =OSJNBa0073E02.13 protein
WPCLQVFLMNLSAPFICEFFRDAQEKALPYVDYIFGNETEARTFAKVRGWEVKVSSCVVIFTWLEVVIN

SEQ ID NO: 111399 - protein, 86 aa, Setaria italica
  misc_feature (59)..(59): Xaa can be any naturally occurring amino acid
  misc_feature (71)..(71): Xaa can be any naturally occurring amino acid
  Transcript Sequence Number=SeqID_45425
  Gene Ontology: Mol. function=adenosine kinase activity; Biological process=purine ribonucleoside salvage
  Homolog annotation: Hit_ID=Q8L5P6; Match level="QueryCoverage=100%, HitCoverage=31%, E-value=3e-33, Identity=78%"; Hit description =Adenosine kinase
ASGKQKRIAVITQGADPVVVAEDGKVKTFPVILLPKEKLVDTNGAGDAFVGGFLSQGTXARALDDHVGGVXIQRPGCTYPEKPDFN

SEQ ID NO: 111400 - protein, 110 aa, Setaria italica
  Transcript Sequence Number=SeqID_45426
  Gene Ontology: Mol. function=adenosine kinase activity; Cellular component=cytosol; Biological process=purine ribonucleoside salvage
  Homolog annotation: Hit_ID=Q84P58; Match level="QueryCoverage=75%, HitCoverage=22%, E-value=9e-43, Identity=97%"; Hit description =Adenosine kinase-like protein (Fragment)
MFCFSISQDFDCQYFLLQEYQLFPSVTRSLIANLSAANCYKSEHLKRPENWALVEKAKYIYIAGFFLTVSPDSIQLVAEHAAANNKVFLMNLSAPFICEFFRDAQEKVLP

SEQ ID NO: 111401 - protein, 107 aa, Setaria italica
  misc_feature (45)..(45): Xaa can be any naturally occurring amino acid
  Transcript Sequence Number=SeqID_45427
  Gene Ontology: Mol. function=adenosine kinase activity; Biological process=purine ribonucleoside salvage
  Homolog annotation: Hit_ID=Q8L5P6; Match level="QueryCoverage=99%, HitCoverage=34%, E-value=4e-46, Identity=89%"; Hit description =Adenosine kinase
VDLSLKISQLPLASGKQKRIAVITQGADPVVVAEDGKVKTFPVIXLIRPKGRKLVDTNGAGDAFVGGFLSQLVQGKSIEDSVKAGCYAANVIIQRPGCTYPEKPDFN

SEQ ID NO: 111402 - protein, 345 aa, Setaria italica
  misc_feature (103)..(103): Xaa can be any naturally occurring amino acid
  Transcript Sequence Number=SeqID_45428
  Gene Ontology: Mol. function=adenosine kinase activity; Biological process=purine ribonucleoside salvage
  Homolog annotation: Hit_ID=Q84P58; Match level="QueryCoverage=98%, HitCoverage=91%, E-value=1e-175, Identity=87%"; Hit description =Adenosine kinase-like protein (Fragment)
  Pfam annotation: Domain name=PfkB; Domain location=26-343; Score =254.7; E_value=2.3e-73; Accession=PF00294.16; Description=pfkB family carbohydrate kinase
MASGSYEGILLGIGNPLLDISAVVDEAFLAKYDVKPGNAILAEDKHLPMYDELASKGNVEYIAGGATQNSIRVAQWMLQIPGATSYIGCIGKDKFGEEMKKKXAKAAGINAHYHEDENALTGTCAVCVVGGERSLIANLSAANCYKSEHLKKPENWALVKKAKYIYIAGFFLTVSPDSIQLVAEHAAATNKVFLMNLSAPFICEFFRDAQEKALPYVDYIFGNETEARTFAKVRGWETENVEEIALKISQLPKASGTHKRITVITQGRDPVVVADDGKVKTFPVILLPKEKLVDTNGAGDAFVGGFLSQLVQEKSIDECVRAACYAANVVIQRSGCTYPEKPDFN

SEQ ID NO: 111403 - protein, 374 aa, Setaria italica
  misc_feature (43)..(43): Xaa can be any naturally occurring amino acid
  misc_feature (236)..(236): Xaa can be any naturally occurring amino acid
  misc_feature (309)..(309): Xaa can be any naturally occurring amino acid
  Transcript Sequence Number=SeqID_45429
  Gene Ontology: Mol. function=adenosine kinase activity; Biological process=purine ribonucleoside salvage
  Homolog annotation: Hit_ID=Q84P58; Match level="QueryCoverage=96%, HitCoverage=98%, E-value=0.0, Identity=91%"; Hit description =Adenosine kinase-like protein (Fragment)
  Pfam annotation: Domain name=PfkB; Domain location=55-372; Score =276.0; E_value=8.6e-80; Accession=PF00294.16; Description=pfkB family carbohydrate kinase
PRPHEPEPSPAHQKASDLSLRRRRFVRVEEMAVSEGVLLGMGXTPLLDISAVVDDAFLSKYDIKLNNAILAEEKHLPMYDELASKSNVEYIAGGATQNSIRVAQWMLQTPGATSYMGCIGKDKFGEEMKKNAQAAGVTAHYYEDETAPTGTCAVCVVGGERSLIANLSAANCYKSEHLKRPENWALVEKAKYIYIAGFFLTVSPDSIQLVAEHAAANNKVFLMNLSAPFICEFFRXDAQEKVLPYVDYIFGNETEAKIFAKVRGWETENIEEIALKISQLPLASGKQKRIAVITQGADPVVVAEDGKVXTFPVILLPKEKLVDTNGAGDAFVGGFLSQLVQGKSIEDSVKAGCYAANVIIQRPGCTYPEKPDFN

SEQ ID NO: 111404 - protein, 411 aa, Setaria italica
  Transcript Sequence Number=SeqID_45430
  Gene Ontology: Mol. function=transferase activity; Cellular component= membrane
  Homolog annotation: Hit_ID=B6U2C1; Match level="QueryCoverage=94%, HitCoverage=92%, E-value=0.0, Identity=92%"; Hit description =Secondary cell wall-related glycosyltransferase family 47
  Pfam annotation: Domain name=Exostosin; Domain location=41-339; Score= 359.0; E_value=8.5e-105; Accession=PF03016.7; Description=Exostosin family
AAAAAVLLVVSCVAAAAPPQRQQHERARISGAAGGVLDDNPVGKLKVFVYEMPRKYNLMLLAKDSRCLHHMFAAEIFMHQFLLNSAVRTLDPEEADWFYTPAYTTCDLTPQGFPLPFRAPRIMRSAIKYVATTWPYWNRTEGADHFFLTPHDFGACFHYQEERAMERGILPLLRRATLVQTFGQRNHVCLQDGSITIPPYANPHKMQAHLINPGTPRSIFVYFRGLFYDMGNDPEGGYYARGARASVWENFKDNPLFDISTEHPSTYYEDMQRAIFCLCPLGWAPWSPRLVEAVVFGCIPVIIADDIVLPFADAIPWEEISVFVAERDVPRLDNILTSIPLEDILRKQRLLAGASVKQALLFHQPARPGDAFDQILNGLARKLPHGKGVFLEPGEKVLDWDAGLENDLKPW

SEQ ID NO: 111405 - protein, 142 aa, Setaria italica
  Transcript Sequence Number=SeqID_45431
  Homolog annotation: Hit_ID=Q9SGN6; Match level="QueryCoverage=97%, HitCoverage=22%, E-value=2e-39, Identity=58%"; Hit description =F3M18.18
LCLHRRKNSLPSLQFTLMGPKLHVNTAKVDSGNRPVTGIRLFLEGKKNDRLGVHLQHLSVTPGTITVAGEAASAEDAIVDERDYIEPVMSPLLSHVCTAPVQYNGARIDDCAAIVTRAWLEVRDTCCLKKVLFLRLGFSGVA

SEQ ID NO: 111406 - protein, 197 aa, Setaria italica
  Transcript Sequence Number=SeqID_45432
  Gene Ontology: Mol. function=hydrolase activity, hydrolyzing O -glycosyl compounds; Cellular component=extracellular region; Biological process=cell wall organization and biogenesis
  Homolog annotation: Hit_ID=Q69NF5; Match level="QueryCoverage=100%, HitCoverage=38%, E-value=3e-98, Identity=84%"; Hit description =Endoglucanase 23
  Pfam annotation: Domain name=Glyco_hydro_9; Domain location=1-184; Score=-92.0; E_value=1.3e-10; Accession=PF00759.11; Description =Glycosyl hydrolase family 9
LQSYKEFADNFICTLIPESSSPHITYTPGAMLYKPGGSNMQHVTSISFLLLTYAKYLSKSSHTVNCGDISIGPVTLQRQAKRQVDYLLGDNPMKMSYMIGYGDRYPQRIHHRASSLPSIKDHPQPIACKEGTPYFNSSGSNPNPLIGAVVGGPGEDDAYEDDRADFRKSEPTTYINAPLVGVLAFLVGNPNPGHFRH

SEQ ID NO: 111407 - protein, 88 aa, Setaria italica
  Transcript Sequence Number=SeqID_45433
  Gene Ontology: Mol. function=transferase activity; Cellular component= chloroplast; Biological process=metabolic process
  Homolog annotation: Hit_ID=Q53NI2; Match level="QueryCoverage=100%, HitCoverage=8%, E-value=1e-40, Identity=92%"; Hit description =Probable NAD kinase 2, chloroplastic
LEDKVAAVLGCMLALLNRGRNEVLSGRAGVASAFQGSEDNTSDRIPPLALFRGDMKRCCESMQVALASYLVPSEPRGLDIWRKLQRLK

SEQ ID NO: 111408 - protein, 229 aa, Setaria italica
  Transcript Sequence Number=SeqID_45434
KLSTGDTGSLSFSVVKKIQIISTKLSQHHSFSALQSQYCQHGYSGEQELNNLIINDLYHHIRGELEGRQISSGPFQELLSFLLEFKLFEHDPLEQLQNTCPVANANFLFNVEHIHDELGVDLWISSDRKSSKEVAEEMLDIMHKSNLMKCYADAKLSTLKSFLTFLSVYTGASSNKNLDLPDGGISTATTQSAVKCACKSFQSTVDSLLPQVDTNEVLFPLLSGQVELL

SEQ ID NO: 111409 - protein, 70 aa, Setaria italica
  Transcript Sequence Number=SeqID_45435
  Subcellular localization annotation: CTP_CleavageSite=30; ConfidenceScore=5.10e-01
MLKFNAPPPQELQLFPGTSSSPEHECSGIRSAATNSSSLTDSLPGQLCLSLTQSSQEESSSGVLGRRKER

SEQ ID NO: 111410 - protein, 50 aa, Setaria italica
  Transcript Sequence Number=SeqID_45436
  Gene Ontology: Mol. function=cyclin-dependent protein kinase inhibitor activity; Cellular component=nucleus; Biological process =cell cycle arrest
  Homolog annotation: Hit_ID=Q52PU8; Match level="QueryCoverage=94%, HitCoverage=18%, E-value=2e-09, Identity=70%"; Hit description =Cyclin-dependent kinase inhibitor 2
KFRRETTPSSRAQGEVSDLESDLADQKNARSSPATTSAPQLITPPADEIR

SEQ ID NO: 111411 - protein, 252 aa, Setaria italica
  Transcript Sequence Number=SeqID_45437
  Gene Ontology: Mol. function=cyclin-dependent protein kinase inhibitor activity; Cellular component=nucleus; Biological process =cell cycle arrest
  Homolog annotation: Hit_ID=Q52PU8; Match level="QueryCoverage=71%, HitCoverage=74%, E-value=1e-36, Identity=52%"; Hit description =Cyclin-dependent kinase inhibitor 2
  Pfam annotation: Domain name=CDI; Domain location=200-250; Score =63.4; E_value=8.5e-16; Accession=PF02234.11; Description=Cyclin -dependent kinase inhibitor
MGKYMRKCRGAAGEEVAGVEVTQVVGVRTRSRTAAAPAVAGGVAKVAPRRKKAVTPPNVAAGEPGADGDGGSCYIKLRSRTLFMAPPQQQPSAPRAPVPAEAVAAGQGAALVAGLSRCSSTASSVDVGCQDRSLACRSDTAEAGGDHILEISTSNSGNDPGRERRETTPSSRAQGEVSDLESDLADQKNARSSPATTSAPQLITPPADEIREFFAAAEKAQAERFAAKYNFDVVRGVPLDGGRFEWTPVVSI

SEQ ID NO: 111412 - protein, 50 aa, Setaria italica
  Transcript Sequence Number=SeqID_45438
HLRTEMKLGYCCSTAPRSFAARSSPHHLSLLSSSSPVSPSHGDDQGHFVI

SEQ ID NO: 111413 - protein, 39 aa, Setaria italica
  Transcript Sequence Number=SeqID_45439
VALVIDDEERIALQMIEELLSSSSPVSPSHGDDQGHFVI

SEQ ID NO: 111414 - protein, 184 aa, Setaria italica
  misc_feature (73)..(73): Xaa can be any naturally occurring amino acid
  Transcript Sequence Number=SeqID_45440
  Gene Ontology: Mol. function=transcription factor activity; Cellular component=nucleus; Biological process=regulation of transcription, DNA-dependent
  Homolog annotation: Hit_ID=B6T5Z6; Match level="QueryCoverage=84%, HitCoverage=72%, E-value=3e-57, Identity=71%"; Hit description =Ethylene responsive element
AEEAARAYDEAAVLMSGRNAKTNFPVQRSSTGEPAPAVGRDARSNIGGGSSTANLSQILSAKLRKCCKAPSPXSLTCLRLDPEKSHIGVWQKRAGARADSNWVMTVELNKEAASTGAASQSTSATTASPATVIDDEERIALQMIEELLSSSSPVSPSHGDDQGHFVIFCCNLQILYLLYVSWTN

SEQ ID NO: 111415 - protein, 87 aa, Setaria italica
  Transcript Sequence Number=SeqID_45441
  Gene Ontology: Mol. function=ATP-dependent helicase activity
  Homolog annotation: Hit_ID=Q0E2Z7; Match level="QueryCoverage=94%, HitCoverage=15%, E-value=3e-31, Identity=78%"; Hit description=DEAD -box ATP-dependent RNA helicase 41
YVQVILFYTPNSIDEYIHQVGRASRMGEEGMAIVFVNEEDRRIFKELVPVLKTAGAPVPRELANSRYTAGVSLGCERKRKLSSRSHP

SEQ ID NO: 111416 - protein, 68 aa, Setaria italica
  Transcript Sequence Number=SeqID_45442
MRPRPSRAIVAELATEDSSSDFTMRTTTSSKVHQGPHCQPPTNDQSHLRVIVAELADPDAAAPTSQRQ

SEQ ID NO: 111417 - protein, 74 aa, Setaria italica
  Transcript Sequence Number=SeqID_45443
LTNILGILPPLLEQQRSYLFFPRRKSQNAKQTLDSLTEHTVRSSSCVGGEQKMLVKASAGVQPYATYDHLKSSS

SEQ ID NO: 111418 - protein, 200 aa, Setaria italica
  Transcript Sequence Number=SeqID_45444
  Homolog annotation: Hit_ID=B6TN35; Match level="QueryCoverage=82%, HitCoverage=70%, E-value=5e-69, Identity=80%"; Hit description =Proline-rich cell wall protein-like
  Subcellular localization annotation: CTP_CleavageSite=90; ConfidenceScore=5.53e-01
PTHGGGGGGGGSATASPRAAPYHHGPGAGSGSSAPIVTPLAPTSTSSKVGIQVAIKPEFRITPPPQLPPQMVEIPRSTFNFDFEYERRILAEAEKENPNWSKFVVERQAPPPPVPQQARPASSGSGDPVVDKYVSMGLGREAVSFAVLNYGDNPAKVKEFVKSYNILHEMGFTSPNVPELLAIHDNDPDKVIQRLLSSPS

SEQ ID NO: 111419 - protein, 146 aa, Setaria italica
  Transcript Sequence Number=SeqID_45445
  Gene Ontology: Mol. function=nucleic acid binding; Cellular component= nucleus; Biological process=jasmonic acid mediated signaling pathway
  Homolog annotation: Hit_ID=Q6L4N4; Match level="QueryCoverage=80%, HitCoverage=28%, E-value=2e-17, Identity=53%"; Hit description=Zinc finger CCCH domain-containing protein 35
  Subcellular localization annotation: CTP_CleavageSite=72; ConfidenceScore=5.25e-01
TAPPPGVRELPHQERHHVVVPTSTLVSPPRSAPSGGSFLAGYPFGSPKSPAALYSLPSTPTRPSTVTVTTPSGATVMTVERLNLGLIGDQELVMERVESGRALREKVFERLSKEATVPNDAAASANAEGAAPAAAPDVGWVSDLIN

SEQ ID NO: 111420 - protein, 116 aa, Setaria italica
  misc_feature (111)..(111): Xaa can be any naturally occurring amino acid
  Transcript Sequence Number=SeqID_45446
  Subcellular localization annotation: CTP_CleavageSite=61; ConfidenceScore=5.30e-01
ARCSGWPKASARTRGTTAAAWRRRRPRVEKSESSAVLLCPVLVHKRRDFFSFYFFSSFCICETMYKCILPPRLFLALVSLSLWSLTILSCPICRRDHTMMPEYLLKKKKKXKKKKQ

SEQ ID NO: 111421 - protein, 143 aa, Setaria italica
  misc_feature (98)..(98): Xaa can be any naturally occurring amino acid
  Transcript Sequence Number=SeqID_45447
  Homolog annotation: Hit_ID=Q10C46; Match level="QueryCoverage=100%, HitCoverage=28%, E-value=3e-64, Identity=85%"; Hit description =Folate/biopterin transporter family protein, expressed
AYFSGSFVDTYGVRFVFGVTALLPLMTSTVAVLVNEERLPLGERSVSLSVSGSELIESSKQRIMQIWNSIKQPSIFLPTLFIFLWQATPQSDSAMFFXITNKLGFSPEFLGRVTLVTSVASLLGIGLYNSFLKEVPLRKIFLV

SEQ ID NO: 111422 - protein, 62 aa, Setaria italica
  Transcript Sequence Number=SeqID_45448
LDQQAIYPLWFSMWFQFFSNFSYSSEFCHKTLIKFWTTSSQYHIIKVLWQNSLKNKDKEFYL

SEQ ID NO: 111423 - protein, 59 aa, Setaria italica
  Transcript Sequence Number=SeqID_45449
  Subcellular localization annotation: CTP_CleavageSite=52; ConfidenceScore=5.11e-01
SIMKMLFLFSHSHVFGGLKVHQIIIGSSEVATKPRFDSCAVFVVCSSNLFVVCTTWRQS

SEQ ID NO: 111424 - protein, 86 aa, Setaria italica
  Transcript Sequence Number=SeqID_45450
IYMSSSLIFCCFAALPCRNTKMHRKFLCRQLILDQQAIYPLWFSMWFQFFSNFSYSSEFCHKTLIKFWTTSSQYHIISVGYSFVKK

SEQ ID NO: 111425 - protein, 80 aa, Setaria italica
  Transcript Sequence Number=SeqID_45451
  Gene Ontology: Mol. function=methyltransferase activity; Cellular component=nucleus
  Homolog annotation: Hit_ID=B9R9F4; Match level="QueryCoverage=86%, HitCoverage=10%, E-value=2e-27, Identity=78%"; Hit description=ATP binding protein, putative
QFLCFARCEMENVLLEMDRILRPEGTVIIRDDVDLLVKIKSIADGMRWNSQIVDHEDGPLVREKLLLVVKTYWTLGDNKQ

SEQ ID NO: 111426 - protein, 111 aa, Setaria italica
  Transcript Sequence Number=SeqID_45452
  Homolog annotation: Hit_ID=C0JJH1; Match level="QueryCoverage=39%, HitCoverage=5%, E-value=7e-10, Identity=65%"; Hit description =Methyltransferase
  Subcellular localization annotation: CTP_CleavageSite=58; ConfidenceScore=5.68e-01
ATAVACTTTAAPRKKTSSARSRTQSRPLDFSAHHAAAADEAVAAAAASSGSSSSSSSSAAPRRYPACPVKYSEYTPCEDVERSLRYPRDRLVYRERHCPASERERLRCLRP

SEQ ID NO: 111427 - protein, 335 aa, Setaria italica
  Transcript Sequence Number=SeqID_45453
  Gene Ontology: Cellular component=plasma membrane
  Homolog annotation: Hit_ID=B9R9F4; Match level="QueryCoverage=98%, HitCoverage=51%, E-value=1e-131, Identity=65%"; Hit description=ATP binding protein, putative
  Pfam annotation: Domain name=DUF248; Domain location=1-325; Score =394.0; E_value=2.5e-115; Accession=PF03141.8; Description=Putative methyltransferase
SRCLIPWQLYDGLYLMEVDRVLRPGGYWILSGPPINWKKYWKGWERTKEDLNAEQQAIEAVARTLCWTKVKEAGDIAVWQKPYNHANCKAPFCSRNKNPDAAWYDKMEACVTPLPEVSGASDVAGGAVKKWPQRLTAVPPRVSRGGVRGVTAKSFAQDTELWRKRVRHYKLVIRQFEQKGRYRNVLDMNARLGGFAAALAAAGDPLWVMNMVPTLGNTTTLGAIYERGLIGSYQDWCEGMSTYPRTYDLIHADSVFTLYNNRCEMDRILLEMDRILRPEGTVIIRDDVDMLVKVKSVADGIRWDSQIVDHEDGPLVREKILLVEKRYWTAQDQGQ

SEQ ID NO: 111428 - protein, 621 aa, Setaria italica
  Transcript Sequence Number=SeqID_45454
  Gene Ontology: Cellular component=plasma membrane
  Homolog annotation: Hit_ID=B9R9F4; Match level="QueryCoverage=86%, HitCoverage=82%, E-value=0.0, Identity=71%"; Hit description=ATP binding protein, putative
  Pfam annotation: Domain name=DUF248; Domain location=50-563; Score =1214.9; E_value=0; Accession=PF03141.8; Description=Putative methyltransferase
  Pfam annotation: Domain name=Methyltransf_11; Domain location=168 -263; Score=22.7; E_value=0.0007; Accession=PF08241.4; Description =Methyltransferase domain
  Pfam module annotation: Pfam domain module=DUF248::Methyltransf_11; Domain location=50-563::168-263
TIPPKRTASSSSSTPAGPLDFAAHHTAEGMEEDAAPRQRAYDACPVKYSEYTPCEDVERSLRFSRDRLVYRERHCPSSDAERLRCLVPAPRGYRNPFPWPASRDVAWFANVPHKELTVEKAVQNWIRVDGDKFRFPGGGTMFPRGAGAYIDDIGKIIPLHDGSIRTALDTGCGVASWGAYLLSRNILAMSFAPRDSHEAQVQFALERGVPAMIGVLASNRLTYPARSFDMAHCSRCLIPWQLYDGLYLIEIDRVLRPGGYWILSGPPINWKKHYKGWARSKDDLNQEQQAIEKVAASLCWKKVKEEGDIAIWQKPTNHIHCKAIRKVIKSPPFCSSQNPDAAWYDKMEACITPLPEVSDLKEVAGGKLKKWPERLTAVPPRIASGSLEGVTEEMFVEDTELWKKRIGHYKSVIPQLAQKGRYRNLLDMNAKFGGFAAALVNDPVWVMNMVPTVGNSTTLGVIYERGLIGSYQDWCEGMSTYPRTYDLIHADSVFTLYHGRCEMENVLLEMDRILRPEGTVIIRDDVDLLVKIKSIADGMRWNSQIVDHEDGPLVREKLLLVVKKLQTHRANGKPVTNSQDLPSMSITNSFIPRYCYCLLSPNVQYVFTTRRSFSRTSDNKQ

SEQ ID NO: 111429 - protein, 88 aa, Setaria italica
  Transcript Sequence Number=SeqID_45455
  Gene Ontology: Mol. function=hydrolase activity, acting on ester bonds; Cellular component=vacuole; Biological process=lipid metabolic process
  Homolog annotation: Hit_ID=Q2R3H2; Match level="QueryCoverage=100%, HitCoverage=23%, E-value=2e-36, Identity=79%"; Hit description=GDSL -like Lipase/Acylhydrolase family protein, expressed
QKPTGRCSDGFLIIDYFAMALNLSLVNPYMDKGADFASGVNFAVAGATALDRAVLLQGGVMMPPASVPISTQLDWFRSHLNATCGSQE

SEQ ID NO: 111430 - protein, 190 aa, Setaria italica
  misc_feature (48)..(48): Xaa can be any naturally occurring amino acid
  Transcript Sequence Number=SeqID_45456
  Gene Ontology: Mol. function=catalytic activity; Biological process =cellular metabolic process
  Homolog annotation: Hit_ID=B6TY10; Match level="QueryCoverage=95%, HitCoverage=56%, E-value=5e-79, Identity=74%"; Hit description =Dihydroflavonol-4-reductase
NRRHYHNSPKGKAFDEDSWSDEEYCRKNEDWYNLSKTLAEREAFAYAXKTGLDIVTICPSLVLGPLMQSTINASSKILLNYLKGDRDTVENKLRNIVDVRDVADALLLAYEKPEASGRYICSSHPIKVSDMINILKNLYPTYPYPKNFMEVEENTVNNSEKLQKLGWTFRPIEETLRDSVESYKAFGLLN

SEQ ID NO: 111431 - protein, 320 aa, Setaria italica
  Transcript Sequence Number=SeqID_45457
  Gene Ontology: Mol. function=catalytic activity; Biological process =cellular metabolic process
  Homolog annotation: Hit_ID=B6TY10; Match level="QueryCoverage=100%, HitCoverage=100%, E-value=1e-133, Identity=72%"; Hit description =Dihydroflavonol-4-reductase
  Pfam annotation: Domain name=3Beta_HSD; Domain location=9-272; Score=- 29.9; E_value=5.8e-08; Accession=PF01073.11; Description=3-beta hydroxysteroid dehydrogenaseisomerase family
  Pfam annotation: Domain name=Epimerase; Domain location=8-252; Score =89.0; E_value=1.6e-23; Accession=PF01370.13; Description=NAD dependent epimerasedehydratase family
  Pfam annotation: Domain name=KR; Domain location=10-152; Score=-64.7; E_value=0.0028; Accession=PF08659.2; Description=KR domain
  Pfam annotation: Domain name=NAD_binding_4; Domain location=10-265; Score=-42.7; E_value=2.2e-06; Accession=PF07993.4; Description=Male sterility protein
  Pfam annotation: Domain name=NmrA; Domain location=8-245; Score= -104.3; E_value=0.034; Accession=PF05368.5; Description=NmrA-like family
  Pfam annotation: Domain name=Polysacc_synt_2; Domain location=8-282; Score=-182.5; E_value=0.016; Accession=PF02719.7; Description =Polysaccharide biosynthesis protein
  Pfam annotation: Domain name=adh_short; Domain location=6-142; Score=- 6.9; E_value=3.9e-05; Accession=PF00106.17; Description=short chain dehydrogenase
  Pfam module annotation: Pfam domain module=3Beta_HSD::Epimerase::KR::N AD_binding_4::NmrA::Polysacc_synt_2::adh_short; Domain location=9 -272::8-252::10-152::10-265::8-245::8-282::6-142
MEAAGKSVCVTGAGGFIASWLVKLLLSRGHYAVRGTVRDPGASKNAHLKALEGAGERLKLLKADLLDYNSVASAVAGCEGVFHVASPVPSGRSSNPEVEVIGPAVTGTTNVLKACYEAKVRRVVVVSSVAAVLSNPNWPKGKPFDENCWSDEEYCRKNEDWYYLSKTRAEREAFAYAAKTGLDVVTICPSLVFGPLMQPTVNSSSKLLFNYFKGDRETVENRLRNIVDVRDVADALFMAYEKPEASGRYICNSPPIKVSDMINILKNLYPTYRYPKNFEEVEESSVYSFEKLQKLGWTFRPVEETLRDSVESYKAFGFLN

SEQ ID NO: 111432 - protein, 197 aa, Setaria italica
  misc_feature (108)..(108): Xaa can be any naturally occurring amino acid
  misc_feature (152)..(152): Xaa can be any naturally occurring amino acid
  Transcript Sequence Number=SeqID_45458
  Gene Ontology: Mol. function=aspartic-type endopeptidase activity; Cellular component=chromatin
  Homolog annotation: Hit_ID=Q8SA91; Match level="QueryCoverage=88%, HitCoverage=7%, E-value=2e-17, Identity=30%"; Hit description =Putative gag-pol polyprotein
ESNFADLKVLQDVQVDALERAAASLEDWRPEMQGMVDDIRLEVRKLSKHWERMVLNRLPPLLETTPSAAKRPSATSEANRPNGHRDDKFHQEDGYGSVTTIVHPSSRXVTPPPHSTHTPKLPVPPLPSLNNRWKSASNGESRGSRTGRLPKXNFPKFEGKNPELWLSLCEDYFELCNVEPFHWIMVVSMLFDTASAR

SEQ ID NO: 111433 - protein, 83 aa, Setaria italica
  Transcript Sequence Number=SeqID_45459
  Gene Ontology: Mol. function=molecular_function; Cellular component =extracellular region; Biological process=biological_process
  Homolog annotation: Hit_ID=B6THQ3; Match level="QueryCoverage=100%, HitCoverage=29%, E-value=5e-34, Identity=85%"; Hit description =Thaumatin-like protein 1a
  Subcellular localization annotation: CTP_CleavageSite=75; ConfidenceScore=5.63e-01
LGADGASSFTFTNACQHPVWVGALHGASSPPLARSGFYLAPSATSRLDAPSSGSWSGTFWARTGCAVDSATGRFSCATADCGT

SEQ ID NO: 111434 - protein, 49 aa, Setaria italica
  Transcript Sequence Number=SeqID_45460
SEHHMQVSNDKLRHALMLQIFTCYTELQMNNVHGHTFPCLARHQYSTLI

SEQ ID NO: 111435 - protein, 134 aa, Setaria italica
  misc_feature (117)..(117): Xaa can be any naturally occurring amino acid
  misc_feature (127)..(127): Xaa can be any naturally occurring amino acid
  Transcript Sequence Number=SeqID_45461
  Gene Ontology: Mol. function=signal transducer activity; Cellular component=integral to membrane; Biological process=positive regulation of I-kappaB kinase/NF-kappaB cascade
  Homolog annotation: Hit_ID=Q7X7S8; Match level="QueryCoverage=100%, HitCoverage=28%, E-value=4e-54, Identity=79%"; Hit description =OSJNBa0083N12.15 protein
LVFAFSCNLFQLVLFEILPVLSKHARFLNWHLDLFCLILLLVFVLPYYHCYLLLRNSGVRRERAWLVAALFLLVFLYGFWRMGIHFPMPSPEKGFFTMPQLVSRIGVIGVSVMAVLXGFGAVNLPYXYLSLFIR

SEQ ID NO: 111436 - protein, 88 aa, Setaria italica
  Transcript Sequence Number=SeqID_45462
LNYFLPPLFDLKTPKIKEILKQLNFRIQSGAPAFFRQNHKRRQVYFAISIPHTAHHPTSRCCTNPNVDHQSSYKATQACPMAQRLQIK

SEQ ID NO: 111437 - protein, 42 aa, Setaria italica
  Transcript Sequence Number=SeqID_45463
IQIYSSDLRFLQHHHNVSQWYRVKITLYITNTKEIMLNKRIF

SEQ ID NO: 111438 - protein, 103 aa, Setaria italica
  Transcript Sequence Number=SeqID_45464
  Subcellular localization annotation: CTP_CleavageSite=53; ConfidenceScore=5.37e-01
GARADSSWVMTVQLNKDAASSGDEPPPSDGATTTPTSTSTSTVTTAGSPPASSVMMDDDEERIALQMIEELLGRSSPVSHPHGMLQPGRQSRHLKARGNRLHG

SEQ ID NO: 111439 - protein, 60 aa, Setaria italica
  misc_feature (1)..(14): Xaa can be any naturally occurring amino acid
  Transcript Sequence Number=SeqID_45465
  Subcellular localization annotation: CTP_CleavageSite=21; ConfidenceScore=5.32e-01
XXXXXXXXXXXXXXAKNPSLSCTSSNQPRTRRQIYKQSDSVTRQGPQAGRNERGDYTLCH

SEQ ID NO: 111440 - protein, 149 aa, Setaria italica
  Transcript Sequence Number=SeqID_45466
  Homolog annotation: Hit_ID=B9RUS0; Match level="QueryCoverage=95%, HitCoverage=3%, E-value=1e-53, Identity=66%"; Hit description =Vacuolar protein sorting-associated protein, putative
DLSCQDFSCNLKMYPEAKIFDLKLGSYRLLSPYGLLAESADVVDSFVGIFSYKPFDEQLDWSLTAKASPCYITYLKDSIDQIVGFFKSSPTISQNLALETAAAVQMTLDEVKRTAQQQMTRVLKDQSRFSLNMDIAAPKITVSVPKFPY

SEQ ID NO: 111441 - protein, 122 aa, Setaria italica
  Transcript Sequence Number=SeqID_45467
  Gene Ontology: Mol. function=zinc ion binding; Cellular component =intracellular
ASSTLSSLICWIRGQIASKGKSNRGRKAKNAPKKSKITSIFCPECQGTGIHVKGDELEKPSISLSEMFRFKLKAIEAHKAWLKSPEVLENCSTGLHFPSEHLENSEEKVMPLKSIPFYAADG

SEQ ID NO: 111442 - protein, 59 aa, Setaria italica
  Transcript Sequence Number=SeqID_45468
  Gene Ontology: Mol. function=zinc ion binding; Cellular component =intracellular
GTSHNLQVGLLSSKSVRKELRKQKRIAAEKVCDICGRPMLPGKDVATLLNCNTGNLACS

SEQ ID NO: 111443 - protein, 122 aa, Setaria italica
  Transcript Sequence Number=SeqID_45469
  Subcellular localization annotation: CTP_CleavageSite=73; ConfidenceScore=5.32e-01
RCQRLTPLFTVLSSKLMYSCSNEFTVTPASAPIHSPPSFLCSAPGTPRRCLPPCLLPVISPPSSLHRPRLPPRSAAAAFAEPRPSPAPVGKEEPATTTKTELAGHTHWETDIYGSQDSATSV

SEQ ID NO: 111444 - protein, 291 aa, Setaria italica
  Transcript Sequence Number=SeqID_45470
  Gene Ontology: Mol. function=ATP-dependent peptidase activity; Cellular component=chloroplast; Biological process=ATP-dependent proteolysis
  Homolog annotation: Hit_ID=Q75K52; Match level="QueryCoverage=100%, HitCoverage=100%, E-value=5e-63, Identity=49%"; Hit description=ATP -dependent protease La domain containing protein, expressed
  Pfam annotation: Domain name=LON; Domain location=77-268; Score=80.7; E_value=5.2e-21; Accession=PF02190.8; Description=ATP-dependent protease La (LON) domain
  Subcellular localization annotation: CTP_CleavageSite=38; ConfidenceScore=5.49e-01
MALKTLQLPYNSARPSSYSFSPSSPCYQPKLPPRLDTRAAVTVKKHQKRTTSVLKCKADLHGCMDEVVQNPKDQITEIPIVMYPSVVFPGATLQLQEFEFRYRIMMHTLLQQGLKFGVIYCGKNGRMADVGCIVHVIECERLIDDRFFLTCVGKDRFRVMEIVRTKPYVVARIQVLNEQPSLEPQDDLGSLMQQVEQHLENVAMLSDKLNLKLRGDLKAEQLCRMHSAASFSFLIARLFIDDHLEQQTLLQMNDTTQRLAREGMYLERRSKYLAAIAAIKDAFDHLSCNEK

SEQ ID NO: 111445 - protein, 76 aa, Setaria italica
  Transcript Sequence Number=SeqID_45471
EVAAGTAHLDILWAPVLLLHLGGQDGITAYSIEDNENWRRHLLVAASQIAIAIYVFVKSWGFHDESLLRTSILLFV

SEQ ID NO: 111446 - protein, 136 aa, Setaria italica
  misc_feature (122)..(122): Xaa can be any naturally occurring amino acid
  Transcript Sequence Number=SeqID_45472
NRHTQTLTRRASYPCENYGTENRGLGKRTLGDPQITMGTSMVLDGSFVSSISSDNSVEESSFRQLQDAVSQLDVQTKMCIRDGLYRLARSAQHRQVFPNTMNSNGDSQDVKDMQNAETSRKXIETQTNPIDRSIAL

SEQ ID NO: 111447 - protein, 96 aa, Setaria italica
  misc_feature (45)..(45): Xaa can be any naturally occurring amino acid
  Transcript Sequence Number=SeqID_45473
  Gene Ontology: Mol. function=transporter activity; Cellular component= mitochondrial inner membrane; Biological process=transport
  Homolog annotation: Hit_ID=Q8S1A3; Match level="QueryCoverage=87%, HitCoverage=24%, E-value=9e-37, Identity=91%"; Hit description =Mitochondrial carrier protein-like
  Pfam annotation: Domain name=Mito_carr; Domain location=9-96; Score =45.2; E_value=2.5e-10; Accession=PF00153.19; Description =Mitochondrial carrier protein
IFAPSVGTGPVVDLLAGSAAGGTAVLCTYPLDLARTKLAYQVSNXGQSGNALGNSGRQQTYNGIKDVFKTVYKEGGARSLYRGVGMSYPLGLISLL

SEQ ID NO: 111448 - protein, 69 aa, Setaria italica
  Transcript Sequence Number=SeqID_45474
  Gene Ontology: Mol. function=fructose 1,6-bisphosphate 1-phosphatase activity; Cellular component=cytoplasm; Biological process =carbohydrate metabolic process
  Homolog annotation: Hit_ID=A7J2C3; Match level="QueryCoverage=82%, HitCoverage=16%, E-value=1e-26, Identity=96%"; Hit description =Fructose-1,6-bisphosphatase 2
MVHSMVADVHRTLLYGGIFLYPADQKSPNGKLRVLYEVFPMSFLMEQAGGQAFTGKQRVCLRSFFSDPK

SEQ ID NO: 111449 - protein, 142 aa, Setaria italica
  misc_feature (93)..(93): Xaa can be any naturally occurring amino acid
  misc_feature (105)..(105): Xaa can be any naturally occurring amino acid
  Transcript Sequence Number=SeqID_45475
LTASCSCRKLLSSTELSEDIDETNEPSSTIEVPIVLDGSFVSSISSDNSVEESSFRQLQDAVSQLDVQTKMCIRDGLYRLARSAQHRQVFPNXMNSNGDSQDVKXMQNAETSRKFADPQSIETQTNPIDRSIALLLSINRRT

SEQ ID NO: 111450 - protein, 133 aa, Setaria italica
  Transcript Sequence Number=SeqID_45476
  Gene Ontology: Mol. function=carbon-sulfur lyase activity
  Homolog annotation: Hit_ID=Q5VQG8; Match level="QueryCoverage=100%, HitCoverage=26%, E-value=8e-53, Identity=75%"; Hit description =Putative alliinase
  Pfam annotation: Domain name=Alliinase_C; Domain location=2-133; Score=-93.7; E_value=9.4e-09; Accession=PF04864.5; Description =Allinase, C-terminal domain
VINLDHGDPTMFEEFWRGTGSAAEIVIPGWQTMSYFSDVGNVCWFLEPGFDHEVRRLHRLVGNAAVDGYHVLVGTGSTQLFMAALYALSPPAAAGAGAPMSVVSTAPYYSSYPAVTDFLQSGLFRWAGDANSF

SEQ ID NO: 111451 - protein, 341 aa, Setaria italica
  Transcript Sequence Number=SeqID_45477
  Gene Ontology: Mol. function=transporter activity; Cellular component= mitochondrial inner membrane; Biological process=transport
  Homolog annotation: Hit_ID=Q8S1A3; Match level="QueryCoverage=99%, HitCoverage=99%, E-value=1e-172, Identity=88%"; Hit description =Mitochondrial carrier protein-like
  Pfam annotation: Domain name=Mito_carr; Domain location=125-229; Score=110.2; E_value=6.7e-30; Accession=PF00153.19; Description =Mitochondrial carrier protein
  Pfam annotation: Domain name=Mito_carr; Domain location=232-329; Score=86.2; E_value=1.2e-22; Accession=PF00153.19; Description =Mitochondrial carrier protein
  Pfam annotation: Domain name=Mito_carr; Domain location=28-118; Score= 115.6; E_value=1.6e-31; Accession=PF00153.19; Description =Mitochondrial carrier protein
  Pfam module annotation: Pfam domain module=Mito_carr::Mito_carr::Mito_ carr; Domain location=125-229::232-329::28-118
MGSSQESTFSSASGAAQVNASTLDLLPVYAKELTAGGAAGAFAKTAVAPLERVKILLQTRTEGFQSLGILQSLRKLWQYEGVRGFYKGNGASVLRIVPYAALHYMTYEQYRCWILNNFAPSVGTGPVVDLLAGSAAGGTAVLCTYPLDLARTKLAYQVSNVGQSGNALGNSGRQQTYNGIKDVFKTVYKEGGARSLYRGVGPTLIGILPYAGLKFYIYEDLKSRVPEDYKKSVILKLSCGALAGLFGQTLTYPLDVVRRQMQVQSKLPQNSSDGFRIRGTFQGLLLIIRCQGWRQLFAGLSLNYVKVVPSVAIGFTTYDMMKTLLGVPPRERVHASSGANK

SEQ ID NO: 111452 - protein, 341 aa, Setaria italica
  Transcript Sequence Number=SeqID_45478
  Gene Ontology: Mol. function=fructose 1,6-bisphosphate 1-phosphatase activity; Cellular component=cytoplasm; Biological process =carbohydrate metabolic process
  Homolog annotation: Hit_ID=A7J2C3; Match level="QueryCoverage=99%, HitCoverage=99%, E-value=0.0, Identity=94%"; Hit description =Fructose-1,6-bisphosphatase 2
  Pfam annotation: Domain name=FBPase; Domain location=13-337; Score =683.5; E_value=1.9e-202; Accession=PF00316.12; Description=Fructose -1-6-bisphosphatase
MDHAAEAQRTDLMTITRHVLNEQSRHPESRGDFTILLSHIVLGCKFVASAVNKAGLAKLIGLAGETNVQGEEQKKLDVLSNEVFVKALVSSGRTCVLVSEENEEAIFVDPALRGKYCVCFDPLDGSSNIDCGVSIGTIFGIYMIKDKDNVTLDDVIQPGTNMLAAGYCMYGSSCTLVLSTGNGVNGFTLDPSLGEFILTHPNIKIPKKGKIYSVNEGNAKNWDAPTAKYVEKCKFPQDGSSPKSLRYIGSMVADVHRTLLYGGIFLYPADQKSPNGKLRVLYEVFPMSFLMEQAGGQAFTGKQRALELAPTKLHERSPIFLGSYDDVEEIKALYASESSTV

SEQ ID NO: 111453 - protein, 396 aa, Setaria italica
  misc_feature (129)..(129): Xaa can be any naturally occurring amino acid
  misc_feature (151)..(151): Xaa can be any naturally occurring amino acid
  Transcript Sequence Number=SeqID_45479
ILLLDYGILDDLSAFQCAEDKSLPSVDPSAALCDNQFDDTYMFSEQKNVNGYGDQIYQEDVMELLPTDHICNGNGNIDMVGNQYSSENAIQDIEDKKFSIASTSQLSSSQNLLKQRHHLDSSSPSNITXSESYPEKFSSSGGSFAQRNSKXRRKLVNIQPRQPTSDNVANRHTQTLTRRASYPCENYGTENRGLGKRTLGDPQITMGTSMVLDGSFVSSISSDNSVEESSFRQLQDAVSQLDVQTKMCIRDGLYRLARSAQHRQVFPNTMNSNGDSQDVKDMQNAETSRKFADPQSIETQTNPIDRSIALLLFHQSPDHAAVAVDDASSLKSPASKKQHQGPAANQGMMPASSAIYSPKRAGRAQGCTIPGQLLKFLDMTGLKPHDVGASNVCDCS

SEQ ID NO: 111454 - protein, 152 aa, Setaria italica
  Transcript Sequence Number=SeqID_45480
  Gene Ontology: Mol. function=structural constituent of ribosome; Cellular component=intracellular; Biological process=translation
  Homolog annotation: Hit_ID=P34788; Match level="QueryCoverage=100%, HitCoverage=100%, E-value=1e-67, Identity=79%"; Hit description=40S ribosomal protein S18
  Pfam annotation: Domain name=Ribosomal_S13; Domain location=14-142; Score=274.2; E_value=2.9e-79; Accession=PF00416.14; Description =Ribosomal protein S13S18
MSLIAGEDFQHILRLLNTNVDGKQKIMFALTSIKGVGRRFSNIVCKKADIDMNKRAGELSPDELERLMTVVANPRQFKVPDWFLNRKKDYKDGRFSQVVSNALDMKLRDDLERLKKIRNHRGLRHYWGLRVRGQHTKTTGRRGKTVGVSKKR

SEQ ID NO: 111455 - protein, 571 aa, Setaria italica
  misc_feature (552)..(552): Xaa can be any naturally occurring amino acid
  Transcript Sequence Number=SeqID_45481
MPDWRVGEFEGKFTDEFAQSNRSEHESRIEAPDVTSSKKLKHAAASEKIHQGVISGTNDSDSQKCNSEHIQCANGNINSNGDCKDGSNAFTSREENTIVETRCPTDNWNSCQFALSNGSSILNNHSAPQDSLAYGDNDLNYIDWPGIDNFEDVDTLFRRSDSTYGQQQLENTDGLSWIPSSSDAVYSSDVALQQGFGSSYSDYGILDDLSAFQCAEDKSLPSVDPSAALCDNQFDDTYMFSEQKNVNGYGDQIYQEDVMELLPTDHICNGNGNIDMLQVGNQYSSENAIQDIEDKKFSIASTSQLSSSQNLLKQRHHLDSSSPSNITSESYPEKFSSSGGSFAQRNSKAQKKTVNIQPRQPTSDNVANRHTQTLTRRASYPCENYGTENRGLGKRTLGDPQITMGTSMVLDGSFVSSISSDNSVEESSFRQLQDAVSQLDVQTKMCIRDGLYRLARSAQHRQVFPNTMNSNGDSQDVKDMQNAETSRKFADPQSIETQTNPIDRSIALLLFHQSPDHAAVAVDDASSLKSPASKKQHQGPAANQGMMPASSXYIPPRGQGGPKDAQSRDNY

SEQ ID NO: 111456 - protein, 564 aa, Setaria italica
  Transcript Sequence Number=SeqID_45482
  Gene Ontology: Mol. function=mannosyl-oligosaccharide 1,2-alpha -mannosidase activity; Cellular component=membrane; Biological process=metabolic process
  Homolog annotation: Hit_ID=Q9SEH8; Match level="QueryCoverage=97%, HitCoverage=96%, E-value=0.0, Identity=72%"; Hit description =Mannosyl-oligosaccharide 1,2-alpha-mannosidase
  Pfam annotation: Domain name=Glyco_hydro_47; Domain location=108-540; Score=657.3; E_value=1.4e-194; Accession=PF01532.12; Description =Glycosyl hydrolase family 47
  Subcellular localization annotation: CTP_CleavageSite=49; ConfidenceScore=5.18e-01
MARRSSSSSSGAWRYLNPAYYLKRPKRLALLFFVFVAATFAFWDRQSLVSEYEAEISRLEDDINRLHDQLRKAGVHLDENPISNKNSRKDLVEIDPVNNERREKVKEAMLHAWNSYVKYAWGMDELQPQSKNGINSFGGLGATLVDSLDTLYIMGLKDEFQKARDWVAESLDFDKDYDASVFETTIRVVGGLLSAYDLSGDKVFLDKAKDITDRLLPAWDTTSGIPYNRINLAHGRAHNPGWTNGDSILADSGTEQLEFIALSQRTRDPKYQQKAENVVRQLQKIYPSDGLLPIYINPHSGTASYSTITFGAMGDSFYEYLLKVWIQGNKTEHVKHYRQMWETSMEGLVSLTKKTTPSNYYYICEKNGGSLSDKMDELACFAPGMLALGASGYESPEKSEEIMNLAKELARTCYNFYQTTPTKLAGENYFFHSGQDMSVGTSWNILRPETVESLMYLWRLTGNKTYQDWGWNIFQAFEKNSRIESGYVGLRDVNTGEKDNMMQSFFLAETLKYLYLLFSPPSVISFDEWVFNTEAHPLRIVPIHDNKGIGTPVRPFGRKQGKPE

SEQ ID NO: 111457 - protein, 86 aa, Setaria italica
  Transcript Sequence Number=SeqID_45483
VKPRRRLKNTVGDRHFYRPNVLHFQGGQTNKKSADVEPMFSKFPSMVQNQHITQRNVDNSSSCEFPQMRWCPQVLILHSRREISLR

SEQ ID NO: 111458 - protein, 59 aa, Setaria italica
  Transcript Sequence Number=SeqID_45484
SRARVSRRAPSSQGDWGPPPPHQHADDTSLAEPAPGRAMRLVPFTCSALPHRRSEASIL

SEQ ID NO: 111459 - protein, 105 aa, Setaria italica
  Transcript Sequence Number=SeqID_45485
  Homolog annotation: Hit_ID=B9RMD8; Match level="QueryCoverage=100%, HitCoverage=17%, E-value=5e-45, Identity=75%"; Hit description=Yth domain-containing protein, putative
  Pfam annotation: Domain name=YTH; Domain location=38-105; Score =105.8; E_value=1.5e-28; Accession=PF04146.7; Description=YT521-B -like family
IHKSIKYNVWASTASGNRKLNAAYREAKEREDYCPIFLFFSVNGSGQFCGVAEMIGPVDFDKSVDYWQNDRWSGQFPVKWHTVKDVPNNLVRHIILENNENKRVT

SEQ ID NO: 111460 - protein, 100 aa, Setaria italica
  Transcript Sequence Number=SeqID_45486
LRMEIEIDEMNRAQGFNVPQMKLTLISSTIIREIKVGRKNHESSEEERWTYLKHADRLPTQDFDSILAKASDLQRESRPVEEIEDASMFSKDFLEPSTRR

SEQ ID NO: 111461 - protein, 146 aa, Setaria italica
  misc_feature (113)..(113): Xaa can be any naturally occurring amino acid
  Transcript Sequence Number=SeqID_45487
  Gene Ontology: Mol. function=oxidoreductase activity, acting on the CH-OH group of donors, NAD or NADP as acceptor; Cellular component =mitochondrial matrix; Biological process=malate metabolic process
  Homolog annotation: Hit_ID=Q7F190; Match level="QueryCoverage=98%, HitCoverage=23%, E-value=1e-68, Identity=86%"; Hit description=Malic enzyme
  Pfam annotation: Domain name=malic; Domain location=67-146; Score =0.6; E_value=3.6e-09; Accession=PF00390.11; Description=Malic enzyme, N-terminal domain
RFNRGTAFSMTERDRLGLRGLLPPNVVSSQQQIDRFMLDLKRLQKYVRDGPSDTYPLAKWRILNRLHDRNETMYYKVLIDNIEEHAPIVYTPTFGLVCQNYSGLFRRPRGMYXSEDRGEMMSMVYNWPADQVDMIVVTDGSRDFGP

SEQ ID NO: 111462 - protein, 436 aa, Setaria italica
  misc_feature (40)..(40): Xaa can be any naturally occurring amino acid
  Transcript Sequence Number=SeqID_45488
  Gene Ontology: Mol. function=oxidoreductase activity, acting on the CH-OH group of donors, NAD or NADP as acceptor; Cellular component =mitochondrial matrix; Biological process=malate metabolic process
  Homolog annotation: Hit_ID=Q7F190; Match level="QueryCoverage=94%, HitCoverage=66%, E-value=0.0, Identity=81%"; Hit description=Malic enzyme
  Pfam annotation: Domain name=Malic_M; Domain location=123-391; Score =415.6; E_value=8.1e-122; Accession=PF03949.7; Description=Malic enzyme, NAD binding domain
  Pfam annotation: Domain name=malic; Domain location=1-121; Score =108.5; E_value=2.3e-29; Accession=PF00390.11; Description=Malic enzyme, N-terminal domain
  Pfam module annotation: Pfam domain module=Malic_M::malic; Domain location=123-391::1-121
MQSVEDAPFLLMDMYQTVHLSHISAAVLKLDLYVAAAGIXRVLPVMIDVGTNNEKLLKDPLYLGLQEHRLEGDEYVSVIDEFMEAVFTRWPNVIVQFEDFQSKWAFRLLQRYRKTYRMFNDDVQGTAGVAIAGLLGAVRAQGRPMIDFPKQRIVVAGAGSAGIGVVNAASRTMARMLGNNEVAFESARSQFWIVDAHGLITEDRADIDPDARPFARRKSELGHQGLSEGASLVEVVKKVKPDVILGLSAVGGLFSKEVLEALKDSSSSRPAIFAMSNPTKNAECTPGEAFSILGEKAIFASGSPFHDVDLGDGKIGHSNQGNNMYLFPGIGLGTLLSGARVISDGMLQAAAERLASYMEEEEVLQGIIYPPISRIRDITKEVAAAVVREAVAEDLAEGYRDMDARELARLSEEETVEYVKTNMWSPVYPTIIYKTD

SEQ ID NO: 111463 - protein, 53 aa, Setaria italica
  Transcript Sequence Number=SeqID_45489
ILYNELLWLERCVFYSWNPTRLLNSIRSYPGSLLYVNTHRKSHSMVQNWIVVG

SEQ ID NO: 111464 - protein, 72 aa, Setaria italica
  Transcript Sequence Number=SeqID_45490
  Subcellular localization annotation: CTP_CleavageSite=27; ConfidenceScore=5.17e-01
SSSVTCCQFCSLNQLTLFFPCFFRTIVHHASVPFCHALTLLTQCSIQAFAKMLNVWLSLCFRRHLEISLYFL

SEQ ID NO: 111465 - protein, 139 aa, Setaria italica
  Transcript Sequence Number=SeqID_45491
  Subcellular localization annotation: CTP_CleavageSite=22; ConfidenceScore=5.19e-01
ITFDDLFLQPSPKMHKQKLQIREVGRSSRHGSSSQQTEDARMNKPNQPSFLFTSHHTPKNAQTQTLHQSILATQHLVVMDDRRRPTPHYSDRMDGLLITRAGRARARRSPRWRSGPCRCGSGPRRALGATRLSSGSAGG

SEQ ID NO: 111466 - protein, 93 aa, Setaria italica
  Transcript Sequence Number=SeqID_45492
YAGSNGGGGGSYAGSDAGSYAGSGGPHWGPGAGSYAGSHAGSYAGSNGGGAGSYAGSEAGSYAGSGGGPYGGAGAGSYAGSRAGSYVGNGHGK

SEQ ID NO: 111467 - protein, 112 aa, Setaria italica
  misc_feature (94)..(94): Xaa can be any naturally occurring amino acid
  Transcript Sequence Number=SeqID_45493
  Subcellular localization annotation: CTP_CleavageSite=22; ConfidenceScore=5.75e-01
MASSTGSAPVSKPSPPPVMPPAASTPPKAPSSTPQAPAPPSKPAPVLHAESSPLPSPKTAPPPKNAPPPNTAPPPSAAPPPKAAPPPPLPKSNXPAGPPPPAMPSSSKTRPP

SEQ ID NO: 111468 - protein, 539 aa, Setaria italica
  misc_feature (113)..(113): Xaa can be any naturally occurring amino acid
  Transcript Sequence Number=SeqID_45494
  Gene Ontology: Mol. function=dihydrolipoyllysine-residue acetyltransferase activity; Cellular component=pyruvate dehydrogenase complex; Biological process=pyruvate metabolic process
  Homolog annotation: Hit_ID=B6TUA2; Match level="QueryCoverage=100%, HitCoverage=100%, E-value=0.0, Identity=85%"; Hit description =Dihydrolipoyllysine-residue acetyltransferase component of pyruvatedehydrogenase complex
  Pfam annotation: Domain name=2-oxoacid_dh; Domain location=306-539; Score=382.8; E_value=6.2e-112; Accession=PF00198.15; Description=2 -oxoacid dehydrogenases acyltransferase (catalytic domain)
  Pfam annotation: Domain name=Biotin_lipoyl; Domain location=117-191; Score=76.6; E_value=9e-20; Accession=PF00364.14; Description=Biotin -requiring enzyme
  Pfam annotation: Domain name=E3_binding; Domain location=253-291; Score=79.5; E_value=1.2e-20; Accession=PF02817.9; Description=e3 binding domain
  Pfam annotation: Domain name=GCV_H; Domain location=104-195; Score= -66.3; E_value=0.08; Accession=PF01597.11; Description=Glycine cleavage H-protein
  Pfam module annotation: Pfam domain module=2-oxoacid_dh::Biotin _lipoyl::E3_binding::GCV_H; Domain location=306-539::117-191::253 -291::104-195
  Subcellular localization annotation: CTP_CleavageSite=71; ConfidenceScore=5.14e-01
MSAAQLLRHSRKLRSLQNAVGCERSGLVRYFSSSPGSFVKENGVGKRTGGARFSKHSQPAKELETFALGVSRSYTWTRASNSLIPSAVSGVNGPFSCGQVASARPFSSSADLXPPHQEIGMPSLSPTMTEGNIAKWLKKEGDKVSPGEVLCEVETDKATVEMECMEEGYLAKIIQGDGAKEIKVGEIIAITVEEEADIEKFKDYKPSSSAEPVAPAESKAQPEPSQPKVEEKAPTKTPEPKAPKNEEASQSGDRIFASPLARKLAEDNNVPLSSVKGTGPDGRILKADIEDYLAKGGQSEAFAAPGLGYVDIPNAQIRKVTANRLLASKQTIPHYYLTVDARVDKLVKLRGELNPLQDASGGKKISINDLVIKAAALALRKVPQCNSSWMNDFIRQYHNVNINVAVQTEHGLFVPVIRDADKKGLGTIAEEVKQLAQKARDNTLKPADYEGGTFTVSNLGGPFGIKQFCAIINPPQSAILAIGSAEKRVIPGSADGQYEFGSFMSATLSCDHRVIDGAIGAEFLKAFKGYIENPTSMLL

SEQ ID NO: 111469 - protein, 193 aa, Setaria italica
  Transcript Sequence Number=SeqID_45495
  Gene Ontology: Mol. function=pyridoxal phosphate binding; Biological process=amino acid metabolic process
  Homolog annotation: Hit_ID=B6THR6; Match level="QueryCoverage=98%, HitCoverage=51%, E-value=4e-86, Identity=82%"; Hit description=L -allo-threonine aldolase
  Pfam annotation: Domain name=Beta_elim_lyase; Domain location=7-193; Score=189.5; E_value=9.4e-54; Accession=PF01212.13; Description=Beta- eliminating lyase
MASKVVDLRSDTVTKPSDAMRAAMAAAVVDDDVVGVDPTAQQFQEEMAALMGKEAALFVPSGTMGNLISVLVHCDVRGSEVILGDDSHIHVYENGGISTIGGVHPKTVRNNPDGTMDIDKIVAAIRHPDLHYPTTRLICLENTHGNCGGKCLSVEYIDKVGEIAKNHDLKLHIDGARIFNASVALGVPVDSTL

SEQ ID NO: 111470 - protein, 68 aa, Setaria italica
  Transcript Sequence Number=SeqID_45496
  Subcellular localization annotation: CTP_CleavageSite=55; ConfidenceScore=5.35e-01
INASFVSAKGLACTGGPYHCGRVGAPGRFQGCNRVLLASSVNMPLQLENFVTWSSAAKIRTHIDEEKE

SEQ ID NO: 111471 - protein, 163 aa, Setaria italica
  Transcript Sequence Number=SeqID_45497
  Gene Ontology: Mol. function=methyltransferase activity; Cellular component=cytoplasm
  Homolog annotation: Hit_ID=B6U3Z6; Match level="QueryCoverage=100%, HitCoverage=53%, E-value=1e-89, Identity=95%"; Hit description=S -adenosylmethionine-dependent methyltransferase/ methyltransferase
  Pfam annotation: Domain name=DUF858; Domain location=1-139; Score =200.5; E_value=4.4e-57; Accession=PF05891.4; Description=Eukaryotic protein of unknown function (DUF858)
EPVSHFLEAARENLTGCMDQGEDSHKAANFYCVPLQDFTPEEGRYDVIWIQWCIGQLPDDDFISFFNRAKVGLKPDGFFVLKENIARNGFVLDKVDNSVTRSDPYFRELFKKCGLYILSVQDQKELPKELFAVKMYALVTSQPKMQNSGKRRRPKNKPRMICS

SEQ ID NO: 111472 - protein, 146 aa, Setaria italica
  Transcript Sequence Number=SeqID_45498
  Gene Ontology: Mol. function=nucleoside-triphosphatase activity; Cellular component=mitochondrion; Biological process=DNA metabolic process
  Homolog annotation: Hit_ID=B6TNM4; Match level="QueryCoverage=98%, HitCoverage=34%, E-value=7e-55, Identity=75%"; Hit description=DNA repair protein recA
MATLLRRVSLRRAIAAASYSSSHPESYKQGICGSTFHCREFSSKAKKKSKSSGTDSGEENMSKKDLALHQAIDQITSAFGKGAIMWLGRSQGHRDVPVISTGSFALDMALGTGGFPKGRVIEVYGPEASGKTTLALHVIAEATKEW

SEQ ID NO: 111473 - protein, 387 aa, Setaria italica
  Transcript Sequence Number=SeqID_45499
  Gene Ontology: Mol. function=GDP-mannose 4,6-dehydratase activity; Cellular component=intracellular; Biological process=GDP-mannose metabolic process
  Homolog annotation: Hit_ID=Q9M7I6; Match level="QueryCoverage=87%, HitCoverage=90%, E-value=1e-169, Identity=84%"; Hit description=Root cap-specific protein
  Pfam annotation: Domain name=Epimerase; Domain location=46-294; Score= 362.9; E_value=6e-106; Accession=PF01370.13; Description=NAD dependent epimerasedehydratase family
  Pfam annotation: Domain name=NAD_binding_4; Domain location=48-279; Score=-109.9; E_value=0.088; Accession=PF07993.4; Description=Male sterility protein
  Pfam annotation: Domain name=RmlD_sub_bind; Domain location=42-327; Score=-152.0; E_value=0.00086; Accession=PF04321.9; Description=RmlD substrate binding domain
  Pfam module annotation: Pfam domain module=Epimerase::NAD_binding _4::RmlD_sub_bind; Domain location=46-294::48-279::42-327
MPPARAAGKPPSPPPQMAHSNGEATAAGDGEVAPVPRPLAPPRKVALITGITGQDGSYLTELLLSKGYEVHGLIRRSSNFNTQRLDHIYHDPHAVPSSPRPAMRLHYADLSDSSSLRRALDAISPDEVYNLAAQSHVAVSFEIPDYTADVTATGALRLLEAVRLARKPIRYYQAGSSEMFGSTPPPQSEDTPFHPRSPYAAAKVAAHWYTVNYREAYGLFACNGVLFNHESPRRGENFVTRKITRAVGRIKVGLQTKVFLGNLTAARDWGFAGDYVEAMWLMLQQDQPGDYVVATEESHTVEEFLQAAFGYAGLNWKDHVVIDKKYFRPAEVDSLKGDSTKARRELKWKPKVGFQQLVEMMVDHDIELANKEKVLVDAGYRDPKQQP

SEQ ID NO: 111474 - protein, 120 aa, Setaria italica
  Transcript Sequence Number=SeqID_45500
  Gene Ontology: Mol. function=protein transporter activity; Cellular component=nuclear pore; Biological process=protein import into nucleus, docking
  Homolog annotation: Hit_ID=Q53QC6; Match level="QueryCoverage=69%, HitCoverage=8%, E-value=3e-26, Identity=67%"; Hit description =Importin-beta N-terminal domain containing protein, expressed
GNVTKLEYLNDEEEEEDTDDDDEDSEDDDVREETEEEFLERYALAAAGESIEVVEEGDLDEETQDIELGSLDEVDVQQVILCLVQNQPALQAQTLPGSLVERIAEAFPEYEHLAQIHRQA

SEQ ID NO: 111475 - protein, 113 aa, Setaria italica
  Transcript Sequence Number=SeqID_45501
  Gene Ontology: Mol. function=transferase activity, transferring glycosyl groups
  Homolog annotation: Hit_ID=Q7XKW1; Match level="QueryCoverage=92%, HitCoverage=22%, E-value=3e-38, Identity=71%"; Hit description =OSJNBa0073E02.8 protein
  Subcellular localization annotation: CTP_CleavageSite=35; ConfidenceScore=5.31e-01
LHTFKASSLFGAIAVLVCFVSAGFSLAFAFAIIPRQVMPWTGLLLMFEWTFVSFFLLFGSYLRFVYRWGSISANHVGFSNSDSSENHMGSGHQRNMSDCDYWYCLTIFTWYLG

SEQ ID NO: 111476 - protein, 66 aa, Setaria italica
  misc_feature (21)..(21): Xaa can be any naturally occurring amino acid
  Transcript Sequence Number=SeqID_45502
TQHLGTYLPLVDSVTSVLQKXGPWAGNHVLKRNHHSFCLCTNLQYNRDQWCRYKIYVALKTRASSS

SEQ ID NO: 111477 - protein, 110 aa, Setaria italica
  misc_feature (17)..(17): Xaa can be any naturally occurring amino acid
  misc_feature (56)..(56): Xaa can be any naturally occurring amino acid
  Transcript Sequence Number=SeqID_45503
  Gene Ontology: Mol. function=transferase activity, transferring glycosyl groups
  Homolog annotation: Hit_ID=Q01J51; Match level="QueryCoverage=92%, HitCoverage=28%, E-value=3e-24, Identity=59%"; Hit description =OSIGBa0145M07.6 protein
IWQDIRQTLEESLPGTXGRNPHDQLVVKILFILPFCLLLFGYYQSCFQTNKELISXRSLCAFARRARHKYKSEESLPSYSVVGSASSFSISNQRVSPLLFSNKSAFQLEI

SEQ ID NO: 111478 - protein, 81 aa, Setaria italica
  Transcript Sequence Number=SeqID_45504
  Gene Ontology: Mol. function=two-component response regulator activity; Cellular component=nucleus; Biological process=two -component signal transduction system (phosphorelay)
  Homolog annotation: Hit_ID=B6THK5; Match level="QueryCoverage=100%, HitCoverage=54%, E-value=4e-32, Identity=82%"; Hit description=Two -component response regulator ARR3
  Pfam annotation: Domain name=Response_reg; Domain location=1-76; Score=-4.9; E_value=0.0033; Accession=PF00072.16; Description =Response regulator receiver domain
GSEPNVSMIITDYWMPEMTGYDLLKKVKESSELKQIPVVIMSSENVPTRISRCLEEGAEDFLLKPVRPSDISRITTRMLLH

SEQ ID NO: 111479 - protein, 164 aa, Setaria italica
  Transcript Sequence Number=SeqID_45505
  Gene Ontology: Mol. function=DNA binding
  Homolog annotation: Hit_ID=Q01IQ4; Match level="QueryCoverage=98%, HitCoverage=66%, E-value=9e-50, Identity=61%"; Hit description =OSIGBa0159F11.10 protein
YAKIAMTLPDKTVRDVALRCRWMAKKECSKKRKEELSKKSKEKKERVGDSSSKGPAHIVSRPNAPSYTVPVLPIDDDDVSYKAIGGPTGQLLEHNAQILNQIHSNISNMQVQDNLSLLGQTRDNILTVLKEVNDVPEIMRQMPPLPVKMNEDLANLILLRPPGT

SEQ ID NO: 111480 - protein, 88 aa, Setaria italica
  Transcript Sequence Number=SeqID_45506
  Gene Ontology: Mol. function=nucleotide binding; Cellular component =nucleus; Biological process=DNA replication initiation
  Homolog annotation: Hit_ID=O80786; Match level="QueryCoverage=100%, HitCoverage=11%, E-value=2e-15, Identity=47%"; Hit description =Putative DNA replication licensing factor, mcm5
MSGWDEGAVFYSDQAQFPRGGPGGDPAADLTRHSALRKFKEFLRGFTGPTGDFPYRESLVHNRDHVNVAIEDLDAFDAELSDKIRKSP

SEQ ID NO: 111481 - protein, 259 aa, Setaria italica
  Transcript Sequence Number=SeqID_45507
  Gene Ontology: Mol. function=DNA binding; Cellular component=nucleus; Biological process=regulation of transcription
  Homolog annotation: Hit_ID=B6SRR9; Match level="QueryCoverage=98%, HitCoverage=78%, E-value=6e-90, Identity=68%"; Hit description=Myb -related protein Hv33
  Pfam annotation: Domain name=Myb_DNA-binding; Domain location=14-61; Score=51.9; E_value=2.4e-12; Accession=PF00249.23; Description=Myb -like DNA-binding domain
  Pfam annotation: Domain name=Myb_DNA-binding; Domain location=67-112; Score=51.6; E_value=3e-12; Accession=PF00249.23; Description=Myb-like DNA-binding domain
  Pfam module annotation: Pfam domain module=Myb_DNA-binding::Myb_DNA -binding; Domain location=14-61::67-112
MAKQSCCHKKKLRRGLWSPEEDEKLMNHIAKYGHGCWSSVPKLAGLERCGKSCRLRWINYLRPDLKRGTFSQEEEDLIIHLHSLLGNKWSQIAAQLPGRTDNEVKNFWNSYIKKRLRERGIDPATHQPLAEPAAAPCRAVFGDVVDLIPPTTTPLQAPLAADSMPLDGVKLPLDWPVAGTAAPPPSSLSRSSCYHQLQGACFDMDALQQHCAAAAVPAAPVVPSASSSSTLTSMAEAEHCNASVAGADGLPWLELGPNA

SEQ ID NO: 111482 - protein, 137 aa, Setaria italica
  Transcript Sequence Number=SeqID_45508
  Gene Ontology: Mol. function=protein transporter activity; Cellular component=mitochondrial inner membrane; Biological process=protein transport
MSGSMETQARAFADEVRGGLEGKSWMLDLGHPLLNRIAESFVKAAGVSATRHALCSLPSSTRDRTRLFSFPRLSSTRFCFCRVFLQIGAVQAVARESYFMAIEGEGGSVSGATGSRKRSFPELNGKLVTALILRSVG

SEQ ID NO: 111483 - protein, 64 aa, Setaria italica
  Transcript Sequence Number=SeqID_45509
  Gene Ontology: Mol. function=hydroxymethylbilane synthase activity; Cellular component=chloroplast; Biological process=tetrapyrrole biosynthetic process
  Homolog annotation: Hit_ID=Q0H637; Match level="QueryCoverage=100%, HitCoverage=65%, E-value=8e-29, Identity=93%"; Hit description =Putative porphobilinogen deaminase (Fragment)
  Pfam annotation: Domain name=Porphobil_deamC; Domain location=13-64; Score=35.6; E_value=1.9e-07; Accession=PF03900.7; Description =Porphobilinogen deaminase, C-terminal domain
MEYLSSLNHEDTRLAVACEREFLAVLDGNCRTPIAAYAYRDKDGNCSFRGLLASPDGTTVYEIT

SEQ ID NO: 111484 - protein, 394 aa, Setaria italica
  misc_feature (348)..(348): Xaa can be any naturally occurring amino acid
  misc_feature (374)..(374): Xaa can be any naturally occurring amino acid
  Transcript Sequence Number=SeqID_45510
  Gene Ontology: Mol. function=hydroxymethylbilane synthase activity; Cellular component=chloroplast; Biological process=tetrapyrrole biosynthetic process
  Homolog annotation: Hit_ID=Q6H6D2; Match level="QueryCoverage=76%, HitCoverage=84%, E-value=1e-149, Identity=86%"; Hit description =Porphobilinogen deaminase, chloroplastic
  Pfam annotation: Domain name=Porphobil_deam; Domain location=50-266; Score=446.6; E_value=3.7e-131; Accession=PF01379.12; Description =Porphobilinogen deaminase, dipyromethane cofactor binding domain
  Pfam annotation: Domain name=Porphobil_deamC; Domain location=274 -350; Score=93.3; E_value=8.6e-25; Accession=PF03900.7; Description =Porphobilinogen deaminase, C-terminal domain
  Pfam module annotation: Pfam domain module=Porphobil_deam::Porphobil _deamC; Domain location=50-266::274-350
IGSWLFNNLVAKEDESPHYLPFFCSPRRRACPVVRAAVAVEAGAQAKVSLIRIGTRGSPLALAQAHETRDKLKAAHSELAEEGAIEIIIIKTTGDIVLDKPLADIGGKGLFTKEIDEALLNGTIDIAVHSMKDVPTYLPDGTILPCNLPREDVRDAFISLTANSLAELPAGSIIGSASLRRQSQILYRYPSLKVVNFRGNVQTRLKKLKGGDVHATLLALAGLKRLNMTENATSLLSVDEMLPAVAQGAIGIACRSSDDKMMEYLSSLNHEDTRLAVACEREFLAVLDGNCRTPIAAYAYRDKDGNCSFRGLLASPDGTTVYETTRSGPYSFDDMVAMGKDAGHELKXRLALASLIACNEKNRLRRALSIATLXLETDGPSRVLGGLFLFSSSS

SEQ ID NO: 111485 - protein, 52 aa, Setaria italica
  Transcript Sequence Number=SeqID_45511
  Subcellular localization annotation: CTP_CleavageSite=54; ConfidenceScore=5.21e-01
CHMCKQWPMQPLNLGGAPSCSLFFSLPFSSYSSLFLQNRGGVKGGASISEIR

SEQ ID NO: 111486 - protein, 461 aa, Setaria italica
  Transcript Sequence Number=SeqID_45512
  Gene Ontology: Mol. function=signal transducer activity; Biological process=response to light stimulus
  Homolog annotation: Hit_ID=Q10G69; Match level="QueryCoverage=99%, HitCoverage=73%, E-value=0.0, Identity=93%"; Hit description =Transposon protein, putative, Mutator sub-class, expressed
  Pfam annotation: Domain name=NPH3; Domain location=168-424; Score =445.4; E_value=8.9e-131; Accession=PF03000.6; Description=NPH3 family
MFPLLSKSAFLARSIEENSDQEECVIKLNDIPGGAKSFELVARFCYGVKIELSPANVVYLRCASEHLEMTEEVAEDNLISQSEIFLNQVVLRNWKDSLTALETCDDLLPHAEDLQIVKRCIESLASKATTDPNLFGWPIREHGIMQSPGGSVLWNGISTGARPRNFNADWWYDDASSLSFPMYKRLISTMESRGIRPEIIAGSLTYYAKKYLPGLNRRHSMGTVPLTATLSEVEQKNLLEEIDRLLPVHKGIASTKVLLGLLRTAMILKASPTCISNLEKRIGMQLDQATLEDLLLPNFSYTMETLYNVECVHRILDHFLAMDQANGGDSPCLDDVMASPSLTPITSVAKLIDGYLAEIAPDINLKLPKFQALASAVPEYARPLDDGLYRAIDIYLKAHSWLSEAEREQLCRLLDCQKLSLEACTHAAQNERLPLRVVVQVLFFEQLHLRTSIAGCLLVSD

SEQ ID NO: 111487 - protein, 192 aa, Setaria italica
  Transcript Sequence Number=SeqID_45513
  Gene Ontology: Mol. function=signal transducer activity; Biological process=response to light stimulus
  Homolog annotation: Hit_ID=Q6AST7; Match level="QueryCoverage=97%, HitCoverage=28%, E-value=1e-83, Identity=83%"; Hit description=NPH3 family protein
VRTRTNWLSEAEREQLCRLLDCQKLSLEACTHAAQNERLPLRVVVQVLFFEQLHLRTSIAGCLLVSDNLEGSRPLRSGIATSGEAGGWATAVRENQVLKVGMDNMRMRLAELEKECSSMRQEIEKLGGRSSKGGGGGWASRVVPRRLGLKVRSQMCSAQEGSVSEQQRSMSAKLDKLQAKVTKQKKQLAADA

SEQ ID NO: 111488 - protein, 132 aa, Setaria italica
  misc_feature (113)..(113): Xaa can be any naturally occurring amino acid
  Transcript Sequence Number=SeqID_45514
  Gene Ontology: Mol. function=DNA binding; Biological process =regulation of transcription
  Homolog annotation: Hit_ID=B6U1F3; Match level="QueryCoverage=87%, HitCoverage=27%, E-value=2e-46, Identity=82%"; Hit description=CDPK substrate protein 1
SKEDIPSIDAAFFSEEPSDKKAASKEDIPSIDLKGSFDLTEALRLQLELQKRLHEQLEIQRSLQLRIEEQGKCLQMMLEQQCIPGAEKATDASTSAEGSKISSEVPESSTAKXVPETSQNGLTKQTESGDTR

SEQ ID NO: 111489 - protein, 169 aa, Setaria italica
  Transcript Sequence Number=SeqID_45515
  Gene Ontology: Mol. function=DNA binding; Biological process =regulation of transcription
  Homolog annotation: Hit_ID=B6U1F3; Match level="QueryCoverage=96%, HitCoverage=39%, E-value=2e-71, Identity=82%"; Hit description=CDPK substrate protein 1
RFVDAVNQLGGSEKATPKGVLKLMKADNLTIYHVKSHLQKYRTARYRPELSEGSSEKKAASKEDIPSIDLKGSFDLTEALRLQLELQKRLHEQLEIQRSLQLRIEEQGKCLQMMLEQQCIPGAEKATDASTSAEGSKISSEVPESSTAKEVPETSQNGLTKQTESGDTR

SEQ ID NO: 111490 - protein, 63 aa, Setaria italica
  Transcript Sequence Number=SeqID_45516
  Homolog annotation: Hit_ID=B6U6W8; Match level="QueryCoverage=93%, HitCoverage=20%, E-value=1e-11, Identity=55%"; Hit description =Transposon protein CACTA, En/Spm sub-class
PVRDEITQLMDLVIQDGAKEDSDEHFYATQLPCKRENRDVFMTLKTSNGRLNWPRRAWEARKR

SEQ ID NO: 111491 - protein, 127 aa, Setaria italica
  Transcript Sequence Number=SeqID_45517
  Gene Ontology: Mol. function=acyltransferase activity; Cellular component=integral to membrane; Biological process=phospholipid biosynthetic process
  Homolog annotation: Hit_ID=Q2QZN3; Match level="QueryCoverage=74%, HitCoverage=17%, E-value=9e-32, Identity=68%"; Hit description =Acyltransferase family protein, expressed
YRRLVVDRGVVPVALAVESSMFHGTTASGWKGVDPFYYLANPRMCYTVEFLDRVDTAAVAEGKAASTDVANAVQRRIAAALGYECTMLTRKDKYLMLVGNDGVVAAPPRRTRADDMRVPVRAPTGCT

SEQ ID NO: 111492 - protein, 76 aa, Setaria italica
  Transcript Sequence Number=SeqID_45518
NHKTKFQCYVSEAKKTYLKRRYPISIDSSILVRFCREEKLLRFEQRNTTRTNSNTQAIYGKLEKYRTFRVKGINIC

SEQ ID NO: 111493 - protein, 73 aa, Setaria italica
  Transcript Sequence Number=SeqID_45519
MNFHGLAKYDGCCFCILMEYLCAITFTLFSFFSRLDLLLSLTSVLDIGTPQKKEYFLCAETPSAARAWVSTLQ

SEQ ID NO: 111494 - protein, 192 aa, Setaria italica
  misc_feature (40)..(40): Xaa can be any naturally occurring amino acid
  Transcript Sequence Number=SeqID_45520
  Gene Ontology: Mol. function=ATPase activity, coupled to transmembrane movement of substances; Cellular component=integral to membrane; Biological process=transport
  Homolog annotation: Hit_ID=B9SN54; Match level="QueryCoverage=98%, HitCoverage=13%, E-value=2e-40, Identity=49%"; Hit description =Multidrug resistance-associated protein 1, 3 (Mrp1, 3), abc -transoprter, putative
MEALENKTVILVTHQVEFLSKVDKILVMENGEITQEGTYXELLQSGTAFEQLVNAHRDSKTPLDSQDHGKGAKEPGPFQCQIPMIPRNSETEISTGNLQSVQLTEEEKRELGEAGLKPYKDYVSVSKGWFLLVLIILVQCAFVVLQCLATYWLAIAVQNHQFSVAVVVGVYAVMATASCLFAYIRSLLAAHF

SEQ ID NO: 111495 - protein, 53 aa, Setaria italica
  Transcript Sequence Number=SeqID_45521
SDYITFEPTKHYLKSINKQLRKQVAGNIHSLAVTFVTGRKQQMSLPEVLETPP

SEQ ID NO: 111496 - protein, 46 aa, Setaria italica
  Transcript Sequence Number=SeqID_45522
REIKLLQRERDYEVNSLLERGGGFRSFLLFYSVLFIPLLNVRVMRQ

SEQ ID NO: 111497 - protein, 288 aa, Setaria italica
  Transcript Sequence Number=SeqID_45523
  Gene Ontology: Cellular component=integral to membrane
  Homolog annotation: Hit_ID=B6TEZ8; Match level="QueryCoverage=100%, HitCoverage=85%, E-value=1e-154, Identity=91%"; Hit description =Protein binding protein
LSYETRKVNAVNSQNETAMDLADKVPYGESKTEIIEWLTEAGAKNARNVGKIDEASELRRTVSDIKHNVQAQLSENAKTNKRVTGIRKELQKLHREAIQNTINSVTMVATLIASIAFVAIFNLPGQYFQDVNDGGDIGEAHIAKLTGFRVFCLLNATALFISLAVVVVQITLVAWETGAQKQVIKIVNKLMWTACLSTGAAFISLAYVVVGPQHAWMAFTISAIGGPIMIGTLLFLAYLLLRPRFKFGDDRQRRIKRASGSKSFSWSLHEGLSDLEAFSDHDKKIYAL

SEQ ID NO: 111498 - protein, 60 aa, Setaria italica
  Transcript Sequence Number=SeqID_45524
TNHNLLNKTQKSQRYGMEELTNATTQMLQRKFSVSSSNAFSRLEHRFPRMKETVSIIVGF

SEQ ID NO: 111499 - protein, 209 aa, Setaria italica
  misc_feature (187)..(187): Xaa can be any naturally occurring amino acid
  Transcript Sequence Number=SeqID_45525
  Gene Ontology: Mol. function=DNA-directed RNA polymerase activity; Cellular component=chloroplast; Biological process=transcription
  Homolog annotation: Hit_ID=O82725; Match level="QueryCoverage=100%, HitCoverage=21%, E-value=3e-94, Identity=81%"; Hit description=DNA -directed RNA polymerase
KVQSFFQKSRKKKDQGENDQALEMEQAKCRKRVKTLVRRRKMTEAQKLVQQELELEEWGTEAQVKLGSRLIELLLDSAFVQPPADQTPDSSPDIRPAFRHVLRQPIIENGRLKKKHWVIECDHLVHEGFESTARHVDIPYLPMLVPPKKWKGYDKGGHLFLPSYIMRTHGVKDQKDAIKSVPRKQLXKVFEALDILGSTKWRVNRRSYN

SEQ ID NO: 111500 - protein, 73 aa, Setaria italica
  Transcript Sequence Number=SeqID_45526
FARTLCVCSRKCFSECAGYLSSCRCSRSGRMPSGAERRSCRCDGSICDSSKRSRRRHLVTVSCFQSCKCHHGG

SEQ ID NO: 111501 - protein, 134 aa, Setaria italica
  Transcript Sequence Number=SeqID_45527
  Gene Ontology: Mol. function=serine-type peptidase activity; Cellular component=membrane; Biological process=proteolysis
  Homolog annotation: Hit_ID=B9RSG5; Match level="QueryCoverage=97%, HitCoverage=17%, E-value=5e-39, Identity=57%"; Hit description =Dipeptidyl peptidase IV, putative
RWGFWWSPDSENLAFTEVDSSELPLYRIMHQGKDYVDPTAQEDHPYPFAGKANAKVRLGVVPSHGGEITWMDVLCGEQNKSNGSEEEYLARVNWMHNKALAVQVLNRTHTKLKLLKFNIATGKRELLLEEKHNV

SEQ ID NO: 111502 - protein, 108 aa, Setaria italica
  misc_feature (52)..(52): Xaa can be any naturally occurring amino acid
  Transcript Sequence Number=SeqID_45528
  Gene Ontology: Mol. function=RNA polymerase II transcription factor activity; Cellular component=transcription factor complex; Biological process=transcription from RNA polymerase II promoter
  Homolog annotation: Hit_ID=B6T8G1; Match level="QueryCoverage=100%, HitCoverage=58%, E-value=5e-55, Identity=95%"; Hit description =Transcription initiation factor IID, 18kD subunit family protein
  Pfam annotation: Domain name=TFIID-18kDa; Domain location=8-98; Score= 148.7; E_value=1.8e-41; Accession=PF02269.8; Description =Transcription initiation factor IID, 18kD
TTLKRKRGVFQKDLQHMMYGFGDDPNPLPETVALVEDIVVEYVTDLVHKAQXVASKRGKLLTEDFLYLIRKDMRKLHRATELLSMNEELKQARKAFDVDEETLATNAV

SEQ ID NO: 111503 - protein, 378 aa, Setaria italica
  misc_feature (11)..(11): Xaa can be any naturally occurring amino acid
  Transcript Sequence Number=SeqID_45529
DVPPWGQQIFXCQKLPSNLSDMGVENCQMLQSFCASEHLGFDLEIQQGEGFLEGMLMYGWLLKLVRIGGSVEDSIASWTLTKLLYSSNKKLQVSATDFWDSILSLDEDDKLLVNLGYFPSYSVLKCAMLSYGYLFETLGTKASISESAAAADSSDVGPPHNIIAWVRVVSACCKIRKVRPIFSASEAEELLVIVISLFLDRGLEGLLVVLGDCLNSLVLYFNTSEWESSCVMVAESIAQRVTMDLNCLRIIDCITGTNKRSKFLRSQLALQLLKINFGLKVGNVEKMLKLVTSINVKEKECDFFRLYVYLVLMDNLLFSSGAFRDKTMIVDTWRNYLRNCSTQIACTNWGFYAPKVRNKASYLLQGAVFKKSGGVSAR

SEQ ID NO: 111504 - protein, 164 aa, Setaria italica
  misc_feature (10)..(10): Xaa can be any naturally occurring amino acid
  Transcript Sequence Number=SeqID_45530
  Gene Ontology: Cellular component=plasma membrane
  Homolog annotation: Hit_ID=B6U7W3; Match level="QueryCoverage=100%, HitCoverage=27%, E-value=4e-81, Identity=92%"; Hit description =Nitrate and chloride transporter
  Pfam annotation: Domain name=Nodulin-like; Domain location=1-164; Score=162.6; E_value=1.1e-45; Accession=PF06813.5; Description =Nodulin-like
VFSGLINEVXPPWVVLAMGATMNLSGYLMVYLAVSGRTARPPVWLVCLYFFIGANSQSFANTGALVTCVKNFPESRGVVLGILKGFVGLSGAVYTQLYLAFYGGDDAESLILLIAWLPAAVSVVFVHTIRYMPYPRRRGGQETSPDPFFCFLYLSIALASFLLV

SEQ ID NO: 111505 - protein, 61 aa, Setaria italica
  Transcript Sequence Number=SeqID_45531
TSKEIIAFLKNHQICITAGCLLSPESTKFEDIMSNDSMSARCSSWLAAKELACVLTVNDSK

SEQ ID NO: 111506 - protein, 130 aa, Setaria italica
  Transcript Sequence Number=SeqID_45532
  Gene Ontology: Mol. function=flavin-containing monooxygenase activity; Biological process=metabolic process
  Homolog annotation: Hit_ID=B6D9L5; Match level="QueryCoverage=100%, HitCoverage=31%, E-value=3e-56, Identity=91%"; Hit description =Sparse inflorescence1
LPREMLGLSTFGIAMALLKLFSVQVVDRILLAAARLTLGDTGKLGLRRPKTGPMELKNLTGRTPVLDVGTLGHIKTGKIKVVGAVKEVTRSGVRFVDGKEEQFDAIILATGYRSNVPSWLKDGGDVFTRE

SEQ ID NO: 111507 - protein, 71 aa, Setaria italica
  Transcript Sequence Number=SeqID_45533
MVKDDPLDNENPRSHTANNIHVDNKREEMSIMVSSVNDQYKTAALDFQKDKTTTDRPRLQGQASVRVATPT

SEQ ID NO: 111508 - protein, 207 aa, Setaria italica
  Transcript Sequence Number=SeqID_45534
  Gene Ontology: Mol. function=nucleotide binding; Cellular component =Golgi apparatus; Biological process=small GTPase mediated signal transduction
  Homolog annotation: Hit_ID=A9SJV7; Match level="QueryCoverage=100%, HitCoverage=94%, E-value=1e-64, Identity=59%"; Hit description=Rab21- family small GTPase
  Pfam annotation: Domain name=Arf; Domain location=26-170; Score= -76.2; E_value=0.0011; Accession=PF00025.13; Description=ADP -ribosylation factor family
  Pfam annotation: Domain name=GTP_EFTU; Domain location=18-172; Score=- 77.2; E_value=0.0025; Accession=PF00009.19; Description=Elongation factor Tu GTP binding domain
  Pfam annotation: Domain name=MMR_HSR1; Domain location=10-125; Score=- 0.5; E_value=0.0011; Accession=PF01926.15; Description=GTPase of unknown function
  Pfam annotation: Domain name=Miro; Domain location=11-125; Score =82.9; E_value=1.2e-21; Accession=PF08477.5; Description=Miro-like protein
  Pfam annotation: Domain name=Ras; Domain location=11-172; Score =233.5; E_value=5.2e-67; Accession=PF00071.14; Description=Ras family
  Pfam module annotation: Pfam domain module=Arf::GTP_EFTU::MMR _HSR1::Miro::Ras; Domain location=26-170::18-172::10-125::11-125::11 -172
MGSRSPGVSFKLVLLGDGRVGKTSLVLRYVNNIFSDKQEATVQASYLTKRLVVEGVPITLSIWDTAGQEKFHALGPIYYRDADAALLVYDITDSDTFVRVTKWVKELKQMASKDIVMAIAANKSDLVRLKNIETQEAVSYAESIGASLFVTSAKAGTGIDDVFSDIAKRLLEKRKNSADGLSPPQPKKGILIVDDEPEKEPPPKCCS

SEQ ID NO: 111509 - protein, 218 aa, Setaria italica
  Transcript Sequence Number=SeqID_45535
  Gene Ontology: Mol. function=transcription repressor activity; Cellular component=cytoplasm; Biological process=regulation of nitrogen utilization
  Homolog annotation: Hit_ID=B6TJG6; Match level="QueryCoverage=98%, HitCoverage=68%, E-value=1e-109, Identity=88%"; Hit description =Isoflavone reductase
  Pfam annotation: Domain name=NmrA; Domain location=2-209; Score =193.9; E_value=4.4e-55; Accession=PF05368.5; Description=NmrA-like family
KLTPLIYGRAIKEAGCVKRFIPAEFGLDPTKVQICDMDYGFYEKKIEIRHLIESEGIPHTYICCNFFMRYLLPSLVQPGLAAPPRDEVKIFGEGNTKGVFVQEGDVAQFTICTIEDPRTLNKTLYLRPPGNVCSMNELADLWETKINKSLKRICITEEQLLKEILDAPFPLKMDLIFIYSAFVKGDHTYFEIDPLIEGTQLYPHINYTTVSKYLDTLV

SEQ ID NO: 111510 - protein, 92 aa, Setaria italica
  Transcript Sequence Number=SeqID_45536
  Gene Ontology: Mol. function=oxidoreductase activity; Biological process=metabolic process
  Homolog annotation: Hit_ID=B9S8J4; Match level="QueryCoverage=69%, HitCoverage=24%, E-value=3e-21, Identity=75%"; Hit description=Short- chain dehydrogenase, putative
IPGMVERGRGTIIFTGSSASVTGFAGYSDLSCGKFALRGLSQSLAREFQPAGVHIAHVIIDGVIGERRSPRSSRAGGAGDPAAAATGAGAGP

SEQ ID NO: 111511 - protein, 390 aa, Setaria italica
  misc_feature (199)..(199): Xaa can be any naturally occurring amino acid
  Transcript Sequence Number=SeqID_45537
  Gene Ontology: Cellular component=plasma membrane
  Homolog annotation: Hit_ID=B9T165; Match level="QueryCoverage=91%, HitCoverage=59%, E-value=1e-100, Identity=50%"; Hit description=RNA binding protein, putative
MAPVRGAKKRKRPEKPAPAPAPRLPLPPLPDGSDWWGVFYRRVAGHSSFPREYQTIESVLKMSRKTFDYICSLVKKDLTTKTYGFRNFRFSDKTILDVEDQVAVALMRLTTGESLQNIGVWFGMNHSAISNITWRFIESMEERAICHLKWPSPDEMATIKARFEKIYGLPNCCGAIDTTHILMCSSAQPNSKVWLDIEXKNSMVLQAVVDTDMRFRDIVSGWPGSMDDSCILRTSGLYRLCEKGVRLDGQMELPGGSAVREYIVGDSSYPLLSWLMTPYQGQGLPAAKVEFNKRHMAATKVVQTALATLKGRWRVIQGELWRPDKHRLPRIIFVCCLITNIIIDMEGVPSKEMLVSGNHDHGYKQQFSNVADDNAVKQRDDLSQHVTAGE

SEQ ID NO: 111512 - protein, 59 aa, Setaria italica
  Transcript Sequence Number=SeqID_45538
  Subcellular localization annotation: CTP_CleavageSite=9; ConfidenceScore=5.10e-01
TFFFGFSYRSMTSQSENPGHLNFLNGSSQVRIQVIIGPRVNHLKTSRTQMLTFIVYGPR

SEQ ID NO: 111513 - protein, 51 aa, Setaria italica
  Transcript Sequence Number=SeqID_45539
KDPNKPVTPKRNIRGEDHVSYLLSFTVSNNSPYNGTCSDIQMALQPMANTH

SEQ ID NO: 111514 - protein, 143 aa, Setaria italica
  Transcript Sequence Number=SeqID_45540
LFSCTPFLSTGTPLAGPPASCCATLRATLASPDSICLCHLIDGWFNQFANVNIDAVRLALLPIVCLAIVPPELPYVCSEGPVPPIIIVPPGPQATRDSVASTAPPATLPRAALRDSVASTVPPAPPAATLPRAALKDSVARRG

SEQ ID NO: 111515 - protein, 211 aa, Setaria italica
  Transcript Sequence Number=SeqID_45541
  Homolog annotation: Hit_ID=B9RS57; Match level="QueryCoverage=98%, HitCoverage=50%, E-value=4e-38, Identity=40%"; Hit description =Pentatricopeptide repeat-containing protein, putative
  Pfam annotation: Domain name=PPR; Domain location=4-38; Score=22.7; E_ value=0.0015; Accession=PF01535.12; Description=PPR repeat
SKIQKLEYLITGFIRLNMLDDAKTVFEEMISLGIKPNSAILEANLEIVTRKEEVNTVIDFLKRVRDGNWELNKATVERLTRICLDGGEIDEMEQLLAVIQKGTHSSYETQLHHGIIRFYAKADRLADMEDAICWMLDNGVMFMCPEDVDVIICSYFRHKEFDRLDLFLNRIQSFFKPNRSTYDILVAGYRKFDLHERLHSTINDMRQAGFA

SEQ ID NO: 111516 - protein, 76 aa, Setaria italica
  Transcript Sequence Number=SeqID_45542
  Homolog annotation: Hit_ID=Q2R0C6; Match level="QueryCoverage=72%, HitCoverage=6%, E-value=6e-15, Identity=67%"; Hit description =Transposon protein, putative, CACTA, En/Spm sub-class
  Pfam annotation: Domain name=DUF594; Domain location=1-57; Score =86.5; E_value=9.3e-23; Accession=PF04578.5; Description=Protein of unknown function, DUF594
LLKMGEAADCWELIVAVWLEMLCYIACNCGAAFHAKHLTTGGEFVTHVKMLLFMLGVPFLRDVKEPLFSKAGDIYS

SEQ ID NO: 111517 - protein, 89 aa, Setaria italica
  Transcript Sequence Number=SeqID_45543
SSAPTRGRWAANLGAKPEAIGKNAALRFGQGQGRRKEIMILIGTAMQVAAKNLHAPGHPGPYYWCAAPSLFLVASPTFVFQNTSTSCWN

SEQ ID NO: 111518 - protein, 61 aa, Setaria italica
  Transcript Sequence Number=SeqID_45544
KDKLTAHLERRIPLPRPIMHQSSELLNHFFECLKTTLGLKLQKSNHRVANGTYTGTTQSGL

SEQ ID NO: 111519 - protein, 76 aa, Setaria italica
  Transcript Sequence Number=SeqID_45545
FDLSVIFYLFLLRFAFGLLSIRNPELYYPSMLYAYEFGLTTLAPSYVVFQPLYMPVFKFLFMYTSIVDIFVFEHEF

SEQ ID NO: 111520 - protein, 82 aa, Setaria italica
  Transcript Sequence Number=SeqID_45546
MVKLTGMLAHTMRADLDFALELSRSPRSSCADAGSTTARILRQQFPSQENKIINYQGMARNTGYAINHHPGIINKASATTYA

SEQ ID NO: 111521 - protein, 77 aa, Setaria italica
  Transcript Sequence Number=SeqID_45547
LAMMEQQLNSIAFPIGRMADGYCTLYQIGPIGRLHRTSRELSPPCQLNGQTDWHARAHHARRFGFCTGVKQISQVLM

SEQ ID NO: 111522 - protein, 134 aa, Setaria italica
  misc_feature (113)..(113): Xaa can be any naturally occurring amino acid
  Transcript Sequence Number=SeqID_45548
  Gene Ontology: Mol. function=DNA binding; Cellular component=nucleus; Biological process=regulation of transcription
  Homolog annotation: Hit_ID=B6TQ24; Match level="QueryCoverage=96%, HitCoverage=40%, E-value=4e-65, Identity=89%"; Hit description=DNA binding protein
  Pfam annotation: Domain name=Myb_DNA-bind_2; Domain location=16-69; Score=-10.4; E_value=0.085; Accession=PF08914.3; Description=Rap1 Myb domain
  Pfam annotation: Domain name=Myb_DNA-binding; Domain location=14-61; Score=37.7; E_value=4.7e-08; Accession=PF00249.23; Description=Myb -like DNA-binding domain
  Pfam annotation: Domain name=Myb_DNA-binding; Domain location=67-112; Score=44.2; E_value=5.1e-10; Accession=PF00249.23; Description=Myb -like DNA-binding domain
  Pfam module annotation: Pfam domain module=Myb_DNA-bind_2::Myb_DNA -binding::Myb_DNA-binding; Domain location=16-69::14-61::67-112
MGRPPCCDKANVKKGPWTPEEDAMLLAYTSTHGTRNWTNVPQRAGLKRCFRSCRLRYTNYLRPNLKHENFTREEEDIIVTLHAMLGNRWSVIANQLPGRTNNHVKNYWNTKLXKKLRQRGICPVTHRPIRRPHS

SEQ ID NO: 111523 - protein, 58 aa, Setaria italica
  Transcript Sequence Number=SeqID_45549
GIGHLGLCSHSYIPPAQNQTQSKTNKEWQFKIHISLKNGGKVRVTFVHFHSKTWTSHS

SEQ ID NO: 111524 - protein, 137 aa, Setaria italica
  Transcript Sequence Number=SeqID_45550
  Gene Ontology: Mol. function=DNA binding; Cellular component=nucleus; Biological process=regulation of transcription, DNA-dependent
  Homolog annotation: Hit_ID=B6TR65; Match level="QueryCoverage=72%, HitCoverage=50%, E-value=2e-26, Identity=59%"; Hit description=TCP -domain protein
  Pfam annotation: Domain name=TCP; Domain location=27-121; Score =108.1; E_value=3e-29; Accession=PF03634.5; Description=TCP family transcription factor
RWSGDGNGNALAVRKAPSIDLAVAVLGGGLADGDSKVDGRGRRIRMPIICAARVFQLTRELGLKSDGQTIEWLLRQAEPSILAATGSGTTPAVFVSSSAPSTSSSSSHYHQQTVLGKRPREEGGDAAVGTAAARRTD

SEQ ID NO: 111525 - protein, 137 aa, Setaria italica
  Transcript Sequence Number=SeqID_45551
  Gene Ontology: Mol. function=DNA binding; Cellular component=nucleus; Biological process=regulation of transcription, DNA-dependent
  Homolog annotation: Hit_ID=Q6K7P2; Match level="QueryCoverage=95%, HitCoverage=58%, E-value=7e-32, Identity=59%"; Hit description =Transcription factor PCF3-like
  Pfam annotation: Domain name=TCP; Domain location=29-128; Score =150.7; E_value=4.4e-42; Accession=PF03634.5; Description=TCP family transcription factor
  Subcellular localization annotation: CTP_CleavageSite=18; ConfidenceScore=5.06e-01
MTTRPAQGGAAADKQLVPASNGNGNGNALAVRKAPSKDRHSKVDGRGRRIRMPIICAARVFQLTRELGHKSDGQTIEWLLRQAEPSIIAATGTGTTPASFSTSSPSSLRSSSSQTTTAPFILGKRVRGADDADAAEP

SEQ ID NO: 111526 - protein, 80 aa, Setaria italica
  Transcript Sequence Number=SeqID_45552
CCQIPSRLNAITRAYPQKNNSLKDNLQPFAIQKKRLTNTCSKVLDRIIDNHNLNLGYEQSEITSSIAERRIGNARTIDSC

SEQ ID NO: 111527 - protein, 142 aa, Setaria italica
  Transcript Sequence Number=SeqID_45553
  Gene Ontology: Mol. function=acyltransferase activity; Biological process=metabolic process
  Homolog annotation: Hit_ID=B6SYA0; Match level="QueryCoverage=88%, HitCoverage=23%, E-value=3e-31, Identity=57%"; Hit description =Glycerol-3-phosphate acyltransferase 1
APSWRRRGRRTPETAPWGLVGAASSGRVHYLFSSYYCKETFAVSEADARGWRPLPRDRYPRPLVFHDGRLAFAPTPPAALAMYTFLPFAVALVTFRTVAFSFLPYRVCFPVGALTGMHYRLVGGRVPGQSSGGGGRLYVCNH

SEQ ID NO: 111528 - protein, 108 aa, Setaria italica
  Transcript Sequence Number=SeqID_45554
MFNLTMNMFFLIGNVNFRYSPYFSDYGYPLSYYQAYGGLQGAQQQYAVFGGGATAAGLTMAAANSSGLYPYFQYSPASLAAAGYSMAQYPQLYQYTAAAAGATTSLAA

SEQ ID NO: 111529 - protein, 319 aa, Setaria italica
  misc_feature (25)..(25): Xaa can be any naturally occurring amino acid
  Transcript Sequence Number=SeqID_45555
  Gene Ontology: Mol. function=nucleic acid binding
  Homolog annotation: Hit_ID=B9R8Y3; Match level="QueryCoverage=51%, HitCoverage=58%, E-value=5e-46, Identity=64%"; Hit description=RNA -binding region-containing protein, putative
  Pfam annotation: Domain name=RRM_1; Domain location=23-92; Score =63.8; E_value=6.4e-16; Accession=PF00076.14; Description=RNA recognition motif. (a.k.a. RRM, RBD, o
MSQAMSGSGGGAGQFGDTTFTKVFXGGLAWETHKEGMRAYFEQFGDILEAVVITDKNTGRSKGYGFVTFHDPEAALRACIDPYPVIDGRRANCNLAYLGVNKSKTAPVPPYLQPYAHAYGGGSMRAMKSIQTAGAGGASLMSLVPADHGIQQGIPTAAYNVYAGYSPYFSDYGYPLSYYQAYGGLQGAQQQYAVFGGGATAAGLTMAAANSSGLYPYFQYSPASLAAAGYSMAQYPQLYQYTAAAAGATTAAATLMTTVAGGLQQYAGAVAFTPNSTGQAGMTMSMTAPTLPAPAAQYQFTRLIPSHLAAAPDQKPSLA

SEQ ID NO: 111530 - protein, 503 aa, Setaria italica
  Transcript Sequence Number=SeqID_45556
  Gene Ontology: Mol. function=electron carrier activity; Cellular component=chloroplast; Biological process=fatty acid biosynthetic process
  Homolog annotation: Hit_ID=Q6QHT5; Match level="QueryCoverage=92%, HitCoverage=91%, E-value=0.0, Identity=77%"; Hit description =Hydroperoxide lyase
  Pfam annotation: Domain name=p450; Domain location=21-497; Score= -146.8; E_value=0.00014; Accession=PF00067.14; Description=Cytochrome P450
  Subcellular localization annotation: CTP_CleavageSite=52; ConfidenceScore=5.27e-01
MLPTLSPAASASAATPPPRPIPGSYGPPVIGALRDRLDYFWFQSQDEFFRRRAAANRSTVFRTNIPPTFPFFVGIDPRVVAVVDAAAFTALFDNTLVDKRDILIGPYNPGAGFTGGTRVGVYLDTEEPEHERVKKFAMAILHRSATTWASAFRAGVDAMLDSIEADLAAKASDEKPSANYIVPLQQCIFRFLCKALVGADPSVDWVVDKFGFTILDVWLALQILPTQKIGIIQPLEELLIHSFPLPSFLIWPGYYRLYRFVEEHGAAAVAYAAEEHGIGKKDAINNLLFVLGFNAFGGFSVFLPFLVAKIGEAADPTGLRPRLREEVRAAMLKAATGGGDTVFGFKAAREMPLVRSTVYEMLRMQPPVPLQFGRARKDFVLRSHGAAFQVAKGEVLCGYQPLAMRDPEVFDRPEEFVPERFLGDEGQALLQHLFWSNGPETSQPAAGNKQCAAKEVVVDTACMLVAELFRRYDDFQVEGTSFTKLVKRQPSPTMSEPAAAGAQ

SEQ ID NO: 111531 - protein, 88 aa, Setaria italica
  Transcript Sequence Number=SeqID_45557
FFPLNGRLSVFPTIVKILCAYMLLAAGRIAFVWPLLRVKKILHFFKRAELSSSSRTLLVCLISLFRNDKSSIYRVNKRLFSLRPKNNS

SEQ ID NO: 111532 - protein, 371 aa, Setaria italica
  misc_feature (366)..(366): Xaa can be any naturally occurring amino acid
  Transcript Sequence Number=SeqID_45558
  Gene Ontology: Mol. function=protein binding; Cellular component =perinuclear region of cytoplasm; Biological process=nucleocytoplasmic transport
  Homolog annotation: Hit_ID=Q6YSF3; Match level="QueryCoverage=69%, HitCoverage=51%, E-value=1e-83, Identity=66%"; Hit description =Acidic leucine-rich nuclear phosphoprotein 32-related protein 1
  Pfam annotation: Domain name=LRR_1; Domain location=123-145; Score =2.8; E_value=88; Accession=PF00560.25; Description=Leucine Rich Repeat
  Pfam annotation: Domain name=LRR_1; Domain location=52-72; Score=5.7; E_value=24; Accession=PF00560.25; Description=Leucine Rich Repeat
  Pfam annotation: Domain name=LRR_1; Domain location=74-97; Score =10.5; E_value=3; Accession=PF00560.25; Description=Leucine Rich Repeat
  Pfam annotation: Domain name=LRR_1; Domain location=99-119; Score =14.2; E_value=0.54; Accession=PF00560.25; Description=Leucine Rich Repeat
  Pfam module annotation: Pfam domain module=LRR_1::LRR_1::LRR_1::LRR _1; Domain location=123-145::52-72::74-97::99-119
MVDEAWERAVEAALHAGGEGSSSPARSLTLDGAVKCMHGRLPAAEILERHQSLEHLSIAGIGVTSLEGFPRLRNLTRLTLSDNRIAGGLDHLVAAGLSSLRDLDLSNNRIQDVDDLAPLADLRLVSLDLYECPVTRVKDYRSRVFGMIRTLKYLDKMDADENERPESDDDDDDGEGEGDGDGDGDGDGDEDEDDEEDEDDPGSGEVANGGVSHSRGGVASHPVEVNGVIDVDEEESDADEVVPNGGVEHHHGANGFRVAVAGEAPEEEDEDVEDDDEDDDEDFEEEEDLGEEIDEDGDDEDAVVEVHDVPSSDEEEDGVEEDEDEEDDEEEVEDEGEEAEPQSSGRVAMMTGEDGGEEIDGHEHGXEGDDE

SEQ ID NO: 111533 - protein, 270 aa, Setaria italica
  Transcript Sequence Number=SeqID_45559
  Gene Ontology: Mol. function=protein binding
  Pfam annotation: Domain name=DUF1308; Domain location=4-268; Score =106.9; E_value=6.8e-29; Accession=PF07000.3; Description=Protein of unknown function (DUF1308)
GVGADIALGLAEGLGAVETDLLAEFVGVSEDEDEEGWVAVSFNTSEEMRSFRAFEIDVVEGAGEVFLPPEAKESTDEVVPLDFEGAFGAFIGKMWRESRELVNLDTTALVAMVSGISNGGVGKLMAAPEAVTRARFKCNYKFVMDQAQSELQFPILVELGKVVEGKQCIICETVNSEFKEIVSMCGGAEEKIRARYLLKQLTIVPDSPSARMMDLPTTRKRAMKNKVVFGTGDHWRAPTFTANMGFVRAVSQSGMPLLTIEHRPRALIGL

SEQ ID NO: 111534 - protein, 54 aa, Setaria italica
  Transcript Sequence Number=SeqID_45560
  Gene Ontology: Mol. function=nucleoside-triphosphatase activity
  Homolog annotation: Hit_ID=B6TNP7; Match level="QueryCoverage=94%, HitCoverage=9%, E-value=8e-21, Identity=92%"; Hit description=ATP binding protein
PAGGGVFGKDAPMREFKKLYGLIKIRSRREGAGVAPLEGDAHGPPTPGNHDRER

SEQ ID NO: 111535 - protein, 91 aa, Setaria italica
  Transcript Sequence Number=SeqID_45561
  Gene Ontology: Mol. function=ARF GTPase activator activity; Cellular component=plasma membrane; Biological process=regulation of ARF GTPase activity
  Homolog annotation: Hit_ID=C0J9Y5; Match level="QueryCoverage=82%, HitCoverage=23%, E-value=7e-36, Identity=89%"; Hit description=ZAC
  Pfam annotation: Domain name=ArfGap; Domain location=17-90; Score =57.3; E_value=5.8e-14; Accession=PF01412.10; Description=Putative GTPase activating protein for Arf
MSSRDGANSGRAASDKMRKLRELLHTSDNRICADCSAPDPKWASANIGVFICLKCSGVHRSLGTHVSKVLSVTLDQWTDDEINSMIEVGWK

SEQ ID NO: 111536 - protein, 127 aa, Setaria italica
  Transcript Sequence Number=SeqID_45562
  Gene Ontology: Mol. function=zinc ion binding; Cellular component =nucleus
  Subcellular localization annotation: CTP_CleavageSite=32; ConfidenceScore=5.50e-01
KIIKRPKVMGQFGREFSRASTSHSQPQTFMFQSSTVSYGGPNGACYTSSTTRRTGVDGITLEESKEADTTTGKATHRISRGIGSKGHSLTRNLKSDGHVNTLQTLHNLNEDELATFEGNTIGRKKNK

SEQ ID NO: 111537 - protein, 341 aa, Setaria italica
  misc_feature (152)..(152): Xaa can be any naturally occurring amino acid
  misc_feature (284)..(284): Xaa can be any naturally occurring amino acid
  misc_feature (319)..(319): Xaa can be any naturally occurring amino acid
  Transcript Sequence Number=SeqID_45563
  Gene Ontology: Mol. function=zinc ion binding; Cellular component =nucleus
  Subcellular localization annotation: CTP_CleavageSite=63; ConfidenceScore=5.38e-01
MQGGRGGRHGLFGFVDPFAGFGGFGRPGSLPSSFFGGANPFDDPFFTNPFGSVMQRGFPTPFSGMMQPSFMDPFASMMQPSLLGPSMFGPHSVLNGGMFGSQTNLNQGMSNASGFIQQAPEPSRPKGPIIKELSSDDEDDARDDKEDDKKKXNFRKHPRESKGAYVEEPDEEVEDNKRPKHGQFGREFSRASTSHSQPQTFMFQSSTVSYGGPNGACYTSSTTRRTGVDGITLEESKEADTTTGKATHRISRGIGSKGHSLTRNLKSDGHVNTLQTLHNLNEGXFFLSGLPYYFSVKLNPMSFFLLHSDELATFEESWXKNARDNLPGWDPRMNMLGNGNA

SEQ ID NO: 111538 - protein, 135 aa, Setaria italica
  Transcript Sequence Number=SeqID_45564
RYYLVIYYLVSKVKVGLVVLTTTGKATHRISRGIGSKGHSLTRNLKSDGHVNTLQTLHNLNEDELATFEESWRRNARDNLPGWDPRMNMLGNGNAHPDFRDANQMPALPAPDQFLGTNSSRNSRNGSSMDRARCT

SEQ ID NO: 111539 - protein, 99 aa, Setaria italica
  misc_feature (84)..(84): Xaa can be any naturally occurring amino acid
  Transcript Sequence Number=SeqID_45565
  Gene Ontology: Mol. function=selenium binding; Biological process =cell redox homeostasis
  Homolog annotation: Hit_ID=B6TEF3; Match level="QueryCoverage=79%, HitCoverage=37%, E-value=5e-34, Identity=88%"; Hit description =SelT/selW/selH selenoprotein domain containing protein
KAEEAAPAAEENGGDAAAEGKRIVVEACTQCRHFKIRAQKVKEDLESSVPGVSVTINPQKPRRGCLEIREEGGEVFLSLLNMPXRPFTPMKKLDMDEVI

SEQ ID NO: 111540 - protein, 70 aa, Setaria italica
  Transcript Sequence Number=SeqID_45566
TFPVFPLRSCFKRSMIKSSPMCLMLSYQLNGRSKECSETKQEKGSDQRKGDLIELKEACHSVIMNELAGR

SEQ ID NO: 111541 - protein, 97 aa, Setaria italica
  Transcript Sequence Number=SeqID_45567
RQRAKPYAHPLTRLPITAVLESPEGCRRTTIAVTGQTRWRPEGRRDLLRASTPTAPIIPASSTTLMAGSSQAVAAGCDSNPFLSGVHVLDAKDPVLD

SEQ ID NO: 111542 - protein, 48 aa, Setaria italica
  misc_feature (3)..(3): Xaa can be any naturally occurring amino acid
  Transcript Sequence Number=SeqID_45568
DNXGVARQKEIGTLTVMACVAGCPLSTRLQESWCHCGAPFLLGVLEPD

SEQ ID NO: 111543 - protein, 64 aa, Setaria italica
  Transcript Sequence Number=SeqID_45569
FAQYLFKIARFFVSYVNKLFLLYTSAIACLKYSSIVCCKLTFALRLYPTSSLTHSISLHTHPTS

SEQ ID NO: 111544 - protein, 60 aa, Setaria italica
  Transcript Sequence Number=SeqID_45570
HFGTLKVSRIMQIDADGENGMNKYSQRSNTSFFVNKQNIQGGTTVLKNGTDRLAVADSSS

SEQ ID NO: 111545 - protein, 197 aa, Setaria italica
  misc_feature (68)..(68): Xaa can be any naturally occurring amino acid
  misc_feature (116)..(116): Xaa can be any naturally occurring amino acid
  misc_feature (123)..(123): Xaa can be any naturally occurring amino acid
  misc_feature (160)..(160): Xaa can be any naturally occurring amino acid
  Transcript Sequence Number=SeqID_45571
  Gene Ontology: Mol. function=aspartic-type endopeptidase activity; Biological process=RNA-dependent DNA replication
  Homolog annotation: Hit_ID=Q2QZM9; Match level="QueryCoverage=94%, HitCoverage=43%, E-value=1e-56, Identity=58%"; Hit description =Retrotransposon protein, putative, unclassified
QLVLPAQQAVFEKPEVKKHRHLKLLYVKGHVDGRLMSKMLVDGGVTIDILPYATYRKLGKTPKDLIKXNMVLKYLEGKRSEAKGVLNNELMIGSKTLLTIFFIIDGKGSYNLLLGXDWIHVNXCIPSTIHQLLIQWDGDMVEIVLADGTAIIAAADVPFXESHKVRFLSGKGWDEDEFMDAASFCSRWVKQMMRKHR

SEQ ID NO: 111546 - protein, 103 aa, Setaria italica
  Transcript Sequence Number=SeqID_45572
  Gene Ontology: Mol. function=nucleic acid binding; Cellular component= endoplasmic reticulum membrane; Biological process=GPI anchor biosynthetic process
  Homolog annotation: Hit_ID=Q33AB1; Match level="QueryCoverage=41%, HitCoverage=4%, E-value=4e-11, Identity=69%"; Hit description =Retrotransposon protein, putative, unclassified
  Subcellular localization annotation: CTP_CleavageSite=63; ConfidenceScore=5.81e-01
MSTSRDWGSGSSSSLRVPTPVPTTASSSLAPTSPPQTPTSTPPSTASSTPAHNEPCSVSFATPLSHDKDRVDTHHDGEPLRYRTMADILGDQPMPGRDGTGAI

SEQ ID NO: 111547 - protein, 135 aa, Setaria italica
  Transcript Sequence Number=SeqID_45573
  Gene Ontology: Mol. function=protein serine/threonine kinase activity; Cellular component=integral to membrane; Biological process=protein amino acid phosphorylation
  Homolog annotation: Hit_ID=Q6L3I5; Match level="QueryCoverage=100%, HitCoverage=59%, E-value=5e-29, Identity=40%"; Hit description =Leucine Rich Repeat family protein
  Pfam annotation: Domain name=LRR_1; Domain location=116-135; Score =11.6; E_value=1.9; Accession=PF00560.25; Description=Leucine Rich Repeat
  Pfam annotation: Domain name=LRR_1; Domain location=20-42; Score =15.4; E_value=0.24; Accession=PF00560.25; Description=Leucine Rich Repeat
  Pfam annotation: Domain name=LRR_1; Domain location=44-66; Score =16.0; E_value=0.15; Accession=PF00560.25; Description=Leucine Rich Repeat
  Pfam annotation: Domain name=LRR_1; Domain location=68-90; Score =13.6; E_value=0.76; Accession=PF00560.25; Description=Leucine Rich Repeat
  Pfam annotation: Domain name=LRR_1; Domain location=92-114; Score =16.8; E_value=0.089; Accession=PF00560.25; Description=Leucine Rich Repeat
  Pfam module annotation: Pfam domain module=LRR_1::LRR_1::LRR_1::LRR _1::LRR_1; Domain location=116-135::20-42::44-66::68-90::92-114
NLQQNALSGPIPRGLAGLASLQVLALAGNQLTGAIPPELGRLTGLQKLNLGNNSLVGAIPPELGELGELQYLNLMNNRLSGRVPRALAKLSSVRMIDLSGNMLSGDLPADLGRLPELTFLVLSDNQLTGSVPGDL

SEQ ID NO: 111548 - protein, 163 aa, Setaria italica
  Transcript Sequence Number=SeqID_45574
  Gene Ontology: Mol. function=RNA-directed DNA polymerase activity; Cellular component=chromatin; Biological process=chromatin assembly or disassembly
  Homolog annotation: Hit_ID=Q7XW39; Match level="QueryCoverage=95%, HitCoverage=9%, E-value=9e-57, Identity=63%"; Hit description =OSJNBa0054D14.1 protein
  Pfam annotation: Domain name=RVT_1; Domain location=2-162; Score =124.7; E_value=2.9e-34; Accession=PF00078.19; Description=Reverse transcriptase (RNA-dependent DNA pol
FRQFASPALLVKKDGNWRFCVDYRHLNAITTKNKYPLLVVDELLDELHGAQWFTKLDMRSGYHQVRLKPEDEHKTTFKTHHGHWEFKVMSFGLTNAPATFQVAMNTIFEPLLRKCVLIFMDDILVYNKTLKEHKQHLQAVFDILQANKLFLKISKCSFAQKQL

SEQ ID NO: 111549 - protein, 309 aa, Setaria italica
  misc_feature (24)..(24): Xaa can be any naturally occurring amino acid
  Transcript Sequence Number=SeqID_45575
  Gene Ontology: Mol. function=histone-lysine N-methyltransferase activity; Cellular component=nucleus; Biological process=chromatin modification
  Homolog annotation: Hit_ID=B6TF98; Match level="QueryCoverage=99%, HitCoverage=65%, E-value=1e-155, Identity=88%"; Hit description=MYND finger family protein
  Pfam annotation: Domain name=SET; Domain location=102-285; Score =13.0; E_value=0.00016; Accession=PF00856.20; Description=SET domain
YNLPFTDQFRLPSVVACPGGCEGXELYCSQSCADSDWDSYHSLLCTGSKTEPLRRSALQKFVQHANGTNDIFLVAAKAITFTLLRYKKLKRQPASHESSFSLLMEAWKPLSMGFKKRWWECVALPEDIDSSEEDSFRQQMRDLAFESLQLLKDAIFDPECAPLFSLDVYGHIIGMFELNNLDLVVASPVEDYFIHIDDLPESEKEEVEKVTGLFLDALGEDYSVPCEGTAFFPLQSCMNHSCCPNARAFKRDEDKDGHAVILALKPISKGEEITISYIDEDLSYEERQAQLADYGFTCACSKCQEERPI

SEQ ID NO: 111550 - protein, 237 aa, Setaria italica
  Transcript Sequence Number=SeqID_45576
  Gene Ontology: Mol. function=ATP binding; Biological process=apoptosis
  Homolog annotation: Hit_ID=Q5JMA3; Match level="QueryCoverage=96%, HitCoverage=40%, E-value=1e-65, Identity=56%"; Hit description =Fusarium resistance protein I2C-5-like
GRHITNQAMLHQLQMLREAMNKGCYLLDNFTYRMLQQESSNVQVSDHPFPLSKFNPAKGLRFSTRRMIVAFQGDGAKEVQKMLGSLHSIISDMAEFIIFLKSYPPISREPYSKHLFLENCMFGRQTELEKIISFLLQPEPPGTERLQVLPITGPPRVGKSTLVEHVCYDERVRNHFSTIILCRDPTAPEGSGVVKKQSHSLHGRSLIVMELADDLVVDERQCRNFYSSSKPTIVLLV

SEQ ID NO: 111551 - protein, 183 aa, Setaria italica
  misc_feature (59)..(59): Xaa can be any naturally occurring amino acid
  Transcript Sequence Number=SeqID_45577
  Gene Ontology: Mol. function=inositol or phosphatidylinositol phosphatase activity
  Homolog annotation: Hit_ID=B9S378; Match level="QueryCoverage=95%, HitCoverage=39%, E-value=9e-62, Identity=63%"; Hit description=Type I inositol polyphosphate 5-phosphatase, putative
RLTQFRRICRRAGRRIPEKILDHDRAIWLGDLNYRISLSYEDTKKLLTENNWDALFEKXDQLNIQRASGRAFKGWSEEKIYFAPTYKYSCNSDSYAGEAATSKKKRRTPAWCDRILWHGDGISQLSYFRGESKFSDHRPVCGTFILEVEMLDGKSKRRSSNTNIRIGAEELLPTSKHNKGAGT

SEQ ID NO: 111552 - protein, 129 aa, Setaria italica
  Transcript Sequence Number=SeqID_45578
PREAETAQHGGDGDPRPRSAAPATWSPRLNPPPHHGHAPQLFGAPGRAGPQKSVSSAGEMTGFPWASPLGVGVAVSGIDSAAGVVTTRGAAALVSCYGGLAGWSGYRALAFVCGSWAHPVPTHPTPYPT

SEQ ID NO: 111553 - protein, 54 aa, Setaria italica
  Transcript Sequence Number=SeqID_45579
VTATQMMYITLKTMLPISHNCRIQHSISSDAEFVSRFYVHKHDSTHDNMASVEA

SEQ ID NO: 111554 - protein, 80 aa, Setaria italica
  misc_feature (20)..(20): Xaa can be any naturally occurring amino acid
  Transcript Sequence Number=SeqID_45580
  Gene Ontology: Mol. function=protein serine/threonine kinase activity; Biological process=protein amino acid phosphorylation
  Homolog annotation: Hit_ID=Q5JN26; Match level="QueryCoverage=80%, HitCoverage=17%, E-value=5e-27, Identity=87%"; Hit description =Receptor protein kinase-like
QGGYGKVYRGVLADGTVAAXKRAQQESLQGSKEFFTEIELLSRLHHRNLVSLLGYCDEEDEQVVPATPPSSLSKEMQILK

SEQ ID NO: 111555 - protein, 707 aa, Setaria italica
  Transcript Sequence Number=SeqID_45581
  Gene Ontology: Mol. function=protein serine/threonine kinase activity; Biological process=protein amino acid phosphorylation
  Homolog annotation: Hit_ID=UPI00000481E8; Match level="QueryCoverage =99%, HitCoverage=74%, E-value=0.0, Identity=55%"; Hit description =leucine-rich repeat transmembrane protein kinase, putative
  Pfam annotation: Domain name=LRR_1; Domain location=1-22; Score=10.2; E_value=3.4; Accession=PF00560.25; Description=Leucine Rich Repeat
  Pfam annotation: Domain name=LRR_1; Domain location=24-44; Score=6.1; E_value=21; Accession=PF00560.25; Description=Leucine Rich Repeat
  Pfam annotation: Domain name=LRR_1; Domain location=47-69; Score =18.4; E_value=0.029; Accession=PF00560.25; Description=Leucine Rich Repeat
  Pfam annotation: Domain name=LRR_1; Domain location=71-94; Score =11.9; E_value=1.6; Accession=PF00560.25; Description=Leucine Rich Repeat
  Pfam annotation: Domain name=Pkinase; Domain location=367-636; Score =148.5; E_value=2.1e-41; Accession=PF00069.17; Description=Protein kinase domain
  Pfam annotation: Domain name=Pkinase_Tyr; Domain location=367-636; Score=109.7; E_value=9.7e-30; Accession=PF07714.9; Description =Protein tyrosine kinase
  Pfam module annotation: Pfam domain module=LRR_1::LRR_1::LRR_1::LRR _1::Pkinase::Pkinase_Tyr; Domain location=1-22::24-44::47-69::71 -94::367-636::367-636
TLLKLSLRNCSLEGPVPDLSGIPQLGYLDLSWNQLRGPIPSSQFASNITTIDLSHNHLNGSIPGSFSGLPNLQRLSLDNNNLDGSVPSNIWQNIDLSGNRSLILDFQNNALTNLSTPLSPPDNVTILLHGNPVCTVQNQQNISKYCQSKTVVADGGSSNNSTLCGPCSTDMPYERVLMSPIPCFCAIPVYVDYRLKSPGLSDFVPYEALFQQYLSSGLSLLSFQLEVSTFIWEEGPRLKMSLKLFPNRTLIFNASEVSRLRGMFTGWQIPDSDIFGPYELLNFNPGWYSNILPQGRRSILSTGAIVGVVMAAFAAAAILSSLITIIILRRRSRHSSSKKRSAKRISMKIAGVKDFTFEELSHCTNDFDDSALIGQGGYGKVYRGVLADGTVAAIKRAQQESLQGSKEFFTEIELLSRLHHRNLVSLLGYCDEEDEQMLVYEFMPNGNLRDHLSAKAKVPLDFPMRLRIALGSSRGILYLHTEADPPIYHRDIKASNILLDSKFVAKVADFGLSRLAPLPETEGSAPGHVSTVVKGTPGYLDPEYFLTHKLTDKSDVYSLGVVFLELLTGMQPISHGRNIVREVLAANQSGMIFSVVDNRMGSYPAECVERFAALALRCCQDETDARPSMVEVVRELEVIWQMTPGTENIASSESGALAMGSSSSNTTGTPTTSSATRMASSNDHYISSMEVSGSNLLSGVVPSINPR

SEQ ID NO: 111556 - protein, 223 aa, Setaria italica
  misc_feature (154)..(154): Xaa can be any naturally occurring amino acid
  Transcript Sequence Number=SeqID_45582
  Gene Ontology: Mol. function=aminoacyl-tRNA ligase activity; Cellular component=cytoplasm; Biological process=alanyl-tRNA aminoacylation
  Homolog annotation: Hit_ID=Q654W2; Match level="QueryCoverage=84%, HitCoverage=57%, E-value=1e-68, Identity=72%"; Hit description =Alanyl-tRNA synthetase-like
  Pfam annotation: Domain name=tRNA-synt_2c; Domain location=1-223; Score=-321.1; E_value=1.5e-05; Accession=PF01411.11; Description =tRNA synthetases class II (A)
PDGVLPSNIGRGYVVRRLIRRVVRTGRLIGIRGDGHGNPEGAFLPALAEVVISLSTQIDPDVESRRKSIIGELQREELRFVQTLGRGEKLLDELLDEALLSAGNNGNKPSLSGKDVFLLYDTYGFPVEITAEIAGERGVTVDMKGFDIEMENQXRKQSQAAHNVVKLSVGNETEIVKSIPDTEFLGYDSLSATAVVRGLLVNGNPVNEVSEGSEVEILLDRTP

SEQ ID NO: 111557 - protein, 461 aa, Setaria italica
  Transcript Sequence Number=SeqID_45583
  Gene Ontology: Cellular component=exocyst; Biological process =exocytosis
  Homolog annotation: Hit_ID=B6U0J9; Match level="QueryCoverage=99%, HitCoverage=69%, E-value=0.0, Identity=80%"; Hit description=Protein binding protein
  Pfam annotation: Domain name=Exo70; Domain location=98-455; Score =479.8; E_value=3.7e-141; Accession=PF03081.7; Description=Exo70 exocyst complex subunit
SEEEDYDAEHGFGDEPIPIAKPVSDFDVVIDALPPGSVSDVHQIARRMVDAGFGRECAEAYATARRGFIDESVARLGIRSRTTEEVHSLPWEELEFDIARWIPAFKMVFRILIPSERRLCDRVFDGLAPYGDLAFVAAVRTQGLQLISFGDAVAAASRAPERLFRVIDMYEAVRDLLPDLDPVFSDPYSAALRAEVSAVCSTLGSSIKGIFMELENLIRRDPARVAVPGGGIHPITRYVMNYLRAACGSRQTLEEVMEGDLGAVGAAAIAVDPDRPTSSLAVHIAWIMDVLHKNLETKSKIYRDPPLASIFLMNNGKYIIHKVNDSELGILLGDEWMKQMMSRVRRWSMEYQRGAWAKVMSVLQTGGSGVGSITAKAMLQKMQMFNSYLEEICAVQSDWVIADEQLRADVKSAIVDSVMPAYRGLIGSLRSSPEAARDLFIKYTPEDVQARIQHLFEGVAK

SEQ ID NO: 111558 - protein, 97 aa, Setaria italica
  Transcript Sequence Number=SeqID_45584
LLDQLRRLLILSPLLLIVAVQLWVATGGDGGGGGIMCALSEMVAGDHRRQYGYGYGVGGAAGAGSSPWGVALALVLVLFLVSFHSSFQERWFPLLGR

SEQ ID NO: 111559 - protein, 357 aa, Setaria italica
  misc_feature (329)..(329): Xaa can be any naturally occurring amino acid
  Transcript Sequence Number=SeqID_45585
  Gene Ontology: Mol. function=protein binding; Biological process =ubiquitin-dependent protein catabolic process
  Homolog annotation: Hit_ID=Q84S70; Match level="QueryCoverage=56%, HitCoverage=28%, E-value=8e-32, Identity=37%"; Hit description=Kelch- like protein
  Pfam annotation: Domain name=Kelch_1; Domain location=212-257; Score =12.4; E_value=0.11; Accession=PF01344.17; Description=Kelch motif
  Pfam annotation: Domain name=Kelch_1; Domain location=259-304; Score =51.2; E_value=4e-12; Accession=PF01344.17; Description=Kelch motif
  Pfam annotation: Domain name=Kelch_1; Domain location=306-351; Score =22.4; E_value=0.0019; Accession=PF01344.17; Description=Kelch motif
  Pfam annotation: Domain name=Kelch_2; Domain location=259-304; Score =16.8; E_value=0.091; Accession=PF07646.7; Description=Kelch motif
  Pfam module annotation: Pfam domain module=Kelch_1::Kelch_1::Kelch _1::Kelch_2; Domain location=212-257::259-304::306-351::259-304
VLSKDLDPFGVSSESHCVAPYKLADPEGEYASACRTSTIHLDNESSKWDDLDDAATKEGTESVNDDHQHTNPPREEQHDTVAVRQKLQELFVLRQQEAQSSNGTVDSASDKSMPQEAQYGAALPTDPPDSTSKADASIEDLTSLGKYHGNAELLHIINELSKRTRAMEKKLVESDKEKLFLRESVKDAERKVQQLEYKFEKLQLNYNSLAPLLGGPYDNVEGPSIFILGGYRGSTCLSSLDAFCPRTDRLVPLCPMSSARAYAAAAALNNNIYIFGGGDGSTWYHSVEYYSRGENQWMTCPRLKHKKGSLAGTTLNDKIFAIGGGDGSXGFSEVEMFDPALGRWIDSLFLLSVFNSY

SEQ ID NO: 111560 - protein, 78 aa, Setaria italica
  Transcript Sequence Number=SeqID_45586
YLFLNCLSCLYPHLALPLKKVRKCCCCYYRLSLIFFCPLGILCNESDEVPVAIPLYPIADGISFAVLVHNNCCFRVSK

SEQ ID NO: 111561 - protein, 174 aa, Setaria italica
  Transcript Sequence Number=SeqID_45587
VWEYSRYYPSTARGILRGLWLKKWKKIFQKTLKDASLVEVSTHQLKQLIAIALKCVDSDLNKRPNAADILQIFYRNEAGQSSCDPCCKYSQVRDLVSVQPTELKIHMADPNKLYRSSCLLHLNNNTLGHVAFRILSNTLARHFIWPKFGFVPPGCRYTVAVTMRYQQNPPPSED

SEQ ID NO: 111562 - protein, 110 aa, Setaria italica
  Transcript Sequence Number=SeqID_45588
  Pfam annotation: Domain name=Motile_Sperm; Domain location=6-107; Score=-7.8; E_value=0.058; Accession=PF00635.18; Description=MSP (Major sperm protein) domain
MQVRDLVSVQPTELKIHMADPNKLYRSSCLLHLNNNTLGHVAFRILSNTLARHFIWPKFGFVPPGCRYTVAVTMRYQQNPPYPAKTWFLHWRAPERVVSGNKERYFKAFN

SEQ ID NO: 111563 - protein, 228 aa, Setaria italica
  misc_feature (16)..(16): Xaa can be any naturally occurring amino acid
  Transcript Sequence Number=SeqID_45589
  Gene Ontology: Mol. function=aminoacyl-tRNA ligase activity; Cellular component=cytoplasm; Biological process=tRNA aminoacylation for protein translation
  Homolog annotation: Hit_ID=B9RXG5; Match level="QueryCoverage=96%, HitCoverage=22%, E-value=3e-94, Identity=73%"; Hit description =Leucyl-tRNA synthetase, putative
YGKKKVNYKLRDWLFXRQRYWGEPFPVVYHDDTNEMVPLSENELPLTLPELDDFTPTGTGEPPLTKATDWVKTIDPLSKKPSRRETSTMPQWAGSCWYYLRFMDPKNSSILVDKAKERYWGPVDIYVGGAEHSVLHLLYARFWHKVLYDMGVVSTKEPFKCLINQGLILGEVEYTAYRDNEGRLVSADSDSSLIDCYQEKVPADKVTKVGDHYVLKDDTNHSSKCYVD

SEQ ID NO: 111564 - protein, 58 aa, Setaria italica
  Transcript Sequence Number=SeqID_45590
LILHYAIWLGWFTLGSELRVGKEPLLESIYEHEDHCFCSLCNWVDSRNTVRLSYNAIM

SEQ ID NO: 111565 - protein, 88 aa, Setaria italica
  Transcript Sequence Number=SeqID_45591
  Homolog annotation: Hit_ID=Q8LEY9; Match level="QueryCoverage=63%, HitCoverage=14%, E-value=6e-20, Identity=85%"; Hit description=UVB -resistance protein-like
  Pfam annotation: Domain name=RCC1; Domain location=24-78; Score=19.4; E_value=0.0065; Accession=PF00415.10; Description=Regulator of chromosome condensation (RCC1)
MYPYVYLQVDIAAGGWHSTALTNEGEVYAWGRGEHGRLGFGDDKSSHMVPLKVELLAGEDIVQVIHLDCSWDVNLVCCPLQFSLQVEK

SEQ ID NO: 111566 - protein, 128 aa, Setaria italica
  Transcript Sequence Number=SeqID_45592
  Subcellular localization annotation: CTP_CleavageSite=76; ConfidenceScore=5.60e-01
FALFLPPLAFLRSRPRLSSSPAPKAPTFPSFLLGVYGLVRPGKQRILFSLRCLLLCCCRGFCPLLGVQFVPSPFLEAPPQWAALFALDSAAWFGSLGSWFGKDPPFKERNLVWVDGILRGVRDAMMGS

SEQ ID NO: 111567 - protein, 89 aa, Setaria italica
  Transcript Sequence Number=SeqID_45593
  Homolog annotation: Hit_ID=B4FAJ5; Match level="QueryCoverage=100%, HitCoverage=18%, E-value=1e-40, Identity=91%"; Hit description =Avr9/Cf-9 rapidly elicited protein 137
  Subcellular localization annotation: CTP_CleavageSite=10; ConfidenceScore=5.16e-01
LLHPRSARAKASSGPITRRDGPSRVHPPMSNSCPIIGLRPSGQKSPTDWRKLLDAPPSTVGGAGLDQQYANVIVSAEELLRMEAEGRQE

SEQ ID NO: 111568 - protein, 66 aa, Setaria italica
  Transcript Sequence Number=SeqID_45594
ATGKLSLPTFGLAPYKFRASIWASDGTQERDRVTSLMQEADGWLRRIQVDHPDFRFFATHFSTTWR

SEQ ID NO: 111569 - protein, 94 aa, Setaria italica
  Transcript Sequence Number=SeqID_45595
  Gene Ontology: Mol. function=protein binding
  Homolog annotation: Hit_ID=Q7F1X6; Match level="QueryCoverage=100%, HitCoverage=26%, E-value=4e-35, Identity=75%"; Hit description =B1065G12.8 protein
VLPGQHNFVATLIEGRDQKKRPTEFGMNQVLQPFDSGKFNFTKVRPEEVIFRFCEADKDSAQYFNDAPDTVSSSSSAILINVSPIGYCHVLFDP

SEQ ID NO: 111570 - protein, 46 aa, Setaria italica
  Transcript Sequence Number=SeqID_45596
  Gene Ontology: Mol. function=metal ion binding; Cellular component =nucleus; Biological process=regulation of transcription, DNA -dependent
  Homolog annotation: Hit_ID=Q0J0K1; Match level="QueryCoverage=73%, HitCoverage=7%, E-value=2e-09, Identity=85%"; Hit description =Squamosa promoter-binding-like protein 18
EGAEPLNTHPWSPSSDGHEMNYHGIFHVGGEGSSDGTSPSLPFSWQ

SEQ ID NO: 111571 - protein, 264 aa, Setaria italica
  Transcript Sequence Number=SeqID_45597
  Gene Ontology: Mol. function=protein dimerization activity
  Homolog annotation: Hit_ID=A8QW53; Match level="QueryCoverage=83%, HitCoverage=59%, E-value=8e-75, Identity=61%"; Hit description=O -methyltransferase 3
  Pfam annotation: Domain name=Methyltransf_2; Domain location=2-241; Score=243.6; E_value=4.9e-70; Accession=PF00891.10; Description=O -methyltransferase
  Subcellular localization annotation: CTP_CleavageSite=42; ConfidenceScore=5.19e-01
HRPPALLPPATGGSTSLTPLLTMLLGPLLVSPLATVVTALVRQEEQPDLSAFGIAHGETVWDVADQEAAFNISLHDAIAADTRFLMPIVLKECGEVFQGIDSLVDVGGGPYGSAAAAIAAAFPHLKCSVLDLPHVVAQAPSDSNVQFIAGDMFESVPPANADYHKWILHDWGDDECIKLLKRCKEAIPSRDAGGKVIIIDMVLGWGPSEEKHTETQLLFDLLMIALNGVERDEQEWKKIFFEAGFKDYKIITLLGIRSIIELYP

SEQ ID NO: 111572 - protein, 56 aa, Setaria italica
  Transcript Sequence Number=SeqID_45598
  Homolog annotation: Hit_ID=B6T972; Match level="QueryCoverage=96%, HitCoverage=8%, E-value=1e-22, Identity=94%"; Hit description =Ankyrin protein kinase-like
MPKEYPASPKAQQLQESKKQRLTYILVVSALCIAFYVLGAWQNTTLPKPVGNSAAI

SEQ ID NO: 111573 - protein, 204 aa, Setaria italica
  misc_feature (24)..(24): Xaa can be any naturally occurring amino acid
  misc_feature (195)..(195): Xaa can be any naturally occurring amino acid
  Transcript Sequence Number=SeqID_45599
  Gene Ontology: Biological process=protein localization
  Homolog annotation: Hit_ID=B9RUS0; Match level="QueryCoverage=94%, HitCoverage=4%, E-value=3e-68, Identity=62%"; Hit description =Vacuolar protein sorting-associated protein, putative
SRERRTSVCLRCIRSDMVMGGQFXLEESVWDSSSARTYEPFSLWTVDNDAGTFLVRSGYRKPPKRLALKLAGPPTSRSSDNIVVDAEIKTFSAVSFDDYGGMMVPLFGMSFDDVGLRYHGGSHHLNATVNLSFVARSYNDKYSSWEPFIEPTDGFLRYQYDMNTPGSPGQLRITSTRDLNVNVSVSNTNMLSQAXASWNNISLG

SEQ ID NO: 111574 - protein, 162 aa, Setaria italica
  Transcript Sequence Number=SeqID_45600
  Homolog annotation: Hit_ID=B9RUS0; Match level="QueryCoverage=84%, HitCoverage=3%, E-value=2e-32, Identity=52%"; Hit description =Vacuolar protein sorting-associated protein, putative
RSRVEVIRSWPGEPGVFMSYWYLNVNVSVSNTNMLSQAYASWNNISLGDELYKKETFSSTEQPVLDVHRRRSYYVVPQNKLGQDIYIRTTENSSSLVTLLPSGDDRSIKVPASKNLLDSHLNGKSVKSYRLMVTAILADAEVKVDEGLATGEYMTAVRLFTE

SEQ ID NO: 111575 - protein, 541 aa, Setaria italica
  Transcript Sequence Number=SeqID_45601
  Gene Ontology: Mol. function=transporter activity; Cellular component= integral to membrane; Biological process=transport
  Homolog annotation: Hit_ID=B6SVW2; Match level="QueryCoverage=98%, HitCoverage=98%, E-value=0.0, Identity=78%"; Hit description =Carbohydrate transporter/ sugar porter
  Pfam annotation: Domain name=7TM_GPCR_Str; Domain location=117-407; Score=-174.1; E_value=0.029; Accession=PF10326.1; Description =Serpentine type 7TM GPCR chemorecepto
  Pfam annotation: Domain name=MFS_1; Domain location=43-463; Score =70.8; E_value=5e-18; Accession=PF07690.8; Description=Major Facilitator Superfamily
  Pfam annotation: Domain name=Sugar_tr; Domain location=34-509; Score=- 12.9; E_value=1.9e-08; Accession=PF00083.16; Description=Sugar (and other) transporter
  Pfam module annotation: Pfam domain module=7TM_GPCR_Str::MFS_1::Sugar_ tr; Domain location=117-407::43-463::34-509
MAADTDTTAPLLTSHKPPKAPTIDDTIENYMGTTGVMQLFKAILLAFAWAFDAQQVFISVFTDAEPQWHCTGASPSCSPAAPPASPCWLPPGAWAWDRPADSTMVSEWALKCAGPALVSLPASSFFAGCLAGGFLLTTLADSLLGRRKMLLTSLVSMSVAGVLTAFAPNVWAYAALRFVSGFGRSMVGTCTLVLSTELVGKRWRDTVSVAGFFFFTVGFLSLPALGFAFREASWRNMYLWTSVPSLCYSVLLYFLAQESPRWLLVRGRKQDAMDTLQQIATLNGNSITSSFSMLHACTMRADGGDAGGGAGGAFGTMRAFWERPWALRRLAAIMTTSFGVGMVYYGMPLNVGSLGTNLYLSVTYNAMAELPSAVLSLAFIGKVNRRTTVIALTAAAGAFSLMCVAIPEGSAARMASELLSFFATITAFNLILIYSIELFPTSVRNSAVGLVRQALVLGGVAAPVLVALGRERSFYSFGVFGLCIGCFGLFAACLPETKGRSMSDTMEEEEHKQEAAAAAAAVTSCTGGATDIATKDNSDVV

SEQ ID NO: 111576 - protein, 275 aa, Setaria italica
  misc_feature (220)..(220): Xaa can be any naturally occurring amino acid
  Transcript Sequence Number=SeqID_45602
  Gene Ontology: Cellular component=integral to membrane
  Homolog annotation: Hit_ID=Q6Z5L0; Match level="QueryCoverage=93%, HitCoverage=72%, E-value=1e-101, Identity=89%"; Hit description =Glucose-6-phosphate/phosphate-tranlocator-like
MMKLRWWRADASEVMAVTAMGVWEAVLAGGGRRFIKRKDSDAGETGRALEELRSSLYNEMHSSEIAKRQQQRFCGPSVALTFNFAVAVGIIMANKMVMGSVGFKFPIALSLIHYAVAFLLMATLKTFSLLPVAPPLKSTPFSSIFALGAVMSLSTGLANVSLKHNSVGFYQMAKIAVTPTIVVAEFMLFQKKVSTQKAMTLAVVSFGVAIATVTDLEFNXLGACVALAWIVPSAVNKILWSSLQQSGNWTALALMWKTTPITIFFLLTLMPLLDP

SEQ ID NO: 111577 - protein, 136 aa, Setaria italica
  Transcript Sequence Number=SeqID_45603
PGSGWEFNCVPWLLTESPPGPDSVPARTTVDDGGVGGLRLRLRAMSCWTRSRASRALLALFFSLLSLETMVGGHMGRAPTCALAHLLVIDHFRISFPSSGPHPLPNANVRGRSKNSGAVISSTPCALTMIVPARGA

SEQ ID NO: 111578 - protein, 87 aa, Setaria italica
  Transcript Sequence Number=SeqID_45604
  Homolog annotation: Hit_ID=B9T426; Match level="QueryCoverage=97%, HitCoverage=28%, E-value=5e-18, Identity=49%"; Hit description =Transferase, transferring glycosyl groups, putative
  Pfam annotation: Domain name=DUF604; Domain location=1-87; Score= -80.0; E_value=1.2e-07; Accession=PF04646.4; Description=Protein of unknown function, DUF604
PRGKTALEAVRPLVGASRLDPARALQQSFCYQRGPGYVWSVSVAWGYTVQLYPWAVAPHDLEVPLQTFRTWRSWADGPFVFNTRPLS

SEQ ID NO: 111579 - protein, 120 aa, Setaria italica
  misc_feature (38)..(38): Xaa can be any naturally occurring amino acid
  misc_feature (71)..(71): Xaa can be any naturally occurring amino acid
  Transcript Sequence Number=SeqID_45605
  Gene Ontology: Mol. function=transferase activity; Biological process= protein modification process
  Homolog annotation: Hit_ID=B9T610; Match level="QueryCoverage=95%, HitCoverage=35%, E-value=6e-35, Identity=65%"; Hit description =Geranylgeranyl transferase type II beta subunit, putative
  Pfam annotation: Domain name=Prenyltrans; Domain location=34-89; Score=41.8; E_value=2.6e-09; Accession=PF00432.13; Description =Prenyltransferase and squalene oxidase re
FSGDIWDSGVKWTDTWFSYIALCTLSLLHRLHKIDVQXAVDFVVSCKNLDGGFGAMPGGESHAGQMVQVTXHIHLHAVFCCVGALAITGSLHHIDRDLLGWWLCERQCKDGGLNGDLRIS

SEQ ID NO: 111580 - protein, 317 aa, Setaria italica
  Transcript Sequence Number=SeqID_45606
  Gene Ontology: Mol. function=transferase activity; Cellular component= Rab-protein geranylgeranyltransferase complex; Biological process =protein modification process
  Homolog annotation: Hit_ID=Q6X0N9; Match level="QueryCoverage=98%, HitCoverage=98%, E-value=1e-147, Identity=78%"; Hit description =Putative Rab geranylgeranyl transferase type II beta subunit
  Pfam annotation: Domain name=Prenyltrans; Domain location=104-147; Score=60.0; E_value=9.2e-15; Accession=PF00432.13; Description =Prenyltransferase and squalene oxidase re
  Pfam annotation: Domain name=Prenyltrans; Domain location=152-195; Score=62.6; E_value=1.5e-15; Accession=PF00432.13; Description =Prenyltransferase and squalene oxidase re
  Pfam annotation: Domain name=Prenyltrans; Domain location=200-243; Score=60.7; E_value=5.4e-15; Accession=PF00432.13; Description =Prenyltransferase and squalene oxidase re
  Pfam annotation: Domain name=Prenyltrans; Domain location=248-292; Score=57.6; E_value=4.9e-14; Accession=PF00432.13; Description =Prenyltransferase and squalene oxidase re
  Pfam annotation: Domain name=Prenyltrans; Domain location=55-99; Score=49.8; E_value=1.1e-11; Accession=PF00432.13; Description =Prenyltransferase and squalene oxidase re
  Pfam module annotation: Pfam domain module=Prenyltrans::Prenyltrans::P renyltrans::Prenyltrans::Prenyltrans; Domain location=104-147::152 -195::200-243::248-292::55-99
MAGKAELAVDQHVRYIVTVEKKKDSFESLVMEHIRLNGAYWGLTTLDLLHKLHAVDAAEVVDWIMSCYHPESGGFGGNVGHDPHVLYTLSAVQVLCLFDRLDVLDVDKVADYVAGLQNEDGSFSGDIWGEVDTRFSYIALCTLSLLHRLHKIDVQKAVDFVVSCKNLDGGFGAMPGGESHAGQIFCCVGALAITGSLHHIDRDLLGWWLCERQCKDGGLNGRPEKLADVCYSWWVLSSLIMIDRVHWIDKEKLTKFILNCQDKENGGISDRPDNAVDIYHTYFGVAGLSLMEYPGVKPMDPAYALPLDVVNRIFLRK

SEQ ID NO: 111581 - protein, 86 aa, Setaria italica
  Transcript Sequence Number=SeqID_45607
  Subcellular localization annotation: CTP_CleavageSite=42; ConfidenceScore=5.38e-01
SSLPPLALFSRAPRPAAAAASTCLPPQTQTLDPPPPGGSAITCRRRAPPALPPPIQTPALAPAPVEGSSKVLERSGDAGRGPGNDC

SEQ ID NO: 111582 - protein, 143 aa, Setaria italica
  Transcript Sequence Number=SeqID_45608
MSLVGEESVGFSSPIYSSIEAEKDLGQSATESRNEKKTEESTLHIVNPKTGSSKVVSSGEQNKPDGSGPRDAWWKKKILSLYKNAKESNNFWPIVAAAAAAAAGLVGLAYFGHRWHKGKLQLQLGKQPPSCNKEVITKHTFYF

SEQ ID NO: 111583 - protein, 230 aa, Setaria italica
  misc_feature (57)..(57): Xaa can be any naturally occurring amino acid
  misc_feature (172)..(172): Xaa can be any naturally occurring amino acid
  Transcript Sequence Number=SeqID_45609
MQFLTRVMKRKTKETCKHKLEGDLPSIPSLDKGKNVSLGDMEFDDGKALQGMSLVGXFSSPIYSSIEAEKDLGQSATESRNEKKTEESTLHIVNPKTGSSKVVSSGEQNKPDGSGPRDAWWKKKILSLYKNAKESNNFWPIVAAAAAAAAGLVGLAYFGHRWHKGKLQLQLXEQPPSATRRLLSANESTLLFSFQKINDAVGPLNRIKDILVAGNHPSPGIHGHARASGM

SEQ ID NO: 111584 - protein, 619 aa, Setaria italica
  misc_feature (9)..(9): Xaa can be any naturally occurring amino acid
  misc_feature (326)..(326): Xaa can be any naturally occurring amino acid
  misc_feature (544)..(544): Xaa can be any naturally occurring amino acid
  Transcript Sequence Number=SeqID_45610
  Gene Ontology: Mol. function=endonuclease activity; Cellular component=cytoplasm; Biological process=regulation of transcription, DNA-dependent
  Homolog annotation: Hit_ID=B6SJQ2; Match level="QueryCoverage=100%, HitCoverage=99%, E-value=0.0, Identity=86%"; Hit description=CCR4 -NOT transcription complex subunit 6
  Pfam annotation: Domain name=Exo_endo_phos; Domain location=267-611; Score=104.2; E_value=4.4e-28; Accession=PF03372.15; Description =EndonucleaseExonucleasephosphatase family
VKPAPGGRXMLTVLRVHLPSEIPIVGCEITPYVLVRRPDGGILTDDVSEASPVDGYFMRYKWYRIQSDRRAAVCSLHPTEQATLQCIGCLKSKIPVAKSYHCSAKCFSDAWQHHRVLHERAISALNENGTEEEELFGKFGSGSSSSGIISAALSGSTPNLSQSSGVNNGPTPVYPTGTEKSSGETWFEVGRSRTYTATADDIGHVLRFECVVVDLETRGTVRAPTSVMTSRVIPAPTPTPRRLIPVNAADAMGHFDLDNRTTSFGTFTVLSYNILADTYATSDTYSYCPTWALSWAYRRQNLLREIIGYHADIICLQEVQNNHFEXFFAPELDKHGYQALFKKRTTEVYAGSPQAIDGCATFFRRDRFSHVKKYEVEFNKAAQSLTDAIIPAAQKKLALTRLVKDNIALIAVLEAKFGNNGTENPSKRQLLCVANTHINIHHDLKDVKLWQIHTLLKGLEKIAVSADIPMLVCGDFNSIPGSTSHGLLAMGKVDQLHPDLGVDPLGILRPPSKLTHQLPLVSAYSSFARMASVGYDLDHQRRRXMDPTTNEPLFTNCTRDFTGTIDYIFYTADSLTVESLLELLDEDSLRKDTALPSPEWSSDHIALLAEFRCKPRVRR

SEQ ID NO: 111585 - protein, 647 aa, Setaria italica
  misc_feature (357)..(357): Xaa can be any naturally occurring amino acid
  Transcript Sequence Number=SeqID_45611
  Gene Ontology: Mol. function=endonuclease activity; Cellular component=cytoplasm; Biological process=regulation of transcription, DNA-dependent
  Homolog annotation: Hit_ID=B6SJQ2; Match level="QueryCoverage=93%, HitCoverage=98%, E-value=0.0, Identity=77%"; Hit description=CCR4 -NOT transcription complex subunit 6
  Pfam annotation: Domain name=Exo_endo_phos; Domain location=295-639; Score=94.0; E_value=5.4e-25; Accession=PF03372.15; Description =EndonucleaseExonucleasephosphatase family
MADPPGGGGSRVCVCGGRTGRGGGGGGAGAREKRAGEGGRMLSVVRVHLPSEIPIVGCEITPYVLLRRPDGAVSTDDVPETAPNDGQYMRYRWYRIQSDRKVPICSVHPMEQATIQCLGCLKSKIPVAKSYHCSAKCFSDAWQHHKVLHERASSALNENGAEEEELFGRFGSGGSGVLSTAGSGSLSNFGQSPGVNNGPVPLYASGTDKNSGETWFEVGRSRTYTPTADDIGHALKFECVAVDAEKRSPMGPPTSIMTSRVIPAPTPTPRRLIQVNGDVLGHLDLDSQTSSSGTFTVLSYNILADAYATSDAYSYCPTWALSWTYRRQNLLREIIGYHADIICLQEVQLNHFEDFFXSPELDKHGYQALYKKRTTEVYSGNPMAIDGCATFFRRDKFSHVKKYEVEFNKAAQSLTDAIIPAAQKRVALSRLIKDNIALIAVLEAKFGNHGAENPGKRQLLCVANTHINVHQDLKDVKLWEVHTLLKGLEKIAVSADIPMLVCGDFNSTPGSSPHGLLAVGKVDQLHPDLAIDPLGILRPPSKLNHQLPLVSAYSSFARMVGVGYDLEHQRRRMDPATNEPLFTNCTRDFTGTVDYIFYTADSLTVESLLELLDEESLRKDTALPSPEWSSDHIALLAEFRCKPRIRR

SEQ ID NO: 111586 - protein, 57 aa, Setaria italica
  Transcript Sequence Number=SeqID_45612
SSSRICIEDHSWIASITFSFQFFSLRPLKRLAPYTNTSETYSFLKISCKPCILSYLS

SEQ ID NO: 111587 - protein, 130 aa, Setaria italica
  misc_feature (75)..(75): Xaa can be any naturally occurring amino acid
  Transcript Sequence Number=SeqID_45613
QVKRMLESGSEAESESDSSSEDARSKRHRRGRKSKASSQVSAENLAAVAVLKEATSTQQMSGMPRSPAQEDNSPXQNGEIHNNGVNESKTERNAATMPVLTGNRSKSRFPILLHTSIILCAYCFCKRCFI

SEQ ID NO: 111588 - protein, 254 aa, Setaria italica
  Transcript Sequence Number=SeqID_45614
  Homolog annotation: Hit_ID=Q6Z6E0; Match level="QueryCoverage=18%, HitCoverage=10%, E-value=2e-11, Identity=79%"; Hit description =Splicing coactivator subunit SRm300-like protein
  Subcellular localization annotation: CTP_CleavageSite=25; ConfidenceScore=5.84e-01
MRSPRRNIRRSLSRSPVRIPRRSVSRSPVRGGRSRRNTSRSPSPPRRAISPPPNNGRSPSRTGSPDGSPKRIRRGRGFTQRYSFARQYRSPSADRSHRYGGRSDRDRYMGYRGSRHRSPPRRYRSPPRGRPSSPRYRRRSRSTSRSPVHRERRRGGGYSRSPVRSRSPPAGKPRSRGERARSVSRSRLSGSRSRSPPPAHDRSPPDSPSPKRASDEKSRSPSPSQSRSVSASPSPGGKKGLVSYGDGSPDSAGK

SEQ ID NO: 111589 - protein, 678 aa, Setaria italica
  Transcript Sequence Number=SeqID_45615
  Gene Ontology: Mol. function=peptidyl-prolyl cis-trans isomerase activity; Cellular component=nuclear matrix; Biological process =protein folding
  Homolog annotation: Hit_ID=B9S4P8; Match level="QueryCoverage=99%, HitCoverage=78%, E-value=1e-47, Identity=56%"; Hit description =Cyclophilin, putative
  Pfam annotation: Domain name=DUF755; Domain location=133-218; Score= -34.0; E_value=0.025; Accession=PF05501.3; Description=Domain of unknown function (DUF755)
  Pfam annotation: Domain name=Pro_isomerase; Domain location=1-152; Score=181.6; E_value=2.2e-51; Accession=PF00160.13; Description =Cyclophilin type peptidyl-prolyl cis-tr
  Pfam module annotation: Pfam domain module=DUF755::Pro_isomerase; Domain location=133-218::1-152
QDSERMIFELFAYVAPLTSEKFRALCTGELGKTKKPLCYKGSTFHRVIKGIMAQGGDLAKRSGSGGESIYSGKFADEACVLRHDDRGLLTTADTGSQFCITFQPNSHLDRKHTVFGKLVIGNDVLKRIEQVDVDAPDSTPVVPVRIVDCGELTDRKHDQKRAAKSKLLKDISSDEESDEGQHKGRRKKSSKRKRKKRRYSYSESDSSSESETESSDSESDSDTYSSDSSDVSSSSDDRRRRRKRHTKKNKHKRSRRKRDHRRERRRRKRDRKSKHKSKRMLESGSEAESESDSSSEDARSKRHRRGRKSKASSQVSAENLAAVAVLKEATSTQQMSGMPRSPAQEDNSPLQNGEIHNNGVNESKTERNAATMPVLTGNRSKSRSQSMSANHSMSKSMSISPRRSPIKRSITTPKRSASRSPVHHSRSRSPVRAPKRSKTRSPARQRSISRSPARRSPSKSSPREASRSPTPRISRSPVKAQRRSISRSSARSMQRRTPSRSPERTHIRKSVSPSPPVEKRRSITRTSSRSPLRSVSRSPVRFSRSPHRPARRSPMRSPRRNIRRSLSRSPVRIPRRSVSRSPVRGGRSRRNTSRSPSPPRRAISPPPNNGRSPSRTGSPDGSPKRIRRGRGFTQRYSFARQYRSPSADRSHRYGGRSDRDRYMGYRGSRHRSPPRRYN

SEQ ID NO: 111590 - protein, 48 aa, Setaria italica
  Transcript Sequence Number=SeqID_45616
VVVGRLFLPRFGQFEACNRCITMLVRRSKVSTPIQASAVQCLDTVGKK

SEQ ID NO: 111591 - protein, 103 aa, Setaria italica
  misc_feature (3)..(3): Xaa can be any naturally occurring amino acid
  misc_feature (86)..(86): Xaa can be any naturally occurring amino acid
  Transcript Sequence Number=SeqID_45617
  Homolog annotation: Hit_ID=B6U203; Match level="QueryCoverage=99%, HitCoverage=26%, E-value=4e-45, Identity=88%"; Hit description=mTERF family protein
VGXFAISYCSKLLTASPDEVDAVLARADGFGVLRRTRAFKDAIIAAFSATPERLAWKAAFFRDELGWTEAQVKTAAAKMPTLMTVXAERLRRNWEFLNTEVAW

SEQ ID NO: 111592 - protein, 224 aa, Setaria italica
  Transcript Sequence Number=SeqID_45618
  Gene Ontology: Mol. function=DNA binding; Cellular component=nucleus
  Homolog annotation: Hit_ID=Q5QL94; Match level="QueryCoverage=94%, HitCoverage=89%, E-value=3e-74, Identity=66%"; Hit description =Putative MYB27 protein
CGTADDKSAKVAASLSHMAQWESARLEAEARLARESKMRTAAPTPTTLHGQQTNVPASTASPCLDVLHAWQGAKIDLESPTSTLTFTGSNSGMLPTPRTNRLEVSESNSVMWERSDELEGEESDWQFYSRHQVLGLEGKEREEDFIGCEEPWFSGMAGVGAGFTGMLLDGSNEHDASECWGESSNGQTEHSNQASDEEDKNYWNGVLGMVNSELPPQSPPSPLV

SEQ ID NO: 111593 - protein, 325 aa, Setaria italica
  Transcript Sequence Number=SeqID_45619
  Gene Ontology: Mol. function=metal ion binding; Cellular component =cytoplasm; Biological process=ubiquitin-dependent protein catabolic process
  Homolog annotation: Hit_ID=Q84JU6; Match level="QueryCoverage=95%, HitCoverage=33%, E-value=3e-87, Identity=50%"; Hit description=E3 ubiquitin-protein ligase HOS1
IEHCRATRDLSSCGRYVHHVLTSCGHAALCAECSQRCDVCPICRSPITDNGNRVRFRLYDKCIEAGLISKQLDERFQEKEAYGNPVNTDVQRLHSLFDVALQNNLTSLICHYITDVCLDDNAVSSDPLLAFLLDEVVIKDWCKRAVNALISKIGMIYRSGLEMMESKLSQLQKFAAQLAGIYSVLEVMIASFTEAVSAHVNDLHQLIENTLKAKQHSEAMIWCIRHRFLQDIYSRYADYTSWSSDVIQRKASAEARKWPDIFDKGSGDSEANQGTLFIEQALQNLGIEQSYRSEEEEAAITRLQNEQSSSMFCSTITADHFSLNR

SEQ ID NO: 111594 - protein, 174 aa, Setaria italica
  misc_feature (8)..(8): Xaa can be any naturally occurring amino acid
  Transcript Sequence Number=SeqID_45620
SDDDEDEXDDDELAGGEGSGEARRRRMLAREEAKLEKEIVRMVLSGEAEEKLKPNSGQSVAVGDHHLCVGFHDEPGGEYRVWEWHGHVMLFDDEDGYSAEYIYGNHFEPLAAATARAKKKEKEKREKDLSMGLRDLVVCTDDGVNGNRSKENGSSGGPRVVRRNVVNSPAAPAR

SEQ ID NO: 111595 - protein, 66 aa, Setaria italica
  Transcript Sequence Number=SeqID_45621
GPWVGGRPWRRPCGLGPPPGGPGFWGPDFGGFLGSCFYVLCCCCLLQDCCAPFLGHPGPGGPPPPF

SEQ ID NO: 111596 - protein, 176 aa, Setaria italica
  misc_feature (159)..(159): Xaa can be any naturally occurring amino acid
  Transcript Sequence Number=SeqID_45622
  Gene Ontology: Mol. function=actin binding; Cellular component =integral to membrane; Biological process=actin cytoskeleton organization and biogenesis
  Homolog annotation: Hit_ID=Q8H8K7; Match level="QueryCoverage=100%, HitCoverage=20%, E-value=4e-73, Identity=79%"; Hit description =Formin-like protein 4
  Pfam annotation: Domain name=FH2; Domain location=1-176; Score=-73.6; E_value=3.3e-06; Accession=PF02181.15; Description=Formin Homology 2 Domain
LHWDKVRACSDRDMVWDRLKSNSFQLDEDMIEVLFTNNAANAPARDTPKKAGVPQCRPEEKVLDPKKAQNIAILLRALNVTLEEVSDALLDGNAECLGADLLETLVKMAPTKEEELKLRNFTGDLSKLGSAERFLKAVLDIPFSFKRVDAMLYRANFDXEIKLPQGNSFTIEAACD

SEQ ID NO: 111597 - protein, 56 aa, Setaria italica
  Transcript Sequence Number=SeqID_45623
TLPKVKYYQHKKLIWYTANNCLTGVHIKVSEVNISIFRSMIQAIHVITYRKMDPDE

SEQ ID NO: 111598 - protein, 65 aa, Setaria italica
  Transcript Sequence Number=SeqID_45624
PSYDCTSKLTKGELVLLHLLVHVSEKCDLLPVVWSLVVQLVNENQSIRIFHNLILKLKHSTPLLL

SEQ ID NO: 111599 - protein, 81 aa, Setaria italica
  Transcript Sequence Number=SeqID_45625
KVRSCEGRVPAKRLSHWVSVKWSHKACIWLVYVPSLFYPLHLHAMIGYQYLNMSKRLGAKARASLNLLFFSSCCSFYILLI

SEQ ID NO: 111600 - protein, 64 aa, Setaria italica
  Transcript Sequence Number=SeqID_45626
  Gene Ontology: Mol. function=nucleic acid binding
  Homolog annotation: Hit_ID=B6TB81; Match level="QueryCoverage=67%, HitCoverage=15%, E-value=2e-16, Identity=95%"; Hit description=SR repressor protein
GGGGGGGGGGGRGGRGGDQGSVSLLVRNIPLRCRPEELRVPFERFGPVRDVYLPRDYHTGVLCE

SEQ ID NO: 111601 - protein, 88 aa, Setaria italica
  Transcript Sequence Number=SeqID_45627
KVMKVLETNFSSLYLPMEDTVKPSCLDEINFVDKLNLVLIRELHSHNTLSHQANERLGLFRACIYFNQIQSQCDSLLAGTRPSKVASY

SEQ ID NO: 111602 - protein, 76 aa, Setaria italica
  misc_feature (41)..(41): Xaa can be any naturally occurring amino acid
  Transcript Sequence Number=SeqID_45628
KVMKVLETNFSSLYLPMEDTVKPSCLDEINFVDKLNLVLIXELHSHNTQKKVASYIKVNTILYRKSISKLKTSRSY

SEQ ID NO: 111603 - protein, 104 aa, Setaria italica
  misc_feature (97)..(97): Xaa can be any naturally occurring amino acid
  Transcript Sequence Number=SeqID_45629
  Gene Ontology: Mol. function=nucleic acid binding
  Homolog annotation: Hit_ID=B6TB81; Match level="QueryCoverage=58%, HitCoverage=22%, E-value=6e-27, Identity=95%"; Hit description=SR repressor protein
ILLIKAFFPSFREPRGFGFVEFVDAYDASEAQYHMNRQMFSGREITVVLAADTRKRPEDMRRRMGPRGYSDHEGRRPSRRGRSRSRSYSRSRSPRPXGRARSRS

SEQ ID NO: 111604 - protein, 142 aa, Setaria italica
  Transcript Sequence Number=SeqID_45630
  Homolog annotation: Hit_ID=B6TB81; Match level="QueryCoverage=45%, HitCoverage=22%, E-value=6e-16, Identity=75%"; Hit description=SR repressor protein
  Subcellular localization annotation: CTP_CleavageSite=45; ConfidenceScore=5.25e-01
MSGAGRSRSRSYSRSRSPRPRGRARSRSYSPAPRRRDDYSASPARAKEEHRRTSKQPKEHDGDKKRRSYTPEDRNDRRGADNGHDERRKSPVAAAEEDEEPRGGRRRSPRPSVSPPGSRFQVRSFVLVLVSRFFNLFVKRVF

SEQ ID NO: 111605 - protein, 287 aa, Setaria italica
  Transcript Sequence Number=SeqID_45631
  Gene Ontology: Mol. function=nucleic acid binding
  Homolog annotation: Hit_ID=B6TB81; Match level="QueryCoverage=72%, HitCoverage=76%, E-value=4e-71, Identity=70%"; Hit description=SR repressor protein
  Pfam annotation: Domain name=RRM_1; Domain location=58-128; Score =72.7; E_value=1.3e-18; Accession=PF00076.14; Description=RNA recognition motif. (a.k.a. RRM, RBD, o
MGRYSPAYHSPPRRGHGGRGRSPPPRRGYGGGGGGGGGGGGGGGGRGGRGGDQGSVSLLVRNIPLRCRPEELRVPFERFGPVRDVYLPRDYHTGEPRGFGFVEFVDAYDASEAQYHMNRQMFSGREITVVLAADTRKRPEDMRRRMGPRGYSDHEGRRPSRRGRSRSRSYSRSRSPRPRGRARSRSYSPAPRRRDDYSASPARAKEEHRRTSKQPKEHDGDKKRRSYTPEDRNDRRGADNGHDERRKSPVAAAEEDEEPRGGRRRSPRPSVSPPGSRSRSASPASSG

SEQ ID NO: 111606 - protein, 75 aa, Setaria italica
  Transcript Sequence Number=SeqID_45632
  Subcellular localization annotation: CTP_CleavageSite=37; ConfidenceScore=5.00e-01
RSSRGCRPHRQKTTLRKLSLMMLTMKVKCGISMKYCMAQRKPVRLMQKMILSVRTRKISLSMSCRLTWHMGLFSY

SEQ ID NO: 111607 - protein, 62 aa, Setaria italica
  Transcript Sequence Number=SeqID_45633
SRIRAVLQLRLVTSCLLSLQDTCGYTWLLCLNSILVITEGYILPTVLVYSRVKFRVLHFFLA

SEQ ID NO: 111608 - protein, 90 aa, Setaria italica
  misc_feature (51)..(51): Xaa can be any naturally occurring amino acid
  Transcript Sequence Number=SeqID_45634
SGAMELTPFQPAAGALVEAIAAPTAGRRAPLSFILGFGLGSYSVDGCGFTXNPQHHPLPPSSQVIPLLGQIAHSFSTTLILFSLSPISTA

SEQ ID NO: 111609 - protein, 73 aa, Setaria italica
  Transcript Sequence Number=SeqID_45635
VLRTTYCCPYCWPSGTTILYPRIWVGIYSVDGCGFTINPQHHPLPPSSQVAKLEQERENLKMMFRLYGSHPSH

SEQ ID NO: 111610 - protein, 156 aa, Setaria italica
  Transcript Sequence Number=SeqID_45636
  Subcellular localization annotation: CTP_CleavageSite=32; ConfidenceScore=5.16e-01
PYLSLRRGSPSAVPPQPRRSSRYQSQLGLGISSSHDVEESSGRGSNRMLSPRGSHGAHPLPAGGRCSRRGYCCPYCWPSGTTILYPRIWVGIYSVDGCGFTINPQHHPLPPSSQDTCGYTWLLCLNSILVITEGYILPTVLVYSRVKFRVLHFFLA

SEQ ID NO: 111611 - protein, 71 aa, Setaria italica
  Transcript Sequence Number=SeqID_45637
  Subcellular localization annotation: CTP_CleavageSite=34; ConfidenceScore=5.41e-01
PRSRPSSTSTSAASSITTSMPSTGIHDHRLKYIRARAPAHTPSCISRCIRMMRCVNSGSRLLPELTHRIIR

SEQ ID NO: 111612 - protein, 53 aa, Setaria italica
  Transcript Sequence Number=SeqID_45638
  Homolog annotation: Hit_ID=B6U432; Match level="QueryCoverage=90%, HitCoverage=22%, E-value=2e-13, Identity=81%"; Hit description =Prenylated Rab receptor 2
FSALALGAAVVCAHGAFRVPEDLFLDEPDQAAGSGNPLLSFIANATGGVGGRV

SEQ ID NO: 111613 - protein, 100 aa, Setaria italica
  Transcript Sequence Number=SeqID_45639
  Subcellular localization annotation: CTP_CleavageSite=48; ConfidenceScore=5.52e-01
SLFSSTFVSMLQKKSVWRFARSSQNNSSSTRDICSKAFIRDKIQNLTNASAAPHSSTEYFTAFSVFDPLQDGPGRWILDAPISQSSCDENTDQLLTSLQR

SEQ ID NO: 111614 - protein, 120 aa, Setaria italica
  misc_feature (86)..(86): Xaa can be any naturally occurring amino acid
  Transcript Sequence Number=SeqID_45640
  Gene Ontology: Mol. function=protein disulfide oxidoreductase activity; Cellular component=chloroplast; Biological process =glycerol ether metabolic process
  Homolog annotation: Hit_ID=Q41864; Match level="QueryCoverage=88%, HitCoverage=62%, E-value=3e-46, Identity=85%"; Hit description =Thioredoxin M-type, chloroplastic
  Pfam annotation: Domain name=Thioredoxin; Domain location=27-119; Score=118.0; E_value=3.1e-32; Accession=PF00085.12; Description =Thioredoxin
GSQRSRKPIEEFSYPRLNSASKNAVDEVLVADDANWDGMVIACETPVLVEFWAPWCGPCRMIAPVIDELAKDYAGKIKCCKVNTDXTTPKVASTYGIRSIPTVLIFKGGDKKESVIGAVP

SEQ ID NO: 111615 - protein, 91 aa, Setaria italica
  Transcript Sequence Number=SeqID_45641
SEPRTCVFLYRALVFLATNGHNLNLHDRKANKSSVQKYTGSGFRLTEQRSSREERRGIDRDTRRGHTRHQRGRRSFFSSGWHVSACGAVAA

SEQ ID NO: 111616 - protein, 192 aa, Setaria italica
  misc_feature (62)..(62): Xaa can be any naturally occurring amino acid
  misc_feature (108)..(108): Xaa can be any naturally occurring amino acid
  Transcript Sequence Number=SeqID_45642
  Gene Ontology: Mol. function=transporter activity; Cellular component= integral to membrane; Biological process=transport
  Homolog annotation: Hit_ID=A9UEB4; Match level="QueryCoverage=72%, HitCoverage=68%, E-value=3e-63, Identity=87%"; Hit description =Aquaporin (Fragment)
  Pfam annotation: Domain name=MIP; Domain location=1-157; Score=124.7; E_value=3e-34; Accession=PF00230.12; Description=Major intrinsic protein
RRATSTRPVTFGLFLARKLSLTRAIFYIIMQCLGAICGAGVVKGFQQGLYMGNGGGANVVAXGYTKGSGLGAEIVGTFVLVYTVFSATDAKRNARDSHVPILRPLPIXFAVFLVHLATIPITGTGINPARSLGAAIIYNREHAWSHHVSGTPSSVLFSPTFHFQWFCYLLALKCLHPKYQTCNHRLSIVQQI

SEQ ID NO: 111617 - protein, 133 aa, Setaria italica
  Transcript Sequence Number=SeqID_45643
  Gene Ontology: Mol. function=transporter activity; Cellular component= integral to membrane; Biological process=transport
  Homolog annotation: Hit_ID=B2CZY9; Match level="QueryCoverage=86%, HitCoverage=39%, E-value=5e-59, Identity=94%"; Hit description =Aquaporin
  Pfam annotation: Domain name=MIP; Domain location=1-120; Score=68.9; E_value=1.8e-17; Accession=PF00230.12; Description=Major intrinsic protein
SRVLYMGNGGGANMVAAGYTKGDGLGAEIVGTFILVYTVFSATDAKRNARDSHVPILAPLPIGFAVFLVHLATIPITGTGINPARSLGAAVIYNRRQAWDDHWIFWVGPFIGAALAAIYHQVVIRAIPFKSRS

SEQ ID NO: 111618 - protein, 151 aa, Setaria italica
  misc_feature (36)..(36): Xaa can be any naturally occurring amino acid
  Transcript Sequence Number=SeqID_45644
  Gene Ontology: Mol. function=transporter activity; Cellular component= integral to membrane; Biological process=transport
  Homolog annotation: Hit_ID=Q9AQU5; Match level="QueryCoverage=98%, HitCoverage=50%, E-value=2e-63, Identity=83%"; Hit description =Aquaporin PIP1-3/PIP1-4
  Pfam annotation: Domain name=MIP; Domain location=1-138; Score=96.3; E_value=1e-25; Accession=PF00230.12; Description=Major intrinsic protein
GTQALHDYVEDGVVKGFQQGLYMGNGGGANVVAPGXYTKGSGLGAEIVGTFVLVYTVFSATDAKRNARDSHVPILAPLPIGFAVFLVHLATIPITGTGINPARSLGAAIIYNREHAWSHHWIFWVGPFIGAALAAIYHQVIIRAIPFKSRS

SEQ ID NO: 111619 - protein, 135 aa, Setaria italica
  Transcript Sequence Number=SeqID_45645
  Gene Ontology: Mol. function=structural constituent of ribosome; Cellular component=ribonucleoprotein complex; Biological process =translation
  Homolog annotation: Hit_ID=Q3HVK7; Match level="QueryCoverage=91%, HitCoverage=91%, E-value=3e-58, Identity=89%"; Hit description =Glycoprotein-like protein
  Pfam annotation: Domain name=Ribosomal_L14e; Domain location=44-120; Score=140.3; E_value=5.9e-39; Accession=PF01929.9; Description =Ribosomal protein L14
MPFKRFVEIGRVALVNYGKDYGRLVVIVDVVDQNRALVDAPDMVRCQMNFKRLSLTDIKIDIKRVPKKTTLIKAMEEADVKNKWEKSSWGKKLIVQKRRASLNDFDRFKVMLAKIKRGGAIRQELAKLKKEVAAA

SEQ ID NO: 111620 - protein, 172 aa, Setaria italica
  Transcript Sequence Number=SeqID_45646
  Gene Ontology: Mol. function=protein disulfide oxidoreductase activity; Cellular component=chloroplast; Biological process =glycerol ether metabolic process
  Homolog annotation: Hit_ID=Q41864; Match level="QueryCoverage=100%, HitCoverage=99%, E-value=6e-77, Identity=84%"; Hit description =Thioredoxin M-type, chloroplastic
  Pfam annotation: Domain name=Redoxin; Domain location=48-169; Score= -17.0; E_value=0.088; Accession=PF08534.2; Description=Redoxin
  Pfam annotation: Domain name=Thioredoxin; Domain location=66-169; Score=159.6; E_value=9.6e-45; Accession=PF00085.12; Description =Thioredoxin
  Pfam module annotation: Pfam domain module=Redoxin::Thioredoxin; Domain location=48-169::66-169
  Subcellular localization annotation: CTP_CleavageSite=58; ConfidenceScore=5.27e-01
MALETCFRAWALHAAPAGGKDRLLAGGSSTSFAPSKRAAAAAPLSVGRVATPRPRHVCQSKNAVDEVLVADDANWDGMVIACETPVLVEFWAPWCGPCRMIAPVIDELAKDYAGKIKCCKVNTDDNPKVASTYGIRSIPTVLIFKGGDKKESVIGAVPKTTLTTLIDKYIGS

SEQ ID NO: 111621 - protein, 291 aa, Setaria italica
  misc_feature (35)..(35): Xaa can be any naturally occurring amino acid
  misc_feature (205)..(205): Xaa can be any naturally occurring amino acid
  misc_feature (240)..(240): Xaa can be any naturally occurring amino acid
  misc_feature (284)..(284): Xaa can be any naturally occurring amino acid
  Transcript Sequence Number=SeqID_45647
  Gene Ontology: Mol. function=transporter activity; Cellular component= integral to membrane; Biological process=transport
  Homolog annotation: Hit_ID=Q6EU94; Match level="QueryCoverage=100%, HitCoverage=100%, E-value=1e-140, Identity=86%"; Hit description =Aquaporin PIP1-1
  Pfam annotation: Domain name=MIP; Domain location=46-277; Score =426.7; E_value=3.8e-125; Accession=PF00230.12; Description=Major intrinsic protein
MEGKEEDVRLGANKYSERQPIGTAAQGSDDKDYKXPPPAPLFEPGELKSWSFYRAGIAEFVATFLFLYISILTVMGVSKSQSKCATVGIQGIAWSFGGMIFALVYCTAGISGGHINPAVTFGLFLARKLSLTRAVFYMIMQCLGAICGAGVVKGFQQGLYMGNGGGANMVAAGYTKGDGLGAEIVGTFILVYTVFSATDAKRNAXRDSHVPILAPLPIGFAVFLVHLATIPITGTGINPXRGALGAAVIYNRRQAWDDHWIFWVGPFIGAALAAIYHQVVIRAXIPFKSRS

SEQ ID NO: 111622 - protein, 174 aa, Setaria italica
  Transcript Sequence Number=SeqID_45648
  Gene Ontology: Mol. function=nucleoside-triphosphatase activity; Cellular component=cell soma; Biological process=regulation of transcription, DNA-dependent
  Homolog annotation: Hit_ID=O81047; Match level="QueryCoverage=89%, HitCoverage=25%, E-value=2e-52, Identity=63%"; Hit description =Putative helicase
MAGRGGGGGGGKGAAGRMVSLQEFVSSMAPLIDLEKAAEISAESETSAKSLERRGCVIANLKCTDAQTGLMGKTLLEFQPNKGDVLPSHKFGTHDVVALKPNKADAGSASLGQGVVYRLKDSSITVAFDDIPEDGLNSPLRLEKLANEVTYRRMKDALIQLSKAVQTGPCANLV

SEQ ID NO: 111623 - protein, 515 aa, Setaria italica
  Transcript Sequence Number=SeqID_45649
  Gene Ontology: Mol. function=binding; Cellular component=chloroplast
  Homolog annotation: Hit_ID=B9T6B9; Match level="QueryCoverage=97%, HitCoverage=58%, E-value=1e-173, Identity=56%"; Hit description =Pentatricopeptide repeat-containing protein, putative
  Pfam annotation: Domain name=PPR; Domain location=116-150; Score =33.0; E_value=1.2e-06; Accession=PF01535.12; Description=PPR repeat
  Pfam annotation: Domain name=PPR; Domain location=185-219; Score =20.5; E_value=0.0072; Accession=PF01535.12; Description=PPR repeat
  Pfam annotation: Domain name=PPR; Domain location=255-288; Score =20.8; E_value=0.0055; Accession=PF01535.12; Description=PPR repeat
  Pfam annotation: Domain name=PPR; Domain location=289-323; Score =18.5; E_value=0.029; Accession=PF01535.12; Description=PPR repeat
  Pfam annotation: Domain name=PPR; Domain location=30-64; Score=13.7; E_value=0.21; Accession=PF01535.12; Description=PPR repeat
  Pfam annotation: Domain name=PPR; Domain location=334-368; Score =21.2; E_value=0.0042; Accession=PF01535.12; Description=PPR repeat
  Pfam module annotation: Pfam domain module=PPR::PPR::PPR::PPR::PPR::PP R; Domain location=116-150::185-219::255-288::289-323::30-64::334-368
LGRYGNWKRVLQVVQWLESRERFKSYKSRYIYTTVLDVLGKAKRPIEALNVFYTMQNQLSSYPDMAAYHCIAVTLGQAGLVNELFDVIDCMRSPPRKKFKLGPLQNWDPRLEPDLIVYNAVLNACVQQKQWEGAFWVLQQLKEKNIRPTNTTYGLVMEVMLVCGKYNLVYEFFNKLEKSLIPGALNYKVLVNALWREGKIDEAVMAVKDMESRGIVGSASLYYDLARCLCSGGRCKEALLQVEKICKVANKPLVVTYTGLIQTCIDNGSMENAKYIFNEMCSYCSPNTVTCNIMLKLFLEHGMLEDAKDLLQDILNGRIRSKADSSQTATADKFTFNTFMEACAASQRWDDFEYAFREMLSKGYHFDERRHLRMVLDAYRNGKEQLLDDLWRYLCHHNRAPPAPVIMERFCLKLVQGETMAAISCVSRFHQEGKIQNTSAMSWLNLLNRNADSLKHEHVTKLVHELSNFVSSRSSSDNISLYQKIQSSCTAFLSGATVVEKAPSGQQMAVALHHS

SEQ ID NO: 111624 - protein, 165 aa, Setaria italica
  Transcript Sequence Number=SeqID_45650
  Homolog annotation: Hit_ID=B9SWR4; Match level="QueryCoverage=81%, HitCoverage=82%, E-value=1e-29, Identity=50%"; Hit description =Phosphatidylinositol n-acetylglucosaminyltransferase subunit p, putative
  Pfam annotation: Domain name=RNase_H1_sml; Domain location=29-145; Score=160.6; E_value=4.6e-45; Accession=PF08615.3; Description =Ribonuclease H1H2 small subunit
MEHATPPAAAAGGVTATVDLSPAATDLGGAHHLPCGIKQNGGAPVSDYFKPRSTGVEVEGVRVEEAFFRGRKLQGATLALPDGYRGYVLEKKSGGKDKQNSDGEVSNFVARAEFQNITYWNHDTTPSAEDSLPRCFHWLTVANAMHKPVTSEELANMSAMQNQDN

SEQ ID NO: 111625 - protein, 104 aa, Setaria italica
  Transcript Sequence Number=SeqID_45651
EHDRTCSTACRKNIHYLFDAFDDIMQALQALDQKAEDNDCRQEDKFKFKFLQRNVRKLFGMCSNMTKNKAKEQQPFRVQVVRVASLVRLQASFPVLHMVTTRRS

SEQ ID NO: 111626 - protein, 180 aa, Setaria italica
  Transcript Sequence Number=SeqID_45652
  Gene Ontology: Mol. function=binding; Cellular component =mitochondrion; Biological process=defense response
  Homolog annotation: Hit_ID=B6TPY7; Match level="QueryCoverage=96%, HitCoverage=27%, E-value=2e-90, Identity=89%"; Hit description=ATP binding protein
  Pfam annotation: Domain name=PPR; Domain location=13-47; Score=31.1; E_value=4.4e-06; Accession=PF01535.12; Description=PPR repeat
  Pfam annotation: Domain name=PPR; Domain location=48-83; Score=7.4; E_ value=1.2; Accession=PF01535.12; Description=PPR repeat
  Pfam annotation: Domain name=PPR; Domain location=84-118; Score=32.4; E_value=1.8e-06; Accession=PF01535.12; Description=PPR repeat
  Pfam module annotation: Pfam domain module=PPR::PPR::PPR; Domain location=13-47::48-83::84-118
EEMTQKGCPPDAQTYNALIKLLTNRHMPDDAARIYKKMIKKGLEPTIHTYNMMMKSYFLGGRNFAMGCAVWEEMHRKGICPDVNSYTVFINGHIRHGRPEEACKYIEEMINKGMKAPQIDYNKFAADFAKAGKPDILYELAQKVEFAGKVDVSNVFHQWAERMKSRVKRTAPNQTGNRMF

SEQ ID NO: 111627 - protein, 104 aa, Setaria italica
  Transcript Sequence Number=SeqID_45653
TRAEPPPGPPVTPPPPGGRGGWDGEEAGMSVFGGDSWARDAQQRKRRLDDLMLPASASSSPSTPDSFRRLPNGKLACLVCPNHPVLDSPLMLSIHNKGARHIAA

SEQ ID NO: 111628 - protein, 59 aa, Setaria italica
  misc_feature (1)..(10): Xaa can be any naturally occurring amino acid
  Transcript Sequence Number=SeqID_45654
XXXXXXXXXXFFFFFFLKSGNLCRVVLTVDLCSTAFTKCIDVQPLDLKMLTTTEYHVTD

SEQ ID NO: 111629 - protein, 87 aa, Setaria italica
  Transcript Sequence Number=SeqID_45655
MGSWRPRMPGFGEGSQAAEPGGGGRGPGRGFRGRGASYHQQFPQGGRGAGYYQHGQGAASQPRGAMTPQQWRPAGPAAGYLGHGQAY

SEQ ID NO: 111630 - protein, 72 aa, Setaria italica
  Transcript Sequence Number=SeqID_45656
  Gene Ontology: Cellular component=integral to membrane
  Homolog annotation: Hit_ID=Q6Z5L0; Match level="QueryCoverage=100%, HitCoverage=12%, E-value=3e-13, Identity=54%"; Hit description =Glucose-6-phosphate/phosphate-tranlocator-like
GYLVFNSDPGFTSLCGAVIALAGMSVYTYLGMKESATNGRRNSLNSRQNSHLLKSKVIIDGEKQETRTVDSV

SEQ ID NO: 111631 - protein, 146 aa, Setaria italica
  Transcript Sequence Number=SeqID_45657
  Gene Ontology: Cellular component=microtubule; Biological process =microtubule cytoskeleton organization and biogenesis
  Homolog annotation: Hit_ID=B4FTU1; Match level="QueryCoverage=94%, HitCoverage=25%, E-value=2e-68, Identity=89%"; Hit description=ABI3 -interacting protein 2
IVNDHSCFQNEMNERELSALKAVIKCIEEHKLEEQYPVDPLQKRVLQLEKAKADKRRAVEAAKPQSKRPRANGSAFAPRATGFADKSFYSLSPERLPSYPYERQFVYGAEAHHPPMMSSAPYTIQPAHTPYYGNGYPVQYQVPYIH

SEQ ID NO: 111632 - protein, 534 aa, Setaria italica
  Transcript Sequence Number=SeqID_45658
  Gene Ontology: Cellular component=microtubule; Biological process =microtubule cytoskeleton organization and biogenesis
  Homolog annotation: Hit_ID=B4FTU1; Match level="QueryCoverage=100%, HitCoverage=100%, E-value=0.0, Identity=87%"; Hit description=ABI3 -interacting protein 2
  Pfam annotation: Domain name=Frigida; Domain location=145-451; Score =448.2; E_value=1.2e-131; Accession=PF07899.3; Description=Frigida -like protein
MSDLESVAALMESTSSKIQQLQQAFAELERQSAVSMNLKWKQLEDHFRGLEQSLKKKFDELKEQEKEFQETVAKSEQMLEQREAAVVAKELTSLERLQEKRDAALAMIFSKSKLSLPVPAINPMDKALDNLGVKWPKLASEESVRLQVDCAAVKPRSELVSLCEEMNVKGLHKFISDNRKNLAIIREEIPSALQKASHPYGLVLDSLEDFYAGDNLVLDGKKDGDLLGVRRTCLMLMESLGQLQTDDITRFSLEGHMLTTDIKERAKKIAFEWKSKLDSLDIDASNGNCLEAHAFLQLLATFGISAEYNDDDLCKLLPYVSRRRQTPELCRLLGLSQKMPGVIGVLVESGKPIDAINLAYAFELTEQFEPVQLLKAYLRDVKKVPHAKNAKISPGAQNEMNERELSALKAVIKCIEEHKLEEQYPVDPLQKRVLQLEKAKADKRRAVEAAKPQSKRPRANGSAFAPRATGFADKSFYPATPERLPSYPYERQFVYGAEAHHPPMMSSAPYTIQPAHTPYYGNGYPVQYQVPYIH

SEQ ID NO: 111633 - protein, 115 aa, Setaria italica
  Transcript Sequence Number=SeqID_45659
ELREVDQRRPLLLCTATADCSVLTDLPRSYCTNAAQLDAKPQVPAPLPRRECFVARSSRCPLRLTSNTSSTAGKMRASRTPRKQATTQLLPRAMVCSLLWQSWGTALKTGMECCS

SEQ ID NO: 111634 - protein, 124 aa, Setaria italica
  Transcript Sequence Number=SeqID_45660
  Gene Ontology: Mol. function=metal ion binding
  Homolog annotation: Hit_ID=B6SYC4; Match level="QueryCoverage=58%, HitCoverage=15%, E-value=2e-24, Identity=75%"; Hit description =Senescence-associated-like protein
  Pfam annotation: Domain name=DUF500; Domain location=9-115; Score =79.8; E_value=1e-20; Accession=PF04366.4; Description=Family of unknown function (DUF500)
SNFYSCLDLGWGVQIGGELTDFIIVLRDRKAVKAFSSRIHLSLGAGLSAAAGPIGRAFEADVRASEKGSGICYSYSCSKGNNLNIGFIFCHHFRSNSELCCQVGYVLLVKRREKKGLTSVFFVR

SEQ ID NO: 111635 - protein, 46 aa, Setaria italica
  Transcript Sequence Number=SeqID_45661
IAKHEVQGGGKLQHIPEILSSHLEAHTVICLLYTLAILCEVRKQSF

SEQ ID NO: 111636 - protein, 189 aa, Setaria italica
  misc_feature (121)..(121): Xaa can be any naturally occurring amino acid
  Transcript Sequence Number=SeqID_45662
  Gene Ontology: Mol. function=DNA-directed RNA polymerase activity; Cellular component=nucleus; Biological process=transcription
  Homolog annotation: Hit_ID=Q07DU9; Match level="QueryCoverage=100%, HitCoverage=16%, E-value=4e-96, Identity=88%"; Hit description=DNA -directed RNA polymerase (Fragment)
  Pfam annotation: Domain name=RNA_pol_Rpb2_1; Domain location=4-189; Score=-10.8; E_value=2.9e-06; Accession=PF04563.7; Description=RNA polymerase beta subunit
PSKKGSGGWKHAIIKFGRVKLEKPVFWSGKDEVDIDFKPRHARLQNMTYASRIKVEVTIKVYSLEKSDKSKTGNDDFVQKRDFMNETHWIYIGRLPVMVKSNLCLLHNLKESDCLFDAGGXFLVKGMEKVFIAQEQRCLSRLWISDRPCWTVSFMSEIKRRRIYIKLVESTKSDDFSGSKIISISFLYA

SEQ ID NO: 111637 - protein, 69 aa, Setaria italica
  Transcript Sequence Number=SeqID_45663
  Subcellular localization annotation: CTP_CleavageSite=35; ConfidenceScore=5.12e-01
DKQVRWYLLKDSSYKQAPSPKASNISISPFTKNIMGFYKTSLQGREMKRIMSETMPILPKHAITQLPKA

SEQ ID NO: 111638 - protein, 50 aa, Setaria italica
  Transcript Sequence Number=SeqID_45664
SSTNRYKSTIEIQSSILTIILQILKSQVNYYRSLKVAKRFYPVTMSRIFC

SEQ ID NO: 111639 - protein, 116 aa, Setaria italica
  misc_feature (10)..(10): Xaa can be any naturally occurring amino acid
  Transcript Sequence Number=SeqID_45665
  Gene Ontology: Mol. function=phosphorus-oxygen lyase activity; Cellular component=integrator complex; Biological process=snRNA processing
  Homolog annotation: Hit_ID=Q68E01; Match level="QueryCoverage=93%, HitCoverage=11%, E-value=8e-19, Identity=42%"; Hit description =Integrator complex subunit 3
  Pfam annotation: Domain name=DUF2356; Domain location=32-116; Score= -83.1; E_value=0.00018; Accession=PF10189.1; Description=Conserved protein (DUF2356)
ECKSAKTLKXCRGRLVSFCVSMLRDHFQVCALIGRDLVRSLHELALVPEFQPLWRDHILHRIGDVCRISTPGWCMAMAITPEMETQLLFMMNNVKWGDQKRYQLWFAMKHLMVPGG

SEQ ID NO: 111640 - protein, 70 aa, Setaria italica
  Transcript Sequence Number=SeqID_45666
THNTYNEGVIEGCKDVSNTKDKLSFTDSGAKGDILLLGLPGLPLRHGCVERRVTGAERAWCGRSRARRRC

SEQ ID NO: 111641 - protein, 113 aa, Setaria italica
  Transcript Sequence Number=SeqID_45667
  Gene Ontology: Mol. function=structural constituent of ribosome; Cellular component=ribonucleoprotein complex; Biological process =translation
  Homolog annotation: Hit_ID=Q9SIH0; Match level="QueryCoverage=97%, HitCoverage=73%, E-value=6e-45, Identity=80%"; Hit description=40S ribosomal protein S14-1
  Pfam annotation: Domain name=Ribosomal_S11; Domain location=25-113; Score=123.6; E_value=6.3e-34; Accession=PF00411.11; Description =Ribosomal protein S11
RKTREPKEENVTLGPTVREGEFVFGVAHIFASFNDTFIHVTDLSGRETLVRITGGMKVKADRDESSPYAAMLAAQDVAQRCKELGITALHIKLRATGGNKTKTPGPGAQSEHQ

SEQ ID NO: 111642 - protein, 133 aa, Setaria italica
  Transcript Sequence Number=SeqID_45668
  Gene Ontology: Mol. function=structural constituent of ribosome; Cellular component=ribonucleoprotein complex; Biological process =translation
  Homolog annotation: Hit_ID=Q9SIH0; Match level="QueryCoverage=86%, HitCoverage=76%, E-value=9e-48, Identity=81%"; Hit description=40S ribosomal protein S14-1
  Pfam annotation: Domain name=Ribosomal_S11; Domain location=28-128; Score=135.1; E_value=2.2e-37; Accession=PF00411.11; Description =Ribosomal protein S11
MSKRKTREPKEENVTLGPTVREGEFVFGVAHIFASFNDTFIHVTDLSGRETLVRITGGMKVKADRDESSPYAAMLAAQDVAQRCKELGITALHIKLRATGGNKTKTPGPGAQSALTSLVFFVLSFSFGFLFVK

SEQ ID NO: 111643 - protein, 102 aa, Setaria italica
  Transcript Sequence Number=SeqID_45669
  Gene Ontology: Mol. function=structural constituent of ribosome; Cellular component=ribonucleoprotein complex; Biological process =translation
  Homolog annotation: Hit_ID=Q9SIH0; Match level="QueryCoverage=84%, HitCoverage=57%, E-value=3e-33, Identity=82%"; Hit description=40S ribosomal protein S14-1
  Pfam annotation: Domain name=Ribosomal_S11; Domain location=3-98; Score=148.1; E_value=2.7e-41; Accession=PF00411.11; Description =Ribosomal protein S11
ENSGSRITGGMKVKADRDESSPYAAMLAAQDVAQRCKELGITALHIKLRATGGNKTKTPGPGAQSALRALARSGMKIGRIEDVTPVPTDSTRRKGGRRGRRL

SEQ ID NO: 111644 - protein, 154 aa, Setaria italica
  Transcript Sequence Number=SeqID_45670
  Gene Ontology: Mol. function=structural constituent of ribosome; Cellular component=ribonucleoprotein complex; Biological process =translation
  Homolog annotation: Hit_ID=Q9SIH0; Match level="QueryCoverage=92%, HitCoverage=92%, E-value=6e-60, Identity=81%"; Hit description=40S ribosomal protein S14-1
  Pfam annotation: Domain name=Ribosomal_S11; Domain location=28-150; Score=239.4; E_value=9.1e-69; Accession=PF00411.11; Description =Ribosomal protein S11
MSKRKTREPKEENVTLGPTVREGEFVFGVAHIFASFNDTFIHVTDLSGRETLVRITGGMKVKADRDESSPYAAMLAAQDVAQHVAQRCKELGITALHIKLRATGGNKTKTPGPGAQSALRALARSGMKIGRIEDVTPVPTDSTRRKGGRRGRRL

SEQ ID NO: 111645 - protein, 80 aa, Setaria italica
  misc_feature (28)..(28): Xaa can be any naturally occurring amino acid
  Transcript Sequence Number=SeqID_45671
  Gene Ontology: Mol. function=phenylalanine-tRNA ligase activity; Cellular component=cytoplasm
  Homolog annotation: Hit_ID=B4FI54; Match level="QueryCoverage=46%, HitCoverage=8%, E-value=2e-12, Identity=94%"; Hit description=ATP binding protein
  Subcellular localization annotation: CTP_CleavageSite=36; ConfidenceScore=5.17e-01
SRPLFSSTRPNRLLLARFFPAAPAPAPXERRGLRTSAAAAASAVEVGGVKIARDDVVKEDDPTNNVPDTIFSKIGLQLHR

SEQ ID NO: 111646 - protein, 138 aa, Setaria italica
  misc_feature (61)..(61): Xaa can be any naturally occurring amino acid
  Transcript Sequence Number=SeqID_45672
  Gene Ontology: Mol. function=hydrolase activity; Biological process =metabolic process
  Homolog annotation: Hit_ID=B6UI33; Match level="QueryCoverage=87%, HitCoverage=37%, E-value=5e-27, Identity=61%"; Hit description =Gibberellin receptor GID1L2
  Pfam annotation: Domain name=Abhydrolase_3; Domain location=40-138; Score=-49.2; E_value=0.00023; Accession=PF07859.5; Description =alphabeta hydrolase fold
LRRAPAAVRWKDVVYDETYDVLSLRVYVPSAAGAKKLPVLVYFHGGGFCIGSFAMLDFQTXCLRLAAELPAVVLSADYRLPAALDEAESLFSWLRAQAAASSAGAGADPWLADSVDFGRVFVSGDSAGANIAHHVAVR

SEQ ID NO: 111647 - protein, 88 aa, Setaria italica
  misc_feature (22)..(22): Xaa can be any naturally occurring amino acid
  misc_feature (30)..(30): Xaa can be any naturally occurring amino acid
  misc_feature (41)..(41): Xaa can be any naturally occurring amino acid
  Transcript Sequence Number=SeqID_45673
  Gene Ontology: Mol. function=nucleotide binding; Cellular component =myosin complex
  Homolog annotation: Hit_ID=Q8LSS8; Match level="QueryCoverage=90%, HitCoverage=5%, E-value=4e-34, Identity=90%"; Hit description =Putative myosin heavy chain
VFECFKYNSFEQLCINFANEKXLQQHFNKXVFKMEQEEYKXTEEINWSYIEFVDNQDILDLLEKKPIGIVSLLDEACLVKQHAWKVNT

SEQ ID NO: 111648 - protein, 99 aa, Setaria italica
  misc_feature (12)..(12): Xaa can be any naturally occurring amino acid
  Transcript Sequence Number=SeqID_45674
GPARWGRTPPAXTLELQHAAAGRQPCDHLPLKRLLSRSGLRIAIGICLRRASAAALRRRVWARAPALAPAAACHGRSRVSQHALVASLVSTDEACWDSG

SEQ ID NO: 111649 - protein, 149 aa, Setaria italica
  Transcript Sequence Number=SeqID_45675
  Gene Ontology: Mol. function=protein serine/threonine kinase activity; Cellular component=cell surface; Biological process =protein amino acid phosphorylation
  Homolog annotation: Hit_ID=B6SVG2; Match level="QueryCoverage=98%, HitCoverage=21%, E-value=3e-51, Identity=70%"; Hit description =Lectin-like receptor kinase 7
  Pfam annotation: Domain name=Lectin_legB; Domain location=1-149; Score=90.6; E_value=5.4e-24; Accession=PF00139.11; Description =Legume lectin domain
  Subcellular localization annotation: CTP_CleavageSite=44; ConfidenceScore=5.12e-01
SFARQNVTTSGAAVVTASGLLQLTNETNEVFGHGFYSAPLRFKDASTGAPLSFSTTFVFAIVPRYPDAHGHGIAFALAPSPAVAGAVAGKNLGLFNTSDNTGQGRSGIVAVELDTARDDEFRDIDKNHVGIDVNSLESVNSTPAAYVDV

SEQ ID NO: 111650 - protein, 114 aa, Setaria italica
  misc_feature (39)..(39): Xaa can be any naturally occurring amino acid
  misc_feature (49)..(49): Xaa can be any naturally occurring amino acid
  misc_feature (64)..(64): Xaa can be any naturally occurring amino acid
  Transcript Sequence Number=SeqID_45676
  Subcellular localization annotation: CTP_CleavageSite=10; ConfidenceScore=5.06e-01
KKIPKLLLASASARRAVVPSPFCLFHTLNLAGTIRSAAXALDLLSWRSXFIFDACVEACIRFVXGSALIRGRGGPILKFAPLLSADKAANLLARLSPPVVASGPSPGVARKKTR

SEQ ID NO: 111651 - protein, 92 aa, Setaria italica
  Transcript Sequence Number=SeqID_45677
  Subcellular localization annotation: CTP_CleavageSite=48; ConfidenceScore=5.33e-01
LLDRNKTSHHNIHVACNMTFSSSFFIAMVICHMSSRCVVSSITPTKTCLGAKSAETCECLLQRIEFPLLKIKHMSLVPNILLTQKKNPSKPP

SEQ ID NO: 111652 - protein, 65 aa, Setaria italica
  Transcript Sequence Number=SeqID_45678
RIIAKESACSASHFNECHYEMHLLRYIILESNLVSINRNQYRKLKRISITVMKRQTNSYKTCKYL

SEQ ID NO: 111653 - protein, 347 aa, Setaria italica
  misc_feature (161)..(161): Xaa can be any naturally occurring amino acid
  Transcript Sequence Number=SeqID_45679
  Homolog annotation: Hit_ID=Q7XKG7; Match level="QueryCoverage=57%, HitCoverage=47%, E-value=3e-22, Identity=34%"; Hit description =OSIGBa0153E02-OSIGBa0093I20.2 protein
  Pfam annotation: Domain name=DUF2296; Domain location=228-278; Score =107.7; E_value=3.8e-29; Accession=PF10058.1; Description=Predicted integral membrane metal-bind
EEEAVRARLRRRARASRQSAHNVLGLAAALEIVAVGYAIMTTRSPDLSYHDYQIARPYLPMFLIPALAALIYSSITSLTKMLDNRDQHTLEKLRTERQAKIDELKERTNYYTTQQLIQRYDLDPAAKAAAATVLASKLGADSGLRVFLGDESSRDAALGKXNDNNLGQPTGLRQRKSAHLSNGTGQTNSSEPFDGSNVYDGNEEGSPGTPNQRTVEHFRGPAGNDGGWLARVAALLVGEDPTQCYALICGNCHMHNGLARKEDFAFVTYYCPHCNALNGSRQHEDHELVPSSGKESPSSESDIIIAQAGASLASSGVASPVAGSLPTVEELSVEDSGEKASNDQPAS

SEQ ID NO: 111654 - protein, 476 aa, Setaria italica
  Transcript Sequence Number=SeqID_45680
  Gene Ontology: Mol. function=phosphoenolpyruvate carboxylase activity; Cellular component=cytoplasm; Biological process=carbon utilization by fixation of carbon dioxide
  Homolog annotation: Hit_ID=A7DX17; Match level="QueryCoverage=100%, HitCoverage=75%, E-value=0.0, Identity=92%"; Hit description =Phosphoenolpyruvate carboxylase (Fragment)
  Pfam annotation: Domain name=PEPcase; Domain location=1-476; Score =473.4; E_value=3.2e-139; Accession=PF00311.9; Description =Phosphoenolpyruvate carboxylase
PEEQRQEWLVSELRGKRPLFGPDLPQSDEVADVLGTFRVIAELPADSFGAYIISMATAPSDVLAVELLQRECGIKRPLRVVPLFEKLADLQQGPATMELLFSNDWYKQRIRGKQEVMIGYSDSGKDAGRLSAAWQLYKAQEEIVGVAERHGVKLTIFHGRGGTVGRGGGPSHLAILSQPPNTVNGSLRVTVQGEVIEKSFGEENLCFRTLQRFTAATLEHGMNPPVSPKLEWRRLLDDMAAVSTEEYRSIVFREPRFVEYFRAATPESEYGRMNIGSRPSKRKPGGGIESLRAIPWIFAWTQTRFHLPVWLGFGAAFRHAAGSPGGLATLREMYDEWPFFRVTIDLLEMVFAKGDPGIAELYDKLLVPGDLRPFGEQLRANYAETQNLLLQVAGHRDLLESDPYLQQQLMLRDSYITALNACQAYTLKRIRDGGFKPAARGAPLSKELLGSTAEELVKLNPSSEYDPGLEDTLILT

SEQ ID NO: 111655 - protein, 62 aa, Setaria italica
  Transcript Sequence Number=SeqID_45681
RITSITKTDIIYDFIGKEFLLVQKTVSKYVQYSYHLSLHFKSTRIGNLRNGVFRLSTCSSKY

SEQ ID NO: 111656 - protein, 281 aa, Setaria italica
  Transcript Sequence Number=SeqID_45682
  Gene Ontology: Mol. function=transferase activity, transferring glycosyl groups; Biological process=metabolic process
  Homolog annotation: Hit_ID=B6TRF2; Match level="QueryCoverage=96%, HitCoverage=58%, E-value=7e-93, Identity=63%"; Hit description =Transferase, transferring glycosyl groups
VLAASGLSIARRTSLTLERCTIAAIRSCPEWELDAFPLAAALLGKPLVPLGLLPPSPDGGRATDAHRDDAAVRWLDVQPDKSVVYVALGSEVPLRVELVHELAHGLELAGTRFLWALRKPRGVSDADVLPAGFLERTHGHGLVTMGWVPQIAILAHGAVGAFLTHCGRNSLIEGLLYGHPLIMLPIFADQGPNARLMERRKVGLQVERNDDDGSFDRHGIASAVRAVMVEEDTKKVFVANAMKMQEIVADKELHERYVDEFVQELRSYITDGNSSTPADEM

SEQ ID NO: 111657 - protein, 573 aa, Setaria italica
  Transcript Sequence Number=SeqID_45683
  Gene Ontology: Mol. function=microtubule motor activity; Cellular component=microtubule associated complex; Biological process =microtubule-based movement
  Homolog annotation: Hit_ID=Q7XCW8; Match level="QueryCoverage=94%, HitCoverage=50%, E-value=0.0, Identity=87%"; Hit description=Kinesin heavy chain, putative, expressed
  Pfam annotation: Domain name=Kinesin; Domain location=48-360; Score =509.2; E_value=5.3e-150; Accession=PF00225.15; Description=Kinesin motor domain
TTPGRRRSSVAPAPEPAPALAPVPFPSADELVIEDTSRSGDSISVTIRFRPLSEREFQRGDEISWYPDGDRLVRCEYNPATAYAYDRVFGPSTTTEAVYDVAARPVVKGAMEGINGTVFAYGVTSSGKTHTMHGDQNCPGIIPLAIKDVFSMIQDSPGREFLLRVSYLEIYNEVINDLLDPTGQNLRVREDAQGTYVEGIKEEVVLSPGHALSFIAAGEEHRHVGSNNFNLFSSRSHTIFTLMIESSARGDEYDGVMYSQLNLIDLAGSESSKTETTGLRRREGAYINKSLLTLGTVIGKLSEGRATHIPYRDSKLTRLLQSSLSGHGHVSLICTITPASSNMEETHNTLKFASRAKRVEIYASRNRIIDEKSLIKKYQREISSLKQELDQLRRGMIGGASQEEIMSLRQQLEEGQVKMQYRLEEEEEAKAALMSRIQRLTKLILVSTKNNIPALTDSHQRHNSSSEQDKLSTSQDSSMPVQNEGTTKDPLTSALPDSLDEINQLRSASGEHSSITGSAPDSVQAGFTASDQMDLLIEQIKMLAGEVAFGTSSLKRSIEQSIDDPEGTKDQVV

SEQ ID NO: 111658 - protein, 466 aa, Setaria italica
  Transcript Sequence Number=SeqID_45684
  Gene Ontology: Mol. function=microtubule motor activity; Cellular component=microtubule associated complex; Biological process =microtubule-based movement
  Homolog annotation: Hit_ID=Q9FW70; Match level="QueryCoverage=99%, HitCoverage=53%, E-value=0.0, Identity=75%"; Hit description=Kinesin- like protein
  Pfam annotation: Domain name=zf-C3HC4; Domain location=420-454; Score= 9.3; E_value=0.0087; Accession=PF00097.17; Description=Zinc finger, C3HC4 type (RING finger)
FSAGRFTASDQMDLLIEQIKMLAGEVAFGTSSLKRSIEQSIDDPEGTKDQIENLEREIQQKRRHMRALEQQIMESGEASVANASMVDMQQTISKLTAQCSEKAFELELKSADNRVLQEQLHQKNVEINELQEKVLRLEQQLSIKADIPPEQETNYTQQETIDLKSKLQSKEAEIEKLKYEHLKITEEHHDLISQNHKLSEEAAYAKELASSAAVELKNLAEEVTKLSVLNAKQAKELLVAQEMAHSRVHARKGRTTSRGRDEVGTWSLDLEDMKMELQARRQREAALEAALAEKELLEEEYKKKFDEAKKKELSLENDLAGMWVLVAKLKRGALGISDLNVDDRSVNLADITNGTKENKVDKNFALVEKQISDDTVKLTTEEHRSPEFEPLLVRLKAKIQEMKEKDLDPLSDKDGNSHVCKVCFESATAAVLLPCRHFCLCKPCSLACSECPLCRTRIADRIITFT

SEQ ID NO: 111659 - protein, 149 aa, Setaria italica
  misc_feature (16)..(16): Xaa can be any naturally occurring amino acid
  Transcript Sequence Number=SeqID_45685
  Gene Ontology: Mol. function=protein serine/threonine kinase activity; Biological process=protein amino acid phosphorylation
  Homolog annotation: Hit_ID=Q53QC2; Match level="QueryCoverage=98%, HitCoverage=13%, E-value=6e-61, Identity=75%"; Hit description =Leucine Rich Repeat family protein, expressed
  Pfam annotation: Domain name=Pkinase; Domain location=1-148; Score= -80.7; E_value=0.0011; Accession=PF00069.17; Description=Protein kinase domain
  Pfam annotation: Domain name=Pkinase_Tyr; Domain location=1-146; Score=-139.0; E_value=0.00017; Accession=PF07714.9; Description =Protein tyrosine kinase
  Pfam module annotation: Pfam domain module=Pkinase::Pkinase_Tyr; Domain location=1-148::1-146
DTLLHSEGRRHLGFRXRLDIMLDVSMAMEYLHHEHHEVVLHCDLKPTNVLFDDDMTAHVADFGIAKFLLGDDNSMITATMPGTLGYIAPEYGSLGKASRKSDVFSYGIMLLEVFTGKRPTDPMFDGELSIRQWVHQAFPSELASVLDDQ

SEQ ID NO: 111660 - protein, 372 aa, Setaria italica
  Transcript Sequence Number=SeqID_45686
  Gene Ontology: Mol. function=structural molecule activity; Cellular component=cytoskeleton; Biological process=regulation of transcription, DNA-dependent
  Homolog annotation: Hit_ID=Q6ZJW9; Match level="QueryCoverage=95%, HitCoverage=80%, E-value=0.0, Identity=90%"; Hit description=Actin -related protein 4
  Pfam annotation: Domain name=Actin; Domain location=4-372; Score =493.1; E_value=3.7e-145; Accession=PF00022.11; Description=Actin
  Pfam annotation: Domain name=MreB_Mbl; Domain location=65-311; Score=- 277.6; E_value=0.058; Accession=PF06723.5; Description=MreBMbl protein
  Pfam module annotation: Pfam domain module=Actin::MreB_Mbl; Domain location=4-372::65-311
MYGGDEVSAIVIDVGSYSCKAGYAGDDTPKAVFPSVVGSIEQTGDTDDSKPEKEADSASDSKNGAKPMDVDKAKTKRKLYVGQELEFRRDHMEVISPMKDGTVTDWDIVDNIWNHAFRRRLLINPEEHPMLIAEPSTNNAQQREKAAELMFENYKVPALFLAKNAVLTSFASGRATSLVVDSGGGSTVVSAVHDGFVLQKSVSTSPVGGEFLTDCMMKALESKGVVIRPRYSFKKKEVGPGEYKIVDLDLPNTTESYRLYCMRAIASDIKESVCRVPDTAFDEVAYANVPTTSYELPDGQTIEVGADRFKVPDILFNPSLSQTIPGVDGFADLMSVRGLPRMVIDSVNRCDVDIRKELFSNILLSGGSSSIL

SEQ ID NO: 111661 - protein, 213 aa, Setaria italica
  Transcript Sequence Number=SeqID_45687
  Gene Ontology: Mol. function=structural molecule activity; Cellular component=cytoskeleton; Biological process=regulation of transcription, DNA-dependent
  Homolog annotation: Hit_ID=Q6ZJW9; Match level="QueryCoverage=100%, HitCoverage=48%, E-value=2e-97, Identity=81%"; Hit description=Actin- related protein 4
  Pfam annotation: Domain name=Actin; Domain location=4-213; Score =102.3; E_value=1.7e-27; Accession=PF00022.11; Description=Actin
FLFKKKEVGPGEYKIVDLDLPNTTESYRLYCMRAIASDIKESVCRVPDTAFDEVAYANVPTTSYELPDGQTIEVGADRFKVPDILFNPSLSQTIPGVDGFADLMSVRGLPRMVIDSVNRCDVDIRKELFSNILLSGGSSSILQLKERLEKEVLEESPQAARVKVMASGNSVERRFSVWIGGSILASLGSFQQMWFSKAEYEEHGVSYIQRKCP

SEQ ID NO: 111662 - protein, 52 aa, Setaria italica
  misc_feature (49)..(49): Xaa can be any naturally occurring amino acid
  Transcript Sequence Number=SeqID_45688
  Gene Ontology: Mol. function=hydrolase activity; Cellular component =cytosol
  Homolog annotation: Hit_ID=Q8L831; Match level="QueryCoverage=90%, HitCoverage=6%, E-value=2e-14, Identity=76%"; Hit description=Nudix hydrolase 3
MAAAPEERLDVLNAAGEKTGVSKPRSEVHRDGDYHRAVHVWIYSESTGXLLL

SEQ ID NO: 111663 - protein, 113 aa, Setaria italica
  Transcript Sequence Number=SeqID_45689
RVALATCPPKLCQAPNLAPTSDHRVIASAITCMLAVALLQCQSESLPGHVQRCFKPSFLENLGLHCAARHSKLLYEKCCSYRFTVTASEEYFSVDFGKTIALCCIIYTSIKQN

SEQ ID NO: 111664 - protein, 66 aa, Setaria italica
  Transcript Sequence Number=SeqID_45690
ANPPPGYPPAGYPPPAQGYPQQGYPQQGYPPPYAQQPPRQQQSSGPSFMEGCLAALCCCCLLDACF

SEQ ID NO: 111665 - protein, 72 aa, Setaria italica
  Transcript Sequence Number=SeqID_45691
GKDGYPPPGYPPAGYPPPAQGYPQQGYPQQGYPPPYAQQPPRQQQSSGPSFMEGWYGCLAALCCCCLLDACF

SEQ ID NO: 111666 - protein, 52 aa, Setaria italica
  Transcript Sequence Number=SeqID_45692
LRRFSAARRRPLHCMYTVNIHHALLLLFSLNFGCCLLASYIMCCDSDHHAWS

SEQ ID NO: 111667 - protein, 86 aa, Setaria italica
  misc_feature (17)..(17): Xaa can be any naturally occurring amino acid
  misc_feature (32)..(32): Xaa can be any naturally occurring amino acid
  misc_feature (49)..(49): Xaa can be any naturally occurring amino acid
  Transcript Sequence Number=SeqID_45693
  Gene Ontology: Mol. function=RNA-directed DNA polymerase activity
  Homolog annotation: Hit_ID=Q2QRJ0; Match level="QueryCoverage=97%, HitCoverage=9%, E-value=4e-10, Identity=38%"; Hit description =Retrotransposon protein, putative, unclassified
IDPTLEKLDRVLMSSEXESEFRLTNLRKSQDXMFDNNPLMLCTEIEKIXNTKKFSFETPWINHADFMPKIQQIWEKEVIAKNAVET

SEQ ID NO: 111668 - protein, 78 aa, Setaria italica
  Transcript Sequence Number=SeqID_45694
  Subcellular localization annotation: CTP_CleavageSite=49; ConfidenceScore=5.49e-01
HQAKFRTLCSQTNLLLSFHSSATNLPLKVKSLYRSTIIFLFNNNILCYRSSMGTTNRKRTLIEPILKLNKTKFNKVKN

SEQ ID NO: 111669 - protein, 160 aa, Setaria italica
  Transcript Sequence Number=SeqID_45695
LPFLGWTAGWSMASEQASGLDQDIASLLSSLECDMTVQAGVLKQYAKMHDAVKALVQEKVKTTHEKQEVERLQEELSNKDKELRCEKENVRGMNQLLSRENHQLSVKNEKLSHENKELTLKLKEKLVHSGHAQGVSGEMKSMCTWKILFVMRVFFHLCLI

SEQ ID NO: 111670 - protein, 222 aa, Setaria italica
  Transcript Sequence Number=SeqID_45696
  Homolog annotation: Hit_ID=Q9LMH6; Match level="QueryCoverage=65%, HitCoverage=19%, E-value=3e-26, Identity=43%"; Hit description =F16A14.2
  Pfam annotation: Domain name=XH; Domain location=80-214; Score=161.5; E_value=2.4e-45; Accession=PF03469.6; Description=XH domain
NEIHVHLEDTICYEGFFSPLLNWKAQGRIEGNNEPKEELFDQVLSNRIIAEDCERRRELSEIRKKLVEVFGNIDHHRQHIRIKMMGQINDQAFLDAAHSKHPNCIIARDEAVKNCSVWQKKIEDPFWHPYKMITEDGPSEEVLNDEDETLKKLKACGKEIYEAVTEALKEMDDYNRSGRSVVPELWNYKEGRKATVLECVEYLGKKVKEQSRKKRKNNPSSV

SEQ ID NO: 111671 - protein, 49 aa, Setaria italica
  Transcript Sequence Number=SeqID_45697
ILVEGQRCNNRSNWYVQDGSMTTGTGKLKFIQRWKVYGQMECVFLTKRD

SEQ ID NO: 111672 - protein, 69 aa, Setaria italica
  Transcript Sequence Number=SeqID_45698
KSNIYFFGLFMNCFFFLSIFQCQSSELLKAKVNSQYICFVHNYILAHTLRIILVNPPAPTNTFMSHTQM

SEQ ID NO: 111673 - protein, 83 aa, Setaria italica
  Transcript Sequence Number=SeqID_45699
TPSHADGHDACGCDAYSSCTPACRRKIAGLASFEAHTHLDCTTFFLPFSSCCVNYSKIKEIYARVRRDRQKVSTSTVLKWYMQ

SEQ ID NO: 111674 - protein, 212 aa, Setaria italica
  misc_feature (114)..(114): Xaa can be any naturally occurring amino acid
  Transcript Sequence Number=SeqID_45700
  Gene Ontology: Cellular component=nucleus; Biological process =regulation of transcription, DNA-dependent
  Homolog annotation: Hit_ID=Q1EPA1; Match level="QueryCoverage=44%, HitCoverage=6%, E-value=5e-31, Identity=72%"; Hit description=Paired amphipathic helix repeat-containing protein / transcription regulator- related
  Pfam annotation: Domain name=PAH; Domain location=138-184; Score =64.3; E_value=4.6e-16; Accession=PF02671.13; Description=Paired amphipathic helix repeat
TKSKWREQIIYLLWFFERGEEKRPRGGRNRGKAGEKQGVLDRTSREAGIGSISPPRRQVPPPPRRWIGFDDGRVPCPRDPIQSSRVLEGSDPIPSPILPPPSIPHAAAAGGGPXQGNLTTTDALTYLKSVKEKFQDKRQKYDEFLEVMRDFKSNKIDTAGVIVRVKTLFHGYPDLILGFNAFLPKGYEIKHEDLEKKPVDFAKAISFVNTIK

SEQ ID NO: 111675 - protein, 105 aa, Setaria italica
  Transcript Sequence Number=SeqID_45701
  Gene Ontology: Mol. function=electron carrier activity; Cellular component=extracellular region; Biological process=response to oxidative stress
  Homolog annotation: Hit_ID=Q94DM0; Match level="QueryCoverage=98%, HitCoverage=28%, E-value=2e-29, Identity=61%"; Hit description=Class III peroxidase 23
  Pfam annotation: Domain name=peroxidase; Domain location=1-105; Score= -60.0; E_value=2.8e-05; Accession=PF00141.15; Description=Peroxidase
HDEVNKGLPSPDANVGAMLEVLRKGNLGLDATDLVALSGAHTIGLSHCTSFENRLFPRQDSTMDAAFAAQLKQTCPAKGVSRTTPLDVRTSDVFDKMYFVNLVKV

SEQ ID NO: 111676 - protein, 190 aa, Setaria italica
  Transcript Sequence Number=SeqID_45702
  Gene Ontology: Mol. function=oxidoreductase activity; Biological process=oxidation reduction
  Homolog annotation: Hit_ID=B6SUN2; Match level="QueryCoverage=100%, HitCoverage=50%, E-value=3e-79, Identity=74%"; Hit description=1 -aminocyclopropane-1-carboxylate oxidase
  Pfam annotation: Domain name=2OG-FeII_Oxy; Domain location=33-138; Score=155.1; E_value=2.1e-43; Accession=PF03171.12; Description=2OG -Fe(II) oxygenase superfamily
KVRATAAARAVMGLLSEGLGLGAAALEEASCLEGKVMACHYYPHCPEPERTMGIVPHTDPGVLTVLAQDEIGGLQVKHQDQDGNACWVDVKPVPGALVINVGDLLQIMSNDKYPSVEHRVTMNTHKEPRVSIAVFFSPGKRGDSNLYGPLPGLVSSENPPKYKNFTMEKFYGTFFSRDLASKALIDHFKM

SEQ ID NO: 111677 - protein, 287 aa, Setaria italica
  Transcript Sequence Number=SeqID_45703
  Gene Ontology: Mol. function=tRNA-intron endonuclease activity; Cellular component=tRNA-intron endonuclease complex; Biological process=tRNA processing
  Homolog annotation: Hit_ID=Q5Z6B1; Match level="QueryCoverage=100%, HitCoverage=98%, E-value=1e-113, Identity=70%"; Hit description =Probable tRNA-splicing endonuclease subunit Sen2
  Pfam annotation: Domain name=tRNA_int_endo; Domain location=125-227; Score=81.8; E_value=2.4e-21; Accession=PF01974.9; Description=tRNA intron endonuclease, catalytic C-terminal domain
  Pfam annotation: Domain name=tRNA_int_endo_N; Domain location=43-115; Score=8.1; E_value=0.0016; Accession=PF02778.6; Description=tRNA intron endonuclease, N-terminal domain
  Pfam module annotation: Pfam domain module=tRNA_int_endo::tRNA_int _endo_N; Domain location=125-227::43-115
LPGPRWKKGKDGKDFAALAAANPMSRIVAELQASLRDSQAVAILSVNGGDAILAVGPHQAALLNRAAFGQAVGNAGEERQWFQLGPEEVFFLCHALRCIAVDTENKKQMGEGDLWDLLNSISEPFPEMYKAYEHLRFKNWVVRSGKQYGADFVAYRHHPALVHSEFAVTVVPEGKAFGTRCGPLQVWSNLLSKLRASGSVAKTLLVLTISTENKCGSSDCLEKMIVHERTITRWIPQKCREQQDKPCREEASREEQDDTREGVVFSYWGVILSFTILSSLLVYKLKF

SEQ ID NO: 111678 - protein, 126 aa, Setaria italica
  Transcript Sequence Number=SeqID_45704
  Gene Ontology: Mol. function=metal ion binding; Biological process =metal ion transport
  Homolog annotation: Hit_ID=B9SSL2; Match level="QueryCoverage=76%, HitCoverage=63%, E-value=3e-40, Identity=78%"; Hit description=Metal ion binding protein, putative
  Pfam annotation: Domain name=HMA; Domain location=33-93; Score=52.5; E_value=1.6e-12; Accession=PF00403.18; Description=Heavy-metal -associated domain
MGGTLEYLSGLLGGSGGHGHGKMKRRKQLQTVELKVRMDCEGCELKVRSALSSMKGVESVEINRKQQKVTVVGFVEASKVLKKAQSTGKKAEIWPYVPYSLVSQPYVAGTYDKRAPPGYVRSAEPG

SEQ ID NO: 111679 - protein, 160 aa, Setaria italica
  misc_feature (57)..(57): Xaa can be any naturally occurring amino acid
  Transcript Sequence Number=SeqID_45705
  Gene Ontology: Mol. function=metal ion binding; Biological process =metal ion transport
  Homolog annotation: Hit_ID=C3SA91; Match level="QueryCoverage=86%, HitCoverage=87%, E-value=3e-45, Identity=68%"; Hit description=Heavy- metal associated domain protein
  Pfam annotation: Domain name=HMA; Domain location=33-94; Score=35.1; E_value=2.7e-07; Accession=PF00403.18; Description=Heavy-metal -associated domain
MGGTLEYLSGLLGGSGGHGHGKMKRRKQLQTVELKVRMDCEGCELKVRSAPSSLKAXHSSVEINRKQQKVTVVGFVEASKVLKKAQSTGKKAEIWPYVPYSLVSQPYVAGTYDKRAPPGYVRSAEPGYVAAGGQQQHVGRPHDHLTDMFNDENPNSCSVM

SEQ ID NO: 111680 - protein, 163 aa, Setaria italica
  Transcript Sequence Number=SeqID_45706
  Gene Ontology: Mol. function=cyclin-dependent protein kinase inhibitor activity; Cellular component=nucleus; Biological process =cell cycle arrest
  Homolog annotation: Hit_ID=Q52PU8; Match level="QueryCoverage=61%, HitCoverage=37%, E-value=2e-09, Identity=41%"; Hit description =Cyclin-dependent kinase inhibitor 2
  Pfam annotation: Domain name=CDI; Domain location=110-160; Score =58.9; E_value=2e-14; Accession=PF02234.11; Description=Cyclin -dependent kinase inhibitor
GTTQSGATGEPVVVVTGMSRCSSTASSVDVVVAAARERSDGAAEVQAREDPDVESSVSDSAGCGRERREATPSSRPPVDLSDEESSQAADDQKHHRRMSLNAVTAAVACRARMPAEEEMEDFFASAEKAEAERFAAKYNFDVARGLPLDSGGRFEWTTVAASG

SEQ ID NO: 111681 - protein, 60 aa, Setaria italica
  Transcript Sequence Number=SeqID_45707
  Subcellular localization annotation: CTP_CleavageSite=18; ConfidenceScore=5.34e-01
ESAFITTSLMVSFSKVTMSNTTGKRCHRQVLPLKKRFPVRLQLSNLYISTQHCIRQALEF

SEQ ID NO: 111682 - protein, 165 aa, Setaria italica
  Transcript Sequence Number=SeqID_45708
  Homolog annotation: Hit_ID=Q5JMT5; Match level="QueryCoverage=81%, HitCoverage=24%, E-value=3e-45, Identity=68%"; Hit description=CBS domain-containing protein-like
  Pfam annotation: Domain name=PB1; Domain location=30-114; Score=66.0; E_value=1.4e-16; Accession=PF00564.16; Description=PB1 domain
ESDARSDESRMVASDSADGKHILPPHVNSSFCFKIEDRKGRMHRFSCVSESLDELVSAVACRIGTDNDKSNIKLLYNDDEGDRVILTTDSDLTAAIEHAKSAGWKVLRLHMDDPEEARTEFTASPAYLSAAHRGRPAPLRFGIVAGAAAVAAGVVVIVYLKRSQL

SEQ ID NO: 111683 - protein, 166 aa, Setaria italica
  misc_feature (148)..(148): Xaa can be any naturally occurring amino acid
  Transcript Sequence Number=SeqID_45709
  Gene Ontology: Mol. function=methyltransferase activity; Cellular component=vacuole; Biological process=methylation
  Homolog annotation: Hit_ID=B9SDN5; Match level="QueryCoverage=98%, HitCoverage=20%, E-value=5e-25, Identity=36%"; Hit description =Transferase, transferring glycosyl groups, putative
  Pfam annotation: Domain name=PPR; Domain location=8-42; Score=28.6; E_ value=2.6e-05; Accession=PF01535.12; Description=PPR repeat
GMSDRTVVTWNVLLDALVRVDDLDAAWKVFVEMPQRNVVSWNTIITGFARQGWAQEAVDLFVEMTVVYGMAADEATMVGFISAVRDIGLLGLGRSAHGYVIRRELSLDGALGVALINMYTRCGSMDAAHSCFSSVSNKNVEHWTSVIXWFAAHGLPEMALSLFNAS

SEQ ID NO: 111684 - protein, 104 aa, Setaria italica
  Transcript Sequence Number=SeqID_45710
  Gene Ontology: Mol. function=amino acid binding; Biological process =metabolic process
  Homolog annotation: Hit_ID=B6TMA2; Match level="QueryCoverage=79%, HitCoverage=19%, E-value=5e-26, Identity=75%"; Hit description=Amino acid binding protein
LGKLLVVLHDVTLVLCELEFTIRRVKVSTTPDGNVLDLFFITDTRELLHTKSRREEAYDKLDSVLGDSLTSREIDLATEDMLSCLQACASLMPAVVEHKENKKF

SEQ ID NO: 111685 - protein, 492 aa, Setaria italica
  misc_feature (25)..(25): Xaa can be any naturally occurring amino acid
  Transcript Sequence Number=SeqID_45711
  Gene Ontology: Mol. function=ATP-dependent helicase activity; Cellular component=nucleus; Biological process=nuclear-transcribed mRNA catabolic process, nonsense-mediated decay
  Homolog annotation: Hit_ID=Q5QMN3; Match level="QueryCoverage=96%, HitCoverage=96%, E-value=0.0, Identity=89%"; Hit description=DEAD -box ATP-dependent RNA helicase 20
  Pfam annotation: Domain name=DEAD; Domain location=113-284; Score =256.1; E_value=8.4e-74; Accession=PF00270.21; Description=DEADDEAH box helicase
  Pfam annotation: Domain name=Helicase_C; Domain location=353-429; Score=129.7; E_value=9e-36; Accession=PF00271.23; Description =Helicase conserved C-terminal domain
  Pfam annotation: Domain name=ResIII; Domain location=109-279; Score= -29.4; E_value=0.015; Accession=PF04851.7; Description=Type III restriction enzyme, res subunit
  Pfam module annotation: Pfam domain module=DEAD::Helicase_C::ResIII; Domain location=113-284::353-429::109-279
MSRFDGRAADPGSYRDRRSEGAFGXGSRAFAAPSKADASAAELDGLPRFEKNFYVESPAVAGMTEDEVEAYRRRREITVEGRDVPKPVREFRDVGFPEYVLQEITKAGFVEPTPIQSQGWPMALRGRDLIGIAETGSGKTLAYLLPAIVHVNAQPILAPGDGPIVLVLAPTRELAVQIQQEATKFGASSKIKSTCIYGGVPKGPQVRDLQKGVEIVIATPGRLIDMIESHHTNLRRVTYLVLDEADRMLDMGFEPQIKKIVSQIRPDRQTLYWSATWPKEVEQLARNFLFDPYKVTIGSEELKANHAIVQHVEILSESQKYNKLVNLLEDIMDGSRILIFMDTKKGCDQITRQLRMDGWPALSIHGDKSQAERDWVLSEFKSGKSPIMTATDVAARGLDVKDVKYVINYDFPGSLEDYVHRIGRTGRAGAKGTAYTFFTAANARFAKELINILEEAGQKVSSELAAMGRGAPPPSSGYRDRYRGYGGGRSWS

SEQ ID NO: 111686 - protein, 608 aa, Setaria italica
  Transcript Sequence Number=SeqID_45712
  Homolog annotation: Hit_ID=Q1SKW8; Match level="QueryCoverage=98%, HitCoverage=98%, E-value=0.0, Identity=68%"; Hit description =Membrane attack complex component/perforin/complement C9
  Pfam annotation: Domain name=MACPF; Domain location=107-319; Score =173.0; E_value=8.5e-49; Accession=PF01823.11; Description =MACPerforin domain
MAAHKAMPQSAAEAAIRSIGLGFDVVSDIRIKYCKRRGSPDPWLIELDHGEVQDIVLPGGVTVAGVTKSIKCDKGERMRFRSDVLSFQQMSEQFNQELSLSGKIPSGLFNTMFEFTGSWQKDAANTKSLAFDGWFVTLYSVALSKGQIELRDHVKQAVPSTWEPAALARFIKNFGTHIVVGVKMGGKDVIYLKQQHSSSLQAADVQKRLKEMSDTRFLDANGQSDMSFKDTYGNNKSDTREQQLRFVQSSPLNSYSSNEDLVMMPKRRGGKDKEFISHSEWLNTVQAEPDVISMSFIPITSLLNGVPGSGFLNHAINLYLRHKPPIEELHQFLEFQLPRQWAPVYGDLALGPQRKRQSSTSLPVNIIGPKLYVCTNMVDAGKRPVTGLRLFLEGRKSNKLAIHLQHLCSLPQIIQLEDDPYNHQTQEYDRKYYEPIGPWKRFSHVCTAPVESDDLSIVTGAQLEVVNRGFNKILFLRLHFSKACNVALVKHSEWDNSPNLAQKSGLISTLISTHFSSVAQKPPPRPADVNINSAVFPGGPPVPVQTPKLLKFVDPTEMMRGPQDSPGYWVVSGAKLNLERGKISLRVKYSLLTAMMPDDEFTLEDDEC

SEQ ID NO: 111687 - protein, 79 aa, Setaria italica
  misc_feature (25)..(25): Xaa can be any naturally occurring amino acid
  Transcript Sequence Number=SeqID_45713
  Gene Ontology: Mol. function=4 iron, 4 sulfur cluster binding; Cellular component=intracellular; Biological process=base-excision repair
  Homolog annotation: Hit_ID=Q2R7H4; Match level="QueryCoverage=62%, HitCoverage=13%, E-value=2e-13, Identity=75%"; Hit description =Endonuclease III-like protein 1, putative, expressed
TQFFIIAIFLTEQVVPRVMSIAWKXTHGISVDTHVHRISFRLGNVFREGMKQENTKPEQTRISGQKSTFGFEQIVYSTT

SEQ ID NO: 111688 - protein, 90 aa, Setaria italica
  Transcript Sequence Number=SeqID_45714
MDHHSAMQGGGGAGAGAAAQEWFYAGGGQHQPEQAVVVDGAFLMELLEDAPLADQAAPEDVDRLSRVIRSLEAEIGGGGPPPSAPADGRS

SEQ ID NO: 111689 - protein, 83 aa, Setaria italica
  Transcript Sequence Number=SeqID_45715
RSKAPTTGWQKLTQTILKKKNIQIKSDFDHLFFGCQFSPRDLLVIQQYSKQQSNCSSQQNGLHRAHQLLDAGTCGYREMMYLW

SEQ ID NO: 111690 - protein, 158 aa, Setaria italica
  misc_feature (87)..(87): Xaa can be any naturally occurring amino acid
  misc_feature (148)..(148): Xaa can be any naturally occurring amino acid
  Transcript Sequence Number=SeqID_45716
  Gene Ontology: Mol. function=transcription factor activity; Cellular component=nucleus; Biological process=regulation of transcription
  Homolog annotation: Hit_ID=Q011W8; Match level="QueryCoverage=82%, HitCoverage=9%, E-value=5e-12, Identity=34%"; Hit description =Transcriptional regulators binding to the GC-rich sequences (ISS)
SGSPSPESTGQMVPSHVFQNGASLFQGLVERARKTVRGSADDIGWLQRDQSLPTTEDGTARFLEILDSVRKNEHKLPDSVVYLLVPXNHGPLYFVKTKAYFSKMGLACHIAKIHSESSVSKNAREIKEYIEEIYWGSRKRVLLLGHSXGGVDSAAALS

SEQ ID NO: 111691 - protein, 479 aa, Setaria italica
  misc_feature (176)..(176): Xaa can be any naturally occurring amino acid
  Transcript Sequence Number=SeqID_45717
  Gene Ontology: Mol. function=transcription factor activity; Cellular component=nucleus; Biological process=regulation of transcription
  Homolog annotation: Hit_ID=Q011W8; Match level="QueryCoverage=61%, HitCoverage=18%, E-value=3e-39, Identity=35%"; Hit description =Transcriptional regulators binding to the GC-rich sequences (ISS)
  Pfam annotation: Domain name=PGAP1; Domain location=180-368; Score= -78.8; E_value=0.013; Accession=PF07819.5; Description=PGAP1-like protein
MRESPSTQGEPSTSAMVDHSCSADRVEDSQLFLSVPSLNQAASYLAQTASFLTQCLPVPGYVGLPEEGQELVALPPASVVDRLSAQTSSAESAGTNSSLGQTGCSGSPSPESTGQMVPSHVFQNGASLFQGLVERARKTVRGSADDIGWLQRDQSLPTTEDGTARFLEILDSVRKXEHKLPDSVVYLLVPGLFSNHGPLYFVKTKAYFSKMGLACHIAKIHSESSVSKNAREIKEYIEEIYWGSRKRVLLLGHSKGGVDSAAALSLYWPQLKDKVAGLVLAQSPYGGSPVASDILREGQLGDYVRLRKIMEVLVSKVLKGDVQALEDLTYERRKEFLRQHPLPQEVPIVSFHTAASITPSVLTALSHVAHLELPIAADGNSTRIPVVMPLSAAMAACSQLLVARYGEKSDGLVTRKDAEVPGSVVVRPERKLDHAWMVYSSLKEEPGDQADTSQVCEALLTLLVEVAQKRRHEVAMKDE

SEQ ID NO: 111692 - protein, 289 aa, Setaria italica
  Transcript Sequence Number=SeqID_45718
  Gene Ontology: Mol. function=nucleotide binding; Biological process =defense response
  Homolog annotation: Hit_ID=Q9ZNV6; Match level="QueryCoverage=99%, HitCoverage=23%, E-value=1e-127, Identity=76%"; Hit description=Pib
VTIGGYLASRPKTRAEWRKLNENISAELEMNPELGMIRTVLQTSYDGLPYELKSCFLYLSIFPEDYIISQRRLVYRWTAEGYSHERRGKSANEMAENYFTELKYRSMILPFQQSVRSRKSIDSCKVHDLIREIAISKSMEENLVFRLEEGCGLSTHGAIRHLAISSNWKGDQSELERIVDLSRLRSLTVFGEFRPFYISDKMRLLRVLDLEGIWLKYHQLDHIWKLLHLKYLSLRGCFRIDLLLDSLGNLRQLQVLDVRGTRVWALPKTIIKLRKLQYIYAGRRTDYVT

SEQ ID NO: 111693 - protein, 45 aa, Setaria italica
  Transcript Sequence Number=SeqID_45719
SPTSSSIIFWTMKVATLARAPSTYVLLALVFSVLLLRWPPRLVPT

SEQ ID NO: 111694 - protein, 197 aa, Setaria italica
  Transcript Sequence Number=SeqID_45720
  Gene Ontology: Mol. function=binding; Cellular component=nucleus
  Homolog annotation: Hit_ID=B6TRX0; Match level="QueryCoverage=69%, HitCoverage=50%, E-value=3e-46, Identity=66%"; Hit description=Cell differentiation protein rcd1
  Pfam annotation: Domain name=Rcd1; Domain location=1-139; Score=51.8; E_value=2.7e-12; Accession=PF04078.5; Description=Cell differentiation family, Rcd1-like
MQVDDTEVVNSLLKSDIIHLCLRIMETGSELSKTVATFIVQKIIIDEAGLQHICGTPERFFGIASVLASMVAEQPQPSTRLLKHIIRCYLRLTDDPRARTALQTNLPETLRDGTFDNCLGDDAVARLYLQQLLDNLAEPAGEAPPPVPGPAAAGVTHLGSAPVAGGAPHPGPGPVAGASPRGSSQAGPSRAHQGPAP

SEQ ID NO: 111695 - protein, 304 aa, Setaria italica
  Transcript Sequence Number=SeqID_45721
  Gene Ontology: Mol. function=binding; Cellular component=nucleus
  Homolog annotation: Hit_ID=Q9LT41; Match level="QueryCoverage=88%, HitCoverage=88%, E-value=2e-89, Identity=60%"; Hit description=RCD1
  Pfam annotation: Domain name=Rcd1; Domain location=17-279; Score =462.2; E_value=7.5e-136; Accession=PF04078.5; Description=Cell differentiation family, Rcd1-like
MSIVEVPSPKDPEIVESLLLDLLDPENKAYALSVLPKRREMFNDLALKLWYSFGTIAALVQEIVSVYPALSPPTLSASAATRVCNALALLQTVAAHPETRTPFLEAGIPFYLFPFLNTTSEAKSFEHLRVTSLGVLGALAKVDDTEVVKFLLKSEVIPLCLRIMETGCELSKTVATFIVHKIMLDEVGLHHICATPEYFFQAASVLANMVIALTEQPSTRLLKHVICCYLRLTDDPRACTALRTHLPEALRNGTFDSCLRDDPAARHFLQQLLDNLAGHAGGAPHPSAGPVAGGGRHGGPSQAG

SEQ ID NO: 111696 - protein, 275 aa, Setaria italica
  Transcript Sequence Number=SeqID_45722
  Gene Ontology: Mol. function=binding; Cellular component=nucleus
  Homolog annotation: Hit_ID=Q9LT41; Match level="QueryCoverage=87%, HitCoverage=92%, E-value=1e-58, Identity=46%"; Hit description=RCD1
  Pfam annotation: Domain name=Rcd1; Domain location=30-252; Score =271.0; E_value=2.7e-78; Accession=PF04078.5; Description=Cell differentiation family, Rcd1-like
MVPHLGLLNSHSKMSIVEVPSPKDSEIVESLLLDLLDPENKAYALSMLPKKRGMWYSFGTIAALLREIVSVYPALSSPTLSASAATRACNALGLLQTVAAHPETRTSFLEAGIPLYLFPFLNTTSVAKSFEYLRATSLGVLGALAKVATFIVQKIMLDEVGLQHICATLECFFQAASVLASMVIALTEQPSTKLLKLIIGSYLRLTDKPRAFTALRTHLREALRGGTFDNCLMDDPAARHFLDQLLGNLAGPASGTQVVRQAQTMEDPLRQTQVA

SEQ ID NO: 111697 - protein, 67 aa, Setaria italica
  Transcript Sequence Number=SeqID_45723
LHRCSQFWMAVTRLVYINACDLVLPERVLHGVLHLPQDLRLDEVLRQHDQPDYPAVVGGNALGTTLL

SEQ ID NO: 111698 - protein, 92 aa, Setaria italica
  Transcript Sequence Number=SeqID_45724
LQVVEDPAWLSNEALCCSLFPFGWPVCVMQARRCSVCISTALCIHSWFGPFQVLPGSMDGEVIWARCEICSRFQHFSFLGGQIPTKFWRPFA

SEQ ID NO: 111699 - protein, 94 aa, Setaria italica
  Transcript Sequence Number=SeqID_45725
  Gene Ontology: Mol. function=nucleoside-triphosphatase activity; Cellular component=membrane; Biological process=transport
  Homolog annotation: Hit_ID=Q8GU82; Match level="QueryCoverage=80%, HitCoverage=5%, E-value=4e-36, Identity=84%"; Hit description=PDR -like ABC transporter
HKKNGESESNGIPGDFCRENRLLIDELEQPEPNTEDLHFPQGYWQNFTTQCVACLWKQSCAYWKNSEHNVVRFINTFAVSIMFGIVFWKIGSTM

SEQ ID NO: 111700 - protein, 88 aa, Setaria italica
  Transcript Sequence Number=SeqID_45726
SNWTTLRANSQQRGSWPRCCSPFPVRVEHVGRFDAFFVHSGDYEEAQFRVIGWIHCEAMAAVFVYPSLSVTWTAGTSASWEALGLHQE

SEQ ID NO: 111701 - protein, 105 aa, Setaria italica
  Transcript Sequence Number=SeqID_45727
  Subcellular localization annotation: CTP_CleavageSite=25; ConfidenceScore=5.26e-01
SLLLPWPMPLATTSSCGRSNKLRVRGVTAAPRPRFLQLLLVEWFIYRYRRPGGGAGAAASWLLLVALTLSIRGAPLPFVWSPFLLGATRHGVARLPRLSLLQKMF

SEQ ID NO: 111702 - protein, 50 aa, Setaria italica
  Transcript Sequence Number=SeqID_45728
KFHLLCKLYRYIMNKILEASSVANFWIQLSSKFIILTHQRNQITDLDLGV

SEQ ID NO: 111703 - protein, 203 aa, Setaria italica
  Transcript Sequence Number=SeqID_45729
  Gene Ontology: Mol. function=nucleotide binding; Cellular component =plasma membrane; Biological process=small GTPase mediated signal transduction
  Homolog annotation: Hit_ID=Q05737; Match level="QueryCoverage=100%, HitCoverage=100%, E-value=1e-112, Identity=95%"; Hit description=GTP- binding protein YPTM2
  Pfam annotation: Domain name=Arf; Domain location=1-169; Score=-45.6; E_value=5.3e-06; Accession=PF00025.13; Description=ADP-ribosylation factor family
  Pfam annotation: Domain name=GTP_EFTU; Domain location=10-171; Score=- 78.6; E_value=0.0032; Accession=PF00009.19; Description=Elongation factor Tu GTP binding domain
  Pfam annotation: Domain name=MMR_HSR1; Domain location=9-124; Score =4.0; E_value=0.00042; Accession=PF01926.15; Description=GTPase of unknown function
  Pfam annotation: Domain name=Miro; Domain location=10-124; Score =90.2; E_value=7.1e-24; Accession=PF08477.5; Description=Miro-like protein
  Pfam annotation: Domain name=Ras; Domain location=10-171; Score =361.2; E_value=2e-105; Accession=PF00071.14; Description=Ras family
  Pfam module annotation: Pfam domain module=Arf::GTP_EFTU::MMR _HSR1::Miro::Ras; Domain location=1-169::10-171::9-124::10-124::10-171
MNPEYDYLFKLLLIGDSGVGKSCLLLRFADDSYLDSYISTIGVDFKIRTVEQDGKTIKLQIWDTAGQERFRTITSSYYRGAHGIIIVYDVTDQESFNNVKQWLNEIDRYASDNVNKLLVGNKCDLTANKVVSYEAGKALADEMGIPFMETSAKNATNVEQAFMAMAASIKTRMASQPAAANARPPTVQIRGQPVNQKTSCCSS

SEQ ID NO: 111704 - protein, 63 aa, Setaria italica
  Transcript Sequence Number=SeqID_45730
SCELATDKPWQGEIPVVHTPNAHEFHKNSAIRPYQCEIISPKLAQLHRNRNKMPHCFGHWNDL

SEQ ID NO: 111705 - protein, 64 aa, Setaria italica
  Transcript Sequence Number=SeqID_45731
YSLSHVAAEIQFSRKKTLAIHLAYLSYLHRNAKHAIHSFLEKVSFFKGSSNFNNMELVVCLYCL

SEQ ID NO: 111706 - protein, 350 aa, Setaria italica
  misc_feature (112)..(112): Xaa can be any naturally occurring amino acid
  Transcript Sequence Number=SeqID_45732
  Gene Ontology: Mol. function=serine-type carboxypeptidase activity; Cellular component=extracellular region; Biological process =proteolysis
  Homolog annotation: Hit_ID=B6U5K7; Match level="QueryCoverage=100%, HitCoverage=73%, E-value=1e-157, Identity=75%"; Hit description =Serine carboxypeptidase F13S12.6
  Pfam annotation: Domain name=Peptidase_S10; Domain location=14-350; Score=325.3; E_value=1.2e-94; Accession=PF00450.14; Description =Serine carboxypeptidase
ALGYPESDLVRGLPGQPPVAFRQFAGYVDVDERAGRSLFYYLAEADGAAAASKPLTLWLNGGPGCSSVGGGAFTELGPFYPRGDGRGLRINDKSWNKCQTFFLLESPAGVGXWSYSNTSSDYKTGDARTASDMHIFLLKWYEKFPEYKSRDLFLTGESYAGHYIPQLTNVLISHNKESKGFKFNIKGVAIGNPLLKLDRDIASIYEYFWSHGMISDEVGLAITNACDFEDYTFSSPHNESQSCNDAIAEANKVVGDYVNNYDVLLDVCYPSIVMQELRLRKYVTKISMGVDICMSYERFFYFNLPEVQQALHANRTRLPYKWSMCSAVLNYSDTDGNINILPLLQRIIEH

SEQ ID NO: 111707 - protein, 154 aa, Setaria italica
  misc_feature (132)..(132): Xaa can be any naturally occurring amino acid
  Transcript Sequence Number=SeqID_45733
  Gene Ontology: Mol. function=aspartic-type endopeptidase activity; Cellular component=chromatin; Biological process=chromatin assembly or disassembly
  Homolog annotation: Hit_ID=A5JSC4; Match level="QueryCoverage=93%, HitCoverage=9%, E-value=6e-44, Identity=60%"; Hit description =Polyprotein
  Pfam annotation: Domain name=Retrotrans_gag; Domain location=1-76; Score=23.1; E_value=0.00034; Accession=PF03732.9; Description =Retrotransposon gag protein
LADHVISWNEFKTAFRAHHIPDGLLECKLNEFLALHQGNRDVLHYAQAFNDLCSYARYHADTDEKKRDRFRRGLSLELRERLNPIRVDTYNELVNLVISQEDCMKALAAERKRKAPLPTPSPPAQRFRMVSXQAPSRPQQSGRWIARPPPAAAP

SEQ ID NO: 111708 - protein, 103 aa, Setaria italica
  Transcript Sequence Number=SeqID_45734
  Gene Ontology: Mol. function=nucleoside-triphosphatase activity; Cellular component=membrane; Biological process=transport
  Homolog annotation: Hit_ID=Q8GU82; Match level="QueryCoverage=72%, HitCoverage=5%, E-value=2e-28, Identity=82%"; Hit description=PDR -like ABC transporter
MEYREAAAAAVVELTEDEGWCDVATTAGRREPPPLTHDDNRGFLRMLRDKKERLGVEAAKVEVRFERLTVEADVRVGRRAVPTLLNCAVNAAQELATSVTIIV

SEQ ID NO: 111709 - protein, 102 aa, Setaria italica
  Transcript Sequence Number=SeqID_45735
  Gene Ontology: Mol. function=phosphatase activator activity
  Homolog annotation: Hit_ID=B6TQY2; Match level="QueryCoverage=83%, HitCoverage=21%, E-value=2e-26, Identity=72%"; Hit description =Serine/threonine-protein phosphatase 2A activator 2
  Subcellular localization annotation: CTP_CleavageSite=19; ConfidenceScore=5.09e-01
TYLSIYPSDSPPPAYRPIRLSAINAPTNTASIVLSPVPQPLPVPPAAPPHAFQTPTKRIASPDDIARFHASLHGRHFLGFVAALSASVHGRKLSDPPPSPPS

SEQ ID NO: 111710 - protein, 430 aa, Setaria italica
  Transcript Sequence Number=SeqID_45736
  Gene Ontology: Mol. function=pyridoxal phosphate binding; Cellular component=plasma membrane
  Homolog annotation: Hit_ID=B9R9I6; Match level="QueryCoverage=99%, HitCoverage=64%, E-value=1e-112, Identity=48%"; Hit description =Molybdopterin cofactor sulfurase, putative
PPRRRGAEVTPASFAWPSMRIHGADLRKKLCRGRRRGGGRGLFVFPLASRMTGARYPYLWMSAAQEQGWHVALDACALGTKDLDTLGLSLIRPDFIVCNFFKVFGENPSGFAGLFVKRSTGLAALERSVIARSIGIVSIVPARRWSLHDGYSTELEHSRSFPKLADPPPPLDDADVETTSSFSGPLSSTAITRSMTLQPDDAAEISEENGFLYQEEPGAQNGGGHGAEQPAKEEEESAMIEVECRGLDHADALGLIAIGNRLRCISNWLVVALQKLRHPHAEGGGHQLVRLYGPRVKFDRGPSLALNVFDWKGERVAPPLVQKLADRHGISLTCGFLRNIWFSDKYDADRAAVLEHIGDDGGAVPVTPGKRRKDAAGDAGILVVNASLGFLSNFEDAYRLWAFVAKFLDADFVEKERWRYTALNQRTVEV

SEQ ID NO: 111711 - protein, 408 aa, Setaria italica
  Transcript Sequence Number=SeqID_45737
  Gene Ontology: Mol. function=oxidoreductase activity, acting on paired donors, with incorporation or reduction of molecular oxygen; Cellular component=chloroplast; Biological process=carotenoid biosynthetic process
  Homolog annotation: Hit_ID=Q9FV42; Match level="QueryCoverage=99%, HitCoverage=79%, E-value=0.0, Identity=75%"; Hit description=Beta cyclase
  Pfam annotation: Domain name=Lycopene_cycl; Domain location=1-385; Score=582.7; E_value=4.1e-172; Accession=PF05834.4; Description =Lycopene cyclase protein
VAQRVAEAGLSVCAIDPSPALVWPNNYGVWVDEFEAMGLSHCLDTVWPSASVFIGDGASPKSLDRPYARVARRKLKSAMMDRCVANGVVFHQAKVAKAVHHDASSLLICDDGVAVPATVVLDATGFSRCLVQYDKPYNPGYQVAYGILAEVDGHPFDIDKMLFMDWRDSHLPEGSEIKERNRRIPTFLYAMPFSPTRIFLEETSLVARPGLAMDDIQERMAARLRHLGIRVRSVEEDERCVIPMGGPLPVLPQRVVGIGGTAGMVHPSTGYMVARTLATAPIVADAIVRFLDTGGGAAGLTGDALSAEVWKQLWPANRRRQREFFCFGMDILLKLDLEGTRRFFDAFFDLEPHYWHGFLSSRLFLPELLMFGLTLFGNASNTSRLEIMAKGTVPLGKMIGNLIQDRDG

SEQ ID NO: 111712 - protein, 77 aa, Setaria italica
  Transcript Sequence Number=SeqID_45738
TYLQLNKKKLHTAHQLLLVCIAMIEARNHNLKQLETTDIISESCQCITEKLSQFKSKYIRANRPSSNYCKNSEGGKN

SEQ ID NO: 111713 - protein, 123 aa, Setaria italica
  misc_feature (24)..(24): Xaa can be any naturally occurring amino acid
  Transcript Sequence Number=SeqID_45739
  Gene Ontology: Mol. function=sulfotransferase activity; Cellular component=cytoplasm
  Homolog annotation: Hit_ID=B6STJ6; Match level="QueryCoverage=97%, HitCoverage=35%, E-value=2e-36, Identity=61%"; Hit description =Flavonol 4-sulfotransferase
  Pfam annotation: Domain name=Sulfotransfer_1; Domain location=1-117; Score=-43.0; E_value=0.00011; Accession=PF00685.19; Description =Sulfotransferase domain
GYWNASKASPETVLFLRYEEMLRXPAGNARKLARFVGQPFSPAEEEAGVVDQIVRLCSIDKLKSVEVNKGGSGTAGTHFANDWYFRKGGAGDWANHMTPDMARRLDAIVEEKLSGSGLSFARD

SEQ ID NO: 111714 - protein, 153 aa, Setaria italica
  Transcript Sequence Number=SeqID_45740
  Homolog annotation: Hit_ID=B6SXQ4; Match level="QueryCoverage=99%, HitCoverage=27%, E-value=1e-71, Identity=87%"; Hit description=CBS domain containing protein
  Pfam annotation: Domain name=PB1; Domain location=19-103; Score=58.7; E_value=2.2e-14; Accession=PF00564.16; Description=PB1 domain
PSEAGDGKSSVYPPVIGNSISFKLQDRKGRVHRFTCGSESLDELVSSVILNFCITDEKETLQLLYEDDEGDRVLLTTDADLAGAVLHAKSSGLKVLKLHIEDPGLNTEVTKPSQQLAPPPSRSGISPVHVGLMAGAVALSGAAVMVYLKRAQL

SEQ ID NO: 111715 - protein, 147 aa, Setaria italica
  misc_feature (18)..(18): Xaa can be any naturally occurring amino acid
  misc_feature (63)..(63): Xaa can be any naturally occurring amino acid
  Transcript Sequence Number=SeqID_45741
  Gene Ontology: Mol. function=2-amino-4-hydroxy-6-hydroxymethyldihydrop teridine diphosphokinase activity; Cellular component=mitochondrion; Biological process=folic acid and derivative biosynthetic process
  Homolog annotation: Hit_ID=A4UIY8; Match level="QueryCoverage=100%, HitCoverage=27%, E-value=1e-59, Identity=74%"; Hit description =HPPK/DHPS
  Pfam annotation: Domain name=HPPK; Domain location=1-104; Score =125.6; E_value=1.6e-34; Accession=PF01288.12; Description=7,8 -dihydro-6-hydroxymethylpterin-pyrophosphokinase (HPPK)
SGVNITRHACLYETAPAXVTDQPRFLNSAIRGMTRMGPHELLKKLKEIEKDIGRTGGIRYGPXRPIDLDILLYGKSQIDSETLIVPHERIHERPFVLAPLVDLLGTSCDDGIETSWHSLSKCSGGFFELWKKLGGESVIGTEGIKRV

SEQ ID NO: 111716 - protein, 46 aa, Setaria italica
  Transcript Sequence Number=SeqID_45742
ATRCAGIRLCSYLVKDMQLIVLLSTAMFAAYRLSLGRRYKSNQPDE

SEQ ID NO: 111717 - protein, 65 aa, Setaria italica
  Transcript Sequence Number=SeqID_45743
AKKCQKKSTLYPEPWIWATLHHWQHPISSVQFGVCLPTTGFLHPSQLSNLVHDKSLVRASPAVSQ

SEQ ID NO: 111718 - protein, 62 aa, Setaria italica
  Transcript Sequence Number=SeqID_45744
SDKDPLECHCALVFVGETGGTSTQLQHLAPSATILCEYPISGTLVFLHRKQTIPRDTQALSL

SEQ ID NO: 111719 - protein, 75 aa, Setaria italica
  Transcript Sequence Number=SeqID_45745
VKSCRDQSDKHTEQRPLNEAELMMIGPRIIIWRHTETNYPKQGRVLNNLFEKLNLPLYIVLLLIHLDISSPTLHI

SEQ ID NO: 111720 - protein, 50 aa, Setaria italica
  Transcript Sequence Number=SeqID_45746
  Gene Ontology: Mol. function=adenosylmethionine decarboxylase activity; Biological process=spermidine biosynthetic process
  Homolog annotation: Hit_ID=Q6KC47; Match level="QueryCoverage=72%, HitCoverage=11%, E-value=6e-10, Identity=80%"; Hit description=S -adenosylmethionine decarboxylase (Fragment)
  Pfam annotation: Domain name=AdoMetDC_leader; Domain location=1-50; Score=97.6; E_value=4.4e-26; Accession=PF08132.3; Description=S -adenosyl-l-methionine decarboxylase
MESKGGKKSSSSRSMMYEAPLGYSIEDVRPAGGEKKFQSAAYSNCAKKPS

SEQ ID NO: 111721 - protein, 110 aa, Setaria italica
  Transcript Sequence Number=SeqID_45747
MPPSLRPAAVLLVAAVWLWSAACAAGDDGDITSLLPPGTASPFPFCPVRPAGVSTGPFPWMTPPPPSTATFPQDPGFLPSGACPASASGAVAWLPLLAVFSAFLLPWMYR

SEQ ID NO: 111722 - protein, 197 aa, Setaria italica
  misc_feature (137)..(137): Xaa can be any naturally occurring amino acid
  Transcript Sequence Number=SeqID_45748
  Gene Ontology: Mol. function=transition metal ion binding; Cellular component=perinuclear region of cytoplasm; Biological process =generation of precursor metabolites and energy
  Homolog annotation: Hit_ID=B6T383; Match level="QueryCoverage=100%, HitCoverage=92%, E-value=1e-80, Identity=74%"; Hit description =Cytoplasm protein
  Pfam annotation: Domain name=Cyt-b5; Domain location=136-196; Score =39.8; E_value=1.1e-08; Accession=PF00173.20; Description=Cytochrome b5-like HemeSteroid binding doma
MDDGDSSDFTFCKVTSEENDGQLGSPKAIPVASMSLEDIHVAKIAKKDGLKANDSDKGRSGNSASVSTQDSNMKEPTIQTSGGAESNVSSQAKPSSKKPAVRKKVPFEKGYSQMDWLKLTQTHPDLAGLKGQSNRGXSLEEVKQHKTGDCIWTVLKGRVYNIAPYMKFHPGGVDMLMKATGKDCTALFNKYHAWVNA

SEQ ID NO: 111723 - protein, 88 aa, Setaria italica
  Transcript Sequence Number=SeqID_45749
LTLSLSLRLNLRLGGYSIWSAIDIALPYKNYSKRRQLGAAERVPSSHVTVLRHFSPQNYLGSACRAQDYGARLQSTRGLVGTTPRTHE

SEQ ID NO: 111724 - protein, 107 aa, Setaria italica
  Transcript Sequence Number=SeqID_45750
  Gene Ontology: Mol. function=inorganic anion exchanger activity; Cellular component=integral to membrane; Biological process=anion transport
  Homolog annotation: Hit_ID=B6SV45; Match level="QueryCoverage=78%, HitCoverage=12%, E-value=5e-15, Identity=54%"; Hit description=Boron transporter-like protein 2
IVIRQHFIPKYFDAKHLRELDAAEYEELEGFTPAPTECGGDDESVRSRDAQPEYALEILDEFTTHRGELKRRNSSFRDGRLLQLNSVKMTRQLTRNMSRAPEIMEEE

SEQ ID NO: 111725 - protein, 58 aa, Setaria italica
  Transcript Sequence Number=SeqID_45751
KLAAPVITTTTNHPCSKIICDPLVNTSKHIPALQGQFVTFCSQGMAPALEPADAPGAA

SEQ ID NO: 111726 - protein, 129 aa, Setaria italica
  Transcript Sequence Number=SeqID_45752
  Gene Ontology: Cellular component=mitochondrion
  Homolog annotation: Hit_ID=B9SBC5; Match level="QueryCoverage=99%, HitCoverage=24%, E-value=3e-11, Identity=31%"; Hit description =Pentatricopeptide repeat-containing protein, putative
  Pfam annotation: Domain name=PPR; Domain location=53-87; Score=15.3; E_value=0.14; Accession=PF01535.12; Description=PPR repeat
  Pfam annotation: Domain name=PPR; Domain location=89-123; Score=11.8; E_value=0.35; Accession=PF01535.12; Description=PPR repeat
  Pfam module annotation: Pfam domain module=PPR::PPR; Domain location =53-87::89-123
PDHSLTAFRLVKPPSERALSALLSAYHDNRLYDRVVEAFNTLPADLAIKPGIVSHNVLLKTLVASGDLTAARKVFDEMPDRAGVQPDIISCNEILKGYLNAGDDAAFDQLLKEITKRHLKPNVGTYNLR

SEQ ID NO: 111727 - protein, 164 aa, Setaria italica
  Transcript Sequence Number=SeqID_45753
  Gene Ontology: Cellular component=mitochondrion
  Homolog annotation: Hit_ID=B9RXN7; Match level="QueryCoverage=85%, HitCoverage=33%, E-value=5e-15, Identity=32%"; Hit description =Pentatricopeptide repeat-containing protein, putative
  Pfam annotation: Domain name=PPR; Domain location=35-68; Score=23.1; E_value=0.0011; Accession=PF01535.12; Description=PPR repeat
  Pfam annotation: Domain name=PPR; Domain location=76-110; Score=0.7; E_value=7.3; Accession=PF01535.12; Description=PPR repeat
  Pfam module annotation: Pfam domain module=PPR::PPR; Domain location =35-68::76-110
LTINRLDLERKRGRSFEAQELLDAMGAKGVPPNRAIFNTVIKGLCNEGEVGAAMALFREMREVPRQNGRGVSPNFETYIMLLEALVNKSVFDPALEVCKECLRNKWAPPFQAVKGLVQGLLKSRKAKQAKEVLTAMRKAVKGDAKEEWVKVEAQFQLVLADKKA

SEQ ID NO: 111728 - protein, 88 aa, Setaria italica
  Transcript Sequence Number=SeqID_45754
  Gene Ontology: Cellular component=extracellular region; Biological process=defense response
  Homolog annotation: Hit_ID=Q5Z4W6; Match level="QueryCoverage=69%, HitCoverage=44%, E-value=2e-17, Identity=68%"; Hit description =Putative thionin Osthi1
  Pfam annotation: Domain name=Thionin; Domain location=34-79; Score =90.8; E_value=4.8e-24; Accession=PF00321.9; Description=Plant thionin
MMKNMALAGNGMKKLILAVLLLCLVIGQIQVEAKSCCPSTTARNVYNTCRLTGASRPTCAKLSGCQIISGNKCKPPNDHLTLDPDTGK

SEQ ID NO: 111729 - protein, 215 aa, Setaria italica
  Transcript Sequence Number=SeqID_45755
  Gene Ontology: Cellular component=mitochondrial matrix
  Homolog annotation: Hit_ID=B4FZA1; Match level="QueryCoverage=100%, HitCoverage=81%, E-value=4e-92, Identity=76%"; Hit description =Mitochondrial glycoprotein
  Pfam annotation: Domain name=MAM33; Domain location=20-213; Score =92.5; E_value=1.4e-24; Accession=PF02330.8; Description =Mitochondrial glycoprotein
PFSSAPATRPSSDAELLSVIDSEIKYAEDCDDHDRVEEIPDNFPFKITDAKGTNAVTLKRTYHGEQIEIVAHMPSLVTGDEPDHDRDDEDKGEDENDSNDDEGEKPPQSSVPLTVTITKGDGPVLEFTCTAYPDEVLIDSLSVMQPSGNDETDLIAYEGPDFNDLDENLQRAFHKYLELRGISPLTTNFLHEYMINKDSREYLFWLRKLKGYFKQ

SEQ ID NO: 111730 - protein, 106 aa, Setaria italica
  Transcript Sequence Number=SeqID_45756
LTVGHMYSTFRLQHHHPPACKAALPPAEQLRAHQATNRAGLINYCLERTEQNARTWLGTANHLNYTVSQVRLTLSTFLTGANTTRTQAQTQTQTQGAIPGEITIIM

SEQ ID NO: 111731 - protein, 55 aa, Setaria italica
  Transcript Sequence Number=SeqID_45757
PNLVAPGSSIWGAWSSLGLDSAEFAGNWTSYLLLQPFSSVFRMFHEMARFDQLCP

SEQ ID NO: 111732 - protein, 289 aa, Setaria italica
  Transcript Sequence Number=SeqID_45758
  Gene Ontology: Mol. function=serine-type endopeptidase activity; Cellular component=cell wall; Biological process=negative regulation of catalytic activity
  Homolog annotation: Hit_ID=Q9SUN6; Match level="QueryCoverage=100%, HitCoverage=33%, E-value=1e-107, Identity=64%"; Hit description =Putative serine proteinase
KQALDTANNVSAAGVIFYLDPFVLGFQLNPTPMRMPGLIIPSSDDSKVFLTYYNDSLVRDETSGQIVSFGGVGKILGGLNPIYGNSAPKVMFYSARGPDPEDNSLSNADILKPNLVAPGSSIWGAWSSLGLDSAEFAGESFAMLSGTSMAAPHVAGLAALIKQKFPSFSPAAIASALSTTTTLSDRQGKPIMAQRTYSNPDSTQSPATAFDMGNGFVNATAALDPGIIFDCSYNDFFSFLCGINGSGPVVTNYTGNSCAASTMTGADLNLPSITIAVLNQTRTITRTVT

SEQ ID NO: 111733 - protein, 81 aa, Setaria italica
  misc_feature (39)..(39): Xaa can be any naturally occurring amino acid
  misc_feature (45)..(45): Xaa can be any naturally occurring amino acid
  Transcript Sequence Number=SeqID_45759
  Gene Ontology: Mol. function=transferase activity, transferring acyl groups, acyl groups converted into alkyl on transfer; Cellular component=mitochondrial matrix; Biological process=cellular carbohydrate metabolic process
  Homolog annotation: Hit_ID=Q2R339; Match level="QueryCoverage=96%, HitCoverage=16%, E-value=3e-36, Identity=91%"; Hit description =Citrate synthase
MVAAHVYKAIDALPVTAHPMTQFTTGVMALQVESEFQKXYDKGLXKNKFWEPTYEDVLNLIARLPPVASYVYRRIFKDGNQ

SEQ ID NO: 111734 - protein, 69 aa, Setaria italica
  Transcript Sequence Number=SeqID_45760
  Gene Ontology: Mol. function=transferase activity, transferring acyl groups, acyl groups converted into alkyl on transfer; Cellular component=mitochondrial matrix; Biological process=cellular carbohydrate metabolic process
  Homolog annotation: Hit_ID=Q2R339; Match level="QueryCoverage=72%, HitCoverage=10%, E-value=4e-22, Identity=98%"; Hit description =Citrate synthase
EKPSLTLLYLLQDRLKKLKSEHGKVQLGNINVDMVLGGMRGMIGMLWETSLLDPEEGIRFRGLSIPECQ

SEQ ID NO: 111735 - protein, 172 aa, Setaria italica
  Transcript Sequence Number=SeqID_45761
  Gene Ontology: Mol. function=transferase activity, transferring acyl groups, acyl groups converted into alkyl on transfer; Cellular component=mitochondrial matrix; Biological process=cellular carbohydrate metabolic process
  Homolog annotation: Hit_ID=Q2R339; Match level="QueryCoverage=100%, HitCoverage=30%, E-value=7e-75, Identity=80%"; Hit description =Citrate synthase
  Pfam annotation: Domain name=Citrate_synt; Domain location=1-155; Score=-141.4; E_value=4.7e-05; Accession=PF00285.13; Description =Citrate synthase
SDVTTDQLKDYVWKTLKSGKVVPGFGHGVLRKTDPRYSCQREFALKHLPEDPLFQLVSKLYEVVPPILTELGKVMWLIMFSTLVLTYSHEHHSLLMYSQVKNPWPNVDAHSGVLLNHFGLSEARYYTVLFGVSRSMGIGSQLIWDRALGLPLERPKSVTMEWLENYCKNKAA

SEQ ID NO: 111736 - protein, 472 aa, Setaria italica
  Transcript Sequence Number=SeqID_45762
  Gene Ontology: Mol. function=transferase activity, transferring acyl groups, acyl groups converted into alkyl on transfer; Cellular component=mitochondrial matrix; Biological process=cellular carbohydrate metabolic process
  Homolog annotation: Hit_ID=Q2R339; Match level="QueryCoverage=100%, HitCoverage=100%, E-value=0.0, Identity=91%"; Hit description =Citrate synthase
  Pfam annotation: Domain name=Citrate_synt; Domain location=78-455; Score=703.6; E_value=1.6e-208; Accession=PF00285.13; Description =Citrate synthase
MAFFRGLTAVSRLRSRVTQEATTLGGVRWVQMQSASDLDLRSQLQELIPEQQDRLKKLKSEHGKVQLGNINVDMVLGGMRGMIGMLWETSLLDPEEGIRFRGLSIPECQKVLPTAVKGGEPLPEGLLWLLLTGKVPTKEQVDSLSKELLARSSVPAHVYKAIDALPVTAHPMTQFTTGVMALQVESEFQKAYDKGLPKTKFWEPTYEDVLNLIARLPPVASYVYRRIFKDGKSIEADNALDYAANFSHMLGFDDPKMLELMRLYITIHTDHEGGNVSAHTGHLVGSALSDPYLSFAAALNGLAGPLHGLANQEVLLWIKSVIEETGSDVTTDQLKDYVWKTLKSGKVVPGFGHGVLRKTDPRYSCQREFALKHLPEDPLFQLVSKLYEVVPPILTELGKVKNPWPNVDAHSGVLLNHFGLSEARYYTVLFGVSRSMGIGSQLIWDRALGLPLERPKSVTMEWLENYCKNKAA

SEQ ID NO: 111737 - protein, 57 aa, Setaria italica
  Transcript Sequence Number=SeqID_45763
  Gene Ontology: Mol. function=protein transporter activity; Cellular component=nuclear pore; Biological process=protein import into nucleus, docking
  Homolog annotation: Hit_ID=Q7XTA3; Match level="QueryCoverage=77%, HitCoverage=16%, E-value=1e-13, Identity=86%"; Hit description =OSJNBa0008A08.7 protein
LGLTSLIGLPASHIPGEALERIFKSTLELLVAYKDQVAESKIENFCCNSECMQLLKC

SEQ ID NO: 111738 - protein, 79 aa, Setaria italica
  Transcript Sequence Number=SeqID_45764
VVLVGSVFLPFRLVFLYFGSPEPPPPVAAAAAAVVQWSSPPPEESERNFMTGDSRELNPLARGSAAACEARRMNLREAG

SEQ ID NO: 111739 - protein, 142 aa, Setaria italica
  Transcript Sequence Number=SeqID_45765
  Gene Ontology: Mol. function=DNA binding; Cellular component=nucleus; Biological process=regulation of transcription
  Homolog annotation: Hit_ID=Q4U0D4; Match level="QueryCoverage=96%, HitCoverage=35%, E-value=5e-57, Identity=78%"; Hit description=NAC domain transcription factor
  Pfam annotation: Domain name=NAM; Domain location=1-105; Score=196.3; E_value=8.6e-56; Accession=PF02365.7; Description=No apical meristem (NAM) protein
SLPCPVPIIAEVNIYQCNPWDLPAKSLFGENEWYFFSPRDRKYPNGARPNRAAGSGYWKATGTDKAILSTPTSENIGVKKALVFYGGKPPKGTKTDWIMHEYRLTGANKGTKRRGSIHEGEIISFRIDFFFSVLCTVALGNC

SEQ ID NO: 111740 - protein, 81 aa, Setaria italica
  Transcript Sequence Number=SeqID_45766
PEKFKIAQAFRFHFHLKGCKLGPGVRTTESHVWMGSMKKLRMTTFLVLCVFGMCCCWCPYPTGEGWITPLVALLEYTLAKK

SEQ ID NO: 111741 - protein, 141 aa, Setaria italica
  Transcript Sequence Number=SeqID_45767
  Gene Ontology: Mol. function=GTP binding; Cellular component =intracellular; Biological process=barrier septum formation
  Homolog annotation: Hit_ID=B9RVE2; Match level="QueryCoverage=98%, HitCoverage=31%, E-value=2e-43, Identity=60%"; Hit description=GTP binding protein, putative
FTFTVFRLASKLCLVDLPGYGFAYAKEEVKESWQDLVKEYVSTRVGLERVCLLVHTKRGMKPLDYELVDLMERHKTPYQIVLTKTDLVFPIDVARRAVEIQESLKKNKSVVKPVMMVSSKTGAGIRNLRGVLGKLARFIKP

SEQ ID NO: 111742 - protein, 65 aa, Setaria italica
  Transcript Sequence Number=SeqID_45768
  Gene Ontology: Cellular component=plasma membrane; Biological process= cell redox homeostasis
  Homolog annotation: Hit_ID=B6T2S8; Match level="QueryCoverage=83%, HitCoverage=37%, E-value=2e-23, Identity=96%"; Hit description =Thioredoxin H-type
  Pfam annotation: Domain name=Thioredoxin; Domain location=2-62; Score= -21.6; E_value=0.012; Accession=PF00085.12; Description=Thioredoxin
TGYNFRLFNAEMSQTYPQLMFLTVDVDDLMEFSSSWDIRATPTFFFLKNGQQVDKLVGANKPESS

SEQ ID NO: 111743 - protein, 144 aa, Setaria italica
  Transcript Sequence Number=SeqID_45769
  Gene Ontology: Mol. function=protein disulfide oxidoreductase activity; Cellular component=plasma membrane; Biological process =cell redox homeostasis
  Homolog annotation: Hit_ID=B6T2S8; Match level="QueryCoverage=88%, HitCoverage=89%, E-value=3e-59, Identity=87%"; Hit description =Thioredoxin H-type
  Pfam annotation: Domain name=Thioredoxin; Domain location=29-133; Score=94.9; E_value=2.8e-25; Accession=PF00085.12; Description =Thioredoxin
MVLKRLMRCCCIAKHTDDEDKIDFGGGNVHVITSKENWDQKVEEANKDGKIVVANFSASWCGPCRVILTVYAEMSQTYPQLMFLTVDVDDLMEFSSSWDIRATPTFFFLKNGQQVDKLVGANKPELEKKVAALAGGSVAPPDRP

SEQ ID NO: 111744 - protein, 75 aa, Setaria italica
  Transcript Sequence Number=SeqID_45770
IPNDFMILLCLIPIYSIMDTCNNFAHNHEKGVNTALGIFLLLLFSKYHLGIALGTSSPQEYDMLDSYPFLIRNID

SEQ ID NO: 111745 - protein, 44 aa, Setaria italica
  Transcript Sequence Number=SeqID_45771
ASHGDAGSKPRSPLMAASLSEFPFLLYKTSASISVSPGGIYVSG

SEQ ID NO: 111746 - protein, 143 aa, Setaria italica
  Transcript Sequence Number=SeqID_45772
  Gene Ontology: Mol. function=zinc ion binding; Cellular component =intracellular
RQTRQLLQKAAEMGAKTSQDPISPLLLKSFPSNVTTRDHMDISSGSQGDSLGNSAANSVGIKTAEDEGSYMSGRSNILMNSPWVSSYKPTTVPLIGLMNHPFAMRSEKESPGIFPGSQMQHSRQENISGVGDAGLTQDFLGLG

SEQ ID NO: 111747 - protein, 163 aa, Setaria italica
  misc_feature (97)..(97): Xaa can be any naturally occurring amino acid
  Transcript Sequence Number=SeqID_45773
FGVDPFLLPPRVAEGFAHVDKQRRVHGVLSDFRYSSGSTDYLSSDIGEFKHKSSYGSSRRCHPSERNITETSHVQPSVMTELDGFHSSGAVLVDSTXYSTAKRKQTSSNIELCHTSSTVSGLSIRPKYYLNNPSSNLKNPPTVKSCSDMSDFSHQLVRSVKRS

SEQ ID NO: 111748 - protein, 83 aa, Setaria italica
  Transcript Sequence Number=SeqID_45774
CKGSQNSVIGHHPRGSIHGGGLHRGRIKLLPRWQWWMKTWRRKQRQIDRVWFHGPLPPPPPRHLILILWVAAAIIEGRRWRGS

SEQ ID NO: 111749 - protein, 30 aa, Setaria italica
  Transcript Sequence Number=SeqID_45775
LFFKCGAMHGTTRDCHVILQSAYHCCQFDL

SEQ ID NO: 111750 - protein, 167 aa, Setaria italica
  misc_feature (35)..(35): Xaa can be any naturally occurring amino acid
  misc_feature (50)..(50): Xaa can be any naturally occurring amino acid
  misc_feature (116)..(116): Xaa can be any naturally occurring amino acid
  misc_feature (160)..(160): Xaa can be any naturally occurring amino acid
  Transcript Sequence Number=SeqID_45776
  Homolog annotation: Hit_ID=Q08I95; Match level="QueryCoverage=94%, HitCoverage=30%, E-value=3e-16, Identity=32%"; Hit description =Pentatricopeptide repeat protein
  Pfam annotation: Domain name=PPR; Domain location=29-63; Score=12.7; E_value=0.28; Accession=PF01535.12; Description=PPR repeat
  Pfam annotation: Domain name=PPR; Domain location=64-98; Score=18.3; E_value=0.032; Accession=PF01535.12; Description=PPR repeat
  Pfam annotation: Domain name=PPR; Domain location=99-133; Score=0.4; E_value=7.9; Accession=PF01535.12; Description=PPR repeat
  Pfam module annotation: Pfam domain module=PPR::PPR::PPR; Domain location=29-63::64-98::99-133
MAYIRADMLDKAEELIKEMEDQQIFAGKEVYKALXRAFSYKGDSDGAQRXFDAIQFAGIVPDTKLCALLVNAYCLSNRMAEAVCVIRNMRSAGVTPCDKCIALVLGAYEKVDMLEXALGFLTELEENGIAIGQEPSQLLAVWFRRLGVVHEVEQVLKESXSEDMTTK

SEQ ID NO: 111751 - protein, 83 aa, Setaria italica
  Transcript Sequence Number=SeqID_45777
  Gene Ontology: Mol. function=oxidoreductase activity, acting on single donors with incorporation of molecular oxygen, incorporation of two atoms of oxygen; Biological process=fatty acid biosynthetic process
  Homolog annotation: Hit_ID=A1XCI4; Match level="QueryCoverage=100%, HitCoverage=9%, E-value=1e-39, Identity=95%"; Hit description =Lipoxygenase
FVGRSVALELISTKIHPRTKKPMLSGQASIKDWCQKRGVKGEHVVYTAEFMVDSDFGEPGAITVANRHHREFFLESIVVEGRL

SEQ ID NO: 111752 - protein, 77 aa, Setaria italica
  Transcript Sequence Number=SeqID_45778
LVPGLGLTKKLGNCSAMIELCSFHNQLMLSVPFFPEMNFSLAYQKVQMHVNLLSTDLLSCHFLDAPLDSFNVDMTSN

SEQ ID NO: 111753 - protein, 92 aa, Setaria italica
  Transcript Sequence Number=SeqID_45779
YYEIRNKIENNLWDIPIWLREIRLALSWRNTRSKRVSRDVALHCSHTAIATGLLVVDGVMVVQDSDIPQIAGGRRGFGGGGASRDWNGKSRD

SEQ ID NO: 111754 - protein, 122 aa, Setaria italica
  Transcript Sequence Number=SeqID_45780
IYFNATLAAIWAAKKDMQAQLQPLEAKPSGGVATLGDDQSSSGGGVATQGDDQSSSEGSGTSSGSGEHGKEEGSNKEGEKQGKSCLTKEECHKKKMLCGKGCTLSAHSKCAAKCTKSCVPTC

SEQ ID NO: 111755 - protein, 111 aa, Setaria italica
  Transcript Sequence Number=SeqID_45781
NWDLQGYRSRDAPSLRQLISCLKDQAEAFSENAKQRLQLRVTRKESLSSDHFSLEPRIPTGRLVVVIAGGTVDAVVGGLAYEVDPEGRILEQLGRRLHGELVPPPAMEESG

SEQ ID NO: 111756 - protein, 213 aa, Setaria italica
  Transcript Sequence Number=SeqID_45782
  Gene Ontology: Mol. function=protein serine/threonine kinase activity; Cellular component=intracellular membrane-bounded organelle; Biological process=protein amino acid phosphorylation
  Homolog annotation: Hit_ID=Q84YE5; Match level="QueryCoverage=100%, HitCoverage=69%, E-value=1e-119, Identity=95%"; Hit description =Cyclin-dependent kinase-like protein
  Pfam annotation: Domain name=Pkinase; Domain location=1-205; Score =128.7; E_value=1.9e-35; Accession=PF00069.17; Description=Protein kinase domain
  Pfam annotation: Domain name=Pkinase_Tyr; Domain location=2-205; Score=-153.8; E_value=0.0017; Accession=PF07714.9; Description =Protein tyrosine kinase
  Pfam module annotation: Pfam domain module=Pkinase::Pkinase_Tyr; Domain location=1-205::2-205
DLKKYLDVYRRGPNARPLPTHLVKNFLYQLCKGVAHCHGHGVLHRDLKPQNLLVDKEKGILKIADLGLGRAFTVPMKSYTHEIVTLWYRAPEVLLGATHYSTGVDMWSVGCIFAEMVRRQALFPGDSELQQLLHIFRLLGTPSEEQWPGVSALRDWHEFPQWKPQSLTRAVPTLEPEGIDLLSKMLQLDPSNRISAIAAMEHPYFDSLDKSQF

SEQ ID NO: 111757 - protein, 149 aa, Setaria italica
  Transcript Sequence Number=SeqID_45783
  Gene Ontology: Mol. function=nucleotide binding; Biological process =defense response
  Homolog annotation: Hit_ID=Q84KC6; Match level="QueryCoverage=75%, HitCoverage=8%, E-value=9e-19, Identity=45%"; Hit description=NBS -LRR disease resistance protein homologue
PTSQDSKKKWRETFIGDRDEIEVIGREREKKDILTKVLQKNGEKESFIIPVVGLGGMGKTTLAKAVYTDKETNMFDVKAWVHVSMEFQLNKIVSAIISQVEGSTPANDVDLQYLKSQLDRILHGKIYLIVLDDLVGGKRRSKLEDLMNM

SEQ ID NO: 111758 - protein, 62 aa, Setaria italica
  Transcript Sequence Number=SeqID_45784
QVSISEQAYQNQGKAPRNSFALWYSQIFVLFYPVLISAYLQLQPFFLCSAFSLLVADTAAPR

SEQ ID NO: 111759 - protein, 78 aa, Setaria italica
  Transcript Sequence Number=SeqID_45785
SGDLGLQQLVIEDAPCLERLRHDTPISHHKMMDILVISGPKLSILGRIYDHFPRFEIGTTVFKVFIFVKQESSFGFGS

SEQ ID NO: 111760 - protein, 247 aa, Setaria italica
  misc_feature (19)..(19): Xaa can be any naturally occurring amino acid
  misc_feature (227)..(227): Xaa can be any naturally occurring amino acid
  Transcript Sequence Number=SeqID_45786
LVDDSDDNSIDDDASLSAXSSESSINNEDIDRKINEKPFLVYPKEENDPLGSEVNEDFRSIFLNTSDGPTCGLEKSLLPLRLKIPTGASNDCFDRYWQYKSAPNTSYEDAEKCLRLALHSNPPVMAALLPLIQILLLGDKLKDALDELERTCLSSTTALPFRLRGRLLEEYFDQNQVSTISSCYEEALRRDPTCSYSMERLIKMHRKGYYNTIQLLEAIALHLDSVXNGKPCIWEELVLCFLRLFSD

SEQ ID NO: 111761 - protein, 133 aa, Setaria italica
  Transcript Sequence Number=SeqID_45787
  Gene Ontology: Mol. function=DNA topoisomerase (ATP-hydrolyzing) activity; Cellular component=chromosome; Biological process=DNA topological change
  Homolog annotation: Hit_ID=Q8GZY4; Match level="QueryCoverage=100%, HitCoverage=16%, E-value=3e-75, Identity=98%"; Hit description=DNA topoisomerase VIA, putative, expressed
LKVELKLPVLALVDSDPYGLKILSVYMCGSKNMSYDSANLTTPDIKWLGVRPSDLDKYRVPEQCRLPMTDHDIKVGKELLEEDFVKQNEGWVKELETMLRTRGLAEIQALSSFGFQYLTEVYLPLKLQQQDWI

SEQ ID NO: 111762 - protein, 89 aa, Setaria italica
  Transcript Sequence Number=SeqID_45788
  Subcellular localization annotation: CTP_CleavageSite=60; ConfidenceScore=5.02e-01
GAGAEGSAHCGRLIGGGGRAPSLKMSFNFHRGAENKPKVNTGSLGKSARQFRIISNYWLLSRTRGNSDLAKSFKHFLLKKPRQNRNYLH

SEQ ID NO: 111763 - protein, 83 aa, Setaria italica
  Transcript Sequence Number=SeqID_45789
  Subcellular localization annotation: CTP_CleavageSite=57; ConfidenceScore=5.12e-01
EIMRDPVVLASGQVLAPNAFLGFGVVLGWIRLRDRYLSNRSVRCLRFGVLFTGLNRCCSTRGNCDRGSKARMFSLNTIFQRKK

SEQ ID NO: 111764 - protein, 114 aa, Setaria italica
  misc_feature (20)..(20): Xaa can be any naturally occurring amino acid
  Transcript Sequence Number=SeqID_45790
  Gene Ontology: Mol. function=protein tyrosine kinase activity; Biological process=protein amino acid phosphorylation
  Homolog annotation: Hit_ID=Q5QM36; Match level="QueryCoverage=97%, HitCoverage=29%, E-value=1e-26, Identity=55%"; Hit description =Serine/threonine-specific protein kinase NPK15-like
VLLQIVDMSVWHEVISKGNXAANGELDRHHEQVSAALAGNVYSFGVILLEIISGKLPEPARERSLVSLALECINNGDRSMVSLLDPTLKDHKEEELVVIGKVIHACIQSDPMNR

SEQ ID NO: 111765 - protein, 313 aa, Setaria italica
  Transcript Sequence Number=SeqID_45791
  Gene Ontology: Mol. function=protein tyrosine kinase activity; Cellular component=integral to membrane; Biological process=protein amino acid phosphorylation
  Homolog annotation: Hit_ID=Q5QM36; Match level="QueryCoverage=98%, HitCoverage=83%, E-value=1e-130, Identity=73%"; Hit description =Serine/threonine-specific protein kinase NPK15-like
  Pfam annotation: Domain name=Pkinase; Domain location=29-281; Score= -32.4; E_value=1.5e-06; Accession=PF00069.17; Description=Protein kinase domain
  Pfam annotation: Domain name=Pkinase_Tyr; Domain location=29-281; Score=-71.1; E_value=5.4e-09; Accession=PF07714.9; Description =Protein tyrosine kinase
  Pfam module annotation: Pfam domain module=Pkinase::Pkinase_Tyr; Domain location=29-281::29-281
TGVPKLQLSELERACEDFSNIVASYPHYTVYKGTLSSGVEIAVVSTTITSSKEWSQHSESCFRKKIDSLSRINHKNFINMLGFCEEEEPFTRMMVLEYAPNGTLYESLHGEDFEHIGWRGRMRIIMGLAYCIQHMHELNPPVVHPDLQSSSILLSEDGAAKIVDMSVWHEVISKGKSPTNGELDRHHEQVSAALAGNVYSFGVILLEIISGKLPEPARERSLVSLALECINNGDRSMVSLLDPTLKDHKEEELVVIGKVIHACIQSDPMNRPSMREITARLREAIGISPVAATPRLSPLWWAELEVLSTAEGS

SEQ ID NO: 111766 - protein, 49 aa, Setaria italica
  Transcript Sequence Number=SeqID_45792
KEDENPDWGIQQRKKITTQTQATQCSEGLVIHIQLCKISVQPNMPLMLL

SEQ ID NO: 111767 - protein, 144 aa, Setaria italica
  Transcript Sequence Number=SeqID_45793
  Gene Ontology: Cellular component=plasma membrane; Biological process= ubiquitin-dependent protein catabolic process
  Homolog annotation: Hit_ID=Q69U54; Match level="QueryCoverage=97%, HitCoverage=31%, E-value=1e-58, Identity=79%"; Hit description=Tubby- like F-box protein 12
  Pfam annotation: Domain name=Tub; Domain location=1-144; Score=78.0; E_value=3.3e-20; Accession=PF01167.10; Description=Tub family
LSPAVLSENGKFLLAAKRNRRTTYTEYIISMDPKNISRSSNGYVGKMRSNFLGTKFVVYDTQPPYNAGSLVSCGRSSRRISSRRVSPKVPTASYPIAQVNYELNVLGTRGPRRMNCTMHSIPASAMEPEGMVPCQPKQLFLPAS

SEQ ID NO: 111768 - protein, 52 aa, Setaria italica
  Transcript Sequence Number=SeqID_45794
  Gene Ontology: Cellular component=plasma membrane
  Homolog annotation: Hit_ID=UPI000182DAC3; Match level="QueryCoverage =98%, HitCoverage=19%, E-value=1e-20, Identity=92%"; Hit description =tub family member
FESSSASDHDKVILQFGKVAKDMFTMDYRYPLSAFQAFTICLTSFDTKLACE

SEQ ID NO: 111769 - protein, 125 aa, Setaria italica
  misc_feature (22)..(22): Xaa can be any naturally occurring amino acid
  Transcript Sequence Number=SeqID_45795
  Gene Ontology: Cellular component=plasma membrane
  Homolog annotation: Hit_ID=Q69U54; Match level="QueryCoverage=97%, HitCoverage=27%, E-value=2e-56, Identity=90%"; Hit description=Tubby- like F-box protein 12
  Pfam annotation: Domain name=F-box; Domain location=57-112; Score =24.1; E_value=0.00059; Accession=PF00646.25; Description=F-box domain
MSFRSIVRDVKESFGSLSRRSXFEVRISGLPGLGHHRGKSVGSLSNLHDRPIVVDQSRWVGLPPELLRDVMKRLEEGESTWPSRKDVVACAAVCGTWREICKDIVPSPEFCGKLTFPVSLKQVTV

SEQ ID NO: 111770 - protein, 66 aa, Setaria italica
  Transcript Sequence Number=SeqID_45796
EAENSLCSICPPTNVCTHLTSSFHVQPGPRDEMIQCFVKRDKSTSTYYLYLCLSPGKCKHVLCFFY

SEQ ID NO: 111771 - protein, 28 aa, Setaria italica
  Transcript Sequence Number=SeqID_45797
YRTPQLHSSEGQFKQLSHLLRYYDRSTV

SEQ ID NO: 111772 - protein, 65 aa, Setaria italica
  Transcript Sequence Number=SeqID_45798
YFLGGIVPSLVVIYVGFVHKVMTHGPTLLWFFSPVQIGSHCIILIYIFRVSFWTSMMGFLSCFSK

SEQ ID NO: 111773 - protein, 131 aa, Setaria italica
  misc_feature (106)..(106): Xaa can be any naturally occurring amino acid
  misc_feature (127)..(127): Xaa can be any naturally occurring amino acid
  Transcript Sequence Number=SeqID_45799
  Gene Ontology: Mol. function=hydrolase activity, acting on ester bonds; Biological process=lipid metabolic process
  Homolog annotation: Hit_ID=Q9AYM5; Match level="QueryCoverage=78%, HitCoverage=40%, E-value=8e-18, Identity=45%"; Hit description =CPRD49 protein
  Subcellular localization annotation: CTP_CleavageSite=20; ConfidenceScore=5.21e-01
MMMPDSCPAASATVHPPVCPAGAAGGSQGLVRPRVVLFGDSITEQSFRPGGWGAALVDTYSRKADVVVRGYSGYNTRWALFLIDHIFPLVGIAPPLATTIFFGAKXDRPFLGRTSERQHVPVSEYKXNLKK

SEQ ID NO: 111774 - protein, 237 aa, Setaria italica
  Transcript Sequence Number=SeqID_45800
  Gene Ontology: Mol. function=hydrolase activity, acting on ester bonds; Biological process=lipid metabolic process
  Homolog annotation: Hit_ID=Q9AYM5; Match level="QueryCoverage=98%, HitCoverage=90%, E-value=6e-47, Identity=41%"; Hit description =CPRD49 protein
  Pfam annotation: Domain name=Lipase_GDSL; Domain location=4-203; Score=185.2; E_value=1.8e-52; Accession=PF00657.14; Description=GDSL- like LipaseAcylhydrolase
RPRVVLFGDSITEQSFRPGGWGAALVDTYSRKADVVVRGYSGYNTRWALFLIDHIFPLVGIAPPLATTIFFGANDAALLGRTSERQHVPVSEYKENLKKIVNHLKDCSNSMVIILITPPPIDEEGRERFARSLYGENARKLPERTNEMAGVYAGQCIELAREMHIPCVNIWSKMQETEGWQTLFLSDGLHLTPEGNAIVHKEVVKTLRNAGLKAEEMPYDFPHHSKIDGSCPDKAFQ

SEQ ID NO: 111775 - protein, 161 aa, Setaria italica
  Transcript Sequence Number=SeqID_45801
  Gene Ontology: Mol. function=oxidoreductase activity; Biological process=metabolic process
  Homolog annotation: Hit_ID=Q6YU31; Match level="QueryCoverage=79%, HitCoverage=30%, E-value=4e-44, Identity=63%"; Hit description =Putative monooxygenase 1
FDTSVRKELRCLKRKDLVEALAKNLPVGTIRFGCHISKNFEDSDCHCTVLSTVDGSTIKARVLIGCDGANSMAAQYLGLGSPSHLPRLVHLGFTSYLHGHPFGTRFLRFAAQDFAVGRMPVNENLVHFFVTRSSPSTPVHVLSVLKNRAAHYHLCCYSLYP

SEQ ID NO: 111776 - protein, 109 aa, Setaria italica
  Transcript Sequence Number=SeqID_45802
IILLVNQKQNILKTRTENQLLLHTVTRRQEQEQQNQSSLRPIQKVQVWRWRRRSNMTDLAGQLLEPAVRCRVEPVDERERVAGGLRHGHHPPLDGVPVLLGAGGLGEGV

SEQ ID NO: 111777 - protein, 115 aa, Setaria italica
  Transcript Sequence Number=SeqID_45803
TFNLAQNYRRSKSAKADDPGKKEAPEAGGLLTFRLFRCSGGIRLPLRKERLARPNPSLLRATTRAFVRKPSSPGCRASRSRPLSPRHNHVIGEVWVETSMIHPSSSAFRAAGQGC

SEQ ID NO: 111778 - protein, 83 aa, Setaria italica
  Transcript Sequence Number=SeqID_45804
  Gene Ontology: Cellular component=integral to membrane
  Homolog annotation: Hit_ID=Q2MJU2; Match level="QueryCoverage=57%, HitCoverage=5%, E-value=2e-15, Identity=81%"; Hit description =Cadmium tolerance factor
LIIVLVNPNLYRPAIRTNALSVCTAAGMMSIMGAYAAGSTQHLKTSIYIFALAAFVLFVVIVAVVFLVIHEKRDQRDKAKKKK

SEQ ID NO: 111779 - protein, 65 aa, Setaria italica
  Transcript Sequence Number=SeqID_45805
CKQHQIECQQIAYIFRKLFCANFIFLDLNELVMNFFDQIKKIKFLENAKPPSKPPKGSNLPGFDS

SEQ ID NO: 111780 - protein, 56 aa, Setaria italica
  Transcript Sequence Number=SeqID_45806
QSCVHLTIHFRVTSDLGDRKFCTISKSDSSKGDSQIPFQGTCECVKDSWFCILVSY

SEQ ID NO: 111781 - protein, 67 aa, Setaria italica
  Transcript Sequence Number=SeqID_45807
  Homolog annotation: Hit_ID=B6SW13; Match level="QueryCoverage=94%, HitCoverage=12%, E-value=6e-14, Identity=70%"; Hit description =Cytochrome P450 CYP86E2
MASELVAMALRFLREYVRVSDLAVTAAVLFVFSAVRNRLSTKPGAPMMWPVVGVIPALVAHFDNIYD

SEQ ID NO: 111782 - protein, 57 aa, Setaria italica
  Transcript Sequence Number=SeqID_45808
KASDPNTTLHCWRNPGLDITDQIRITIALFLIAKVDNFCTLSHLIVTIIRIKWTSSL

SEQ ID NO: 111783 - protein, 73 aa, Setaria italica
  Transcript Sequence Number=SeqID_45809
WLDFLCTMDVLAIYNFGLCLSYCLNSAAILRRLLMIKCSAVLIFIWICIFTSSFWYKKYMNVYRNQRMICLLT

SEQ ID NO: 111784 - protein, 51 aa, Setaria italica
  Transcript Sequence Number=SeqID_45810
TTAREVLQAAQYVPSGCDGMATGAAMPAENGGFDMMVTVAHAVVASLSKGY

SEQ ID NO: 111785 - protein, 167 aa, Setaria italica
  Transcript Sequence Number=SeqID_45811
TEEFFHDLVVPFPSMTGVGSTLHGFALQQSKRNTRNSPGCEVGKLHDSHCKNLQTARILGARSSRARWGSRGAGLDRSAGRQGARAQIDPGRRRASYGAGARGASQQKQQAAASERTATATPTEAGRGEHETLNPRRPTAPRSRGEGVKGGGAEPQGRAALGRNKAG

SEQ ID NO: 111786 - protein, 161 aa, Setaria italica
  Transcript Sequence Number=SeqID_45812
  Gene Ontology: Mol. function=transporter activity; Cellular component= membrane; Biological process=transport
  Homolog annotation: Hit_ID=Q6JN48; Match level="QueryCoverage=98%, HitCoverage=13%, E-value=4e-40, Identity=58%"; Hit description =Ethylene insensitive 2
  Subcellular localization annotation: CTP_CleavageSite=70; ConfidenceScore=5.37e-01
FSNFHAPSYSDNQFYQPATIHGYHLANYLKGMNASRNLQSSTQLDPRRLPRSSESAITGSTMNAHNQDVLGSLGPSSMQSPTLNRLTTMAVDRSYYDPTYVGESVGSSAYSKKYHSSPDISKVIAASRNAFLDEANLGGPAANLSYLSRLASEKSRYMDSA

SEQ ID NO: 111787 - protein, 57 aa, Setaria italica
  Transcript Sequence Number=SeqID_45813
LLMHVKPYGGCMRAKHTLMLHLNIVKALLGFRVPYWASAFPGPNRYHSTSYKQKKEG

SEQ ID NO: 111788 - protein, 283 aa, Setaria italica
  misc_feature (131)..(131): Xaa can be any naturally occurring amino acid
  Transcript Sequence Number=SeqID_45814
  Gene Ontology: Mol. function=oxidoreductase activity; Biological process=cellular aromatic compound metabolic process
  Homolog annotation: Hit_ID=Q00YQ8; Match level="QueryCoverage=72%, HitCoverage=21%, E-value=7e-10, Identity=26%"; Hit description =Kynurenine 3-monooxygenase and related flavoprotein monooxygenases (ISS)
AVSMMQTHRLAFARQRDMSMLVGMAMVALPECSPQGISNIAWALSKIGGDLLYQSEMDRIADVAITKVQEFNAQNVANVAGAFASMRQSAPGLFSALAQRAAQILQTFKEQELAQFLWGCASLNECPHPLXLDALDAAFQNDARFQCHVSDVTSSMHQEMDRPLNFGRDQIGNIAWSYAVIGKMDRPFFLHIWRTLSQFEEQRVSDQYREDMMFASQVYLANQSLKLEYPNLGLCLRSDLEEKITRAGKSKRFNQKTTSSFQKEVGRLLYSTGHEWVREYAID

SEQ ID NO: 111789 - protein, 136 aa, Setaria italica
  Transcript Sequence Number=SeqID_45815
  Gene Ontology: Mol. function=DNA binding; Biological process =regulation of transcription
  Homolog annotation: Hit_ID=B4FPL5; Match level="QueryCoverage=87%, HitCoverage=44%, E-value=1e-50, Identity=87%"; Hit description=Myb family transcription factor-related protein
HLWPSLAITASYLMEAQSGTNSSPRGSTPDVKESQELKEALRAQMEVQRRLHEQVEVQKHMQIRMEANQKYIDAILDKAFKIVSEQLSGISISDRDLPDLASAGVMFSPADPLSPSVFHQLSVSAVSLLSPGGGKA

SEQ ID NO: 111790 - protein, 241 aa, Setaria italica
  Transcript Sequence Number=SeqID_45816
  Gene Ontology: Mol. function=DNA binding; Biological process =regulation of transcription
  Homolog annotation: Hit_ID=B4FPL5; Match level="QueryCoverage=92%, HitCoverage=85%, E-value=1e-100, Identity=87%"; Hit description=Myb family transcription factor-related protein
  Pfam annotation: Domain name=Myb_DNA-binding; Domain location=28-79; Score=47.3; E_value=6.2e-11; Accession=PF00249.23; Description=Myb -like DNA-binding domain
TADPKPRLGLHGHGGGPSVVLTADPKPRLRWTADLHDRFVDAVSQLGGPDKATPKAIMRTMGVKGLTLFHLKSHLQKYRLGRQSGKELTEQSKDASYLMEAQSGTNSSPRGSTPDVKESQELKEALRAQMEVQRRLHEQVEVQKHMQIRMEANQKYIDAILDKAFKIVSEQLSGISISDRDLPDLASAGVMFSPADPLSPSVFHQLSVSAVSLLSPGGGKALPHVAIDISQKPPELKRKSR

SEQ ID NO: 111791 - protein, 83 aa, Setaria italica
  Transcript Sequence Number=SeqID_45817
KFKMHLVSLWFYCHIYRHHLLSCTLCSVVDLHVSLFTYHNIILRVVCTSTYCSCWTTKEGFLACTMWLGETRVYHHVWLCSAV

SEQ ID NO: 111792 - protein, 52 aa, Setaria italica
  misc_feature (1)..(26): Xaa can be any naturally occurring amino acid
  Transcript Sequence Number=SeqID_45818
XXXXXXXXXXXXXXXXXXXXXXXXXXFFFFFLTYSNCNVQKAKSNSLVYFCL

SEQ ID NO: 111793 - protein, 571 aa, Setaria italica
  Transcript Sequence Number=SeqID_45819
  Gene Ontology: Mol. function=oxidoreductase activity, acting on paired donors, with incorporation or reduction of molecular oxygen; Cellular component=chromoplast; Biological process=carotenoid biosynthetic process
  Homolog annotation: Hit_ID=Q0DUI8; Match level="QueryCoverage=100%, HitCoverage=100%, E-value=0.0, Identity=88%"; Hit description =Phytoene dehydrogenase, chloroplastic/chromoplastic
  Pfam annotation: Domain name=Amino_oxidase; Domain location=106-548; Score=357.3; E_value=2.9e-104; Accession=PF01593.16; Description =Flavin containing amine oxidoreductase
  Pfam annotation: Domain name=DAO; Domain location=98-480; Score=-9.8; E_value=5e-05; Accession=PF01266.16; Description=FAD dependent oxidoreductase
  Pfam annotation: Domain name=Pyr_redox_2; Domain location=98-529; Score=-64.4; E_value=0.062; Accession=PF07992.6; Description =Pyridine nucleotide-disulphide oxidore
  Pfam module annotation: Pfam domain module=Amino_oxidase::DAO::Pyr _redox_2; Domain location=106-548::98-480::98-529
  Subcellular localization annotation: CTP_CleavageSite=79; ConfidenceScore=5.33e-01
MDTGCLSSMNITGVNQARSLAGQLPTQRCFANSHHASFAVKSLVVRNKGRRSHHRHAALQIVCKDFPRPPLESTINYLEAGQLSSFFRNSERPSKPLQVVIAGAGLAGLSTAKYLADAGHKPILLEARDVLGGKVAAWKDEDGDWYETGLHIFFGAYPNIQNLFGELGIEDRLQWKEHSMIFAMPNKPGEFSRFDFPETLPAPVNGIWAILRNNEMLTWPEKVKFAIGLLPAMLGGQPYVEAQDGLTVSEWMKKQGVPDRVNDEVFIAMSKALNFINPDELSMQCILIALNRFLQEKHGSKMAFLDGNPPERLCMPIVNHIRSRGGEVRLNSRLKKIELNPDGTVKHFTLTDGTQITGDAYVCAAPVDIFKLLVPQEWSEISYFKKLEKLVGVPVINVHIWFDRKLKNTYDHLLFSRSPLLSVYADMSVTCKEYYDPNRSMLELVFAPAEEWVGRSDTEIIDATMEELAKLFPDEIAADQSKAKILKYHVVKTPRSVYKTVPNCEPCRPLQRSPIEGFYLAGDYTKQKYLASMEGAVLSGKLCAQSIVQDYSRLSLRSQKSLQSEEVPVAS

SEQ ID NO: 111794 - protein, 63 aa, Setaria italica
  Transcript Sequence Number=SeqID_45820
ELGSFTVGSQLRRSHQSSLRRITAQLLTYIVRESLQRSGRRPAVPDGVPARRLHLGGLLLTLT

SEQ ID NO: 111795 - protein, 104 aa, Setaria italica
  Transcript Sequence Number=SeqID_45821
  Gene Ontology: Mol. function=hydrolase activity, acting on ester bonds; Biological process=lipid metabolic process
  Homolog annotation: Hit_ID=B6UBC0; Match level="QueryCoverage=96%, HitCoverage=25%, E-value=7e-49, Identity=89%"; Hit description =Anther-specific proline-rich protein APG
FGAGTFVAANAFRVHFDFVSDPAAYGFATATEACCGQGPHNGLGLCTAASNLCADRGRYVFWDPYHPTERANRIIVSQFMSGSLDYVSPMNLSTVLEMDARLGA

SEQ ID NO: 111796 - protein, 71 aa, Setaria italica
  Transcript Sequence Number=SeqID_45822
  Gene Ontology: Mol. function=DNA-directed RNA polymerase activity; Cellular component=nucleus; Biological process=transcription
  Homolog annotation: Hit_ID=P38421; Match level="QueryCoverage=98%, HitCoverage=39%, E-value=1e-29, Identity=88%"; Hit description=DNA -directed RNA polymerase II subunit RPB7
FVSNHLIPDDMEFQSGDVPNYTTSDGSVKIQKESEVRLKIIGTRVDATEIFCIGTIKDDFLGVISDPGAAV

SEQ ID NO: 111797 - protein, 177 aa, Setaria italica
  Transcript Sequence Number=SeqID_45823
  Gene Ontology: Mol. function=DNA-directed RNA polymerase activity; Cellular component=nucleus; Biological process=transcription
  Homolog annotation: Hit_ID=P38421; Match level="QueryCoverage=99%, HitCoverage=100%, E-value=3e-87, Identity=88%"; Hit description=DNA -directed RNA polymerase II subunit RPB7
  Pfam annotation: Domain name=RNA_pol_Rbc25; Domain location=79-171; Score=-58.4; E_value=0.1; Accession=PF08292.4; Description=RNA polymerase III subunit Rpc25
  Pfam annotation: Domain name=RNA_pol_Rpb7_N; Domain location=8-77; Score=88.6; E_value=2.2e-23; Accession=PF03876.9; Description=RNA polymerase Rpb7, N-terminal domain
  Pfam annotation: Domain name=S1; Domain location=78-160; Score=54.3; E_value=4.6e-13; Accession=PF00575.15; Description=S1 RNA binding domain
  Pfam module annotation: Pfam domain module=RNA_pol_Rbc25::RNA_pol _Rpb7_N::S1; Domain location=79-171::8-77::78-160
MFFHIVLERNMQLHPRHFGPHLRDKLVSKLIKDVEGTCSGRHGFVVAITGVEDIGKGLIREGTGYVTFPVKYQCVVFRPFKGEILEAVVTMVNKMGFFAEAGPVQIFVSNHLIPDDMEFQSGDVPNYTTSDGSVKIQKESEVRLKIIGTRVDATEIFCIGTIKDDFLGVISDPGAAV

SEQ ID NO: 111798 - protein, 131 aa, Setaria italica
  Transcript Sequence Number=SeqID_45824
  Gene Ontology: Mol. function=protein tyrosine phosphatase activity; Cellular component=chloroplast; Biological process=cell division
  Homolog annotation: Hit_ID=Q66T88; Match level="QueryCoverage=100%, HitCoverage=100%, E-value=6e-51, Identity=73%"; Hit description =Rhodanese-like protein
  Pfam annotation: Domain name=Rhodanese; Domain location=10-114; Score= 8.0; E_value=0.053; Accession=PF00581.12; Description=Rhodanese-like domain
MARSVSYVSAAKLVSMARGNPRVAIIDVRDEERSYQAHIAGSHHFASGSFAARMPELVQAASGKDTLVFHCALSQVRGPTCARMFFDYLSETKEDSEIKNIMVLELGFNGWEVSGQPVCRCTDAPCKGTCS

SEQ ID NO: 111799 - protein, 106 aa, Setaria italica
  Transcript Sequence Number=SeqID_45825
  Gene Ontology: Mol. function=hydrolase activity
  Homolog annotation: Hit_ID=Q2QYH4; Match level="QueryCoverage=59%, HitCoverage=11%, E-value=4e-17, Identity=79%"; Hit description =Retrotransposon protein, putative, Ty1-copia subclass
  Subcellular localization annotation: CTP_CleavageSite=51; ConfidenceScore=5.14e-01
RASGLPQPEQSLNQMQMLLSPSPPPAAAHLPAAAPAWTQPLRARRLAGVPQASASAEFPGFVPDGVQMPPGRRRRRSVAGIDQDELLDPEALADPDSSFFEINGVR

SEQ ID NO: 111800 - protein, 51 aa, Setaria italica
  Transcript Sequence Number=SeqID_45826
  Gene Ontology: Cellular component=plasma membrane
PRISGKSYSVEISGTVVDDTTGMKLRGLGKLAPTIEKMKRGFGMHIPEETS

SEQ ID NO: 111801 - protein, 389 aa, Setaria italica
  misc_feature (17)..(17): Xaa can be any naturally occurring amino acid
  Transcript Sequence Number=SeqID_45827
  Gene Ontology: Cellular component=plasma membrane
KDILCQGDTGSPQGPIXEDKQIDPFSSQRKDYSGGDQIRRKEYDINNKADYEANGGDESLGRKCTEKSKEGHRGVLGDECSNRRTHELKGKHGNVGSPEDRIVGNKYKQKTSNAVTSSLEDEGMSIKYERNGSFRVQSISKRYEKCNKKDDSNTLEVESITKRYEQENIKGDSGKLLHSDNINGDTPAKNNSLVNECTNSSSRVSSEAEVDEMQSSIGKNGDSSFFTGFLKKGFKDLSLFNQSADSAKVSINGHPISERALRKAEKKAGPVGPGSYWYDYRAGFWGVFGQECRGIIPPFIKEFNYPMPKNCAGGNTGVFVNGRELHQKDFDLLVGRGLPRISGKSYSVEISGTVVDDTTGMKLRGLGKLAPTIEKMKRGFGMHIPEETS

SEQ ID NO: 111802 - protein, 83 aa, Setaria italica
  Transcript Sequence Number=SeqID_45828
LTGSALQIICLLLLGITFTILCYACRCKFVAVVFVISKAFILFLIRFTSLVVFYIISYVQKTNSVFVSSMRCTTLHHFTSLQV

SEQ ID NO: 111803 - protein, 95 aa, Setaria italica
  Transcript Sequence Number=SeqID_45829
LRRFLCLRSSDEDAPSDSNNHKHHKSRSLEESSDERAADESEKMRNGKRSHKNSHHHHCHHRHHHHERRTTTAFMMEALQSALSPSRAFWSSLGS

SEQ ID NO: 111804 - protein, 46 aa, Setaria italica
  Transcript Sequence Number=SeqID_45830
MDAKKFLQLVEEKKKRILEKKEAPLKWEQKLEAAAKAKADAEAKAK

SEQ ID NO: 111805 - protein, 55 aa, Setaria italica
  Transcript Sequence Number=SeqID_45831
  Subcellular localization annotation: CTP_CleavageSite=43; ConfidenceScore=5.10e-01
CQPCINSILLFSNVAIYQRHNINSTSSHLSFACFVRSVSNLITASLFVKMLCQDG

SEQ ID NO: 111806 - protein, 114 aa, Setaria italica
  Transcript Sequence Number=SeqID_45832
AMRWTGISLRHAATPLLYAHAIASLFLLLPSPALSCFIPLLFAWVLATVACLIRLLGGPMRLLQSIGVEGAAFSLFVEYVCKAWVTSCLGHPDGEAYRGRHSSFYRLVNHGARI

SEQ ID NO: 111807 - protein, 90 aa, Setaria italica
  Transcript Sequence Number=SeqID_45833
  Gene Ontology: Mol. function=electron carrier activity; Cellular component=integral to membrane; Biological process=microtubule bundle formation
  Homolog annotation: Hit_ID=B6UCA5; Match level="QueryCoverage=100%, HitCoverage=19%, E-value=4e-46, Identity=96%"; Hit description =Cytochrome P450 CYP85A1
RYSRRRGLPPGTMGWPLFGETTEFLKQGPSFMKARRLRYGSLFRTHILGCPTVVCMDPELNRRTLASEGAGFVPGYPQSMLDILGPNNIA

SEQ ID NO: 111808 - protein, 70 aa, Setaria italica
  misc_feature (12)..(12): Xaa can be any naturally occurring amino acid
  misc_feature (26)..(26): Xaa can be any naturally occurring amino acid
  Transcript Sequence Number=SeqID_45834
  Gene Ontology: Mol. function=pseudouridine synthase activity; Biological process=pseudouridine synthesis
  Homolog annotation: Hit_ID=A3BN26; Match level="QueryCoverage=84%, HitCoverage=12%, E-value=4e-22, Identity=88%"; Hit description=RNA pseudourine synthase 6, chloroplastic
QKTFRVTDPNPXLEAGTYLRVHVHPXNRFPRCYEIDWKSRVIAVADDYVVLNKPAATSVCFSFPPLVHFS

SEQ ID NO: 111809 - protein, 276 aa, Setaria italica
  Transcript Sequence Number=SeqID_45835
  Gene Ontology: Mol. function=pseudouridine synthase activity; Biological process=pseudouridine synthesis
  Homolog annotation: Hit_ID=A3BN26; Match level="QueryCoverage=100%, HitCoverage=57%, E-value=1e-137, Identity=83%"; Hit description=RNA pseudourine synthase 6, chloroplastic
  Pfam annotation: Domain name=PseudoU_synth_2; Domain location=13-182; Score=20.3; E_value=1.2e-06; Accession=PF00849.14; Description=RNA pseudouridylate synthase
LDWKSRVIAVADDYVVLNKPAATSVGGATDNIEESCAVFTSRALGLETPLMTTHQIDNCSEGCVVLSKTKEFCSVFHGLIREKQVKKVYLALTTAPVSTGTITHYMRPVNRAPRLVSEDHIAKWYLCQMEVLDCKKVPWPSSLTRKAYNVNDCGWPQQEAAYECKINLLTGKTHQIRAQLAAIGTPIIGDSAYMTAAMAAKANPSINPFRRERLSYNSEEEKEAAVEAWIAAHGKEPKSVIGLQASEISWDHEGEHHSYKAGVPWWRQDSVESDLV

SEQ ID NO: 111810 - protein, 81 aa, Setaria italica
  Transcript Sequence Number=SeqID_45836
KYLSRGGSTMRRRSCDVTFDLGKSPFYSYLLFRCGHGFDWSKIVLTDDVELERVVPSRSASYHRRSRADPRHSSRATSIKS

SEQ ID NO: 111811 - protein, 61 aa, Setaria italica
  Transcript Sequence Number=SeqID_45837
  Gene Ontology: Cellular component=nucleus; Biological process=cell division
  Homolog annotation: Hit_ID=Q75I54; Match level="QueryCoverage=100%, HitCoverage=16%, E-value=6e-14, Identity=69%"; Hit description =Cyclin-A3-1
LSAPTSLRSISLAIVLNYPSELKDCIIAIHDLQLNRKCSSLMAIRDKYKQHKFKFVSTLLP

SEQ ID NO: 111812 - protein, 290 aa, Setaria italica
  Transcript Sequence Number=SeqID_45838
  Gene Ontology: Mol. function=kinase activity; Cellular component =nucleus; Biological process=cell division
  Homolog annotation: Hit_ID=B6SKE9; Match level="QueryCoverage=95%, HitCoverage=65%, E-value=1e-144, Identity=89%"; Hit description =Cyclin-A2
  Pfam annotation: Domain name=Cyclin_C; Domain location=154-281; Score= 165.0; E_value=2.2e-46; Accession=PF02984.11; Description=Cyclin, C -terminal domain
  Pfam annotation: Domain name=Cyclin_N; Domain location=23-152; Score =226.4; E_value=7.4e-65; Accession=PF00134.15; Description=Cyclin, N -terminal domain
  Pfam module annotation: Pfam domain module=Cyclin_C::Cyclin_N; Domain location=154-281::23-152
SSPPRAAVAAPADPQLCGSYASDIYTYLRALEVEPRRRPRSDYIEAVQSDVTANMRTILVDWLVEVAEEYKLVADTLYLAISYVDRFLSANALSRDRLQLLGVAAMLIAAKYEEISPPHAEDFCYITDNTYTKQELVKMESDILKLLQFELGNPTIKTFLRRFTRSAHEDKKRSILLMEFLGSYLAELSLLDYGCLRFLPSVVAASVMFVARLTIDPDVNPWNKKLQKVTGYKASELKDCIIAIHDLQLNRKCSSLMAIRDKYKQHKFKFVSTLLPPVVIPASYLEDLAE

SEQ ID NO: 111813 - protein, 81 aa, Setaria italica
  Transcript Sequence Number=SeqID_45839
PRSGLLRGGDAQPQQHELRENGTDMAGPHLLRQRAPPSAQAHNSVKERSGPEMPPQGGQGGSKNREILEPQWLCWILSPET

SEQ ID NO: 111814 - protein, 70 aa, Setaria italica
  Transcript Sequence Number=SeqID_45840
WKYKVLDANNRSHESRFGHKYFYIHIVGEIKITVTYQNNNFILAWSTFPERQRHAGQLKIRRQHTLCLIY

SEQ ID NO: 111815 - protein, 69 aa, Setaria italica
  Transcript Sequence Number=SeqID_45841
  Pfam annotation: Domain name=FFD_TFG; Domain location=2-47; Score =68.1; E_value=3.4e-17; Accession=PF09542.2; Description=FFD and TFG box motifs
KPVYVKDDFFDSLSSGTFGRGGGPNGRGRFSERRRVDTETFGEFPRHRQPYRGGARGYRGGGRSRGGYY

SEQ ID NO: 111816 - protein, 92 aa, Setaria italica
  Transcript Sequence Number=SeqID_45842
ELGYVVKLVNNGIEEDVEMILAETRGDATINSLTVSANPAKKCNDASSLQGNTSLIIPTRVGSFSFDVKHDMKKRIKYSCCYGTAVQGFYWS

SEQ ID NO: 111817 - protein, 116 aa, Setaria italica
  Transcript Sequence Number=SeqID_45843
  Gene Ontology: Mol. function=protein binding; Cellular component =nucleolus; Biological process=endonucleolytic cleavage in ITS1 to separate SSU-rRNA from 5.8S rRNA and LSU-rRNA from tricistronic rRNA transcript ...
  Gene Ontology: Biological process=(SSU-rRNA, 5.8S rRNA, LSU-rRNA)
  Homolog annotation: Hit_ID=A2Q5D0; Match level="QueryCoverage=98%, HitCoverage=12%, E-value=4e-30, Identity=55%"; Hit description =Periodic tryptophan protein-associated region; WD40-like
  Subcellular localization annotation: CTP_CleavageSite=81; ConfidenceScore=5.47e-01
AGDSSVLLSAVGNRVASTDLAASSSLTLPFESSSNVTRLAVSPSGDFLLAADDNGRALYANLSRRAVLHRVSFKGAPSAVRFSPDGQLIAVAVGKVVQIWRSPGFRKEFFPFHLLR

SEQ ID NO: 111818 - protein, 568 aa, Setaria italica
  Transcript Sequence Number=SeqID_45844
  Gene Ontology: Mol. function=catalytic activity; Biological process =trehalose biosynthetic process
  Homolog annotation: Hit_ID=B2ZAQ8; Match level="QueryCoverage=99%, HitCoverage=56%, E-value=0.0, Identity=71%"; Hit description =Trehalose synthase/phosphatase-like protein
  Pfam annotation: Domain name=Glyco_transf_20; Domain location=1-249; Score=36.1; E_value=2.5e-15; Accession=PF00982.13; Description =Glycosyltransferase family 20
  Pfam annotation: Domain name=Trehalose_PPase; Domain location=298 -533; Score=327.9; E_value=2.1e-95; Accession=PF02358.8; Description =Trehalose-phosphatase
  Pfam module annotation: Pfam domain module=Glyco_transf_20::Trehalose_ PPase; Domain location=1-249::298-533
TVGINIMPVGINTVQLQSLLQQPDLERQVAELRNQFDRKTVLLGVDDMDIFKGIDLKILAFEQMLKTHPKWQGRAVLVQIANPKGGSRKDLEELQAEIEVSCKRINEQFGRPGYSPVVLVNRTLSSVERMAYYTIAECVVVTAVRDGMNLTPYEYIVCRQGAPGLDGSGDDRPRGKSMLVVSEFIGCSPSLSGAIRVNPWNIESTAEAMNESIALSDNEKQLRHEKHYRYVSSHDVAYWSKSFIHDFERSCRDHFRRRCWGVGLGFGFRVVALDRNFKKLTVDSIVADYKKSKSRVILLDYDGTLIPQTTMNKTPNETVVSMMNTLCADKKNVVFIVSGRGRDSLEKWFYPCPELGIAAEHGYFMRWTRDEQWQIQNPTSEFGWMHMAEPVMKLYTEATDGSYIETKESALVWHHQDADPGFGSSQAKEMLDHLESVLANEPVSVKSGQHIVEVKPQAVSKGFVAEKILSTLMEKGRQADFVLCIGDDRSDEDMFEQISDIMRRSMVDPQTSLYACTVGQKPSKAIYYLDDANDVLNMLEALADASEEAGSGSPEATEEEGPLTLEQA

SEQ ID NO: 111819 - protein, 67 aa, Setaria italica
  Transcript Sequence Number=SeqID_45845
MVLQFHLPINMLPLSLLFLFLSCPAPLAGQTFCGNHNGARYIPYNTYKSKLISHAETLIARTVEMHF

SEQ ID NO: 111820 - protein, 76 aa, Setaria italica
  Transcript Sequence Number=SeqID_45846
  Subcellular localization annotation: CTP_CleavageSite=48; ConfidenceScore=5.63e-01
QNLITVTMVKLYKVQTSPDSNPTYSTTTNTTSAQGYRKSGRRSSLYNVSNSVWSPELSFLISLVVGSYNSLFKNPH

SEQ ID NO: 111821 - protein, 68 aa, Setaria italica
  Transcript Sequence Number=SeqID_45847
ESIKDTDPSLCSCSCTCAGDIKRLNEMRCHYQQGNNTPFSFATSNATTFEWLRSKPPAADNSHIIIHP

SEQ ID NO: 111822 - protein, 47 aa, Setaria italica
  Transcript Sequence Number=SeqID_45848
ALPAITRQITRWNHTPSNHYPATSQIPGLQANIVHYPFDQITNFSPL

SEQ ID NO: 111823 - protein, 325 aa, Setaria italica
  Transcript Sequence Number=SeqID_45849
  Gene Ontology: Mol. function=transferase activity, transferring glycosyl groups; Cellular component=integral to membrane; Biological process=protein amino acid glycosylation
  Homolog annotation: Hit_ID=B6SXL2; Match level="QueryCoverage=100%, HitCoverage=50%, E-value=0.0, Identity=95%"; Hit description =Galactosyltransferase family
  Pfam annotation: Domain name=Galactosyl_T; Domain location=92-285; Score=58.5; E_value=2.5e-14; Accession=PF01762.13; Description =Galactosyltransferase
KAGVEGFHIYVGGRHVTSFPYRPGFTLEEATGLFVKGDVDVHSVYATALPMSHPSFSLQQVLEMSEKWRSRPLPKRPVSLFIGILSASNHFAERMAVRKTWMQTPEIKSSEAVARFFVALNSRKEVNVMLKKEAEYFGDIVILPFIDRYELVVLKTIAICEYGVQNLTAAYIMKCDDDTFVRVDVVLRHIKLNNGGKPLYMGNLNLLHRPLRTGKWAVTDEEWPEDIYPPYANGPGYVISGDIAKFIVSQHANQSLRLFKMEDVSMGLWVEKFNSTTPVQYSHSWKFCQYGCLENYYTAHYQSPRQMLCLWDKLIRGRASCCNYR

SEQ ID NO: 111824 - protein, 90 aa, Setaria italica
  Transcript Sequence Number=SeqID_45850
AKLFFVGKLPLFKELRQVNSMKLDRGLTNQVQMLSTIENFHLEANWHMIICAHLIHQCKLQKEQAQQPNLNLKHDAYIKRHKHSAIQDCS

SEQ ID NO: 111825 - protein, 102 aa, Setaria italica
  misc_feature (2)..(2): Xaa can be any naturally occurring amino acid
  Transcript Sequence Number=SeqID_45851
RXRALPMIMTLVPSGGYNYLVHPFHVSLPTGPRQDHIQTASDELITLHKICLHGNGVLQSSAEDPAICHLKDVCLSFALFRLTVRRYFGYSCAEAGIAKTHP

SEQ ID NO: 111826 - protein, 48 aa, Setaria italica
  Transcript Sequence Number=SeqID_45852
ISGFVILKSLLFPTFVRLLSVAALHLLFLLSIAATPYVSYFCGYLPSE

SEQ ID NO: 111827 - protein, 58 aa, Setaria italica
  Transcript Sequence Number=SeqID_45853
  Gene Ontology: Mol. function=serine-type endopeptidase activity; Cellular component=intracellular; Biological process=protein modification process
  Homolog annotation: Hit_ID=Q0WRN6; Match level="QueryCoverage=100%, HitCoverage=89%, E-value=5e-20, Identity=86%"; Hit description =Polyubiquitin 4 UBQ4
  Pfam annotation: Domain name=ubiquitin; Domain location=1-39; Score =31.6; E_value=3.2e-06; Accession=PF00240.15; Description=Ubiquitin family
IPPDQQRLIFAGKQLEDGRTLADYNIQKESTLHLVLRLRGGMQIVSEDSTSRVIVLPV

SEQ ID NO: 111828 - protein, 255 aa, Setaria italica
  misc_feature (26)..(26): Xaa can be any naturally occurring amino acid
  Transcript Sequence Number=SeqID_45854
  Gene Ontology: Mol. function=protein binding; Cellular component =polytene chromosome band; Biological process=protein modification process
  Homolog annotation: Hit_ID=P93501; Match level="QueryCoverage=98%, HitCoverage=88%, E-value=1e-137, Identity=95%"; Hit description =Ubiquitin-like protein
  Pfam annotation: Domain name=Tash_PEST; Domain location=108-126; Score=6.2; E_value=10; Accession=PF07708.3; Description=Tash protein PEST motif
  Pfam annotation: Domain name=Tash_PEST; Domain location=184-202; Score=6.2; E_value=10; Accession=PF07708.3; Description=Tash protein PEST motif
  Pfam annotation: Domain name=Tash_PEST; Domain location=32-50; Score =6.2; E_value=10; Accession=PF07708.3; Description=Tash protein PEST motif
  Pfam annotation: Domain name=ubiquitin; Domain location=108-176; Score=138.0; E_value=2.9e-38; Accession=PF00240.15; Description =Ubiquitin family
  Pfam annotation: Domain name=ubiquitin; Domain location=184-252; Score=138.0; E_value=2.9e-38; Accession=PF00240.15; Description =Ubiquitin family
  Pfam annotation: Domain name=ubiquitin; Domain location=32-100; Score= 135.5; E_value=1.7e-37; Accession=PF00240.15; Description=Ubiquitin family
  Pfam module annotation: Pfam domain module=Tash_PEST::Tash_PEST::Tash_ PEST::ubiquitin::ubiquitin::ubiquitin; Domain location=108-126::184 -202::32-50::108-176::184-252::32-100
MAAPFADYNIQKESTLHLVLRLRGGXMQIFVKTLTGKTITLEVESSDTIDNVKAKIQDKEGIPPDQQRLIFAGKQLEDGRTLADYNISKESTLHLVLRLRGGMQIFVKTLTGKTITLEVESSDTIDNVKAKIQDKEGIPPDQQRLIFAGKQLEDGRTLADYNIQKESTLHLVLRLRGGMQIFVKTLTGKTITLEVESSDTIDNVKAKIQDKEGIPPDQQRLIFAGKQLEDGRTLADYNIQKESTLHLVLRLRGGQ

SEQ ID NO: 111829 - protein, 72 aa, Setaria italica
  Transcript Sequence Number=SeqID_45855
  Subcellular localization annotation: CTP_CleavageSite=32; ConfidenceScore=5.06e-01
NPCYLVVAYVLFLYTSMEAVGMRRVGARCSTVATRSSGLARSGVHDGLRAKCFNCFSTMNRSVLTAAPQCLT

SEQ ID NO: 111830 - protein, 45 aa, Setaria italica
  Transcript Sequence Number=SeqID_45856
MAAQVAAAVVANGSAGAVPAVVSPGAVGVGVGVAQPLPTTSLYVG

SEQ ID NO: 111831 - protein, 60 aa, Setaria italica
  Transcript Sequence Number=SeqID_45857
  Homolog annotation: Hit_ID=Q6AT26; Match level="QueryCoverage=83%, HitCoverage=4%, E-value=2e-09, Identity=64%"; Hit description =Probable cellulose synthase A catalytic subunit 1 [UDP-forming]
INNGIDVSQPLQKLQPPAVGTRTKLNGAKRLAYINTIVYPITSIPLIAYCVLPAVCKETN

SEQ ID NO: 111832 - protein, 103 aa, Setaria italica
  Transcript Sequence Number=SeqID_45858
  Gene Ontology: Mol. function=transferase activity, transferring glycosyl groups; Cellular component=integral to membrane; Biological process=cell wall organization and biogenesis
  Homolog annotation: Hit_ID=B9IKV7; Match level="QueryCoverage=85%, HitCoverage=8%, E-value=6e-46, Identity=95%"; Hit description =Cellulose synthase
VPLCFTLRFLIQLCRYDREGEPSQLAPIDVFVSTVDPLKEPPLITANTVLSILAVDYPVDKVSCYVSDDGSAMLTFEALSETAEFARKWVPFCKKHNIEPRAT

SEQ ID NO: 111833 - protein, 99 aa, Setaria italica
  Transcript Sequence Number=SeqID_45859
  Gene Ontology: Mol. function=transferase activity, transferring glycosyl groups; Cellular component=integral to membrane; Biological process=cell wall organization and biogenesis
  Homolog annotation: Hit_ID=Q6AT26; Match level="QueryCoverage=88%, HitCoverage=8%, E-value=1e-46, Identity=98%"; Hit description =Probable cellulose synthase A catalytic subunit 1 [UDP-forming]
TIIRNIDVFVSTVDPLKEPPLITANTVLSILAVDYPVDKVSCYVSDDGSAMLTFESLSETAEFARKWVPFCKKHNIEPRAPEFYFAQKIDYLKRLKFLT

SEQ ID NO: 111834 - protein, 223 aa, Setaria italica
  misc_feature (151)..(151): Xaa can be any naturally occurring amino acid
  Transcript Sequence Number=SeqID_45860
  Gene Ontology: Mol. function=transferase activity, transferring glycosyl groups; Cellular component=integral to membrane; Biological process=cellulose biosynthetic process
  Homolog annotation: Hit_ID=Q6AT26; Match level="QueryCoverage=98%, HitCoverage=20%, E-value=1e-121, Identity=98%"; Hit description =Probable cellulose synthase A catalytic subunit 1 [UDP-forming]
  Pfam annotation: Domain name=Cellulose_synt; Domain location=1-218; Score=-344.3; E_value=0.085; Accession=PF03552.6; Description =Cellulose synthase
ASLSIPLIAYCVLPAICLLTNKFIIPEISNYAGMFFILLFASIFATGILELRWSGVGIEDWWRNEQFWVIGGTSAHLFAVFQGLLKVLAGIDTNFTVTSKASDEDGDFAELYVFKWTSLLIPPTTVLVINLVGMVAGISYAINSGYQSWGXRFFGKLFFSIWVILHLYPFLKGLMGRQNRTPTIVIVWSILLASIFSLLWVKIDPFISPTQKAVALGQCGVNC

SEQ ID NO: 111835 - protein, 42 aa, Setaria italica
  Transcript Sequence Number=SeqID_45861
  Homolog annotation: Hit_ID=Q6AT26; Match level="QueryCoverage=92%, HitCoverage=3%, E-value=3e-15, Identity=94%"; Hit description =Probable cellulose synthase A catalytic subunit 1 [UDP-forming]
SVALVVWSILLASIFSLLWVKIDPFISPTQKAVALGQCGVNC

SEQ ID NO: 111836 - protein, 1076 aa, Setaria italica
  misc_feature (1023)..(1023): Xaa can be any naturally occurring amino acid
  misc_feature (1069)..(1069): Xaa can be any naturally occurring amino acid
  Transcript Sequence Number=SeqID_45862
  Gene Ontology: Mol. function=transferase activity, transferring glycosyl groups; Cellular component=integral to membrane; Biological process=cell wall organization and biogenesis
  Homolog annotation: Hit_ID=Q6AT26; Match level="QueryCoverage=100%, HitCoverage=100%, E-value=0.0, Identity=91%"; Hit description =Probable cellulose synthase A catalytic subunit 1 [UDP-forming]
  Pfam annotation: Domain name=Cellulose_synt; Domain location=255 -1071; Score=2130.1; E_value=0; Accession=PF03552.6; Description =Cellulose synthase
  Pfam annotation: Domain name=PHD; Domain location=38-87; Score=4.6; E_ value=0.0082; Accession=PF00628.21; Description=PHD-finger
  Pfam annotation: Domain name=zf-C3HC4; Domain location=39-84; Score =1.2; E_value=0.074; Accession=PF00097.17; Description=Zinc finger, C3HC4 type (RING finger)
  Pfam module annotation: Pfam domain module=Cellulose_synt::PHD::zf -C3HC4; Domain location=255-1071::38-87::39-84
MAANRGMVAGSRDGVVTIRHDGDGGATAKQLKNANEQICQICGDTVGLSATGDVFVACNECAFPVCRPCYEYERKEGNQCCPQCKTRYKRHKGSPRVPGDDEEDEVDDLDNEFNYTQGNGKGPQWQLQGQGEDVDISSSSRHEPHHRIPCLTSGQQISGDIPDASPDRHSIRSPTPSYVDPSIPVPVRIVDPSKDLNSYGVGSVDWKERVESWRVKQEKNMIQVTHKYAAEGKGDIEGTGSNGEDLQMADDARLPLSRIVPISPNELNLYRTVIVLRLIILCFFFQYRITHPVWDAYGLWLVSVICEVWFALSWLLDQFPKWYPINRETYLDRLALRYDREGEPSQLAPIDVFVSTVDPLKEPPLITANTVLSILAVDYPVDKVSCYVSDDGSAMLTFEALSETAEFARKWVPFCKKHNIEPRAPEFYFAQKIDYLKDKIQPSFVKERRAMKREYEEFKVRINALVAKAQKIPEEGWTMADGTPWPGNNPRDHPGMIQVFLGHSGGLDTDGNELPRLVYVSREKRPGFQHHKKAGAMNALIRVSAVLTNGAYLLNVDCDHYFNSSKALREAMCFMMDPALGRKTCYVQFPQRFDGIDLHDRYANRNIVFFDINMKGLDGIQGPVYVGTGCCFNRQALYGYDPVLTEADLEPNIIIKSCCGGRKRKDKSYIDSKNRAMKRTESSAPIFNMEDIEEGFEGYEDERSLLMSQKSLEKRFGQSPIFIASTFMTQGGIPPSTNPASLLKEAIHVISCGYEDKTEWGKEIGWIYGSVTEDILTGFKMHARGWISIYCMPLRPCFKGSAPINLSDRLNQVLRWALGSVEILLSRHCPIWYGYNGRLKLLERLAYINTIVYPITSIPLIAYCVLPAICLLTNKFIIPEISNYAGMFFILLFASIFATGILELRWSGVGIEDWWRNEQFWVIGGTSAHLFAVFQGLLKVLAGIDTNFTVTSKATDEEGDFSELYVFKWTSLLIPPTTVLVINLVGIVAGVSYAINSGYQSWGPLFGKLFFSIWVILHLYPFXLKGLMGKQNRTPTIVIVWSILLASIFSLLWVKIDPFISPTQKALSXGQCGVNC

SEQ ID NO: 111837 - protein, 1078 aa, Setaria italica
  misc_feature (931)..(931): Xaa can be any naturally occurring amino acid
  Transcript Sequence Number=SeqID_45863
  Gene Ontology: Mol. function=transferase activity, transferring glycosyl groups; Cellular component=integral to membrane; Biological process=cell wall organization and biogenesis
  Homolog annotation: Hit_ID=Q6AT26; Match level="QueryCoverage=100%, HitCoverage=100%, E-value=0.0, Identity=90%"; Hit description =Probable cellulose synthase A catalytic subunit 1 [UDP-forming]
  Pfam annotation: Domain name=Cellulose_synt; Domain location=257 -1073; Score=2127.6; E_value=0; Accession=PF03552.6; Description =Cellulose synthase
  Pfam annotation: Domain name=PHD; Domain location=40-89; Score=3.3; E_ value=0.011; Accession=PF00628.21; Description=PHD-finger
  Pfam annotation: Domain name=zf-C3HC4; Domain location=41-86; Score =2.7; E_value=0.05; Accession=PF00097.17; Description=Zinc finger, C3HC4 type (RING finger)
  Pfam module annotation: Pfam domain module=Cellulose_synt::PHD::zf -C3HC4; Domain location=257-1073::40-89::41-86
MAANKGMVAGSHKRNEFVMIHHEGDAPAAAKPAKSVNGQVCQICGDTVGVSATGDVFVACNECAFPVCRPCYEYERKEGNQCCPQCKTRYRRQKGSPRVHGDEEEEDVDDLDNEFNYKQGNGKGPEWQLHGQGDDADLSSSARHEPHHRIPRLTSGQQISGEIPDASPDRHSIRSPTSSYVDPSVPVPVRIVDPSKDLNSYGLNSVDWKERVESWRVKQDKNMMQVTNKYPEARGGDMEGTGSNGEDMQMVDDARLPLSRIVPISSNQLNLYRIVIILRLIILCFFFQYRVTHPVRDAYGLWLVSVICEVWFALSWLLDQFPKWHPINRETYLDRLALRYDREGEPSQLAPIDVFVSTVDPLKEPPLITANTVLSILAVDYPVDKVSCYVSDDGSAMLTFESLSETAEFARKWVPFCKKHNIEPRAPEFYFAQKIDYLKDKIQPSFVKERRAMKREYEEFKVRINALVAKAQKVPEEGWTMADGTAWPGNNTRDHPGMIQVFLGHSGGLDTDGNELPRLVYVSREKRPGFQHHKKAGAMNALIRVSAVLTNGAYLLNVDCDHYFNSSKALREAMCFMMDPALGRKTCYVQFPQRFDGIDLHDRYANRNIVFFDINMKGLDGIQGPVYVGTGCCFNRQALYGYDPVLTEADLEPNIVVKSCCGRRKKKNKSYMDSQSRIMKRTESSAPIFNMEDIEEGIEGYEDERSVLMSQRKLEKRFGQSPIFIASTFMTQGGIPPSTNPASLLKEAIHVISCGYEDKTEWGKEIGWIYGSVTEDILTGFKMHARGWQSIYCMPPRPCFKGSAPINLSDRLNQVLRWALGSVEILLSRHCPIWYGYSGRLKLLERLAYINTIVYPITSIPLIAYCVLPAICLLTNKFIIPEISNYAGMFFILLFASIFATGILELRWSGVGIEDWWRNEQFWVIGGTSAXHLFAVFQGLLKVLAGIDTNFTVTSKASDEDGDFAELYVFKWTSLLIPPTTVLVINLVGMVAGISYAINSGYQSWGPLFGKLFFSIWVILHLYPFLKGLMGRQNRTPTIVIVWSILLASIFSLLWVKIDPFISPTQKAVALGQCGVNC

SEQ ID NO: 111838 - protein, 1078 aa, Setaria italica
  Transcript Sequence Number=SeqID_45864
  Gene Ontology: Mol. function=transferase activity, transferring glycosyl groups; Cellular component=integral to membrane; Biological process=cell wall organization and biogenesis
  Homolog annotation: Hit_ID=Q6AT26; Match level="QueryCoverage=100%, HitCoverage=100%, E-value=0.0, Identity=90%"; Hit description =Probable cellulose synthase A catalytic subunit 1 [UDP-forming]
  Pfam annotation: Domain name=Cellulose_synt; Domain location=257 -1073; Score=2126.0; E_value=0; Accession=PF03552.6; Description =Cellulose synthase
  Pfam annotation: Domain name=PHD; Domain location=40-89; Score=3.3; E_ value=0.011; Accession=PF00628.21; Description=PHD-finger
  Pfam annotation: Domain name=zf-C3HC4; Domain location=41-86; Score =2.7; E_value=0.05; Accession=PF00097.17; Description=Zinc finger, C3HC4 type (RING finger)
  Pfam module annotation: Pfam domain module=Cellulose_synt::PHD::zf -C3HC4; Domain location=257-1073::40-89::41-86
MAANKGMVAGSHNRNEFVTIHHDVDAPAATKPAKSVNGQVCQICGDTVGVSATGDVFVACNECAFPVCRPCYEYERKEGNQCCPQCKTRYKRQKGSPRVHGDEEEEDVDDLDNEFNYKQGNGKGPEWQLHGQGDDADLSSSARHEPHHRIPRLTSGQQISGEIPDASPDRHSIRSPTSSYVDPSVPVPVRIVDPSKDLNSYGLNSVDWKERVESWRVKQDKNMMQVTNKYPEARGGDMEGTGSNGEDMQMVDDARLPLSRIVPISSNQLNLYRIVIILRLIILCFFFQYRVTHPVRDAYGLWLVSVICEVWFALSWLLDQFPKWHPINRETYLDRLALRYDREGEPSQLAPIDVFVSTVDPLKEPPLITANTVLSILAVDYPVDKVSCYVSDDGSAMLTFESLSETAEFARKWVPFCKKHNIEPRAPEFYFAQKIDYLKDKIQPSFVKERRAMKREYEEFKVRINALVAKAQKVPEEGWTMADGTAWPGNNTRDHPGMIQVFLGHSGGLDTDGNELPRLVYVSREKRPGFQHHKKAGAMNALIRVSAVLTNGAYLLNVDCDHYFNSSKALREAMCFMMDPALGRKTCYVQFPQRFDGIDLHDRYANRNIVFFDINMKGLDGIQGPVYVGTGCCFNRQALYGYDPVLTEEDLEPNIVVKSCCGRRKNKNKSYMDSQSRIMKRTESSAPIFNMEDIEEGIEGYEDERSVLMSQRKLEKRFGQSPIFIASTFMTQGGIPPSTNPASLLKEAIHVISCGYEDKTEWGKEIGWIYGSVTEDILTGFKMHARGWQSIYCMPPRPCFKGSAPINLSDRLNQVLRWALGSVEILLSRHCPIWYGYSGRLKKLLERLAYINTIVYPITSIPLIAYCVLPAICLLTNKFIIPEISNYAGMFFILLFASIFATGILELRWSGVGIEDWWRNEQFWVIGGTSAHLFAVFQGLLKVLAGIDTNFTVTSKASDEDGDFAELYVFKWTSLLIPPTTVLVINLVGMVAGISYAINSGYQSWGPLFGKLFFSIWVILHLYPFLKGLMGRQNRTPTIVIVWSILLASIFSLLWVKIDPFISPTQKAVALGQCGVNC

SEQ ID NO: 111839 - protein, 164 aa, Setaria italica
  Transcript Sequence Number=SeqID_45865
  Gene Ontology: Mol. function=kinase activity; Cellular component =chloroplast; Biological process=carbohydrate metabolic process
  Homolog annotation: Hit_ID=B6SSY8; Match level="QueryCoverage=100%, HitCoverage=31%, E-value=2e-92, Identity=95%"; Hit description =Protein kinase
LSRDELEFLLDHEYYEYKRRTPPQYYLEGFHFTRNWPQYYHYSPEEIAPIWHDGIKVLLVTYGTLRIHYYTPKFHGCVVGTEDALITPYTTDRTGSGDAVVAAAIRKLITCPEMYEDQDTLERQLRFAVAAGIISQWTIGAVRGFPTESAAQNLKEQVYVPSMW

SEQ ID NO: 111840 - protein, 74 aa, Setaria italica
  Transcript Sequence Number=SeqID_45866
YLCKLDQLINQLAASVANLYCFNDASTQLIDVMLLLMVENMIGKSSEKMFCLCLPDAPPVASHQSSPFLMCYYC

SEQ ID NO: 111841 - protein, 76 aa, Setaria italica
  Transcript Sequence Number=SeqID_45867
  Gene Ontology: Mol. function=protein binding; Cellular component =nuclear chromosome; Biological process=chromatin remodeling
  Homolog annotation: Hit_ID=B6T3Y4; Match level="QueryCoverage=93%, HitCoverage=27%, E-value=4e-33, Identity=98%"; Hit description =SWI/SNF-related, matrix-associated, actin-dependent regulator of chromatin subfamily B member 1
LNITDPEVGPAIAVSIREQLYEIASQSVSVMREKQLSKKGRRAPEFSSNSKAVNNAVDLFKYFGSKGSVIRYHLFF

SEQ ID NO: 111842 - protein, 64 aa, Setaria italica
  Transcript Sequence Number=SeqID_45868
RELLSKLLIVPKLEGFSAKICLPWGCCLPDIISPRMCSLLFACLQQYVCIVSECLFPDAGALTL

SEQ ID NO: 111843 - protein, 255 aa, Setaria italica
  Transcript Sequence Number=SeqID_45869
  Gene Ontology: Mol. function=protein binding; Cellular component =nuclear chromosome; Biological process=chromatin remodeling
  Homolog annotation: Hit_ID=B6T3Y4; Match level="QueryCoverage=100%, HitCoverage=100%, E-value=1e-143, Identity=97%"; Hit description =SWI/SNF-related, matrix-associated, actin-dependent regulator of chromatin subfamily B member 1
  Pfam annotation: Domain name=SNF5; Domain location=2-242; Score=20.2; E_value=1.1e-10; Accession=PF04855.4; Description=SNF5  SMARCB1  INI1
MKTVSLGASRPSTVNFRMPTRDNLVPIRVDIEVDGQRYRDAFTWNPRDPDSEIISFAKRTAKDLKLPANFVPQMLQSIQGQLAEFRSYEGQEMQIKEKIVPLKIDLRVNNTVIRDQFLWDIGNLDSDPEEFARTLCDDLNITDPEVGPAIAVSIREQLYEIASQSVSVMREKQLSKKGRRAPEFSSNSKAVNNAVDLFKYFGSKGSVIRKRKEWYLYEPVVDVVANEEDGKEEPNNSSRPKKRAEEEKVASLQSL

SEQ ID NO: 111844 - protein, 170 aa, Setaria italica
  misc_feature (95)..(95): Xaa can be any naturally occurring amino acid
  misc_feature (133)..(133): Xaa can be any naturally occurring amino acid
  Transcript Sequence Number=SeqID_45870
  Gene Ontology: Mol. function=ATPase activity, coupled to transmembrane movement of substances; Cellular component=integral to membrane; Biological process=transport
  Homolog annotation: Hit_ID=Q8RVT7; Match level="QueryCoverage=99%, HitCoverage=63%, E-value=9e-52, Identity=56%"; Hit description =Multidrug resistance protein 1 homolog
  Pfam annotation: Domain name=ABC_tran; Domain location=3-169; Score =9.8; E_value=7.3e-07; Accession=PF00005.19; Description=ABC transporter
EKGSGKSTVISLVERFYDPQAGEVCIDGINIKCFKLDWIRQKIGRVSQEPLLFTTSIKENISYGKEDATLEEVKRAAELANAATFINNLPNVLKXTQYITVSYVHIYKHNVNPLLSEIRSMTQELVNMELNFXGQKQRIAIARAILKNPRILLLDEATSALDLESERVVP

SEQ ID NO: 111845 - protein, 71 aa, Setaria italica
  Transcript Sequence Number=SeqID_45871
GETLSSAVLETNHRAQMINQIEAIVLSEFIKEDITTTQTMLRYHFYIISSCGKLSSKYSTVKHLAFHQSTT

SEQ ID NO: 111846 - protein, 139 aa, Setaria italica
  Transcript Sequence Number=SeqID_45872
  Gene Ontology: Biological process=response to stress
  Homolog annotation: Hit_ID=B6U8I5; Match level="QueryCoverage=52%, HitCoverage=36%, E-value=2e-21, Identity=72%"; Hit description=Small heat shock-like protein
  Pfam annotation: Domain name=HSP20; Domain location=7-67; Score= -13.6; E_value=0.037; Accession=PF00011.13; Description=Hsp20alpha crystallin family
EQVRVQMVRNHRRLIVRGERPVAGNRWSRFRLELRVPDDCDVKAIHARFVDGVVQVTMPGVAPEPVRVEAGAAAGQQDPSPPAAVKPAAAASAQDQKDAAGRAAQHQQDGDGRAARGGGADDEGEKKEEAVQKQEMRQR

SEQ ID NO: 111847 - protein, 128 aa, Setaria italica
  misc_feature (12)..(12): Xaa can be any naturally occurring amino acid
  misc_feature (54)..(54): Xaa can be any naturally occurring amino acid
  Transcript Sequence Number=SeqID_45873
AAVTDEVKEKKXKRQKDEEDNDADASVPSKKIKVEEAAETVEGEKSEKKKKKRXDKGESGSAEAVEVKEEVDVADEKGSGKKKKKKKSKEGSDAADPESAQNGDGAEAEKSEKKKEKKKKSRDTEEAQ

SEQ ID NO: 111848 - protein, 135 aa, Setaria italica
  Transcript Sequence Number=SeqID_45874
  Gene Ontology: Mol. function=transcription factor activity; Cellular component=nucleus; Biological process=regulation of transcription, DNA-dependent
  Homolog annotation: Hit_ID=B6TFS2; Match level="QueryCoverage=87%, HitCoverage=62%, E-value=7e-29, Identity=58%"; Hit description =Ethylene-responsive transcription factor 3
  Pfam annotation: Domain name=AP2; Domain location=15-66; Score=80.6; E_value=5.8e-21; Accession=PF00847.12; Description=AP2 domain
MRRGGAEAADFDVESRFRGVRKRPWGRYAAEIRDPAKKARVWLGTFDSAEDAARAYDAAARMLRGPKAKTNFPLPAAAHHHHMPAAYTPYTTPGVSTPPVAMPACSSLSSTVESFNGARQRPVLPPRPPPPPIPD

SEQ ID NO: 111849 - protein, 40 aa, Setaria italica
  Transcript Sequence Number=SeqID_45875
WGYVQSGHMAGRTGSVAVCAMGYGRWIPIRQGSPLIGLVL

SEQ ID NO: 111850 - protein, 61 aa, Setaria italica
  Transcript Sequence Number=SeqID_45876
SETKSTPSIKRNTCRYKSMVYSAMCTLKKLLEGLQLAWQHQQISDNTIDYFWKSKMSKPAR

SEQ ID NO: 111851 - protein, 58 aa, Setaria italica
  Transcript Sequence Number=SeqID_45877
GPNRLCNISCDPPCEVMGELAALFLQQKQSLVLGRSGEQPGFFIEGQLGYTTQLLLVY

SEQ ID NO: 111852 - protein, 97 aa, Setaria italica
  Transcript Sequence Number=SeqID_45878
  Pfam annotation: Domain name=Remorin_C; Domain location=11-97; Score =33.2; E_value=1e-06; Accession=PF03763.5; Description=Remorin, C -terminal region
ERDAYLAKIVSEKRLTLITAWEESEKARAENRAAKKLAYITSWENAKKAEMEAELKKIEEQLEKKKAAYEEKLKNKLASSSAMMISSPRFASVSVLV

SEQ ID NO: 111853 - protein, 104 aa, Setaria italica
  misc_feature (93)..(93): Xaa can be any naturally occurring amino acid
  Transcript Sequence Number=SeqID_45879
  Homolog annotation: Hit_ID=B6U3W6; Match level="QueryCoverage=98%, HitCoverage=61%, E-value=3e-09, Identity=36%"; Hit description =Remorin
  Pfam annotation: Domain name=Remorin_C; Domain location=12-104; Score= 67.9; E_value=3.8e-17; Accession=PF03763.5; Description=Remorin, C -terminal region
PLNHTTNSLYCLQLTHFLRLSAMIDDRAAKKLAYITSWENAKKAEMEAELKKIEEQLEKKKAAYEEKLKNKLAMLHKTAEEKRALTEAKRGEXIIMAEELAAKY

SEQ ID NO: 111854 - protein, 29 aa, Setaria italica
  Transcript Sequence Number=SeqID_45880
TYLAKIVSEKRLTLITAWEESEKARAENR

SEQ ID NO: 111855 - protein, 85 aa, Setaria italica
  Transcript Sequence Number=SeqID_45881
CVGISMCVKVGCVFETAYSLCPVSLRAASSIAVVHSSLNGLIWRWRLHCPVEQRKGHALNGSTSDASPESSFQAASSIPPPFPVS

SEQ ID NO: 111856 - protein, 81 aa, Setaria italica
  Transcript Sequence Number=SeqID_45882
  Gene Ontology: Mol. function=serine-type endopeptidase activity
MGVVRMKKHRAASAVFLYAVVVLGVLMGGAGVRAFEDGTAVYIVTMKQSPVFHRRLNLEKFGNSRVADAAGGTSGGGGGSG

SEQ ID NO: 111857 - protein, 115 aa, Setaria italica
  Transcript Sequence Number=SeqID_45883
WINCIVSDFQRTKYLSKQMGTEICRLAYIDYCILHQPFSLICITSLYPSGVIFAGKNRDTHQSLICYFEADRVSACFDNLNYDSFFVTILADKMALPYIRCNCDETVHPNHSIVQ

SEQ ID NO: 111858 - protein, 88 aa, Setaria italica
  Transcript Sequence Number=SeqID_45884
  Homolog annotation: Hit_ID=B6UIM9; Match level="QueryCoverage=76%, HitCoverage=17%, E-value=4e-09, Identity=49%"; Hit description =Flavonol sulfotransferase-like
VAVPGAGRSRRTRRRRGSAMDVVRMCSKLKDLEVNRVGSGSSPLPGIREGGLMNKNNSYFSRGEVGDWANHMTPEMARRLDVVMEERL

SEQ ID NO: 111859 - protein, 140 aa, Setaria italica
  misc_feature (108)..(108): Xaa can be any naturally occurring amino acid
  Transcript Sequence Number=SeqID_45885
  Gene Ontology: Mol. function=protein serine/threonine kinase activity; Cellular component=extracellular region; Biological process=protein amino acid phosphorylation
  Pfam annotation: Domain name=LRR_1; Domain location=23-44; Score=8.6; E_value=6.8; Accession=PF00560.25; Description=Leucine Rich Repeat
  Pfam annotation: Domain name=LRR_1; Domain location=49-72; Score=8.6; E_value=6.9; Accession=PF00560.25; Description=Leucine Rich Repeat
  Pfam annotation: Domain name=LRR_1; Domain location=74-97; Score=9.4; E_value=4.9; Accession=PF00560.25; Description=Leucine Rich Repeat
  Pfam annotation: Domain name=LRR_1; Domain location=99-121; Score =6.1; E_value=20; Accession=PF00560.25; Description=Leucine Rich Repeat
  Pfam module annotation: Pfam domain module=LRR_1::LRR_1::LRR_1::LRR _1; Domain location=23-44::49-72::74-97::99-121
MNLNLSHNSLHGILPTELVLHNSIAVLDVSFNHLTGPLKELRPLNHNLPLQVLNISSNFFTGQFPSTIWGAMKNLIALNASNNSFAGQIPASICKSSPSFSVLDLCYXKFSGNIPPELGNCSMLRLIKVGHNDLSGALPH

SEQ ID NO: 111860 - protein, 98 aa, Setaria italica
  Transcript Sequence Number=SeqID_45886
DISIYSKSSQPHSSSDTWLSHSRILILRKHMKHESDLNALVIIYSQQTYNHATTNNSSNQKYKISLSSTFPIFASSSFRKYSTRQQQNNNHEQFAQSH

SEQ ID NO: 111861 - protein, 167 aa, Setaria italica
  Transcript Sequence Number=SeqID_45887
  Gene Ontology: Mol. function=DNA-directed DNA polymerase activity; Biological process=DNA replication
  Homolog annotation: Hit_ID=B6T490; Match level="QueryCoverage=95%, HitCoverage=41%, E-value=2e-31, Identity=44%"; Hit description =Protein trpH
ESVVQLVCQTGGVAVFTVPTTRKNPAAVIKNLKAAGLHGIEVYRSDGKVSGLSDLADTYELLKLGGSDFHGRDDKEEPDVGSVDLPVLAVFKFLEIAKPIWHNAIKEIFASISERTTDLNGSNGFRRISSAGDFCILRLSSKDSELTDASEVEVLRAELADIGLTPQ

SEQ ID NO: 111862 - protein, 117 aa, Setaria italica
  Transcript Sequence Number=SeqID_45888
LIASKNRQMHASRIYRIYGSMENASVEISSSGEHERNWFPSKLGITTRPTMRATFLLVVVTIAAIYIFAMPATAISQPQQGWYPLPVIDAPVSKSLASGRWWSTTRRQDELPSGGGW

SEQ ID NO: 111863 - protein, 48 aa, Setaria italica
  Transcript Sequence Number=SeqID_45889
YKSLLQPPQTMSSSSKHHINPNQQRVDVEKLKTRYYALTSSEANKFNI

SEQ ID NO: 111864 - protein, 50 aa, Setaria italica
  Transcript Sequence Number=SeqID_45890
VCKVFRMHVDSGILITSLPPRPKLLRIFIRLLAIILSHLGRWAPCSCNLA

SEQ ID NO: 111865 - protein, 94 aa, Setaria italica
  Transcript Sequence Number=SeqID_45891
RSKKKYSNCMTAAYACLHVAGLKHKFKIDPRRITEASLAVATTVFQPYRYLHSCLFRLHGRQNREAISIWIYLTSPIFLPIQMIRSSIVGADSM

SEQ ID NO: 111866 - protein, 184 aa, Setaria italica
  misc_feature (155)..(155): Xaa can be any naturally occurring amino acid
  Transcript Sequence Number=SeqID_45892
  Gene Ontology: Mol. function=nucleoside-triphosphatase activity; Cellular component=membrane; Biological process=transport
  Homolog annotation: Hit_ID=B6U195; Match level="QueryCoverage=95%, HitCoverage=26%, E-value=1e-55, Identity=65%"; Hit description=ABC transporter-like protein
  Pfam annotation: Domain name=ABC2_membrane; Domain location=33-184; Score=-9.6; E_value=0.01; Accession=PF01061.16; Description=ABC-2 type transporter
AAGSNRTREPSEQLRLAVRARNGHRGGGIGWLQQFAVLSRRTFRERAPDYLDKMRLAQAVGVALLLGLLWWRSKAGDEAQLRDQVGLIFYICIFWTSSSLFGSVYVFPFEKLYLVKERQAGMYSLSAYYASSTLCDAVPHVVYPVLFTAVLYFMXGLRRTPACFSLTLLATLLVVFTSQGTGGA

SEQ ID NO: 111867 - protein, 171 aa, Setaria italica
  misc_feature (21)..(21): Xaa can be any naturally occurring amino acid
  misc_feature (157)..(157): Xaa can be any naturally occurring amino acid
  Transcript Sequence Number=SeqID_45893
  Gene Ontology: Mol. function=ATPase activity, coupled to transmembrane movement of substances; Cellular component=integral to membrane; Biological process=transport
  Homolog annotation: Hit_ID=Q6Y3I1; Match level="QueryCoverage=100%, HitCoverage=11%, E-value=7e-69, Identity=72%"; Hit description =Multidrug resistance associated protein 1
YIQRYYIASARELVRINGTTXAPVMNFAAESMLGVITIRAFASTKRFIQTNLQLIDIDATLFFYTSAALEWVLLRVEVLQILVIITSAILLVSLPEGAVAPGFLGLCLSYALTLSSAQVFLTRCNSYLENYIISVERIKQFMHLPAEPPAVISDSTXLPPSWPSKGRIDLK

SEQ ID NO: 111868 - protein, 171 aa, Setaria italica
  misc_feature (32)..(32): Xaa can be any naturally occurring amino acid
  Transcript Sequence Number=SeqID_45894
  Gene Ontology: Mol. function=protein binding; Cellular component =clathrin adaptor complex; Biological process=intracellular protein transport
  Homolog annotation: Hit_ID=Q0DJA0; Match level="QueryCoverage=99%, HitCoverage=27%, E-value=4e-72, Identity=78%"; Hit description =Coatomer subunit delta-1
  Pfam annotation: Domain name=Adap_comp_sub; Domain location=13-171; Score=58.6; E_value=2.4e-14; Accession=PF00928.13; Description =Adaptor complexes medium subunit family
RPFPSGQNETPLVKWRIQGMNESSLPLSGATXLCLYLSKNLEIWTCINMLLLDVVNCWPSVSGNETYVNIEYEASEMFDLHNVVISIPLPALREAPNVKQIDGEWKFDSRNSVLEWSILLIDQSNRSGSMEFVVPPADPSSFFPISVGFSASGTFSDLKVTGIHPLKEGNA

SEQ ID NO: 111869 - protein, 45 aa, Setaria italica
  misc_feature (22)..(22): Xaa can be any naturally occurring amino acid
  Transcript Sequence Number=SeqID_45895
  Gene Ontology: Mol. function=protein binding; Cellular component =clathrin adaptor complex; Biological process=intracellular protein transport
  Homolog annotation: Hit_ID=Q0DJA0; Match level="QueryCoverage=88%, HitCoverage=7%, E-value=1e-11, Identity=85%"; Hit description =Coatomer subunit delta-1
KIVRYVYKPIEGLYLLLITNKXSNILKDLDTLRLLSKLVSYFCIY

SEQ ID NO: 111870 - protein, 53 aa, Setaria italica
  Transcript Sequence Number=SeqID_45896
GCLCHLLRNPLLLGFPVDAARLGALLPACAAGNSFAATTVEAAILFADACRGA

SEQ ID NO: 111871 - protein, 226 aa, Setaria italica
  misc_feature (64)..(64): Xaa can be any naturally occurring amino acid
  Transcript Sequence Number=SeqID_45897
  Gene Ontology: Mol. function=nucleoside-triphosphatase activity; Cellular component=outer membrane-bounded periplasmic space; Biological process=cytochrome complex assembly
  Homolog annotation: Hit_ID=B6U3M9; Match level="QueryCoverage=93%, HitCoverage=93%, E-value=1e-107, Identity=91%"; Hit description =Cytochrome c biogenesis ATP-binding export protein ccmA-like
  Pfam annotation: Domain name=ABC_tran; Domain location=36-210; Score =102.0; E_value=2e-27; Accession=PF00005.19; Description=ABC transporter
  Subcellular localization annotation: CTP_CleavageSite=42; ConfidenceScore=5.05e-01
MLPLRPPPPRLLLNNVSCMRNAQTVLRDINLSVNDGTALVLTGANGSGKTTLLRMLAGFSRPSXAGEILWNGHDVTSPGVFQQYKLQLNWMSLKDAVKEKLTVLENVQWFELLEGKDGSRAGPAIELMGLGRLMNEKSRMLSMGQRKRLQLARLLAIDRPIWLLDEPSVALDADGTRLLEYIIAEHRKKGGIVFVATHLPIEIEDSMSLRLPQRFPRRKTLVDLVH

SEQ ID NO: 111872 - protein, 529 aa, Setaria italica
  Transcript Sequence Number=SeqID_45898
  Gene Ontology: Mol. function=protein binding; Cellular component =clathrin adaptor complex; Biological process=intracellular protein transport
  Homolog annotation: Hit_ID=Q0DJA0; Match level="QueryCoverage=98%, HitCoverage=100%, E-value=0.0, Identity=89%"; Hit description =Coatomer subunit delta-1
  Pfam annotation: Domain name=Adap_comp_sub; Domain location=278-519; Score=182.0; E_value=1.7e-51; Accession=PF00928.13; Description =Adaptor complexes medium subunit family
STKPLKMVVLAASIVSKSGKALVSRQFVDMSRIRIEGLLAAFPKLVGTGKQHTYVETENVRYVYQPIEGLYLLLITNKQSNILEDLDTLRLLSKLVPEYSPSLDEEGVCKTAFELIFAFDEAISLGNKENVTVQQVKQYCEMESHEEKAHKLMMQAKINETKDVMKKKANELDKMRMERGKLDKGGYSSISGPRVIEKAFNDMSISGSRFGSGSGLGGLSADMDSFASKPKGHPSTAATAPGKGLGMKLGKTQKTNQFLESLKAEGEVILEDVQPSAVPSRLSALPPSDPVTVTIEEKLNVVVKRDGGINNFDVQGTLALQVLNDADGFIQLQIESQDIPGLSFKTHPNINKELFNSQQILGAKDPNRPFPSGQNETPLVKWRIQGMNESSLPLSVNCWPSVSGNETYVNIEYEASEMFDLHNVVISIPLPALREAPNVKQIDGEWKFDSRNSVLEWSILLIDQSNRSGSMEFVVPPADPSSFFPISVGFSASGTFSDLKVTGIHPLKEGNAPKFSQRACLLTANYQVV

SEQ ID NO: 111873 - protein, 535 aa, Setaria italica
  Transcript Sequence Number=SeqID_45899
  Gene Ontology: Mol. function=protein binding; Cellular component =clathrin adaptor complex; Biological process=intracellular protein transport
  Homolog annotation: Hit_ID=Q0DJA0; Match level="QueryCoverage=96%, HitCoverage=100%, E-value=0.0, Identity=90%"; Hit description =Coatomer subunit delta-1
  Pfam annotation: Domain name=Adap_comp_sub; Domain location=284-525; Score=183.3; E_value=6.9e-52; Accession=PF00928.13; Description =Adaptor complexes medium subunit family
  Pfam annotation: Domain name=Clat_adaptor_s; Domain location=19-154; Score=-65.4; E_value=0.098; Accession=PF01217.12; Description =Clathrin adaptor complex small chain
  Pfam module annotation: Pfam domain module=Adap_comp_sub::Clat _adaptor_s; Domain location=284-525::19-154
  Subcellular localization annotation: CTP_CleavageSite=21; ConfidenceScore=5.06e-01
FVGLFFYNSSDQPRRLKMVVLAASIVSKSGKALVSRQFVDMSRIRIEGLLAAFPKLVGTGKQHTYVETENVRYVYQPIEGLYLLLITNKQSNILEDLDTLRLLSKLVPEYSPSLNEEGICKTAFELIFAFDEAISLGNKENVTVQQVKQYCEMESHEEKAHKLMMQAKINETKDIMKKKANELDKMRMERGKLDKGGYSSISGPRVIEKTFSDMSISGSGFGGLSTDMDSFASKPKGGRPSTTATAPGKGLGMKLGKTQKTNQILESLKAEGEVILEDVQTSSVPTRSPSLPPTDPVMVTIEEKLNVVAKRDGGINNFDVQGTLALQVLNDADGFIQLQIESQDIPGLSFKTHPNINKELFNSQQILGAKDPNRPFPSGQNETPLVKWRIQGMDESSLPLSVNCWPSVSGNETYVNIEYEASEMFDLHNVVISIPLPALREAPSVKQIDGEWKFDSRNSVLEWSILLIDQSNRSGSMEFVVPPADPSSFFPISVGFSASSTFSDLKVAGILPLKEGNPPKFSQRARLLTANYQVV

SEQ ID NO: 111874 - protein, 147 aa, Setaria italica
  Transcript Sequence Number=SeqID_45900
LAWMIHIDASCMDFNLSLLQQRTLTAQWKVGTSNIYFWVNPSLCQQPGQRAHDSAEVEADEGIGLGHAPLSSKPAVFMEVKFPYGFTLHNPTNFSSHVLSSCTSKLNTEPRYQFDSLSHTESLNLSSVPHQTVRQGGAAQVLMLTAP

SEQ ID NO: 111875 - protein, 118 aa, Setaria italica
  Transcript Sequence Number=SeqID_45901
LAWMIHIDASCMDFNLSLLQQRTLTAQWKVGTSNIYFWVNPSLCQQPGQRAHDSAEVEADEGIGLGHAPLSRLLFEVLMLLLVKVLNQPTVTSAPSVPHVNPSADLAGVSGDVNVSTA

SEQ ID NO: 111876 - protein, 44 aa, Setaria italica
  Transcript Sequence Number=SeqID_45902
RWGNSTQGCGQQCTADGMHYDGEVYDAVLHIMLNALVIESQQRI

SEQ ID NO: 111877 - protein, 90 aa, Setaria italica
  Transcript Sequence Number=SeqID_45903
EERKRREEMEARMEVDWQREARRMEARVEAAERRAEQMFQYMQGVLRGWVNLRHRTYSLHLLHLLLINRRHQMSHRTQLCRSGHRCLLSD

SEQ ID NO: 111878 - protein, 161 aa, Setaria italica
  misc_feature (114)..(114): Xaa can be any naturally occurring amino acid
  misc_feature (130)..(130): Xaa can be any naturally occurring amino acid
  Transcript Sequence Number=SeqID_45904
  Gene Ontology: Mol. function=RNA-directed DNA polymerase activity; Biological process=RNA-dependent DNA replication
  Homolog annotation: Hit_ID=Q9ZTP1; Match level="QueryCoverage=99%, HitCoverage=33%, E-value=5e-40, Identity=50%"; Hit description=Prpol (Fragment)
DKCVFGVQRGKILGCLITTKGIEANPDKITALANMSEPTSLKQVQRLTGRIAALNRFIPRAVERSLPFFKTLQSSKIFEWGHEQSGAFQDLKEYLHSMTKLCPPEPKSPLLLYXSASATAVSTALIQEKXNRRQNQVDTSYFASEALSGSKMHYSELEKLR

SEQ ID NO: 111879 - protein, 61 aa, Setaria italica
  Transcript Sequence Number=SeqID_45905
TFHVLLKIILVLMLVRNYASIVLIVNLQDFVHIKSYVDYSSFSLKAMDPNQRIIEYLFYVT

SEQ ID NO: 111880 - protein, 77 aa, Setaria italica
  Transcript Sequence Number=SeqID_45906
  Gene Ontology: Mol. function=oxidoreductase activity; Biological process=metabolic process
  Homolog annotation: Hit_ID=Q6YU31; Match level="QueryCoverage=75%, HitCoverage=13%, E-value=2e-13, Identity=67%"; Hit description =Putative monooxygenase 1
MAEAESHGIVIVGGGICGLATALGLHRKGIASLVLEKSEVLRAEGAGIGVQANGWRALEQLGVAAELRKTAGLITAY

SEQ ID NO: 111881 - protein, 229 aa, Setaria italica
  misc_feature (83)..(83): Xaa can be any naturally occurring amino acid
  misc_feature (103)..(103): Xaa can be any naturally occurring amino acid
  misc_feature (169)..(169): Xaa can be any naturally occurring amino acid
  Transcript Sequence Number=SeqID_45907
  Gene Ontology: Mol. function=structural molecule activity; Cellular component=Golgi-associated vesicle; Biological process=intracellular protein transport
  Homolog annotation: Hit_ID=Q8H852; Match level="QueryCoverage=92%, HitCoverage=23%, E-value=5e-96, Identity=81%"; Hit description =Coatomer subunit gamma-1
  Pfam annotation: Domain name=Gamma-COP; Domain location=3-228; Score =191.0; E_value=3.2e-54; Accession=PF08752.2; Description=Coatomer gamma subunit appendage domain
NRLNEKMLSSIPEFSGFGRLFKSSEPVELTEAETEYAVNVVKHIYDSYVVLQYNCTNTIEEQLLENVTVCVDSSDAEEFSEIXSKPLASLPYNTTGQNFCCFXEKPERVPAIGKMFNLLKFTVKEVDTFTGEADEDGVDDEYQLEDFEIFAADYMLRVAVSNFRNAWEXMDPESERVDEYGLGVRESLAEAVSAVINILGMQPCEGTEVVTEENRQRIPNNLDLDFTGS

SEQ ID NO: 111882 - protein, 116 aa, Setaria italica
  Transcript Sequence Number=SeqID_45908
  Gene Ontology: Mol. function=structural molecule activity; Cellular component=Golgi-associated vesicle; Biological process=intracellular protein transport
  Homolog annotation: Hit_ID=Q8H852; Match level="QueryCoverage=77%, HitCoverage=10%, E-value=1e-39, Identity=86%"; Hit description =Coatomer subunit gamma-1
  Pfam annotation: Domain name=Gamma-COP; Domain location=2-116; Score=- 124.7; E_value=0.0013; Accession=PF08752.2; Description=Coatomer gamma subunit appendage domain
MKAWALIIKPLYLNCSITKILDTFPLCQVDTFTGEADEDGVDDEYQLEDFEIFAADYMLRVAVSNFRNAWENMDPESERVDEYGLGVRESLAEAVSAVINILGMQPCEGTEVVTGR

SEQ ID NO: 111883 - protein, 779 aa, Setaria italica
  Transcript Sequence Number=SeqID_45909
  Gene Ontology: Mol. function=structural molecule activity; Cellular component=Golgi-associated vesicle; Biological process=intracellular protein transport
  Homolog annotation: Hit_ID=Q8H852; Match level="QueryCoverage=95%, HitCoverage=83%, E-value=0.0, Identity=86%"; Hit description =Coatomer subunit gamma-1
  Pfam annotation: Domain name=Adaptin_N; Domain location=39-558; Score= 510.3; E_value=2.4e-150; Accession=PF01602.12; Description=Adaptin N terminal region
  Pfam annotation: Domain name=Gamma-COP; Domain location=631-777; Score=-0.6; E_value=3.2e-12; Accession=PF08752.2; Description =Coatomer gamma subunit appendage domain
  Pfam annotation: Domain name=HEAT; Domain location=150-186; Score =4.3; E_value=15; Accession=PF02985.14; Description=HEAT repeat
  Pfam annotation: Domain name=HEAT; Domain location=301-337; Score =0.0; E_value=49; Accession=PF02985.14; Description=HEAT repeat
  Pfam annotation: Domain name=HEAT; Domain location=373-409; Score =1.9; E_value=28; Accession=PF02985.14; Description=HEAT repeat
  Pfam annotation: Domain name=HEAT; Domain location=522-558; Score =14.1; E_value=0.6; Accession=PF02985.14; Description=HEAT repeat
  Pfam module annotation: Pfam domain module=Adaptin_N::Gamma -COP::HEAT::HEAT::HEAT::HEAT; Domain location=39-558::631-777::150 -186::301-337::373-409::522-558
MPRSLVEGDLAGPEMAQPYMKKDDDDDEEVEYSPFFGIEKGAVLQEARAFHDPQLDVRRCSQVITKLLYLLNQGETFTKVEATEVFFAVTKLFQSSDAGLRRLVYLMIKELSPSSDEVIIVTSSLMKDMNSKTDMYRANAIRVLCRIIDGTLLTQIERYLKQAIVDKNPVVASAALVSGIHLAQANPEIVKRWSNEVQEAVQSRAPLVQFHGLALLHQIRQNDRLAVSKLVSSLTRGSVRSPLAQCLLIRYASQVMRESSTNTQNGDRLFFDFLESSLRHKSDMVMLEAARKITEMDVTSRELAPAIAVLQSFLSPSSKPVLRFAAVRTLNKVAMTRPLAVTNCNVDLESLISDTNRSIATLAITTLLKTGNESSVDRLMKQITNFMSDIADEFKIVVVEAIRSLCLKFPLKYRSMLNFLSNSLREEGGFEYKKAIVDSIVTLIIEIPDAKEIGLLHLCEFIEDCEFTYLSSQILHFLGNEGPRTSDPSRYIRYIYNRVILENATVRASAVSTLAKFGALVDTLKPRIFVLLRRCLFDTEDEVRDRATLYLQTLGGEVAIGNNEKDVKDFLFGSFDVPLANLEASLRTYEPSEEPFDISLVSRDVRSLPLQEKKAPGKKAPAAAASAPVSAVDAYEKMLSSIPEFSGFGRLFKSSEPVELTEAETEYAVNVVKHIYDSYVVLQYNCTNTIEEQLLENVTVCVDSSDAEEFSEICSKPLASLPYNTTGQIFVAFEKPERVPAIGKMFNLLKFTVKEVNVMVHVYNLLQYQTLLMLSCVFQ

SEQ ID NO: 111884 - protein, 263 aa, Setaria italica
  Transcript Sequence Number=SeqID_45910
  Gene Ontology: Mol. function=structural molecule activity; Cellular component=Golgi-associated vesicle; Biological process=intracellular protein transport
  Homolog annotation: Hit_ID=Q8H852; Match level="QueryCoverage=98%, HitCoverage=29%, E-value=1e-133, Identity=88%"; Hit description =Coatomer subunit gamma-1
  Pfam annotation: Domain name=Gamma-COP; Domain location=1-261; Score =314.0; E_value=3.1e-91; Accession=PF08752.2; Description=Coatomer gamma subunit appendage domain
EGTYDIPEFSGFGRLFKSSEPVELTEAETEYAVNVVKHIYDSYVVLQYNCTNTIEEQLLENVTVCVDSSDAEEFSEICSKPLASLPYNTTGQIFVAFEKPERVPAIGKMFNLLKFTVKEVDTFTGEADEDGVDDEYQLEDFEIFAADYMLRVAVSNFRNAWENMDPESERVDEYGLGVRESLAEAVSAVINILGMQPCEGTEVVPRNARSHTCLLSGVFIGDVKVLVRLSFGLSGPNEVAMKLAVRSDDPEVSDKIHEIVASG

SEQ ID NO: 111885 - protein, 164 aa, Setaria italica
  Transcript Sequence Number=SeqID_45911
  Gene Ontology: Mol. function=hydrogen ion transporting ATP synthase activity, rotational mechanism; Cellular component=proton -transporting two-sector ATPase complex; Biological process=ATP synthesis coupled proton transport
  Homolog annotation: Hit_ID=B4F9I5; Match level="QueryCoverage=100%, HitCoverage=80%, E-value=4e-87, Identity=96%"; Hit description=ATP synthase delta chain
  Pfam annotation: Domain name=ATP-synt_DE_N; Domain location=34-114; Score=89.4; E_value=1.2e-23; Accession=PF02823.8; Description=ATP synthase, DeltaEpsilon chain, beta-sandwich domain
  Subcellular localization annotation: CTP_CleavageSite=18; ConfidenceScore=5.02e-01
EAWKKVAPNIEPPSTPMSLMQPRPPTPATIPTKLTVNFVLPYKSEIANKEVDMVIVPATTGQMGVLPGHVATIAELKPGVLSVHEGNDVTKYFVSSGFAFVHANSIADIVAVEAVPVDQIDPALVQKGLSEFTAKLGSASTDLEKAEAQIGVDVHSALNAALTG

SEQ ID NO: 111886 - protein, 187 aa, Setaria italica
  Transcript Sequence Number=SeqID_45912
  Gene Ontology: Cellular component=endoplasmic reticulum; Biological process=ER to Golgi vesicle-mediated transport
  Homolog annotation: Hit_ID=A8J304; Match level="QueryCoverage=98%, HitCoverage=99%, E-value=5e-64, Identity=61%"; Hit description =Component of TRAPP complex
  Pfam annotation: Domain name=TRAPP; Domain location=24-174; Score =221.0; E_value=3e-63; Accession=PF04051.8; Description=Transport protein particle (TRAPP) component
MPPLTAPKSGDALFASVDRVNAELFTLTYGAIVRQLLTDLEEVEEVNKQLDQMGYNIGTRLVDEFLAKSNVSRCVDFKETADVIAKLGFKMFLGVTATVTNWDAEGTSCSFVLEDNPLVDFVELPDTCQGLQYCNVLSGVIRGALEMVSMKTEVTWVRDMLRGDDAYEMRVKLIKQVPEEYPYKDDD

SEQ ID NO: 111887 - protein, 285 aa, Setaria italica
  misc_feature (221)..(221): Xaa can be any naturally occurring amino acid
  misc_feature (229)..(229): Xaa can be any naturally occurring amino acid
  misc_feature (240)..(240): Xaa can be any naturally occurring amino acid
  misc_feature (252)..(252): Xaa can be any naturally occurring amino acid
  misc_feature (273)..(273): Xaa can be any naturally occurring amino acid
  Transcript Sequence Number=SeqID_45913
  Gene Ontology: Mol. function=microtubule motor activity; Cellular component=microtubule associated complex; Biological process =microtubule-based movement
  Homolog annotation: Hit_ID=UPI0001739063; Match level="QueryCoverage =96%, HitCoverage=31%, E-value=6e-82, Identity=54%"; Hit description =ATP binding / microtubule motor
  Pfam annotation: Domain name=Kinesin; Domain location=3-235; Score =152.3; E_value=1.5e-42; Accession=PF00225.15; Description=Kinesin motor domain
AKPTATDLGVIPRGIQALFDRASESHRRFLFTFSMLEIYMGNLRDLLVPGSKTHGFKKVPSLSIKTDPDGGIEIENLVAVTVNSFQEVKRLYEVGTRLRSTAYTMANSTSSRSHCLIRLSLTSFDAPERKKARNKLWMIDLGGSERLVKTKATGKRLKEGKAINLSLSALGDVIDALQTKKAHVPYRNSKLTQVLRDSLGCDSKMLMLVHIRPNENDLCEXICTLGFVXLSSLVSLFRLXENEEPPDEKARXTLLTELEREISDLEQECEDYXRKIKKLEETMEH

SEQ ID NO: 111888 - protein, 45 aa, Setaria italica
  Transcript Sequence Number=SeqID_45914
MARCQGTVESLCQGLLDLDDDKFGAMCSAFGYLQEWPDLGAMCGA

SEQ ID NO: 111889 - protein, 132 aa, Setaria italica
  Transcript Sequence Number=SeqID_45915
MSGIFQGWDPCRGSDPCSGMGTGENCPRVQCRGREQGDFVTQGAERSTGTPTGDSPRCHPYMHICLPCFFSQKTWPLPSSYCPFVSFYLPNINELHKEYISNHTAPQDQWLQNISNSFSLHPKQSLLDVPYV

SEQ ID NO: 111890 - protein, 84 aa, Setaria italica
  Transcript Sequence Number=SeqID_45916
VEWLISAGFEGLHRSSRLLLYPLAELRVEPVDKHLPESCQRGSRNSGYFRLGLQNDFSLRCLVLRKTCDTETKVSPTKRGLNLA

SEQ ID NO: 111891 - protein, 193 aa, Setaria italica
  Transcript Sequence Number=SeqID_45917
  Gene Ontology: Mol. function=peptidase activity; Cellular component =anchored to membrane; Biological process=lipid transport
  Homolog annotation: Hit_ID=B6TD92; Match level="QueryCoverage=70%, HitCoverage=67%, E-value=1e-48, Identity=75%"; Hit description=Lipid- transfer protein
  Pfam annotation: Domain name=Tryp_alpha_amyl; Domain location=41-120; Score=36.8; E_value=8.8e-08; Accession=PF00234.14; Description =Protease inhibitorseed storageLTP f
MAMLLPRLATVLVAAALAFGMAAAQGPAAAPGPAPGISDECLNSVLNMSDCLTYVTAGSTARHPDKACCPELAGLLESHPVCLCQLLAGGAESYGVSVDYKRALALPGICRLTAPPVSACAAFGVPLPAGLVPTAAPSPMSGLSPSMGPEVPANTPAGSAAKSSNHAPGRVTAGGLIALAALPLAVAAAAGML

SEQ ID NO: 111892 - protein, 102 aa, Setaria italica
  Transcript Sequence Number=SeqID_45918
ILHPKLEINVCFYKDVITSIGAKALLTLLSYRCRDLLTDSLRCPAKCCFSSNNLLSHTSTFLFRTTAPALGGTIYGAACSPSNTKACLCACLQVLRSKYLIL

SEQ ID NO: 111893 - protein, 57 aa, Setaria italica
  Transcript Sequence Number=SeqID_45919
VLDESETNGDLPYHSYGKTCLPGLFAGDTHQVVDSLNVVHNGEPQIERTEGATEQIP

SEQ ID NO: 111894 - protein, 141 aa, Setaria italica
  misc_feature (96)..(96): Xaa can be any naturally occurring amino acid
  Transcript Sequence Number=SeqID_45920
  Gene Ontology: Mol. function=zinc ion binding; Cellular component =nucleus; Biological process=transcription initiation
  Homolog annotation: Hit_ID=B9SS21; Match level="QueryCoverage=97%, HitCoverage=21%, E-value=9e-15, Identity=36%"; Hit description =Protein binding protein, putative
MLGRVAGIKKSSKEYKINDTYTNVLLCVTGLWNDVNISELSDEDFVEDECNDLISLVKKGLLERATIAEFEEKVATVHRDIVNHWIERELVILEDXIDRAHMKGWHVEMEELLQRKKLLSTPAERQRRLEEIPEIVPDTEY

SEQ ID NO: 111895 - protein, 149 aa, Setaria italica
  Transcript Sequence Number=SeqID_45921
TILKKEPPKGAAADAVECLKVLEKPPEGAGDQVTDSLIVLNEESSEGDTHQVVDSLNVVHNGEPQIERTEGSEQLLPDSLNLLNKESSEVASKQGDATRESPSEAPEACFSGAILDLHCILKCTILKMIAQLKPLMLTERKVTTPGKLS

SEQ ID NO: 111896 - protein, 77 aa, Setaria italica
  Transcript Sequence Number=SeqID_45922
SYLYYLRVLIILLKASMLFYIERIHLCIMIHNPSLCHIHSPSLSFPISCHLWFAFVSMWLKFYFGRALPTPKGSSSI

SEQ ID NO: 111897 - protein, 81 aa, Setaria italica
  Transcript Sequence Number=SeqID_45923
  Gene Ontology: Mol. function=DNA binding; Cellular component=nucleus; Biological process=transcription initiation
  Homolog annotation: Hit_ID=B9SS21; Match level="QueryCoverage=61%, HitCoverage=9%, E-value=1e-09, Identity=48%"; Hit description =Protein binding protein, putative
  Pfam annotation: Domain name=GYF; Domain location=25-75; Score=5.8; E_ value=0.057; Accession=PF02213.8; Description=GYF domain
MNGVLHPEQCEPVPAAKNAVSPREPLWHYVDPQGDPRGPFALVRLSFWKQSGFFNEDFRVWMTGQNAEQGILLTDAFKMHL

SEQ ID NO: 111898 - protein, 456 aa, Setaria italica
  misc_feature (299)..(299): Xaa can be any naturally occurring amino acid
  Transcript Sequence Number=SeqID_45924
  Gene Ontology: Mol. function=zinc ion binding; Cellular component =nucleus; Biological process=transcription initiation
  Homolog annotation: Hit_ID=B9SS21; Match level="QueryCoverage=60%, HitCoverage=57%, E-value=2e-30, Identity=29%"; Hit description =Protein binding protein, putative
  Pfam annotation: Domain name=Plus-3; Domain location=244-312; Score =13.5; E_value=7.9e-05; Accession=PF03126.10; Description=Plus-3 domain
  Pfam annotation: Domain name=SWIB; Domain location=118-193; Score =15.1; E_value=0.00084; Accession=PF02201.10; Description=SWIBMDM2 domain
  Pfam module annotation: Pfam domain module=Plus-3::SWIB; Domain location=244-312::118-193
YLIEKNADADPDVAKTDHEDAQIGKILFKDYWEVIKDRERLSLVDLEEASALLNIRLNCKGGVNSEKSPDDYHKSDGNILPDNDTNDQTIPSDSKRKQNKVNTSLKNKSNKKTYVGWASEELIEFLSSFGKDTAKPLDEPEIVGVVKGYIKQKNLYQDDKKLCFFCDDKLQPLFTRRKVRCKMIRRFLAVHLTSNAVSDDEISDGSEDDDTPVMKKKPRNSLEPKIAKRVSERSKRCFASLVQNNINLIYLRRTLVVSLLSQPDTFEQKVVGCFVRFKIPFSMDCYKNSPNAFMLGRVXDECNDLISLVKKGLLERATIAEFEEKVATVHRDIVNHWIERELVILERYIDRAHMKGWHVEMEELLQRKKLLSTPAERQRRLEEIPEIVPDTEYEEKETKLEVATSNSSQENRGKRRGRVCFIDVEETSKGAAQQVANPLNDLKEEPPKGASVVGIV

SEQ ID NO: 111899 - protein, 131 aa, Setaria italica
  Transcript Sequence Number=SeqID_45925
  Subcellular localization annotation: CTP_CleavageSite=40; ConfidenceScore=5.31e-01
LLGATMSMLQEVIRSVEPAAASGSGSAGLSSSSGRVLAVVEKSKQATASGAALGTVPLVESIQRLVLSPPSDLELQRAMDVFRGVQERSHQLEQECARLKEALRVHEVGAKILCRGAHGSRHSAGETREPL

SEQ ID NO: 111900 - protein, 64 aa, Setaria italica
  Transcript Sequence Number=SeqID_45926
  Gene Ontology: Mol. function=transcription regulator activity; Cellular component=nucleus; Biological process=transcription
MAPPSRDYWLGFFRGAGDSIFDAIDAAITVAASDHPGALRERRDGIAERLFTALLVTGATAAAG

SEQ ID NO: 111901 - protein, 89 aa, Setaria italica
  Transcript Sequence Number=SeqID_45927
MSRHRRQPSRALPLDFNVDGDDGPAGTKGATSLDGSQNQNPGAGSGGGRRDAGKGQEGNSNKPPPATGSRSSAEGGAGNKSRDDASGGP

SEQ ID NO: 111902 - protein, 166 aa, Setaria italica
  Transcript Sequence Number=SeqID_45928
  Homolog annotation: Hit_ID=B6TIS5; Match level="QueryCoverage=74%, HitCoverage=37%, E-value=3e-23, Identity=55%"; Hit description =Somatic embryogenesis related protein
MEARAEGEKTMTTREPHEASRREREGRDSHGRRPHSSSRSRRDDPSPRRRRDDRRHESDRAHYRSRDEESAKVSDRDQKRNRDAEQRDDPPNAESKSVSDAKNDPSTRRERSPRGTKRFSESREAWRPRPFFQVFNLFSIYKRAQRQWLVLCFKWFDAIAYSVLIL

SEQ ID NO: 111903 - protein, 120 aa, Setaria italica
  misc_feature (47)..(47): Xaa can be any naturally occurring amino acid
  Transcript Sequence Number=SeqID_45929
  Homolog annotation: Hit_ID=B6TIS5; Match level="QueryCoverage=83%, HitCoverage=31%, E-value=7e-34, Identity=74%"; Hit description =Somatic embryogenesis related protein
MHSNELFITMLDYLHLYVQHNERGSAGQGGRRYDRQASGYGRQRDQXGHDRDKQKDAGHSLQGKVEQDDGDSTWRHDGFFQLEEEAPLAKKRPPFQEMKMQDSAATVTDLDSGSRNLISL

SEQ ID NO: 111904 - protein, 152 aa, Setaria italica
  misc_feature (142)..(142): Xaa can be any naturally occurring amino acid
  Transcript Sequence Number=SeqID_45930
  Homolog annotation: Hit_ID=B6TIS5; Match level="QueryCoverage=92%, HitCoverage=42%, E-value=7e-33, Identity=59%"; Hit description =Somatic embryogenesis related protein
MEARAEGEKTMTTREPHEASRREREGRDSHGRRPHSSSRSRRDDPSPRRRRDDRRHESDRAHYRSRDEESAKVSDRDQKRNRDAEQRDDPPNAESKSVSDAKNDPSTRRERSPRGTKRFSESREAWRPRPFFQHNERGSAGXGGRRYDRQAR

SEQ ID NO: 111905 - protein, 295 aa, Setaria italica
  Transcript Sequence Number=SeqID_45931
  Homolog annotation: Hit_ID=B6TIS5; Match level="QueryCoverage=96%, HitCoverage=83%, E-value=1e-112, Identity=75%"; Hit description =Somatic embryogenesis related protein
LFGFICYFRRDEESAKVSDRDQKRNRDAEQRDDPPNAESKSVSDAKNDPSTRRERSPRGTKRFSESREAWRPRPFFQHNERGSAGQGGRRYDRQASGYGRQRDQKEHDRDKQKDAGHSLQGKVEQDDGDSTWRHDGFFQLEEEAPLAKKRPPFQEMKMQDSAATVTDLDSGSRKPDQPGPTSAIREERRNYHPRGFGNHRPFIRPDDRGFRRGFPDHRSEGQRNGYDSRGRFPGRGGMDRDRFINPYGGRGNIYHQTSGDQEEKWKHDLYDQSNRSPPPKTEEEQIAKVEALLAL

SEQ ID NO: 111906 - protein, 365 aa, Setaria italica
  misc_feature (204)..(204): Xaa can be any naturally occurring amino acid
  Transcript Sequence Number=SeqID_45932
  Gene Ontology: Mol. function=prenyltransferase activity; Cellular component=integral to membrane; Biological process=menaquinone biosynthetic process
  Homolog annotation: Hit_ID=B6UA12; Match level="QueryCoverage=100%, HitCoverage=100%, E-value=1e-162, Identity=78%"; Hit description=1,4- dihydroxy-2-naphthoate octaprenyltransferase
  Pfam annotation: Domain name=UbiA; Domain location=72-360; Score =18.8; E_value=7.8e-05; Accession=PF01040.10; Description=UbiA prenyltransferase family
  Subcellular localization annotation: CTP_CleavageSite=43; ConfidenceScore=5.61e-01
MPLAGIALAPFLLVTPLAPSPRRSCVATAAARRPSALRRARCSATAASGEAEEFGELSRATLLWRAAKLPIYSVALVPLTVGSASAYHHAGLFFARRYFTILAAAVLVITWLNLSNDVFDSDTGADKNKKESVVNIIGSRAVTQNAANVSLLLGFVGLFWAFAEAGDARFIFLVMCAIFCGYVYQCPPFRLSYQGLGEPLCFAXFGPLATTAFYFSNSSVNISSGKVVLPLTKTVVASSVLVGLTTTLILFCSHFHQIDGDLAVGKMSPLVRVGTEAGSRIVAVAIAMLYILLAAFAISKALPSACTVLCGLTLPVGKLVVDYVLKNHEDNAKIFMAKYYCVRLHALFGMALASGLVLARNGVLA

SEQ ID NO: 111907 - protein, 69 aa, Setaria italica
  Transcript Sequence Number=SeqID_45933
NGNIIGCGIRNGCVVLIQFLVSCHGLLLTHHVGSSKMPLVILVYRLLTVDYNNRLSLSNTEDTIFYVLW

SEQ ID NO: 111908 - protein, 68 aa, Setaria italica
  Transcript Sequence Number=SeqID_45934
YVLLILFQNLRPEFCFLWFFSFHLHSEGNMHVTVGCFAQSIVSGALTVYNTIKQVSYSNQLSDKVIKR

SEQ ID NO: 111909 - protein, 283 aa, Setaria italica
  Transcript Sequence Number=SeqID_45935
  Gene Ontology: Mol. function=phosphoric diester hydrolase activity; Cellular component=nucleus; Biological process=DNA repair
LGRSINPQFIASFASAAGKRPHQDFDSQESDPEWGCWTAKHELKKPSISLLFPTIDRVKKGACGIQLCRNLLSLPEKTWQRLRSTGIFHDAIPQPYARIGHPMHVKVAQRRFEARPGGHSFGWTYCGSHNFSPAAWGQVLSPPSRANPNEVRAAPPGPRLHVCNYELGIILISPPPGKSKQASESKHRIEGITLPFVVPPPRYKGSDRPATRLAMREAAAEACVLQSNDVVDLSDDTDEDVPDEDDEQEVELSDCSQQEKEEEKIYAETLWGQVDSSQSQEKD

SEQ ID NO: 111910 - protein, 99 aa, Setaria italica
  Transcript Sequence Number=SeqID_45936
GSGICGAAALVVSICLHQNSNGCFHQEVVYARRCVNWFTSRVQVVSMVSYKLLLYHVLQHLYLTHCLRCRYSEFNKCDVHIRSWIEEFVDHVTLYICDI

SEQ ID NO: 111911 - protein, 122 aa, Setaria italica
  misc_feature (107)..(107): Xaa can be any naturally occurring amino acid
  Transcript Sequence Number=SeqID_45937
  Gene Ontology: Mol. function=cation transmembrane transporter activity; Cellular component=integral to membrane; Biological process=cation transport
  Homolog annotation: Hit_ID=Q7XPF7; Match level="QueryCoverage=100%, HitCoverage=24%, E-value=3e-58, Identity=86%"; Hit description =Probable cation transporter HKT7
QDHSTESQGIRFLKSTVYTQLSYLTIFVIAICITERRKLKEDPLNFNVLSIIVEVVSAYGNVGFSMGYSCSRQINPDQLCTDRWTGFAGRWSDSGKLILIIVMFFGXLKKFSMKGGKAWKLS

SEQ ID NO: 111912 - protein, 55 aa, Setaria italica
  Transcript Sequence Number=SeqID_45938
  Subcellular localization annotation: CTP_CleavageSite=45; ConfidenceScore=5.05e-01
RLLKHGINLEIHKISCVIKALKTTISKVSNASSRTKLFAKSSSVLSNQVSEITAD

SEQ ID NO: 111913 - protein, 163 aa, Setaria italica
  Transcript Sequence Number=SeqID_45939
  Gene Ontology: Mol. function=galactosylgalactosylxylosylprotein 3 -beta-glucuronosyltransferase activity; Cellular component=membrane
  Homolog annotation: Hit_ID=Q10N05; Match level="QueryCoverage=89%, HitCoverage=40%, E-value=2e-39, Identity=48%"; Hit description =Glycosyltransferase family 43 protein, expressed
  Pfam annotation: Domain name=Glyco_transf_43; Domain location=1-159; Score=-24.0; E_value=9.1e-08; Accession=PF03360.8; Description =Glycosyltransferase family 43
DSDDAWEEERHHQRNVALAHIEQHRLRGVVIFAGLADVYDIRLLENLRHIRTLGAWAVATVWQQQRRVAVEGPVCVRNTTTAAWFSSSTSSTSDSVHGFAFASHLLWDPARWDRFPTSEPDQSQDSIKFVQRLLVEDYNETIPAGCSSPTIMAWRLVDTTLLL

SEQ ID NO: 111914 - protein, 106 aa, Setaria italica
  misc_feature (26)..(26): Xaa can be any naturally occurring amino acid
  Transcript Sequence Number=SeqID_45940
  Gene Ontology: Mol. function=hydrolase activity
  Homolog annotation: Hit_ID=Q6ABK6; Match level="QueryCoverage=91%, HitCoverage=13%, E-value=6e-44, Identity=92%"; Hit description =Conserved protein, glycosyl hydrolase family
SYSHPPFQVDGNLGLVGAVAEMLLQXSHDGRIRLLPALPPAWEAEGEVIGLRARGGYRVSMQWRDGWVTWFEIVADRGHAEDVIIVVNGREHWIRPDKRRPWSRHL

SEQ ID NO: 111915 - protein, 221 aa, Setaria italica
  Transcript Sequence Number=SeqID_45941
  Homolog annotation: Hit_ID=O04624; Match level="QueryCoverage=54%, HitCoverage=13%, E-value=8e-48, Identity=74%"; Hit description=A _IG002N01.30 protein (Fragment)
  Pfam annotation: Domain name=Peptidase_C12; Domain location=1-104; Score=-59.0; E_value=0.048; Accession=PF01088.13; Description =Ubiquitin carboxyl-terminal hydrolase, family 1
ISPYADFSHLRSGSAEKEKHACGVVHEILSLTVEKRTLVDHLTHFREEFRFSQSLRGMIIRHPDMFYVSFKGDRDSVFLREAYKDSQLVEKNKLVLLKEKMRALVVVPRFPRRGGARTSEEAEGANGAVRLSDEGSDEEYDEDEGLSDMEDFISELSGGKSDGGYQWGDGWFGENDDAPPDFADDDSSPQEVEVTMKNTDGSANGRAAVPVFPDGRPRERW

SEQ ID NO: 111916 - protein, 52 aa, Setaria italica
  Transcript Sequence Number=SeqID_45942
ILFDSKLVGLYIFPDSILKRATVNMAILLANQIHIITMTYSTFPIHKLQLLT

SEQ ID NO: 111917 - protein, 68 aa, Setaria italica
  Transcript Sequence Number=SeqID_45943
HKCSPVHRWIATFPLHNADRTINANMCGAGSLYPTLIFASYKKIIKTRTQDITDAILNNWTALVTRLL

SEQ ID NO: 111918 - protein, 151 aa, Setaria italica
  Transcript Sequence Number=SeqID_45944
  Homolog annotation: Hit_ID=B6TFP8; Match level="QueryCoverage=56%, HitCoverage=52%, E-value=4e-32, Identity=82%"; Hit description =Disease resistance response protein 206
  Pfam annotation: Domain name=Dirigent; Domain location=1-108; Score =41.3; E_value=2e-09; Accession=PF03018.6; Description=Dirigent-like protein
  Subcellular localization annotation: CTP_CleavageSite=55; ConfidenceScore=5.23e-01
TTVIDDALTEDPSSSSAAVGRVQGFYMMTSQSGGAVLTVCANLLLTAGGYNGSTVAVMGRDDIAADVRELAVVGGTGRFRMATGYVLWKTNSMNGPDATVELDVYVTTGGGATIDSSTPVGGSSSAAAVRVGGWVSAVFVAVPVTVVGSYV

SEQ ID NO: 111919 - protein, 137 aa, Setaria italica
  Transcript Sequence Number=SeqID_45945
  Gene Ontology: Mol. function=transferase activity, transferring glycosyl groups; Biological process=metabolic process
  Homolog annotation: Hit_ID=B6U1M8; Match level="QueryCoverage=94%, HitCoverage=27%, E-value=3e-48, Identity=72%"; Hit description =Flavonol-3-O-glycoside-7-O-glucosyltransferase 1
TAAAMVAVHLHRPEVLPDPFVVPGGFPCPLKLRRAQVNEEALAHLPLFRAAEAESCAIAFNTFSALEADFAAYYQSQLVGRRKEVFLVGPTRAAAVSARTAERDPILQWLDGRPAGSVVYVCFGSTCALGESQLREL

SEQ ID NO: 111920 - protein, 117 aa, Setaria italica
  Transcript Sequence Number=SeqID_45946
MDLLIAQITTDLRSSDALRQSSALLQALQQCAAGRDVSALARTAATEILSAPSSAVCKRLALDLLRALPLPPDLLDPLLLSSLSSDLSFPDPDVAASSIASFPSLPSHLLPSLLSSA

SEQ ID NO: 111921 - protein, 133 aa, Setaria italica
  Transcript Sequence Number=SeqID_45947
  Gene Ontology: Mol. function=transporter activity; Cellular component= intracellular; Biological process=transport
  Homolog annotation: Hit_ID=Q2L3A5; Match level="QueryCoverage=93%, HitCoverage=29%, E-value=3e-55, Identity=81%"; Hit description=SEC14 cytosolic factor (Secretion factor 14) family protein (Fragment)
  Pfam annotation: Domain name=CRAL_TRIO_N; Domain location=2-69; Score= 41.6; E_value=3e-09; Accession=PF03765.7; Description=CRALTRIO, N -terminus
VVLRLSVSSEQAVSSFREVLFARGLLPVKHDDYHMMLRFLKARKFDLEKAAQMWADMLHWRKEFGTDTIFEDFEFHELEEVLQYYPHGYHGVDKEGRPVYIELLGKVEPNKLVQITSVERYIKYHVQEFERAF

SEQ ID NO: 111922 - protein, 74 aa, Setaria italica
  Transcript Sequence Number=SeqID_45948
VSLVSIHSSRCRCLSILSVYTPKCSLVTCHFLGAKPFKDYYAAYNIWWPQLPQPCLVVHLECSCCIFGSVGSLF

SEQ ID NO: 111923 - protein, 51 aa, Setaria italica
  Transcript Sequence Number=SeqID_45949
  Gene Ontology: Mol. function=protein binding
  Homolog annotation: Hit_ID=B6TAC3; Match level="QueryCoverage=98%, HitCoverage=12%, E-value=1e-12, Identity=74%"; Hit description=F -box/LRR-repeat protein 2
LLVSLDHCNINLFRLFIADESVVALANGCPHLRSLGLYFCQNITDRAMYSL

SEQ ID NO: 111924 - protein, 65 aa, Setaria italica
  Transcript Sequence Number=SeqID_45950
  Gene Ontology: Mol. function=protein binding
  Homolog annotation: Hit_ID=B6TAC3; Match level="QueryCoverage=90%, HitCoverage=16%, E-value=1e-21, Identity=83%"; Hit description=F -box/LRR-repeat protein 2
HAESGGPLPTLSGWKDLPVELLLRILSTIGDDRMVIVASGVCTGWRDALGWGVTRLSLSCLKTVQ

SEQ ID NO: 111925 - protein, 397 aa, Setaria italica
  Transcript Sequence Number=SeqID_45951
  Gene Ontology: Mol. function=transporter activity; Cellular component= membrane; Biological process=oligopeptide transport
  Homolog annotation: Hit_ID=Q9SZY4; Match level="QueryCoverage=94%, HitCoverage=65%, E-value=1e-117, Identity=55%"; Hit description =Nitrate transporter
  Pfam annotation: Domain name=PTR2; Domain location=2-321; Score =176.4; E_value=8.3e-50; Accession=PF00854.13; Description=POT family
RAAMGLFFNRFFFFISVGTLLAVTILVYVQDHVGRSWAYGICTGAMLVAIAVFLSGTRRYRYKRGSGSPIVQILQVLVAAAQKRSIKQPLTASALYEDRPEHARIPHTAQFPCLDRAAVMAGDDDNEVGRDGRPVPNPWKLCSVSRVEEVKMVARLMPVWATTILFWTIYAQMITFSVEQATTMDRRMGRFEIPAASLTVFFVGAIMLTLAVYDRVFVPLCRSLMTGRQGLTNLEKIGMGLVLSIAGMAAAAICEKKRLAVAATAAGQHESLPISVFMLTPQFLLVGAGEAFIYTGQLDFFITRSPKGMKTMSTGLFLTTLSLGFFLSSALVSLVKGCTTWLGDTINHSRLDYFYWLLAVLSVVNLVAYLVCAMWTTPPASSQAEQPQIAMTADEKC

SEQ ID NO: 111926 - protein, 57 aa, Setaria italica
  Transcript Sequence Number=SeqID_45952
RRLTKLNEGFSAIQKNSRKQSKFHQIQCLSRTDAKIKDDQLEFISKFCLNVGGRRIA

SEQ ID NO: 111927 - protein, 84 aa, Setaria italica
  Transcript Sequence Number=SeqID_45953
  Gene Ontology: Mol. function=nucleic acid binding; Cellular component= nucleus; Biological process=nuclear mRNA splicing, via spliceosome
  Homolog annotation: Hit_ID=Q6YXY3; Match level="QueryCoverage=100%, HitCoverage=7%, E-value=3e-30, Identity=83%"; Hit description =Putative splicing factor 3b, subunit 3, 130kDa
MYLYSLTLQRATGAVCAVIGSFSGRDAKKAASGSASTQEIAVARGSTLDLLRLDPETGRLRTLLSVDVFGAIRSLAQFRLTGAS

SEQ ID NO: 111928 - protein, 84 aa, Setaria italica
  Transcript Sequence Number=SeqID_45954
MPHSSVWPKDHTDECGNGSSQITTCSSGKVPDEGSSPQVSSEVACDENAILKVMEFLALPRADAIQLLMQYNGNAETVIQHIFQ

SEQ ID NO: 111929 - protein, 523 aa, Setaria italica
  misc_feature (476)..(476): Xaa can be any naturally occurring amino acid
  misc_feature (503)..(503): Xaa can be any naturally occurring amino acid
  Transcript Sequence Number=SeqID_45955
TNRLLFHLHKQRFVELVRRGTEADRDAALDCLRTALAPCALDAYPEAYEEFKHIMLVLIYDKDDQFSPVVNEWSIKRRFELAGLLSSILRAQLQAYDPILSMTLRYLISIHKVYCTHQGISSPLSDLTERLLFEDRDPPVVPQECSLEAPPFDEVDVQALAHAVELTRQGAVDSLKFAKGDLYQAFQNELCRMKLDVTLLDKLVHEYCIYRGIVEGGSHVLPGTADLKCSQNNYVNNETQLECEMANNQNGDCSTSDITRDDSWSRRLRRVRSSTSGQRRRKRWRGRVDDLDYACEALLDVNKHDSLSPALDMDEDTVVEQQDLVANSNTSDTKNMEDQKYEVVLEMQDLTRKGMASKVVEEISSIDPDFFQQNPVLLFQLKQVEFLKLVAAGEHVAALKVASTHLGPLAATNQALLKPLKETLVTLIKPNGDVLNAVSLPVLASSLQVAMSRRLGIEEPQLMKIVRAAIHTHTEXWFKLQMCKDRFEHFLKIDSLKEVDPPXGSCSMPKDHTDECGNGILFF

SEQ ID NO: 111930 - protein, 170 aa, Setaria italica
  misc_feature (152)..(152): Xaa can be any naturally occurring amino acid
  Transcript Sequence Number=SeqID_45956
  Gene Ontology: Mol. function=ATPase activity, coupled to transmembrane movement of substances; Cellular component=integral to membrane; Biological process=transport
  Homolog annotation: Hit_ID=Q6YUU5; Match level="QueryCoverage=96%, HitCoverage=64%, E-value=1e-71, Identity=71%"; Hit description =Putative multidrug resistance protein
  Pfam annotation: Domain name=ABC_tran; Domain location=1-130; Score =69.5; E_value=1.2e-17; Accession=PF00005.19; Description=ABC transporter
NQTTNLAGTIRENIVYGTETASEEEIENAARSANAHDFISNLKDGYNTRCGEQGVLLSGGQKQRIAIARAILKNPAILLLDEATSALDSQSEMVVQEALDRMLTGRTSVVVAHRLSTIQNCDMIIVLEKGIVVEKGTHASLLGKVPAGTYLXLVNMQQGSKPHQQLCDSA

SEQ ID NO: 111931 - protein, 147 aa, Setaria italica
  Transcript Sequence Number=SeqID_45957
  Homolog annotation: Hit_ID=Q9ZU10; Match level="QueryCoverage=100%, HitCoverage=73%, E-value=1e-47, Identity=56%"; Hit description =F5F19.22 protein (Fragment)
YCIMCERLSIRERRTTAVLGCLLYLSLIGYKAAVPYFTVFLLINYFASFYIIFRRTSQNLIVLQEQLSFIEEEDIHSLHGTLNTKYTMFKRFQGTMQVAAVAFIMVYMRADDTPDNYWFRVLVREWVQFCYFMYIGWNFRIPEASLL

SEQ ID NO: 111932 - protein, 100 aa, Setaria italica
  Transcript Sequence Number=SeqID_45958
YFIATVSKFTHCASMLSQPETFSITCVKNRKQWNAILGRGRHDVPSAAHACSCRLQIPDSRVESREFLLDSLLLQPPIPSTFACSEIHSWADGLPSPMHP

SEQ ID NO: 111933 - protein, 106 aa, Setaria italica
  Transcript Sequence Number=SeqID_45959
  Subcellular localization annotation: CTP_CleavageSite=63; ConfidenceScore=5.75e-01
ARGSASFSASFFFSFLPCRGRRHPPQSHRHPPIQTPGGTPRQQAATQRRGSRTAPPRLGQGAQAAGARGGSAAAPLPGSAGPPGSTPSACSYPCSRAVKADSASTP

SEQ ID NO: 111934 - protein, 81 aa, Setaria italica
  misc_feature (1)..(1): Xaa can be any naturally occurring amino acid
  Transcript Sequence Number=SeqID_45960
  Gene Ontology: Mol. function=transporter activity; Cellular component= mitochondrial inner membrane; Biological process=transport
  Homolog annotation: Hit_ID=Q10MX0; Match level="QueryCoverage=98%, HitCoverage=24%, E-value=2e-38, Identity=95%"; Hit description =Mitochondrial carrier protein, expressed
  Pfam annotation: Domain name=Mito_carr; Domain location=1-75; Score =71.7; E_value=2.7e-18; Accession=PF00153.19; Description =Mitochondrial carrier protein
XTGPFDVVKTRLMAQGRTGDIKYTGMVHAIRTIYAEEGLRALWKGLLPRLMRIPPGQAIMWAVADQVMGLYERTYLQPAHV

SEQ ID NO: 111935 - protein, 103 aa, Setaria italica
  Transcript Sequence Number=SeqID_45961
  Gene Ontology: Mol. function=electron carrier activity; Biological process=oxidation reduction
  Homolog annotation: Hit_ID=B6TEH7; Match level="QueryCoverage=90%, HitCoverage=18%, E-value=1e-33, Identity=71%"; Hit description =Cytochrome P450 CYP71K14
NKRKPENDRPDEFSPERFEESGRDFRGTDFEFIPFGAGRRMCPGMAFGLAHVELALAALLFHFDWELPGGMAAEELDMTEAFGVTTQLRSDLVVVPRVPVSTG

SEQ ID NO: 111936 - protein, 102 aa, Setaria italica
  Transcript Sequence Number=SeqID_45962
  Gene Ontology: Mol. function=transferase activity, transferring nitrogenous groups; Biological process=biosynthetic process
  Homolog annotation: Hit_ID=B6TFA9; Match level="QueryCoverage=99%, HitCoverage=22%, E-value=1e-24, Identity=59%"; Hit description=8 -amino-7-oxononanoate synthase
AQWDALVDAALARLEARSLLRATRPIALAPPPAAPETFAGPGPWDRAAVEIRFDRDTLHQWLAEGGETGEQEEKLDGNLILFSGNDYMGLSSHPAVREAAVK

SEQ ID NO: 111937 - protein, 65 aa, Setaria italica
  Transcript Sequence Number=SeqID_45963
VKYWSTVNADATYRGVRVVYNYSRNPFTNTPKVVCAITKEAMLLLLCGVCGIFCMKVATDTTKFA

SEQ ID NO: 111938 - protein, 105 aa, Setaria italica
  Transcript Sequence Number=SeqID_45964
  Subcellular localization annotation: CTP_CleavageSite=39; ConfidenceScore=5.04e-01
AGWLAAAPPASGVSDLLFWRSRDPGTTRVLQSELQSPVVIGSRSSFVHQHYQYQRVLVWFRPVIRQVVQLLLGVLVDLLLAWNSSSWPCWVLQCALLVCFSVFAC

SEQ ID NO: 111939 - protein, 171 aa, Setaria italica
  misc_feature (24)..(24): Xaa can be any naturally occurring amino acid
  Transcript Sequence Number=SeqID_45965
  Gene Ontology: Mol. function=mismatched DNA binding; Cellular component=intracellular; Biological process=mismatch repair
  Homolog annotation: Hit_ID=Q1XBQ7; Match level="QueryCoverage=100%, HitCoverage=15%, E-value=8e-82, Identity=88%"; Hit description=DNA mismatch repair protein
CISAAKLVKLLESKEVNHIEFCRXKNVVDEIMLMSRNAELSAILNKLLVPASVVTGLNVEADMLMNECSFISQRIAEVISLGVESDQAITSFEYIPREFFNDMESSWKGRVKRIHAEEEFANVDRAAEALSTAVIEDFMPIISRVKSVMSTNGGPKGEICYAKDHEAVWFK

SEQ ID NO: 111940 - protein, 48 aa, Setaria italica
  Transcript Sequence Number=SeqID_45966
  Gene Ontology: Mol. function=phosphoprotein phosphatase activity; Cellular component=cytoplasm
  Homolog annotation: Hit_ID=B7FIQ3; Match level="QueryCoverage=100%, HitCoverage=21%, E-value=8e-16, Identity=77%"; Hit description =Serine/threonine protein phosphatase
MPSHADLDRQISQLRECKFLAEAEVKALCEQAKAILMEEWNVQPVRCP

SEQ ID NO: 111941 - protein, 58 aa, Setaria italica
  Transcript Sequence Number=SeqID_45967
LSIYFFRARPVVSMQISAIINTSCSIIKISQKENRILNPNFTRKTYIEWSTIQNMRGV

SEQ ID NO: 111942 - protein, 141 aa, Setaria italica
  Transcript Sequence Number=SeqID_45968
  Gene Ontology: Mol. function=phosphoprotein phosphatase activity; Cellular component=cytoplasm; Biological process=negative regulation of tyrosine phosphorylation of Stat3 protein
  Homolog annotation: Hit_ID=O04951; Match level="QueryCoverage=90%, HitCoverage=41%, E-value=4e-70, Identity=96%"; Hit description =Serine/threonine-protein phosphatase PP2A-5 catalytic subunit
VTFTSTCFDYLPLTALIENQVFCLHGGLSPSLDTLDNIRSLDRIQEVPHEGPMCDLLWSDPDDRCGWGISPRGAGYTFGQDIAQQFNHTNGLSLISRAHQLVMEGYNWAQDKNVVTVFSAPNYCYRCGNMAAILENTVKKQ

SEQ ID NO: 111943 - protein, 127 aa, Setaria italica
  misc_feature (93)..(93): Xaa can be any naturally occurring amino acid
  Transcript Sequence Number=SeqID_45969
  Gene Ontology: Mol. function=phosphoprotein phosphatase activity; Cellular component=cytoplasm; Biological process=negative regulation of tyrosine phosphorylation of Stat3 protein
  Homolog annotation: Hit_ID=B7FIQ3; Match level="QueryCoverage=100%, HitCoverage=53%, E-value=2e-54, Identity=81%"; Hit description =Serine/threonine protein phosphatase
MPSHGDLDRQIAQLRDCKYLPEAEVKALCEQAKAILMEEWNVQPVRCPVTVCGDIHGQFYDLIELFRIGGDAPDTNYLFMGDYVVELTMGIFXDRGYYSVETVTLLVALKVRYRDRITILRGNHESR

SEQ ID NO: 111944 - protein, 154 aa, Setaria italica
  Transcript Sequence Number=SeqID_45970
  Gene Ontology: Mol. function=phosphoprotein phosphatase activity; Cellular component=cytoplasm; Biological process=negative regulation of tyrosine phosphorylation of Stat3 protein
  Homolog annotation: Hit_ID=B7FIQ3; Match level="QueryCoverage=83%, HitCoverage=57%, E-value=5e-68, Identity=94%"; Hit description =Serine/threonine protein phosphatase
  Pfam annotation: Domain name=Metallophos; Domain location=34-152; Score=72.2; E_value=1.9e-18; Accession=PF00149.20; Description =Calcineurin-like phosphoesterase
MAVEMAAVVMVAVAMVAVAMANLMEEWNVQPVRCPVTVCGDIHGQFYDLIELFRIGGDAPDTNYLFMGDYVDRGYYSVETVTLLVALKVRYRDRITILRGNHESRQITQVYGFYDECLRKYGNANVWKYFTDLFDYLPLTALIENQVFCLRPKP

SEQ ID NO: 111945 - protein, 306 aa, Setaria italica
  Transcript Sequence Number=SeqID_45971
  Gene Ontology: Mol. function=phosphoprotein phosphatase activity; Cellular component=cytoplasm; Biological process=negative regulation of tyrosine phosphorylation of Stat3 protein
  Homolog annotation: Hit_ID=O04951; Match level="QueryCoverage=99%, HitCoverage=99%, E-value=1e-169, Identity=91%"; Hit description =Serine/threonine-protein phosphatase PP2A-5 catalytic subunit
  Pfam annotation: Domain name=Metallophos; Domain location=47-242; Score=138.7; E_value=1.8e-38; Accession=PF00149.20; Description =Calcineurin-like phosphoesterase
MPSHADLDRQISQLRECKFLAEAEVKALCEQAKAILMEEWNVQPVRCPVTVCGDIHGQFYDLIELFRIGGDAPDTNYLFMGDYVDRGYYSVETVTLLVALKVRYRDRITILRGNHESRQITQVYGFYDECLRKYGNANVWKYFTDLFDYLPLTALIENQVFCLHGGLSPSLDTLDNIRALDRIQEVPHEGPMCDLLWSDPDDRCGWGISPRGAGYTFGQDIAQQFNHTNGLSLISRAHQLVMEGFNWCQDKNVVTVFSAPNYCYRCGNMAAILEIGENMDQNFLQFDPAPRQIEPDMTRKTPDYFL

SEQ ID NO: 111946 - protein, 87 aa, Setaria italica
  Transcript Sequence Number=SeqID_45972
PDGGGAVYGCRGVGPARAYAVDVAGERGDAVTATVVCHGDDGASNGNLEHAASRLLGVGGGVGAAVCYAVPDAQMLLVKSEKVPSSA

SEQ ID NO: 111947 - protein, 189 aa, Setaria italica
  Transcript Sequence Number=SeqID_45973
  Gene Ontology: Mol. function=Rab GTPase activator activity; Cellular component=intracellular; Biological process=regulation of Rab GTPase activity
  Homolog annotation: Hit_ID=A8I108; Match level="QueryCoverage=33%, HitCoverage=17%, E-value=6e-09, Identity=46%"; Hit description =RabGAP/TBC protein
MFGTQIRDVADDFNPSRRRTLWNTPNKSMPTTTHTIRYNTGKKNLFNPHLMSVKFEDLYGFMVEGNVDDVNVLNEVRERIREQGRVWWALEANKGANWYLQPKISSNEGMISVTSLKLSVLTNTITLRRLIRKGVPPVLRPKVWLSVSGAAKKRSTVPETYYDELIRATEGKTTPATRQIDHDLPRTFP

SEQ ID NO: 111948 - protein, 153 aa, Setaria italica
  misc_feature (35)..(35): Xaa can be any naturally occurring amino acid
  Transcript Sequence Number=SeqID_45974
  Gene Ontology: Mol. function=sequence-specific DNA binding; Cellular component=intracellular; Biological process=DNA metabolic process
  Homolog annotation: Hit_ID=Q8GT06; Match level="QueryCoverage=99%, HitCoverage=23%, E-value=5e-56, Identity=71%"; Hit description =Endonuclease-like
NCGLRKLIYLVEGDPNTSNGSVASIKTACFTTEIXEGFDVLRTSGYTDTQRTYGYLTQSIVDYYSTNFSLAKSARICPTYDEFEGKCRDLQKKTVSQIFALQLMQVPQVTEKVALAVVEFYPTLFSLARAYSMLEGDTRAQEEMLKNKSKVIN

SEQ ID NO: 111949 - protein, 283 aa, Setaria italica
  Transcript Sequence Number=SeqID_45975
  Gene Ontology: Mol. function=metal ion binding
  Homolog annotation: Hit_ID=B6SY32; Match level="QueryCoverage=99%, HitCoverage=55%, E-value=6e-98, Identity=65%"; Hit description=C -terminal zinc-finger
SYYGGPGSDPSNLGVQVAVGVPGSTANVGICDLRNHEHQHVHNSYPHAGVASSFVFPTTVYNPSMATAAVSVYVPQTQSFGLGNAQPPSLYHSTGTIDESSSSVNFGDGASGFIKRKNAMVAGNHHFFHGFAGSSSSAHVPQNPAYGPWNASFQSNCFPNSAASNPPEYRSNNGWLFLEGSSADVPSSFSSMAARPELVPHGNYVFPACHMSQCNTWIPQAANGVAHGVPQWGYMNAVANPPGTTDMPSGNIQAGHSSIHGPLPHFCQNSLHTMQVPQIQVNP

SEQ ID NO: 111950 - protein, 310 aa, Setaria italica
  Transcript Sequence Number=SeqID_45976
  Gene Ontology: Mol. function=metal ion binding
  Homolog annotation: Hit_ID=B6SY32; Match level="QueryCoverage=99%, HitCoverage=60%, E-value=1e-149, Identity=81%"; Hit description=C -terminal zinc-finger
  Pfam annotation: Domain name=zf-C3HC4; Domain location=258-298; Score= 38.8; E_value=2.2e-08; Accession=PF00097.17; Description=Zinc finger, C3HC4 type (RING finger)
PRSNNGWLFLEGSSADVPSSFSSMAARPELVPHGNYVFPACHMSQCNTWIPQAANGVAHGVPQWGYMNAVANPPGTTDMPSGNIQAGHSSIHGPLPHFCQNSLHTMQVPQIQVPHQQFLSNNVVHGLNPSAAGLPLDPRMLALPFNSEHTFGHPMHPPLANQVNNGVLRILPYQNATVMDRSRIHEAGHVIDEHRDMRLDVDNMTYEELVALEEQIGDVNTGLTESYIQENLRSTFYVPGAAGVSDQFSELSLENDACIICQDEYEAKELIGILECGHKYHATCIKQWLMMKNLCPICKTTALSSDRRNG

SEQ ID NO: 111951 - protein, 121 aa, Setaria italica
  Transcript Sequence Number=SeqID_45977
  Gene Ontology: Mol. function=lipid binding; Biological process=lipid transport
  Homolog annotation: Hit_ID=B6U968; Match level="QueryCoverage=96%, HitCoverage=79%, E-value=3e-25, Identity=53%"; Hit description=Non -specific lipid-transfer protein
  Pfam annotation: Domain name=Tryp_alpha_amyl; Domain location=33-117; Score=88.5; E_value=2.3e-23; Accession=PF00234.14; Description =Protease inhibitorseed storageLTP f
PQELAMKTISAIAVVLLAALAVQQQLARADIACPDVLNDMEPCLSFLQGGDASPSGQCCAGVRALYAAADTTADRRATCECLKTAYRQVHAQLSAARALPEECGLSLSYPITPDIDCNTIE

SEQ ID NO: 111952 - protein, 109 aa, Setaria italica
  Transcript Sequence Number=SeqID_45978
  Gene Ontology: Mol. function=electron carrier activity; Cellular component=extracellular region; Biological process=response to oxidative stress
  Homolog annotation: Hit_ID=B9V0I2; Match level="QueryCoverage=98%, HitCoverage=32%, E-value=4e-31, Identity=64%"; Hit description =Peroxidase
IPAAFVAELKARCPPGDFNTRLPLDRGSESDFDDSILRNIRSGLAVIASDAALANSNATRALVDAYLGPAAGSFERDFAAAMVRMGSIGAITGDDDGEIRDVCSAFNTN

SEQ ID NO: 111953 - protein, 339 aa, Setaria italica
  Transcript Sequence Number=SeqID_45979
  Gene Ontology: Mol. function=electron carrier activity; Cellular component=extracellular region; Biological process=response to oxidative stress
  Homolog annotation: Hit_ID=B9V0I2; Match level="QueryCoverage=90%, HitCoverage=92%, E-value=1e-142, Identity=80%"; Hit description =Peroxidase
  Pfam annotation: Domain name=peroxidase; Domain location=52-298; Score=335.5; E_value=1.1e-97; Accession=PF00141.15; Description =Peroxidase
MARRCSRSNGTNVTGLGLAMVASWLLLLAGVSDGQLQVGFYSRTCPGAESTVASVVRQSGSADPTILPALLRLQFHDCFVRGCDGSVLIKGGSGSAEVDNSKHQGLRGLEIIEGAKTQLEAQCPGVVSCADIVALAARDAVAFTGGPSFDVPTGRRDGKVSNIRDADALPDVHDGIDALRSKFRANGLDEKDLVLLTAAHTVGTTACFFLQDRLYNTPLPGGGRGADPTIPPGFLSELKSRCAPGDFNTRLPLDRGSGNVFDTSILRNIRNGFAVIGSDAALYNDTATVDVVDSYSGLLSNFFGPYFRQDFADAMVRMGSIGVVTGGAGEVRKVCSKFN

SEQ ID NO: 111954 - protein, 197 aa, Setaria italica
  Transcript Sequence Number=SeqID_45980
  Gene Ontology: Mol. function=electron carrier activity; Biological process=oxidation reduction
  Homolog annotation: Hit_ID=Q6DV71; Match level="QueryCoverage=96%, HitCoverage=37%, E-value=4e-90, Identity=83%"; Hit description =Cytochrome P450 CYP709C1
MDKLKMMTETMSTCARSMMSEWEAQLAKAGGVEIELSRQFEELTADVISHTAFGSSYVQGKKVFLAQRELQFLAFSTVFDVQIPVLRYLPTEKNRRTWKLDKQVRGMLMDIIKSRLATKDTAGYGNDLLGLMLEACAPEHGETPALSMDEIIDECKTFFFAGHDTTSHLLTWATFLLSTHPEWQDRLREEVPENATG

SEQ ID NO: 111955 - protein, 175 aa, Setaria italica
  Transcript Sequence Number=SeqID_45981
  Gene Ontology: Cellular component=exocyst; Biological process =exocytosis
  Homolog annotation: Hit_ID=Q6Z5V6; Match level="QueryCoverage=97%, HitCoverage=23%, E-value=3e-27, Identity=42%"; Hit description =Putative leucine zipper-containing protein
  Pfam annotation: Domain name=Exo70; Domain location=1-172; Score= -113.0; E_value=0.042; Accession=PF03081.7; Description=Exo70 exocyst complex subunit
YSSRKAVQDGGGITSLTGYLMRYIRLLVKHRSSLDTILGHGHWDDLLTVKGTNSTGRLVFGLIDDLDTVLEKQSMLLSSKELQCLFLMNNTHFMLQEIKQSDVQLIVGSRWIGKRQYRIKEYMKGYLSAAWGPVTLNLETTKSTSPRKRLRANVLSFLYASPTPLQNFAWSFNET

SEQ ID NO: 111956 - protein, 403 aa, Setaria italica
  misc_feature (162)..(162): Xaa can be any naturally occurring amino acid
  Transcript Sequence Number=SeqID_45982
  Gene Ontology: Mol. function=ARF GTPase activator activity; Cellular component=Golgi apparatus; Biological process=regulation of ARF GTPase activity
  Homolog annotation: Hit_ID=B6TII3; Match level="QueryCoverage=100%, HitCoverage=100%, E-value=0.0, Identity=84%"; Hit description=ADP -ribosylation factor GTPase-activating protein 3
  Pfam annotation: Domain name=ArfGap; Domain location=11-127; Score =186.6; E_value=6.8e-53; Accession=PF01412.10; Description=Putative GTPase activating protein for Arf
MAATEASADKNAVFRKLRAKSDNKMCFDCYAKNPTWASVTYGVFLCIDCSAVHRSLGVHVSFVRSTNLDSWTPEQLKMMVYGGNHRAQAFFKQHGWTDGGKIEAKYTSRAADLYRQLLAKEVAKSSTEDGNNSWPSSPVSAPQGPNQTAAFPDLKPTEASKXNASEKTEPVRSPRAPTHSFKKPIGAKKPGNKTGGLGARKLTSKPNESLYEQKPEEPAPVLPSVTESTTTRSKSYTSRFEYVENAPASRTGSSSGDNQMSGHVAPPKSSNFFAEFGMDSGYNKKSSSSSKVQVEESSEAREKFSNAKSISSSQFFGDQASFEKEAQVSLQKFSGSSSISSADLFGHPANNSSVDLSASDLINRISFQATQDLSSLKNMAGETGKKLTSMASNIITDLQDRIL

SEQ ID NO: 111957 - protein, 60 aa, Setaria italica
  Transcript Sequence Number=SeqID_45983
TYMITFGLFPIVNNIVSLPPNVSYMFFFLLAQLGGNIQVDILLVKVEFCKTKLNLSKVTS

SEQ ID NO: 111958 - protein, 66 aa, Setaria italica
  Transcript Sequence Number=SeqID_45984
  Gene Ontology: Mol. function=metal ion binding; Biological process =metal ion transport
  Subcellular localization annotation: CTP_CleavageSite=31; ConfidenceScore=5.38e-01
VSYPPYIALDPSFYSRPSGQTSSSVPSREPTANRGSKSPPRNDIGNEELDQRQNKPRRYSEMNFSQ

SEQ ID NO: 111959 - protein, 572 aa, Setaria italica
  Transcript Sequence Number=SeqID_45985
  Gene Ontology: Mol. function=metal ion binding; Biological process =metal ion transport
  Homolog annotation: Hit_ID=Q9S770; Match level="QueryCoverage=84%, HitCoverage=64%, E-value=6e-22, Identity=37%"; Hit description =F18B13.8 protein
  Pfam annotation: Domain name=Btz; Domain location=6-119; Score=119.7; E_value=9.6e-33; Accession=PF09405.2; Description=CASC3Barentsz eIF4AIII binding
EGRAAPPTEDGGGGGQESRGEDGVAGEEGLAEGEAKGEGEEKEQEPFAVPTSGAFYMHDDRFQEENRGRRRRMFGGRKLWDAKDDQAWVHDRFEEMNLQDDRYEDQRMSRGRFRGRGGRGKARGGGRGFPRGGKNRSYQEDGNTQNRPPKVVRGRGPRRYEAVARNSREVVGSQRKQAARFREPAPNTAAARDSGQVSHTQPEAAPPKKNVINSSLNSASPPFYPSGASNQDFPVAAQRRDIQTGGSNKVLPSSMKMDDNSKLQSGPMVRGRTTMDYGGRDRFHADGPVRSSPGRAPTTSLNSGFTSSSVNPGQSPVVRASGGSSNTGVSSNNQSTSSFHQMQRISTQMQSHAPVLHPKSGQVPNQSAARIPPQPLNHRTNNLSPAQHQPVKSTESGENGSYPSQNNSKAPSAVVKANNHETGMGSFMYGGAQVIGAAGLSQGDQNFPGTPALLPVMQFGGQHPGGPGVPTIGMALPGYVAQQQMGMGNNEMTWLPLLAGAAGAFGGSYPPYIALDPSFYSRPSGQTSSSVPSREPTANRGSKSPPRNDIGNEELDQRQNKPRRYSEMNFSQ

SEQ ID NO: 111960 - protein, 83 aa, Setaria italica
  Transcript Sequence Number=SeqID_45986
  Gene Ontology: Cellular component=chloroplast
  Homolog annotation: Hit_ID=B9SW54; Match level="QueryCoverage=100%, HitCoverage=16%, E-value=1e-09, Identity=36%"; Hit description =Pentatricopeptide repeat-containing protein, putative
  Pfam annotation: Domain name=PPR; Domain location=1-33; Score=0.9; E _value=6.9; Accession=PF01535.12; Description=PPR repeat
  Pfam annotation: Domain name=PPR; Domain location=34-67; Score=19.1; E_value=0.018; Accession=PF01535.12; Description=PPR repeat
  Pfam module annotation: Pfam domain module=PPR::PPR; Domain location =1-33::34-67
TCNILIKKLCAGRRLADAERVLAVLRASGAADSVSHNTLVAGYCRDGRLADAERVLETAKASGASNVVTYTALIDGYCRSGRL

SEQ ID NO: 111961 - protein, 300 aa, Setaria italica
  misc_feature (28)..(28): Xaa can be any naturally occurring amino acid
  misc_feature (40)..(40): Xaa can be any naturally occurring amino acid
  Transcript Sequence Number=SeqID_45987
  Gene Ontology: Mol. function=mannosyl-oligosaccharide 1,2-alpha -mannosidase activity; Cellular component=membrane; Biological process=metabolic process
  Homolog annotation: Hit_ID=B9S090; Match level="QueryCoverage=99%, HitCoverage=52%, E-value=1e-128, Identity=72%"; Hit description =Mannosyl-oligosaccharide alpha-1,2-mannosidase, putative
  Pfam annotation: Domain name=Glyco_hydro_47; Domain location=1-266; Score=90.3; E_value=7e-24; Accession=PF01532.12; Description =Glycosyl hydrolase family 47
VENVIRQFQKIFPSDGLLPININPHSGXVKSYSTITFGAXGDSFYEYLLKVWIQSYETESVKHYRQMWETSMEGLLSLTRKTSPSNFYYVCEKNGDSLSEKMDELACFVPGMLALGASGYSPEKAEQIMNLAEELAWTCYNFYQSTPTKLAGENYYFHGGQDMVVGTSWNILRPETIESLMYLWRLTGNKTYQDLGWDIFQAFEKNSRIESGYVGLKDVNTGTKDDMMQSFFLAETLKYLYLLFSPPSLISFDEWVFNTEAHPLKIVTRHDNEGGSGGGEGKGIADSKIQPQGRKHGKPE

SEQ ID NO: 111962 - protein, 540 aa, Setaria italica
  misc_feature (343)..(343): Xaa can be any naturally occurring amino acid
  misc_feature (363)..(363): Xaa can be any naturally occurring amino acid
  Transcript Sequence Number=SeqID_45988
  Gene Ontology: Mol. function=mannosyl-oligosaccharide 1,2-alpha -mannosidase activity; Cellular component=membrane; Biological process=metabolic process
  Homolog annotation: Hit_ID=B9S090; Match level="QueryCoverage=95%, HitCoverage=89%, E-value=0.0, Identity=73%"; Hit description =Mannosyl-oligosaccharide alpha-1,2-mannosidase, putative
  Pfam annotation: Domain name=Glyco_hydro_47; Domain location=71-508; Score=644.8; E_value=8.3e-191; Accession=PF01532.12; Description =Glycosyl hydrolase family 47
ATIAARDRLSLVRDYEAEISRLDEEVNRLHDQLRMAGIYLDESPNIENIIKKHHLEIDHVNNARREKVKEAMLHAWNSYVKYAWGHDELQPQSKNGVNSFGGLGATLVDSLDTLYIMGLKEEFKKARDWVAESLDFDKDYEASVFETTIRVVGGLLSAYDLSADKIFLEKARDITDRLLPAWDTSSGIPYNRINLAQGKASNPGWNGGNSILADSGTEQLEFIALSQRTGDQKYQQKVENVIRQFQKIFPSDGLLPININPHSGAVKSYSTITFGAMGDSFYEYLLKVWIQGNKTESVKHYRQMWEASMEGLLSLTRKTSPSNFYYVCEKNGDSLSEKPITRXMDELACFVPGMLALGASGYXQKKAEQIMNLSEELAWTCYNFYQSTPTKLAGENYYFHGGQDMVVGTSWNILRPETIESLMYLWRLTGNKTYQDWGWDIFQAFEKNSRIESGYVGLKDVNTGTKDDMMQSFFLAETLKYLYLLFSPPSLISFDEWVFNTEAHPLKIVTRHDNEGGSGGGEGLLLSPSDLDLHDKGNPL

SEQ ID NO: 111963 - protein, 44 aa, Setaria italica
  Transcript Sequence Number=SeqID_45989
GCLEKLFPDELKFVSGAYHSSLRPVVIIFKSHNRFDHHGTLMLS

SEQ ID NO: 111964 - protein, 389 aa, Setaria italica
  misc_feature (306)..(306): Xaa can be any naturally occurring amino acid
  misc_feature (347)..(347): Xaa can be any naturally occurring amino acid
  Transcript Sequence Number=SeqID_45990
  Gene Ontology: Mol. function=serine-type endopeptidase activity; Biological process=negative regulation of catalytic activity
  Homolog annotation: Hit_ID=B6SWF4; Match level="QueryCoverage=99%, HitCoverage=52%, E-value=7e-91, Identity=48%"; Hit description =Subtilisin-like protease
  Pfam annotation: Domain name=PA; Domain location=38-130; Score=32.0; E_value=2.3e-06; Accession=PF02225.14; Description=PA domain
  Pfam annotation: Domain name=Peptidase_S8; Domain location=78-256; Score=-87.9; E_value=0.052; Accession=PF00082.14; Description =Subtilase family
  Pfam module annotation: Pfam domain module=PA::Peptidase_S8; Domain location=38-130::78-256
EAPWMLTVAAGSVDRSFRATVRLGDGEMFEGESLTQDKHFSSMVYPLYYSQGMNYCDFFDVNITGMMVVCDTETPVPPMSSIQAVREAGGVGIVFINEPDFGYTIVLEKYYDLPMSQVTAVDGTKIMGYAMKGSSTSNHTATIVFNSTVVGVKPAPIVAAFSSRGPSVASPGVLKPDIMAPGLNILAAWPSEVPVAGPGSYSFNVISGTSMATPHVTGIVALVKKAHPDWSPAAIKSAIMTTSSAVDNDGHKIMDEEHREASFYAVGAGHVVPTRAVDPGLVYDLGVRDYAGYVCKLLGEAALKTXAGNASLTCTEIEPIGAAELNYPAILVPLRAEPFAVNRTVTXNVGPAKSNYTAKIEAPKGLSIKVEPAELEFTEVKERKTFTVT

SEQ ID NO: 111965 - protein, 397 aa, Setaria italica
  Transcript Sequence Number=SeqID_45991
  Gene Ontology: Mol. function=cysteine-type endopeptidase activity; Cellular component=vacuole; Biological process=proteolysis
  Homolog annotation: Hit_ID=B4ESE3; Match level="QueryCoverage=99%, HitCoverage=84%, E-value=1e-159, Identity=69%"; Hit description =Legumain
  Pfam annotation: Domain name=Peptidase_C13; Domain location=1-245; Score=483.1; E_value=3.7e-142; Accession=PF01650.10; Description =Peptidase C13 family
GGTTKERRTIIVFMYDDIASSPDNPRPGVIINHPSGGDVYAGVPKDYTGEDVTVNNFLAVLLGNRSAVSGGSGKVVASGPGDHVFVYYSDHGGPGVLGMPSGDYLYAKDLVGALERKHDAGGYRSLVFYLEACESGSIFEGLLPEGINVYATTAANAEESSWGTYCPGDDQGPPPEFDTCLGDLYSVAWMEDSDVHNLRTESLKQQYEVVKDRTSAHGTYSLGSHVMQYGDQSLNGQSLYQFIGTDPANDNATFGRDNSLRRRSSGTVNQRDADLVYFWQKYKKSAEGTPEKAEARKRLLQVMSRRSRVDSSMELIGSLLFGSDEGPKVLGAVRPAGQPLADDWDCLKAMVHAYEAQCGPLKQYGMKHMRSFANICNAGVGEDAMAKVASQACAAAR

SEQ ID NO: 111966 - protein, 118 aa, Setaria italica
  Transcript Sequence Number=SeqID_45992
  Gene Ontology: Mol. function=transferase activity
  Homolog annotation: Hit_ID=Q6A741; Match level="QueryCoverage=99%, HitCoverage=10%, E-value=1e-58, Identity=97%"; Hit description =Putative glycosyl transferase
VSDEKYSAETGPGESHQCDRSDAPRTAEGLTDWTILVIPSTRIDPEDWAWAHEQRKPVDPDITVDQVAAILLVHQAAGWLPRALNALRRSGERAAVQIAVDLGSTDGSSDLLVAAVER

SEQ ID NO: 111967 - protein, 66 aa, Setaria italica
  Transcript Sequence Number=SeqID_45993
  Gene Ontology: Mol. function=structural constituent of ribosome; Cellular component=ribonucleoprotein complex; Biological process =translation
  Homolog annotation: Hit_ID=B9SVH0; Match level="QueryCoverage=46%, HitCoverage=10%, E-value=1e-09, Identity=93%"; Hit description=40S ribosomal protein sa, putative
RPYGQRAVLKFAQYTGAHAIAGRHTPGTIINLGKTWEKLQLAARVIVAIREPLRTFIVQSARPYGQ

SEQ ID NO: 111968 - protein, 72 aa, Setaria italica
  Transcript Sequence Number=SeqID_45994
  Gene Ontology: Mol. function=structural constituent of ribosome; Cellular component=ribonucleoprotein complex; Biological process =translation
  Homolog annotation: Hit_ID=Q8H173; Match level="QueryCoverage=61%, HitCoverage=15%, E-value=3e-17, Identity=90%"; Hit description=40S ribosomal protein Sa-2
TFTNQLQTSFSEPRLLILTDPRSVPAIAGRHTPGTFTNQLQTSFSEPRLLILTDPRTDHQPIKESAIVGMFP

SEQ ID NO: 111969 - protein, 92 aa, Setaria italica
  Transcript Sequence Number=SeqID_45995
  Subcellular localization annotation: CTP_CleavageSite=67; ConfidenceScore=5.18e-01
LLFYPQLGVGVATGAAPCSHPGAAAAGGGAAAASQTPSVGGAAIQKNDSSTCKATITDQTTGKQLTMSTSVNKIDNRLNEGILHSNITHWPS

SEQ ID NO: 111970 - protein, 166 aa, Setaria italica
  misc_feature (106)..(106): Xaa can be any naturally occurring amino acid
  Transcript Sequence Number=SeqID_45996
AAEDTSRSEGLCLLPALSGGWAAGSHPVGATAGGTAPSTGGGGAPAGSQPSPVGTGAAKKNVITSCYHNKLIRATQGIEQGVGYIVSISTQLDFCMSSIPKMIKFXQYIPAAAPTQHQCHQQQQAEPHQRSTGRKPKPQTSSGAVPPAVAPTGWDPAAQPPAQGWE

SEQ ID NO: 111971 - protein, 128 aa, Setaria italica
  misc_feature (20)..(20): Xaa can be any naturally occurring amino acid
  Transcript Sequence Number=SeqID_45997
  Gene Ontology: Mol. function=structural constituent of ribosome; Cellular component=ribonucleoprotein complex; Biological process =translation
  Homolog annotation: Hit_ID=B4G194; Match level="QueryCoverage=82%, HitCoverage=32%, E-value=5e-22, Identity=53%"; Hit description=40S ribosomal protein SA
GIPANNKGKQSIGCLFWLLXRMVLQMRGTILPGHKWEVMVDLFFYRDPEEAKELEEEEAPVAPDYAAVADYGAPAADTWATEQWGATEAQPGALPAAPVGAEWGTAFFPTSGSWSGSWRRDSSSRIPS

SEQ ID NO: 111972 - protein, 309 aa, Setaria italica
  misc_feature (274)..(274): Xaa can be any naturally occurring amino acid
  Transcript Sequence Number=SeqID_45998
  Gene Ontology: Mol. function=structural constituent of ribosome; Cellular component=ribonucleoprotein complex; Biological process =translation
  Homolog annotation: Hit_ID=B4G194; Match level="QueryCoverage=64%, HitCoverage=64%, E-value=1e-113, Identity=97%"; Hit description=40S ribosomal protein SA
  Pfam annotation: Domain name=Ribosomal_S2; Domain location=23-191; Score=332.3; E_value=9.3e-97; Accession=PF00318.12; Description =Ribosomal protein S2
MATAAAGGAPRALSQKEQDIQMMLAADVHLGTKNCDFQMERYVFKRRTDGIFIINLGKTWEKLQLAARVIVAIENPQDIIVQSARPYGQRAVLKFAQYTGAHAIAGRHTPGTFTNQLQTSFSEPRLLILTDPRTDHQPIKESALGNIPTIAFCDTDSPMRYVDIGIPANNKGKQSIGCLFWLLARMVLQMRGTILPGHKWEVMVDLFFYRDPEEAKELEEEEAPVAPDYAAVADYGAPAADTWATEQWGATEAQPGALPAAPVGAEWGAAPAPXGADGWDPAAAVPPPAAAPAATGWEEGSAPAPTGWQ

SEQ ID NO: 111973 - protein, 307 aa, Setaria italica
  misc_feature (168)..(168): Xaa can be any naturally occurring amino acid
  Transcript Sequence Number=SeqID_45999
  Gene Ontology: Mol. function=structural constituent of ribosome; Cellular component=ribonucleoprotein complex; Biological process =translation
  Homolog annotation: Hit_ID=B6TIC4; Match level="QueryCoverage=73%, HitCoverage=72%, E-value=1e-117, Identity=92%"; Hit description=40S ribosomal protein SA
  Pfam annotation: Domain name=Ribosomal_S2; Domain location=23-192; Score=327.1; E_value=3.6e-95; Accession=PF00318.12; Description =Ribosomal protein S2
MAAAPAGGAARALSQKELDIQMMLAADVHLGTKNCDFQMERYVFKRRTDGIYIINLGKTWEKLQLAARVIVAIENPQDIIVQSARPYGQRAVLKFAQYTGAHAIAGRHTPGTFTNQLQTSFSEPRLLILTDPRTDHQPIKESALGNIPTIAFCDTDSPMRYVDIGIPXANNKGKQSIGCLFWLLARMVLQMRGTILPGHKWDIMVDLFFYRDPEEAKEQEEEEALVAPDYGAVAEYTAPGTDNWGGDWGAGDAAAPPAAIPAPTGADWTAAPAPPTDGVWDAAAAPTACSRRPWMGTRRCPCRDTHS

SEQ ID NO: 111974 - protein, 313 aa, Setaria italica
  misc_feature (195)..(195): Xaa can be any naturally occurring amino acid
  misc_feature (264)..(264): Xaa can be any naturally occurring amino acid
  misc_feature (283)..(283): Xaa can be any naturally occurring amino acid
  misc_feature (309)..(309): Xaa can be any naturally occurring amino acid
  Transcript Sequence Number=SeqID_46000
  Gene Ontology: Mol. function=structural constituent of ribosome; Cellular component=ribonucleoprotein complex; Biological process =translation
  Homolog annotation: Hit_ID=B4G194; Match level="QueryCoverage=96%, HitCoverage=96%, E-value=1e-125, Identity=77%"; Hit description=40S ribosomal protein SA
  Pfam annotation: Domain name=Ribosomal_S2; Domain location=23-191; Score=333.8; E_value=3.3e-97; Accession=PF00318.12; Description =Ribosomal protein S2
MAAAGGGGAPRALSQKETDIQMMLAADVHLGTKNCDFQMERYVFKRRTDGIYIINLGKTWEKLQLAARVIVAIENPQDIIVQSARPYGQRAVLKFAQYTGAHAIAGRHTPGTFTNQLQTSFSEPRLLILTDPRTDHQPIKESALGNIPTIAFCDTDSPMRYVDIGIPANNKGRNSIGCLFWLLARMVLQMRGTIXPLGHKWEVMVDLFFYRDPEEAKEEEEAAAAPEFAAITDYQAPEQWGGDQWTSDVAQPVAVGGTGAEWGXAAAAPVPTGDGWDPAGASXLPPVEGAVPPAVAPTGWDPAAQPPAXQGWE

SEQ ID NO: 111975 - protein, 537 aa, Setaria italica
  Transcript Sequence Number=SeqID_46001
  Gene Ontology: Mol. function=voltage-gated chloride channel activity; Cellular component=integral to membrane; Biological process=chloride transport
  Homolog annotation: Hit_ID=Q2VBU9; Match level="QueryCoverage=97%, HitCoverage=63%, E-value=1e-166, Identity=55%"; Hit description =Chloride channel-like protein Osclc
  Pfam annotation: Domain name=CBS; Domain location=331-500; Score =35.8; E_value=1.7e-07; Accession=PF00571.20; Description=CBS domain
  Pfam annotation: Domain name=Voltage_CLC; Domain location=1-298; Score=-17.6; E_value=5.9e-08; Accession=PF00654.12; Description =Voltage gated chloride channel
  Pfam module annotation: Pfam domain module=CBS::Voltage_CLC; Domain location=331-500::1-298
VFALESLSSWWRSALIWRSFFTTAVVAVVLRLFIELCGSGRCGMFGQGGLIMYGVSTMFDDLITYHLKDIPIVILIGVAGALLGGLYNFLMMKVLRVYNMINEGGRAHKLLMAATVSILTSCCLFGLPWLAPCRPCPTRSPPSPDGTCHALNRFRRFHCPPGHYNDLASLFLNINDDAIRNLYSTGTNDVYHTGSMITFFVASYALGVLSYGVVAPSGLFVPIILTGATYGRLVAMLLDGHSGLDHGLVAILGSASFLGGTLRMTVSVCVIILELTNNLLLLPLVMLVLLISKTVADSFNSSIYDLILQLKGLPHLDGHAEPYMRQLTVGDVVAGPLRSFNGVEKVGNIVHILRTTGHNAFPVVDEPPFSPAPVLYGLVLRAHLLVLLKKREFLRAQELRYPKEYVAGRFQAEDFDKRGSGKQDTIGAVQLSPEEMEMYVDLHPFTNTSPYTVVETMSLAKALVLFREVGLRHLLVVPKACDRSPVVGILTRHDFMPEHILGLHPVLLGSRWKRLRWQKGAVAKYFRSLLVWIANSS

SEQ ID NO: 111976 - protein, 167 aa, Setaria italica
  misc_feature (26)..(26): Xaa can be any naturally occurring amino acid
  misc_feature (43)..(43): Xaa can be any naturally occurring amino acid
  misc_feature (89)..(89): Xaa can be any naturally occurring amino acid
  misc_feature (142)..(142): Xaa can be any naturally occurring amino acid
  Transcript Sequence Number=SeqID_46002
  Gene Ontology: Mol. function=electron carrier activity; Cellular component=chloroplast; Biological process=protein amino acid phosphorylation
  Homolog annotation: Hit_ID=B6SS49; Match level="QueryCoverage=100%, HitCoverage=38%, E-value=2e-69, Identity=74%"; Hit description =Protein kinase
MVCREVLVMEFVKGTPIMNLGNEMAXKRGVDPGSKIAAMAKQXPHPGNILICKDTEVALLDYGQVKEMPDDLRLAYANLVVAMADDDFXRAEEGFRELGIKTRTIADNKLEELFQLSLRMFDTRLPPGVTVMSPFADDSSLXKNWSWRAFPGKSLFSVLRTIQLCEG

SEQ ID NO: 111977 - protein, 405 aa, Setaria italica
  Transcript Sequence Number=SeqID_46003
  Gene Ontology: Mol. function=hydrolase activity, acting on carbon -nitrogen (but not peptide) bonds; Cellular component=cytosol
  Homolog annotation: Hit_ID=B6TJL6; Match level="QueryCoverage=100%, HitCoverage=86%, E-value=0.0, Identity=95%"; Hit description =Amidohydrolase family protein
  Pfam annotation: Domain name=Amidohydro_1; Domain location=1-330; Score=202.8; E_value=9.3e-58; Accession=PF01979.12; Description =Amidohydrolase family
  Pfam annotation: Domain name=Amidohydro_3; Domain location=1-328; Score=-57.6; E_value=0.00086; Accession=PF07969.3; Description =Amidohydrolase family
  Pfam module annotation: Pfam domain module=Amidohydro_1::Amidohydro _3; Domain location=1-330::1-328
IVLPGLVNTHVHTSQQLARGIADDVDLMTWLHGRIWPYESHMTEEDSYASTLLCGIELIRSGVTCFAEAGGQFVSEMARAVELLGLRACLTKSTMDCGEGLPPNWSSCSTDDCIQSQKELYKKHHNTADGHIRIWFGLRQIMNATDRLLLETRDVALKLNTGIHMHIAEIPYENQLIVRTKGIDHGTVTYLEKIDFLRSNLLAAHSVWLNEPEIGHFSKAGVKVSHCPASAMRMLGFAPIREMLDSGVCVSLGTDGAPSNNRMSIVDEMYLASLINKGREAYISGTTNPTALPAETVLEMATINGAKAVLWDNEIGSLEVGKKADLVVVNPFIWSMVPLHDSIANIIYCMRTENIESVMCNGQWIMKDHKIMSLNEEEVISSAVKRANDLLERAGINLPKRMNYV

SEQ ID NO: 111978 - protein, 130 aa, Setaria italica
  Transcript Sequence Number=SeqID_46004
  Gene Ontology: Mol. function=binding; Biological process=methylation
  Homolog annotation: Hit_ID=B9SVS3; Match level="QueryCoverage=82%, HitCoverage=14%, E-value=1e-24, Identity=44%"; Hit description =Pentatricopeptide repeat-containing protein, putative
TDSVTFLGALVSCICEGHVGLGRSYFTLMTDEYSIVPRMEHYECMIELLGKHGYMVELEDFVDHMPFEPTTAMWLRIFDCCREYGNKKLGERAAQRINESKPLTPVRFVEPSPDYECSGSDDVDDSMSFC

SEQ ID NO: 111979 - protein, 96 aa, Setaria italica
  Transcript Sequence Number=SeqID_46005
CKLKASLELNGFRQTCPNSKNQTEGGYWQLCGPKTEKQVFKHFGITWVGTNCVENVDIVCAPPAYQKPNSLIVLRQRTNCLKYFCYHKGGYWFSGS

SEQ ID NO: 111980 - protein, 61 aa, Setaria italica
  Transcript Sequence Number=SeqID_46006
  Gene Ontology: Mol. function=hydrolase activity; Biological process =metabolic process
  Homolog annotation: Hit_ID=Q94I53; Match level="QueryCoverage=80%, HitCoverage=12%, E-value=1e-22, Identity=97%"; Hit description =Putative hydrolase
RFDCDGVLVDTEKDGHRISFNETFAERELGFSWDVELYGELLKIGGGKERWWKGIEIEDFH

SEQ ID NO: 111981 - protein, 280 aa, Setaria italica
  Transcript Sequence Number=SeqID_46007
  Gene Ontology: Mol. function=hydrolase activity; Biological process =metabolic process
  Homolog annotation: Hit_ID=B4FF48; Match level="QueryCoverage=94%, HitCoverage=86%, E-value=1e-127, Identity=84%"; Hit description =Protein cbbY
  Pfam annotation: Domain name=Hydrolase; Domain location=37-240; Score= 93.9; E_value=5.4e-25; Accession=PF00702.18; Description=haloacid dehalogenase-like hydrolase
RSSALLLAASAPGGERRAAVICAAAASDGGAPASALPAALLFDCDGVLVDTEKDGHRISFNETFAERELGFSWDVELYGELLKIGGGKERMTAYFNKTGWPAKAPKTDEERKEFIASLHKRKTELFMALIEKKLLPLRPGVQRLIDEALGKGIKVAVCSTSNEKAVSAIVSCLLGPDKAEKITIFAGDVVPRKKPDPAIYILAATTLGVDPSSCVVVEDSNIGLAAAKAAGMKCIVTKSGYTAEEDFATADAVFDCIGDPPEVRFDLNFCTDLLQEQYVS

SEQ ID NO: 111982 - protein, 190 aa, Setaria italica
  Transcript Sequence Number=SeqID_46008
  Gene Ontology: Mol. function=mismatched DNA binding; Cellular component=MutSalpha complex; Biological process=response to DNA damage stimulus
  Homolog annotation: Hit_ID=Q9XGC9; Match level="QueryCoverage=99%, HitCoverage=20%, E-value=1e-96, Identity=86%"; Hit description=DNA mismatch repair protein MSH2
  Pfam annotation: Domain name=MutS_V; Domain location=1-110; Score= -13.7; E_value=6.7e-14; Accession=PF00488.13; Description=MutS domain V
TYDGFGLAWAICEHLVEVTRAPTLFATHFHELTALAQRNDDEHQQVSDIGISNYHVGAHIDPSSRKLTMLYKVEPGACDQSFGIHVAEFANFPEAVIALAKSQAAELEDFSTTPTFSDDSIDEVGSKRKRVFSPDDVTRGAARAQLFLEELAALPIDEMDQSKAMEMAAKLKVDMQKDAAGNPWLQQLLR

SEQ ID NO: 111983 - protein, 55 aa, Setaria italica
  misc_feature (37)..(37): Xaa can be any naturally occurring amino acid
  Transcript Sequence Number=SeqID_46009
SQAHGLLKRDLSYYTVVQMTEKKFMEKFIHPYTEAAXPHLAEDYAAACRGESGLY

SEQ ID NO: 111984 - protein, 147 aa, Setaria italica
  misc_feature (55)..(55): Xaa can be any naturally occurring amino acid
  misc_feature (66)..(66): Xaa can be any naturally occurring amino acid
  misc_feature (87)..(87): Xaa can be any naturally occurring amino acid
  Transcript Sequence Number=SeqID_46010
  Gene Ontology: Mol. function=serine-type endopeptidase activity; Cellular component=plasma membrane; Biological process=negative regulation of catalytic activity
  Homolog annotation: Hit_ID=B3TZE7; Match level="QueryCoverage=100%, HitCoverage=25%, E-value=3e-43, Identity=59%"; Hit description =Subtilisin protease (Fragment)
NETKESKSPLDTIGHGTHTASTAAGSAGADAAFFSYAKGKAIGMAPGARIAAYKXCWTKGCTDSDXLMAFEAAIADGVDVISVSLGXPKAPKFYKDNTAIGAFRAVRRGIVVSASSGNFGPGEFTAVNIAPWILTVGASTIDRHFPA

SEQ ID NO: 111985 - protein, 395 aa, Setaria italica
  Transcript Sequence Number=SeqID_46011
  Gene Ontology: Mol. function=drug transporter activity; Cellular component=membrane; Biological process=multidrug transport
  Homolog annotation: Hit_ID=B6SSS7; Match level="QueryCoverage=99%, HitCoverage=70%, E-value=0.0, Identity=86%"; Hit description =Antiporter/ drug transporter/ transporter
PPYTSVARLAAATRDPAMAFSVVRRMAAAGTPPRLRTYGPALFAYCDAKDADGAGQVEAHMDASGVVPEEPELAALLRVNADKGRADEVYRLLHRTRALVRQVCDTTAQVVEAWFRSDAASEAGVDKWDPSQVREGVVKGGGGWHGQGWLGKGQWSVGRSEMDKEGTCQRCGERLVCIDIDPSETDNFANSLTELAIKREVREDFLGFQRWLRRHGPFDAVIDAANVGLYNSKAFSFSQVNSVANAIQRVTKSKKLPLIILHRSRVNGGPAKAPFNQKILEGWRNAGALYATPPGSNDDWYWLYAAVSCRSLLVTNDEMRDHLFQLLGTGFFPRWKEKHQVRLTFSGRGPTLHLPPPYSIVIQESEDGTWHVPTTTGDDIEKPRQWICSTRKSFK

SEQ ID NO: 111986 - protein, 87 aa, Setaria italica
  Transcript Sequence Number=SeqID_46012
  Subcellular localization annotation: CTP_CleavageSite=59; ConfidenceScore=5.98e-01
RPRHGSSAAAATTTTTTTTTTTATMTATTTTSACSTSSSSSSASSSGGDAITTSGTAAGAAAAAACTEEQRRRECRCFVLIVRSGSG

SEQ ID NO: 111987 - protein, 37 aa, Setaria italica
  Transcript Sequence Number=SeqID_46013
MSYRKGSKVWVEEKGEGWVEAEVTESKERAVFVLTSQ

SEQ ID NO: 111988 - protein, 49 aa, Setaria italica
  Transcript Sequence Number=SeqID_46014
KKFKLSTALLLIFVPFAMKIYKKRDFRFLKQIYYVMGLLPPQQFVVINS

SEQ ID NO: 111989 - protein, 489 aa, Setaria italica
  misc_feature (170)..(170): Xaa can be any naturally occurring amino acid
  Transcript Sequence Number=SeqID_46015
  Gene Ontology: Mol. function=GTPase activator activity; Cellular component=integral to membrane; Biological process=copper ion transport
  Homolog annotation: Hit_ID=B9RJC2; Match level="QueryCoverage=81%, HitCoverage=84%, E-value=1e-133, Identity=60%"; Hit description =Vacuolar protein sorting-associated protein VPS9, putative
  Pfam annotation: Domain name=VPS9; Domain location=143-249; Score =146.7; E_value=7.3e-41; Accession=PF02204.10; Description=Vacuolar sorting protein 9 (VPS9) domain
MEGGGDAFGSSTAPLAWHDFLERMRQPSAAEFVKSIKSFIVTFSNRAPDPEKDSASVQEFLENMEGAFRAHTPWAGSSEEELESAGEGLEKYVMTKLYNRVFASVPEDVKSDEELFEKMSLLQQFIRPENLDIKPEYQNETSWLLAQKELQKINMFKAPRDKLSCILNCXKVINNLLLNASIVSNDNPPGADEFLPVLIYVTIKANPPQLHSNLLYIQRYRRQTRLVSEAQYFFTNILSAESFIWNIDGESLSMNELDFQRKMDWARERLLGLSADSEKQDNQANPDFQEQRSQNLKAYRSSDVSLSLKDPVQGSGQDMRRDSDVSVSGKPVERVQSISDLEKKGATELLNDDDLNRKFQEYPYLFARAGDLTIADVESLLNSYKQLVVRYVALAQGKGVSPETILAPSGQTASDLAVSEEPENVNSVVNNNENSEGISKTSDDVTSENHHSEVVDTDVSEQMTQKTAVDSSDDSKVSKDEASHQPENA

SEQ ID NO: 111990 - protein, 93 aa, Setaria italica
  misc_feature (14)..(14): Xaa can be any naturally occurring amino acid
  Transcript Sequence Number=SeqID_46016
ILDLNIIQREWIAXFCCHTREPNCHRTDVSALLRGLRPARPYAAPSRHAALPLAPPRRRTGVASASPGRAPPFPRPRAHPAAAPSSAAGPHLR

SEQ ID NO: 111991 - protein, 175 aa, Setaria italica
  Transcript Sequence Number=SeqID_46017
  Subcellular localization annotation: CTP_CleavageSite=50; ConfidenceScore=5.46e-01
SLMLTRRSTSDLSLPASAATAPASPLSTASEGGPVRLRMRLPKAQVEKLMAESRDGAEAAARIMQLCAANAGSGAATPERGILRTPERSPRFVPTPDWGVGAGAFPQTPERSPRFAATPDWGTGFMMPAGAGTAPRTPERWPALPRMPEYASPDVKASRKEKRTRFVALPDEIIA

SEQ ID NO: 111992 - protein, 73 aa, Setaria italica
  Transcript Sequence Number=SeqID_46018
PATKENDHGTERGSVYIFWLSDLVSPACLPCRKQPPISILFHRGRRSHAIISSGSATNRVRFSFRLALTSGDA

SEQ ID NO: 111993 - protein, 48 aa, Setaria italica
  Transcript Sequence Number=SeqID_46019
MEAVSAAEALDGHKDRFDLGVFVGDLALDEEVTSDDECLEGLQQELDD

SEQ ID NO: 111994 - protein, 74 aa, Setaria italica
  Transcript Sequence Number=SeqID_46020
VSLVNAMRKVPQIINNNITLAENNRYCICYLLHTVHSTKKREQSQLYFATQKDQSTYSACADLATERANSSMSL

SEQ ID NO: 111995 - protein, 155 aa, Setaria italica
  Transcript Sequence Number=SeqID_46021
  Homolog annotation: Hit_ID=Q7XP93; Match level="QueryCoverage=96%, HitCoverage=40%, E-value=1e-20, Identity=36%"; Hit description =OSJNBa0021F22.7 protein
MSELMKMDFTKIVKTWEELQLRILVLASLFIQCFLFVSAPQRKRRIPGLLRFFIWLAYLGSDAVAIYALTTLSGSQEKDSHPGPQVLWVPILLVHLGGQEAITAYNIEDNELWRRHVLTAVFKVTVAINVFVKYYPWSSSPDIGIFVPGLSFVLV

SEQ ID NO: 111996 - protein, 52 aa, Setaria italica
  Transcript Sequence Number=SeqID_46022
STSNYSSDDEGAATGGSEAVDDEAEEFIRRFYEQLRRQNTVALLPYMQESAA

SEQ ID NO: 111997 - protein, 66 aa, Setaria italica
  Transcript Sequence Number=SeqID_46023
HGSTGQNHRKAWQSRALDFLVYLEHHVIQDTTIIWICRLRHTRPVTRQLLRLHLNGIEKERKSSLS

SEQ ID NO: 111998 - protein, 125 aa, Setaria italica
  misc_feature (26)..(26): Xaa can be any naturally occurring amino acid
  Transcript Sequence Number=SeqID_46024
  Gene Ontology: Cellular component=integral to membrane
  Homolog annotation: Hit_ID=B6ST67; Match level="QueryCoverage=88%, HitCoverage=18%, E-value=3e-33, Identity=70%"; Hit description=K -exchanger-like protein
SLLLLGGQEEGTSCEAALRSLPDHGXRCRYLSWQGHPPCAPGAYVDYLRLFYCDFGRAPWLGAGAMALWLLVLFYLLGDTASRYFCASLEGLSEALRLPPAIAGVTLLSLGNGAPDVLSSVVAFA

SEQ ID NO: 111999 - protein, 219 aa, Setaria italica
  Transcript Sequence Number=SeqID_46025
  Pfam annotation: Domain name=VQ; Domain location=119-149; Score=49.5; E_value=1.3e-11; Accession=PF05678.6; Description=VQ motif
MANPCAALDPTWAHLPAPAPTHVAASHYCLFPAAAFENEALTSALRASMAPAHAAAAAKSLVSPAVPSSSTSSASEILSSGHDAPAPASRPPAAGRPPARALKGPKVGRVSKRKPRPSRRAQTTYITADPADFRRMVQEITGLPVPGPASSSPAASGAAAAPSWTPAPAPLLPTLDTSAFLLDRFTAEPAAVPEYKCSIGSAPAAAGDHDSSSLLLEME

SEQ ID NO: 112000 - protein, 46 aa, Setaria italica
  Transcript Sequence Number=SeqID_46026
  Gene Ontology: Mol. function=binding; Cellular component=cell wall
  Homolog annotation: Hit_ID=Q53RB7; Match level="QueryCoverage=100%, HitCoverage=4%, E-value=4e-18, Identity=93%"; Hit description=HEAT repeat, putative
GKDKTSEERRIAICIFDDVAEHCREAAVRYYDAYLPSLLEACTSEN

SEQ ID NO: 112001 - protein, 990 aa, Setaria italica
  Transcript Sequence Number=SeqID_46027
  Gene Ontology: Mol. function=binding; Cellular component=nuclear pore; Biological process=interspecies interaction between organisms
  Homolog annotation: Hit_ID=Q53RB7; Match level="QueryCoverage=98%, HitCoverage=84%, E-value=0.0, Identity=79%"; Hit description=HEAT repeat, putative
  Pfam annotation: Domain name=Arm; Domain location=326-366; Score =10.2; E_value=0.62; Accession=PF00514.15; Description=Armadillobeta -catenin-like repeat
  Pfam annotation: Domain name=Arm; Domain location=370-408; Score =12.0; E_value=0.37; Accession=PF00514.15; Description=Armadillobeta -catenin-like repeat
  Pfam annotation: Domain name=HEAT; Domain location=16-54; Score=0.5; E_value=43; Accession=PF02985.14; Description=HEAT repeat
  Pfam annotation: Domain name=HEAT; Domain location=248-284; Score =12.0; E_value=1.7; Accession=PF02985.14; Description=HEAT repeat
  Pfam annotation: Domain name=HEAT; Domain location=290-325; Score =28.8; E_value=2.2e-05; Accession=PF02985.14; Description=HEAT repeat
  Pfam annotation: Domain name=HEAT; Domain location=331-368; Score =20.7; E_value=0.0063; Accession=PF02985.14; Description=HEAT repeat
  Pfam annotation: Domain name=HEAT; Domain location=374-410; Score =9.5; E_value=3.4; Accession=PF02985.14; Description=HEAT repeat
  Pfam annotation: Domain name=HEAT; Domain location=55-92; Score=9.7; E_value=3.2; Accession=PF02985.14; Description=HEAT repeat
  Pfam annotation: Domain name=HEAT; Domain location=581-618; Score =3.6; E_value=18; Accession=PF02985.14; Description=HEAT repeat
  Pfam annotation: Domain name=HEAT; Domain location=636-673; Score =3.4; E_value=19; Accession=PF02985.14; Description=HEAT repeat
  Pfam annotation: Domain name=HEAT; Domain location=792-828; Score =25.5; E_value=0.00021; Accession=PF02985.14; Description=HEAT repeat
  Pfam annotation: Domain name=HEAT_PBS; Domain location=269-294; Score= 2.2; E_value=54; Accession=PF03130.8; Description=PBS lyase HEAT-like repeat
  Pfam annotation: Domain name=HEAT_PBS; Domain location=310-347; Score= 13.7; E_value=0.76; Accession=PF03130.8; Description=PBS lyase HEAT -like repeat
  Pfam annotation: Domain name=HEAT_PBS; Domain location=39-67; Score =0.1; E_value=1.1e+02; Accession=PF03130.8; Description=PBS lyase HEAT-like repeat
  Pfam annotation: Domain name=HEAT_PBS; Domain location=395-427; Score= 3.9; E_value=30; Accession=PF03130.8; Description=PBS lyase HEAT-like repeat
  Pfam annotation: Domain name=HEAT_PBS; Domain location=813-849; Score= 6.1; E_value=14; Accession=PF03130.8; Description=PBS lyase HEAT-like repeat
  Pfam annotation: Domain name=Proteasom_PSMB; Domain location=1-435; Score=-223.1; E_value=0.026; Accession=PF10508.1; Description =Proteasome non-ATPase 26S subunit
  Pfam module annotation: Pfam domain module=Arm::Arm::HEAT::HEAT::HEAT: :HEAT::HEAT::HEAT::HEAT::HEAT::HEAT::HEAT_PBS::HEAT_PBS::HEAT _PBS::HEAT_PBS::HEAT_PBS::Proteasom_PSMB; Domain location=326 -366::370-408::16-54::...
  Pfam module annotation: Domain location=248-284::290-325::331 -368::374-410::55-92::581-618::636-673::792-828::269-294::310-347::39- 67::395-427::813-849::1-435
KLSDAVAELASFLLPSNAWPDLLSFLYKSIDSQSSPPGLQESALNILARLASHLAAVFPNLHGLLLAALSHPSSADVRVAGLNAAISLIQSLPSAGARDQFQDLLPAMMRALAESLNCGNEGSAQEALEMMIELAGAEPRFLRRQLPDVVASMLQIAEAPGLEDGTRHLAVEFVVTLAEARERAPGMMRKLPRYVGRLFAVIMTMLLDVQDEPAWHAAVSEEEDAGETGSYVFAQECLDRLAIAVGGNTILPVAAELLPSFFSSEDWKRRHAALVTIAQIAEGSAKVMIKNLEQLVGMVLNSFQDPHPRVRWAAINAVGQLSTDLGPELQNQLHHVVLPALASAMDDVQNPRVQAHAASAILNFSENCRPDILTPYLDGIVGKLLLLLQTGNQMVQEAALTALASAADSSQEHFQKYYDAVMPYLKAILMNATDKSNRMLRAKSMECISLVGMAVGKQKFKDDAKQVMEVLMTLQGSQMEADDPITSYMLQAWARLCKCLGQDFLPYMSVVMPPLLQSAQLKPDVSVTSAGPEDGESDDEGVETITLGDKRIGIRTSLLEEKATACNMLCCYADELKEGFFPWIDQVTTTLVPLLKFYFHEEVRKAAVSAMPELLRSAKLAIEKGQAQGRDKSYLKQLSDYIVPALVEVMHKEPEPQICASILESLNESIQISGTLLEENQVRSVVEGVKEVIVASANRRIERTERAKAEDFDSEEEELLREENEQEDEIFDQVGDCLGTLAKTFKTYFLPFFDELSMYLTPMLGKDKTSEERRIAICIFDDVAEHCREAAVRYYDAYLPSLLEACTSENPDVRQAAVYGIGICAEFGGSAFRPHTGEALSRLYNVIKHPNALDLDNAMAYDNAVSALGKICQFHRDSIDASQVIPAWLSCLPIKNDLIEAKLVHEQLCAMLEKSERELLGHNNQYLAKIVSVFAEILCAGKDLATEQTASRMINLLRQLQTTLPPSVLASTWSSLQPQQQLALQSVLSS

SEQ ID NO: 112002 - protein, 75 aa, Setaria italica
  Transcript Sequence Number=SeqID_46028
  Subcellular localization annotation: CTP_CleavageSite=23; ConfidenceScore=5.38e-01
ILDAMNSTMGSTKLGETWLCCKRSSRNTSLSQRGLSSYRPTSPASYHLSRPRLLICCTIECVAKMRFSILWVFHV

SEQ ID NO: 112003 - protein, 56 aa, Setaria italica
  Transcript Sequence Number=SeqID_46029
  Gene Ontology: Mol. function=serine-type endopeptidase activity; Biological process=negative regulation of catalytic activity
  Homolog annotation: Hit_ID=B9R8D5; Match level="QueryCoverage=91%, HitCoverage=8%, E-value=2e-12, Identity=70%"; Hit description =Cucumisin, putative
ATVKAWNPTWSPAAIRSAIMTTATQLNNDRAPMTTDSGSPATPYDYGAGQVHPTAA

SEQ ID NO: 112004 - protein, 426 aa, Setaria italica
  Transcript Sequence Number=SeqID_46030
  Gene Ontology: Mol. function=serine-type endopeptidase activity; Biological process=negative regulation of catalytic activity
  Homolog annotation: Hit_ID=Q8LAE1; Match level="QueryCoverage=97%, HitCoverage=53%, E-value=1e-109, Identity=50%"; Hit description =Subtilisin-like serine protease
  Pfam annotation: Domain name=PA; Domain location=44-148; Score=76.4; E_value=1e-19; Accession=PF02225.14; Description=PA domain
  Pfam annotation: Domain name=Peptidase_S8; Domain location=21-288; Score=-53.2; E_value=0.00072; Accession=PF00082.14; Description =Subtilase family
  Pfam module annotation: Pfam domain module=PA::Peptidase_S8; Domain location=44-148::21-288
ATVVNAAPWILTVAATTIDRDFESDVVLGGNSSAVRGGAINFSNLDKSPKYPLIDGAAAKESSVSDAESASHCEPGTLDSGKVQGKIVLCNHSEGDTSKVVKADELQSAGAVGAIFVNDAERSVATTYLDFPVTEVTSAAAAAIHKYIASASQPVATITPTATVTEYKPAPVVAYFSSRGPSAQTGNVLKPDVAAPGVNILASWIPTSSSSLPAGQKAASQFKLVSGTSMACPHVAGAAATVKAWNPTWSPAAIRSAIMTTATQLNNDRAPMTTDSGSPATPYDYGAGQVHPTAALDPGVVYEAGEDDYLQFLCNYGYDAPKIKLIAASLPDGFACAANASAALISDLNYPSIAVSGLGGKGGSRTVTRAVTNVGAQEAATYTVAVSAPAGLNVKVTPTKLEFTKSAKKLAFQVTFSGGHDAAAKK

SEQ ID NO: 112005 - protein, 251 aa, Setaria italica
  Transcript Sequence Number=SeqID_46031
  Gene Ontology: Mol. function=sugar:hydrogen symporter activity; Cellular component=integral to membrane; Biological process =carbohydrate transport
  Homolog annotation: Hit_ID=B4FM14; Match level="QueryCoverage=100%, HitCoverage=75%, E-value=1e-130, Identity=88%"; Hit description =Organic anion transporter
  Pfam annotation: Domain name=DUF6; Domain location=23-152; Score =30.5; E_value=6.8e-06; Accession=PF00892.12; Description=Integral membrane protein DUF6
  Pfam annotation: Domain name=TPT; Domain location=161-250; Score= -26.9; E_value=0.024; Accession=PF03151.8; Description=Triose -phosphate Transporter family
  Pfam annotation: Domain name=UAA; Domain location=14-250; Score= -140.5; E_value=0.0025; Accession=PF08449.3; Description=UAA transporter family
  Pfam module annotation: Pfam domain module=DUF6::TPT::UAA; Domain location=23-152::161-250::14-250
MEDGKMGNATTIRAVLAILQWWGFNVTVIIINKWIFQKLEFKFPLTVSCVHFICSSIGAYIAIKVLKTKPLIEVASEDRWRRIFPMSFVFCINIVLGNVSLRYIPVSFMQTIKSFTPATTVILQWLIWRKYFEWRIWASLVPIVGGILLTSITELSFNTFGFCAAMVGCLATSTKTIMAESLLHGYKFDSINTVYYMAPFATMILSVPAIVLEGSGVVSWLYTYDSVAPALAIIITSGVLAFCLNFSIFNV

SEQ ID NO: 112006 - protein, 52 aa, Setaria italica
  Transcript Sequence Number=SeqID_46032
  Subcellular localization annotation: CTP_CleavageSite=23; ConfidenceScore=5.48e-01
WSLRWLHPPNPFTPASPPAVPARSSSSSSILHRRRPPIYSRPTSPPHLPSPP

SEQ ID NO: 112007 - protein, 271 aa, Setaria italica
  Transcript Sequence Number=SeqID_46033
  Pfam annotation: Domain name=Glyco_transf_8; Domain location=15-227; Score=-68.1; E_value=0.072; Accession=PF01501.12; Description =Glycosyl transferase family 8
PGAGAVAVAGPEPFRVFVGYDSREDIAYRVCRRSLLRRSSIPLDVIPIVQQELREAGLYWRERGPTESTEFSFTRFLTPHLAGYRGWALFVDCDFLFVADVADLARLAASADPRHAVLCVHHDYTPTEATKMDGAVQTVYPRKNWSSMVLFNCGHSKNRAALTPEAVSTRSGAYLHRFMWLDDDEVGEVPFVWNFLVGHNKVDPADEAATAPRAIHYTSGGPWFERYKDCEFADLWVQERDAYEAEEEKKKVEEEGVKAAVQMSSAVSVDA

SEQ ID NO: 112008 - protein, 68 aa, Setaria italica
  Transcript Sequence Number=SeqID_46034
LQSKSCKNLGRQNTAECTKPMSVLNTDGYHCLDSVVFYEFFMSIYVVSALACRKWHLQTGRCYCILHL

SEQ ID NO: 112009 - protein, 81 aa, Setaria italica
  Transcript Sequence Number=SeqID_46035
  Subcellular localization annotation: CTP_CleavageSite=57; ConfidenceScore=5.11e-01
MAQWSTAASLDRWIGPRRCGSPPPPQPWQAPVPTVPPPRPAKWKGRIGCASVPRELSAAAEAEQTARPLVDGDTEEEGVVC

SEQ ID NO: 112010 - protein, 94 aa, Setaria italica
  Transcript Sequence Number=SeqID_46036
SYCFGYGGLNLVSAALGFGMTAAFVAFACARFVCCRVRGDDSGAPPSLNFDADLDDPVRATPRSPSLLTTASIPLRSWSFATGEFSRGEVKAST

SEQ ID NO: 112011 - protein, 135 aa, Setaria italica
  misc_feature (66)..(66): Xaa can be any naturally occurring amino acid
  misc_feature (77)..(77): Xaa can be any naturally occurring amino acid
  Transcript Sequence Number=SeqID_46037
  Gene Ontology: Mol. function=metal ion binding; Cellular component =integral to membrane; Biological process=ubiquitin-dependent protein catabolic process
  Homolog annotation: Hit_ID=B9RDK3; Match level="QueryCoverage=66%, HitCoverage=51%, E-value=1e-23, Identity=51%"; Hit description=Ring finger protein, putative
  Pfam annotation: Domain name=zf-C3HC4; Domain location=79-112; Score =18.3; E_value=0.00083; Accession=PF00097.17; Description=Zinc finger, C3HC4 type (RING finger)
RGARLGMTAAFVAFACARFVCCRVRGDDSGAPPSLNFDADLDDPVEHRTGLEPLVIAAIPTMKYNXEAFQSKDDAQXYKEKEILRIIPTCRHNFHLACLDLWLEKQTTCPICRVSLKELQAAMSSACSIQQLPTA

SEQ ID NO: 112012 - protein, 52 aa, Setaria italica
  Transcript Sequence Number=SeqID_46038
  Gene Ontology: Mol. function=protein serine/threonine kinase activity; Biological process=protein amino acid phosphorylation
  Homolog annotation: Hit_ID=C4P7U5; Match level="QueryCoverage=100%, HitCoverage=10%, E-value=1e-22, Identity=96%"; Hit description=CBL -interacting protein kinase 13
FELTPSLVVVEVKMKAGDREEYEDFCERELKPGMQHLVHHTASVPDIPSDTE

SEQ ID NO: 112013 - protein, 73 aa, Setaria italica
  Transcript Sequence Number=SeqID_46039
CASTGNHVHPATKDDDECGGMHLSAAAAAEPKQLLLFTSRRGDKQDLLQSVRRCRQLRQKPLFILEPYCIATS

SEQ ID NO: 112014 - protein, 231 aa, Setaria italica
  Transcript Sequence Number=SeqID_46040
  Gene Ontology: Mol. function=DNA topoisomerase (ATP-hydrolyzing) activity; Cellular component=chromosome; Biological process=DNA topological change
  Homolog annotation: Hit_ID=Q9C5V6; Match level="QueryCoverage=99%, HitCoverage=34%, E-value=1e-91, Identity=69%"; Hit description=DNA topoisomerase 6 subunit B
  Pfam annotation: Domain name=Topo-VIb_trans; Domain location=1-119; Score=154.4; E_value=3.4e-43; Accession=PF09239.3; Description =Topoisomerase VI B subunit, transduce
IIVEAGISIGGKDVKQGLNIFRFANRIPLLFEQGADVITRTALKRINWSSYKINQQQDKIGVFVSIVSTKIPFKGTGKEYIGDDITEISSAVKSALKQCCLQLKSKIVKKLQARERQDRKKNLNRYIPDVARAIMETLVEIADESPPKRPRYDKEDEELLEKINSEEVTEMTFKDCLTQHVEQVDYEMALDYAMQSGVSEEPREAIYLNSLEGSYKFVDFQSPVFVFRFIP

SEQ ID NO: 112015 - protein, 393 aa, Setaria italica
  Transcript Sequence Number=SeqID_46041
  Gene Ontology: Mol. function=DNA topoisomerase (ATP-hydrolyzing) activity; Cellular component=chromosome; Biological process=DNA topological change
  Homolog annotation: Hit_ID=B9RI75; Match level="QueryCoverage=99%, HitCoverage=59%, E-value=0.0, Identity=84%"; Hit description=Type II DNA topoisomerase VI subunit B, putative
  Pfam annotation: Domain name=HATPase_c; Domain location=8-225; Score =16.6; E_value=0.0013; Accession=PF02518.18; Description=Histidine kinase-, DNA gyrase B-, and HSP90-like ATPase
KNIAGFDNPGKSLYTTMRELVENALDSAESISELPDIEITIEEITKSKFNTMIGLVDRERVDEALYDDFESEKAREKRLAKEARFQETQAKNAALGKKVKEAPSARGKGRGEAAFFKVTCKDNGRGMPHDDIPNMLGRVLSGTKYGLRQTRGKFGLGAKMALIWSKMSTGLPIEINSSMKGQNYVSFCRLDIDIHKNVPHVHLHEKRENKTHWHGAEIQVIIEGNWTTHRSKILHYMRQMAVITPYAQFLFRFLSDAADKNLTIKFARRTDVMPPVPLQTKHHPSAVDLLLIKRLIVETTKQNLLQFLQHEFVNISKSHAERLIGEMGPDFSPKMTVKSLTPQQLVRIHQLFRQAKFDDPSGNCLSPAGEYNLRLGIIKELHPDMVATHASSP

SEQ ID NO: 112016 - protein, 134 aa, Setaria italica
  misc_feature (128)..(128): Xaa can be any naturally occurring amino acid
  Transcript Sequence Number=SeqID_46042
  Gene Ontology: Mol. function=transferase activity, transferring glycosyl groups; Cellular component=intracellular; Biological process=protein amino acid ADP-ribosylation
  Homolog annotation: Hit_ID=Q9ZSV1; Match level="QueryCoverage=100%, HitCoverage=13%, E-value=9e-56, Identity=77%"; Hit description=Poly [ADP-ribose] polymerase 1
  Pfam annotation: Domain name=PADR1; Domain location=62-115; Score =118.3; E_value=2.5e-32; Accession=PF08063.4; Description=PADR1 (NUC008) domain
KEKLVDPRDSNASSADIQQKLKEQSDTLWKLKDELTKHLSTAELRDMLEANEQDTSGPERLLLDRCADGMLFGALGPCPVCNNGLYYYNGQYQCSGNVSEWSKCTYSTTEPVRIKKKWKIPDGTENDXLMKWFK

SEQ ID NO: 112017 - protein, 102 aa, Setaria italica
  Transcript Sequence Number=SeqID_46043
  Homolog annotation: Hit_ID=B6UGF3; Match level="QueryCoverage=99%, HitCoverage=59%, E-value=2e-35, Identity=84%"; Hit description =Plasma membrane associated protein
  Pfam annotation: Domain name=AWPM-19; Domain location=1-89; Score =119.2; E_value=1.3e-32; Accession=PF05512.3; Description=AWPM-19 -like family
  Subcellular localization annotation: CTP_CleavageSite=34; ConfidenceScore=5.27e-01
FIFALITGVVGISTSLTGLHDVSQGFPANMMSAAASALVTWTLTLLAMGLACKEISISWRPASLRTLEAFTIILSGTQLLCAGSLHAGAHEAIVATPIGGRV

SEQ ID NO: 112018 - protein, 109 aa, Setaria italica
  misc_feature (90)..(90): Xaa can be any naturally occurring amino acid
  Transcript Sequence Number=SeqID_46044
  Subcellular localization annotation: CTP_CleavageSite=71; ConfidenceScore=5.90e-01
PVHNSRRPFQPPSATAPLPPAPRRRPPPHRSPLPSRRPNRTLRRQRPSRASPRAPTKWAPPAATSQLSSLSAAAAAACSSGRPAPAPVGXLVGGVGVGTRRGKGGEVGG

SEQ ID NO: 112019 - protein, 40 aa, Setaria italica
  Transcript Sequence Number=SeqID_46045
SGSVFQLAWPLTATSVRHVFVCTGLRFVTRKIDELLISTD

SEQ ID NO: 112020 - protein, 168 aa, Setaria italica
  misc_feature (156)..(156): Xaa can be any naturally occurring amino acid
  Transcript Sequence Number=SeqID_46046
  Homolog annotation: Hit_ID=Q2R178; Match level="QueryCoverage=90%, HitCoverage=10%, E-value=6e-28, Identity=49%"; Hit description=Lipin, N-terminal conserved region family protein, expressed
MEIEGSQTVTGSSSLVNDPEDVTENLIVENKACNREPDGSVTLTSTIGDGSTEFIAQSANFPNKIEVEEGSPTATGSSNLVYGEVQSIKTEGETGRSSSVSGDEVGFVLEATAEPEEEAEARVSFSEYTEEIQFQFSDTENFADRKAMDDIVADKXAGEGEHEESDCD

SEQ ID NO: 112021 - protein, 329 aa, Setaria italica
  Transcript Sequence Number=SeqID_46047
  Homolog annotation: Hit_ID=Q2R178; Match level="QueryCoverage=89%, HitCoverage=19%, E-value=2e-51, Identity=44%"; Hit description=Lipin, N-terminal conserved region family protein, expressed
RKLNLTKVIKVRPPINLEDVAGREIHKKEAFSNGIFEIHTVETDTTSGKSEVVSQFVTVDSYGANQNLTGANSPAYATTDEKHEVTLIPSAQDPVQEKVVILSSSETVEISQDAVQEKMVIFSSSETLESSYAVSNISDDKVRDASDISLADSIQREEHSGVSDGSQEQVFSEERLSACSGASSNKKDVIEVVVEEHGAFILEDPAPQTLQGNGPDMDISVDSVSLSHTDAVHDFACQHDVVCPDASSSVVETSSYVPDYDPEDVTNNVIVENQACNRELDVSVTQTSIIGDESTECNAQSANFPNKIEVEEVHQLLLGLPVWSMILKM

SEQ ID NO: 112022 - protein, 144 aa, Setaria italica
  Transcript Sequence Number=SeqID_46048
  Gene Ontology: Mol. function=kinase activity; Cellular component =chloroplast; Biological process=carbohydrate metabolic process
  Homolog annotation: Hit_ID=Q8L794; Match level="QueryCoverage=92%, HitCoverage=27%, E-value=1e-49, Identity=70%"; Hit description =Putative xylulose kinase
AAAWASSWRAALFQLLDDIPPAHRPFISSISIDGTSATTLIVDSETGELLAGPFLYNESFPDALPAVESIAPANHTVCSASSTLCKLVSWWNTTGGAGGAGSAAVLMHQSDWLLWLLHGRYGVSDYNNALKVGYDPEADAYPSW

SEQ ID NO: 112023 - protein, 60 aa, Setaria italica
  Transcript Sequence Number=SeqID_46049
YIYPMLLCSFIRVYVCDILVFFSSLVHVRLIDLIPYISHVTIYFLMYLLALRAVVYSFIT

SEQ ID NO: 112024 - protein, 157 aa, Setaria italica
  Transcript Sequence Number=SeqID_46050
MRIHPAAAPTGGKKDLRRLPHVYSKVLELPLPADTDVEVFEGPDAFHFVAAGARGTGMVQVRTVRIHPGVTKVVVRAGGTGGGDEPGADDMELDRWRSRLPEASCPAMAVAGYVDGQLVVTVPKGRGGDEGAEGGQGEVTWRCCSGGKISGRLVVVQ

SEQ ID NO: 112025 - protein, 89 aa, Setaria italica
  Transcript Sequence Number=SeqID_46051
  Subcellular localization annotation: CTP_CleavageSite=56; ConfidenceScore=5.21e-01
ESVGRGRSRFPAPAEKGGGGGRQSSTARYTRETESSRQRGRSVSRPPAERRGVAPSAANGGPAARRQRYASVDRRASMDRHRWCDSDND

SEQ ID NO: 112026 - protein, 274 aa, Setaria italica
  Transcript Sequence Number=SeqID_46052
  Gene Ontology: Mol. function=binding; Cellular component=integral to membrane; Biological process=transport
  Homolog annotation: Hit_ID=Q8LDS8; Match level="QueryCoverage=93%, HitCoverage=79%, E-value=4e-77, Identity=53%"; Hit description =Putative mitochondrial carrier protein
  Pfam annotation: Domain name=Mito_carr; Domain location=123-215; Score=74.2; E_value=4.8e-19; Accession=PF00153.19; Description =Mitochondrial carrier protein
  Pfam annotation: Domain name=Mito_carr; Domain location=27-112; Score= 37.1; E_value=6.9e-08; Accession=PF00153.19; Description =Mitochondrial carrier protein
  Pfam module annotation: Pfam domain module=Mito_carr::Mito_carr; Domain location=123-215::27-112
PTEASAAGLALAEANINWERLDKTRFHVIGAILFTAQQGALHPTAVVKTRMQVAEGGLAHMSGFAVFRRILRSDGIPGVFRGFGTSAVGALPGRVLALTSLEVSKQMTFKYSERFDMSEASRIAVANGVAGLVSSICSSAYFVPLDVICQRLMVQGLPGMATYRGPFDVINKVVRMEGIRGLYRGFGITMLTQSPASALWWSAYGGAQHAIWRSLGYGNDSQTKPSESELVAVQATAGTIAGACSSIITTPVDTIKTRLQVMDNYSGRPSVMKT

SEQ ID NO: 112027 - protein, 130 aa, Setaria italica; identical to SEQ ID NO: 103443
  Transcript Sequence Number=SeqID_46053
  Gene Ontology: Mol. function=structural constituent of ribosome; Cellular component=ribonucleoprotein complex; Biological process =translation
  Homolog annotation: Hit_ID=Q9LX88; Match level="QueryCoverage=100%, HitCoverage=100%, E-value=2e-68, Identity=96%"; Hit description=40S ribosomal protein S15a-4
  Pfam annotation: Domain name=Ribosomal_S8; Domain location=5-130; Score=219.3; E_value=9.9e-63; Accession=PF00410.11; Description =Ribosomal protein S8

SEQ ID NO: 112028 - protein, 68 aa, Setaria italica
  Transcript Sequence Number=SeqID_46054
LLIIPLNAWGKAKQLILPQIIDKNTGFKRDHLAYPCLYCTCMNHGPEPRSRPLPRPLLSLLPQQRLSE

SEQ ID NO: 112029 - protein, 107 aa, Setaria italica
  Transcript Sequence Number=SeqID_46055
LDTPGGWLGFSLLRRRCWHIEGPRDRESSCRWPLRKLVVDGAMEGGGVPGGDGVGDARRLGLILPRHRLRRRARPQERSLIRVVGVIHLEPDRQSILRAYSHVPVHR

SEQ ID NO: 112030 - protein, 246 aa, Setaria italica
  Transcript Sequence Number=SeqID_46056
  Gene Ontology: Mol. function=phosphatidylinositol phosphate kinase activity; Biological process=phosphatidylinositol metabolic process
  Homolog annotation: Hit_ID=Q652R9; Match level="QueryCoverage=75%, HitCoverage=11%, E-value=3e-66, Identity=64%"; Hit description =Finger-containing phosphoinositide kinase-like
HKGTRKQNTAADVSLHSGSAGISSALGPCKIQSEVVLADELKAETMLQKSQSSASNISDRIDLAWTGSGQFVIDPSQCSMETVPVIPAALKDDPAYQKVIAPIRIKSFDSAVSSRNRLSPVDDSNASIRRSYSQRPPKAIEKTGRARSPTFMSNLSLSGVVDGEGRLLLSQNDSDVVVPIYDDEPSSMIAHAMTVPEYHSFLLPLMDENNESSVLNYVAHKSSRSTFDGSMRSYGSDQSQAITGSD

SEQ ID NO: 112031 - protein, 242 aa, Setaria italica
  Transcript Sequence Number=SeqID_46057
  Gene Ontology: Mol. function=phosphatidylinositol phosphate kinase activity; Biological process=phosphatidylinositol metabolic process
  Homolog annotation: Hit_ID=Q652R9; Match level="QueryCoverage=96%, HitCoverage=14%, E-value=1e-119, Identity=87%"; Hit description =Finger-containing phosphoinositide kinase-like
  Pfam annotation: Domain name=PIP5K; Domain location=5-233; Score =160.3; E_value=5.9e-45; Accession=PF01504.10; Description =Phosphatidylinositol-4-phosphate 5-Kinase
TKKNGSRLKGGKSNVYFAKTLDDRFVIKQVTRTELDSFEDYAVEYFKYLTESVSSGSPTCLTKILGLYQITAKNLRDGKELKMDVMVMENLFFKRKVSRIYDLKGSLRSRYNPDTSGKNKVLLDLNLLETLHTKPIFLGSKAKRRLERAVWNDTSFLASVDVMDYSLLVGIDEERKELVMGIIDYLRQYTWDKQLETWVKASAFLGGSKDGLPTIISPDQYKKRFRKAMSKYFLTLPDQWSP

SEQ ID NO: 112032 - protein, 310 aa, Setaria italica
  Transcript Sequence Number=SeqID_46058
  Gene Ontology: Mol. function=phosphatidylinositol phosphate kinase activity; Biological process=phosphatidylinositol metabolic process
  Homolog annotation: Hit_ID=Q652R9; Match level="QueryCoverage=98%, HitCoverage=18%, E-value=1e-138, Identity=80%"; Hit description =Finger-containing phosphoinositide kinase-like
  Pfam annotation: Domain name=PIP5K; Domain location=125-309; Score =32.7; E_value=1.1e-12; Accession=PF01504.10; Description =Phosphatidylinositol-4-phosphate 5-Kinase
KLNSDVVVPIYDDEPSSMIAHAMTVPEYHSFLLPLMDENNESSVLNYVAHKSSRSTFDGSMRSYGSDQSQAITGSDSKDNHLTVSFEDEDSNSVDKAKFSVTCYFAKQFDAIRRKCCPDELDYIRSLSRCKRWSAQGGKSNVYFAKTLDDRFVIKQVTRTELDSFEDYAVEYFKYLTESVSSGSPTCLTKILGLYQITAKNLRDGKELKMDVMVMENLFFKRKVSRIYDLKGSLRSRYNPDTSGKNKVLLDLNLLETLHTKPIFLGSKAKRRLERAVWNDTSFLASVDVMDYSLLVGIDEERKELVMGIN

SEQ ID NO: 112033 - protein, 602 aa, Setaria italica
  Transcript Sequence Number=SeqID_46059
  Gene Ontology: Mol. function=phosphatidylinositol phosphate kinase activity; Biological process=phosphatidylinositol metabolic process
  Homolog annotation: Hit_ID=Q652R9; Match level="QueryCoverage=99%, HitCoverage=35%, E-value=0.0, Identity=63%"; Hit description=Finger -containing phosphoinositide kinase-like
YEELKKVKLAVQFALFAAYHLSLETSYLADEGATLPKVPSDLQLEKQIFSLSNCQQNFNDLQTIADRTSGNGCIMPCLDGSSASEQHSRADLINAEYVESHPRADSSQEAYTGETIDTYPYSTKASLYDSCIPPVGITVQTCARKRTPADHNGHIGELVGQMLKVESDLDNGWNHISDEDRVAIRDHNENHNFTTSDNPQSILVSLSVACPLRGIVCKQSQLFRIKFYGTFDKPLGRYFREDLFVQTSCCESCKEPAESHVRCYTHQQGSLTISVRTLASVKLPGEHDGKVWMWHRCLRCKPKDGIPPATQRVIMSDAARGLSFGKFLELSFSNHTTANRIASCGHSLQRDCLRFYGLGSMVAVFHYSPVDILSVNLPPSVLDFSYPTAQDWIIKEAADVASRKEHLYKEIVAKLDCIEQIIKAQNVTMKSGLYKHVADLKELVKVEWKKYDVLSGFSNIDNLQTFGPTLDVLDLNHLRRELALDIHIWDRRLYMMHSLTKENCHTVPTETQCSEKLTESVLEEPKDVISSKHGTINNSLEQTHPNALELPTDSAKPFPMREQNNTSGSHLGLKTNTAADVSLHSGSAGISSALGPCKIRVE

SEQ ID NO: 112034 - protein, 113 aa, Setaria italica
  Transcript Sequence Number=SeqID_46060
LFFYKCFCLILGSQVAWMKAMSLGGLHQVTRIILLHVVQRTCMRGRIYQTPCCRVITFLISFLLDIIRFILVVIREDKVVFSPFCAFLDVYFSEYFTNFCARIFFYTSITSYI

SEQ ID NO: 112035 - protein, 105 aa, Setaria italica
  Transcript Sequence Number=SeqID_46061
SIVHTLGRVLGTQIADFQVPSQRLFFGYIPCVSLLLIHMPLFGRAAFCAVSHHRSGCCLRTHPLASAPCLSQRMPEASCHSIHPVRMPLIIWLKTFSSKVCLHSS

SEQ ID NO: 112036 - protein, 245 aa, Setaria italica
  misc_feature (122)..(122): Xaa can be any naturally occurring amino acid
  Transcript Sequence Number=SeqID_46062
  Gene Ontology: Mol. function=aminoacyl-tRNA hydrolase activity; Cellular component=mitochondrion; Biological process=translation
  Homolog annotation: Hit_ID=Q5N9Q7; Match level="QueryCoverage=79%, HitCoverage=78%, E-value=1e-102, Identity=92%"; Hit description =Peptidyl-tRNA hydrolase, mitochondrial
  Pfam annotation: Domain name=Pept_tRNA_hydro; Domain location=54-235; Score=220.3; E_value=5.1e-63; Accession=PF01195.11; Description =Peptidyl-tRNA hydrolase
  Subcellular localization annotation: CTP_CleavageSite=35; ConfidenceScore=5.59e-01
MRLLPGASASRLPSPLLSLPRARPRCVPASSSACRAASSSAAGAGDGGARKPWLFVGLGNPGKVYQGTRHNVGFEMIDVISEAEGIPLSSMQFKAMVGKGRIGDAPVMLAKPQTFMNASGGXQLVSYFKIPLNQVVVMYDDLDLPFAKLRLLPKGGHGGHNGMRSIINHLKQSRDFPRLRIGIGRPPGKMDPANFVLRPFTKREQEELDFAFHRGLEAVRIMVLEGFNKSATYVNTTQSSEMLNR

SEQ ID NO: 112037 - protein, 156 aa, Setaria italica
  Transcript Sequence Number=SeqID_46063
  Gene Ontology: Mol. function=DNA binding; Cellular component =ribosome; Biological process=RNA-dependent DNA replication
  Homolog annotation: Hit_ID=Q6YYW9; Match level="QueryCoverage=88%, HitCoverage=43%, E-value=1e-11, Identity=35%"; Hit description =Ribosomal protein-like
YFWANVVGVYNRNTPKDRKRTLMQLKTHWQRINTKIAHFYDCWCRVEAKHSCIQSEKMQLMDKTWAMYNEEAREMYLEEAKHHFALSHCWKAVWDQPKWKRHVSSLYFKKTELSESEDCTSSSEGAPETETGEQGSVPAKKKHKINGKVSSPPSEL

SEQ ID NO: 112038 - protein, 504 aa, Setaria italica
  Transcript Sequence Number=SeqID_46064
  Gene Ontology: Mol. function=drug transporter activity; Cellular component=membrane; Biological process=multidrug transport
  Homolog annotation: Hit_ID=B9RHB8; Match level="QueryCoverage=90%, HitCoverage=82%, E-value=1e-179, Identity=66%"; Hit description=DNA -damage-inducible protein f, putative
  Pfam annotation: Domain name=MatE; Domain location=69-231; Score =54.3; E_value=4.5e-13; Accession=PF01554.10; Description=MatE
RRLQLPAPPLPAARLRLLRATRLEESRGSSRAGPCRCAGSAVARVGDDGGDQAAGIWEQVRDIVVFAGPALGLWICGPLMSLIDTMVIGQTSALQLAALGPGTVFCDYLSYIFMFLSVATSNMVATSLAKKDKELAQHQVSMLLFIALACGIGMFLFTKVFGTQVLTAFTGSGNYEIVTSANTYAQIRGFAWPAVLVGLVAQSASLGVKDSWGPLKALAAASVINGVGDIVLCSVCGYGIAGAAWATMVSQIVAAFMMMRNLNNKGFRAFSFTIPSARELLQIFEIAAPVFVTMTSKVAFYALLTYSATSMGAITLAAHQVMINILCMCTVWGEPLSQTAQSFMPELIYGANRNLTKARMLLKSLVIIGAITGAVLGTVGTLVPWLFPSLFTNDRMVVQQMHIILAPYFSALLVTPSVHSLEGTLLAGRDLRYLSQSMSVCFCIGTLLLMVLRNKFGSLPGCWWILVLFQWGRFASGFQRLISPTGMLYNENFNQVEYIKTKAT

SEQ ID NO: 112039 - protein, 217 aa, Setaria italica
  misc_feature (163)..(163): Xaa can be any naturally occurring amino acid
  Transcript Sequence Number=SeqID_46065
  Gene Ontology: Mol. function=hydrolase activity, hydrolyzing O -glycosyl compounds; Cellular component=extracellular region; Biological process=cell wall organization and biogenesis
  Homolog annotation: Hit_ID=Q6ZA06; Match level="QueryCoverage=98%, HitCoverage=41%, E-value=1e-94, Identity=76%"; Hit description =Endoglucanase 20
  Pfam annotation: Domain name=Glyco_hydro_9; Domain location=1-209; Score=-62.7; E_value=5.3e-12; Accession=PF00759.11; Description =Glycosyl hydrolase family 9
SWDNKYPGAQMLATQEYLAGRTELEGYKRGLDSYVCAVMPNSGNTQIRTTPGGLLFTSDSVNMQYTTTAALLLSIYSKTLSSSGTGAVRCSGASFSPDQISSFAASQVGYILGDNPMGMSYMAGYSSKFPRRIHHRGASIPSIKALPRKVTCNEGFSSWFPTXSPNPNVHVGAIVGGPDGNDQFPDNRGDSTHSEPATYINAAFVGACAAALGQTSC

SEQ ID NO: 112040 - protein, 183 aa, Setaria italica
  Transcript Sequence Number=SeqID_46066
  Gene Ontology: Mol. function=aspartic-type endopeptidase activity; Biological process=proteolysis
  Homolog annotation: Hit_ID=B6SL29; Match level="QueryCoverage=100%, HitCoverage=38%, E-value=1e-50, Identity=63%"; Hit description =Aspartic proteinase nepenthesin-2
SYAAVPCGGSACAGLGIYASGCSAAQCGYVVSYGDGSNTTGVYSSDTLTLTATDAVEGFLFGCGHAQRGLFTGIDGLLGLGRLPVSLVGQAAGVYGSAFSYCLPTKPSTTGYLTLGGGANAAAPGFATTQLLTLPSAPTYYIVMLTGMSVGGQALSVPESAFAGGTVVDTGTVVTRLPPAAYA

SEQ ID NO: 112041 - protein, 105 aa, Setaria italica
  misc_feature (17)..(17): Xaa can be any naturally occurring amino acid
  Transcript Sequence Number=SeqID_46067
  Gene Ontology: Mol. function=lyase activity
  Homolog annotation: Hit_ID=Q6ETM5; Match level="QueryCoverage=90%, HitCoverage=19%, E-value=2e-10, Identity=38%"; Hit description =Putative ribosomal RNA apurinic site specific lyase
SVVLCVKVMTICEFQGXQHELAFLQFIYQNARVLNFSAIVSANVRVTGISANQIFSIVQNMDSSRWARNFNLAILGSKGPEGGRPWKFQRGANFSNDDPFAPVKS

SEQ ID NO: 112042 - protein, 103 aa, Setaria italica
  Transcript Sequence Number=SeqID_46068
  Subcellular localization annotation: CTP_CleavageSite=83; ConfidenceScore=5.62e-01
GIGSNKGALSIDRPPFPAQRNHLRLSMAATASSTLLQGSKFSSARCVPRTAGHQRIPCGVGRKSALSSGCLRTGSERRAAVICAAAASDGGAPASALPAALLF

SEQ ID NO: 112043 - protein, 72 aa, Setaria italica
  Transcript Sequence Number=SeqID_46069
LVKKNISSANLDMLAKEQCYVVIKSNVLGFLSRRKSSIQFFSGSISRQRMPICYSKHIHKVLSCYLDMPINH

SEQ ID NO: 112044 - protein, 31 aa, Setaria italica
  Transcript Sequence Number=SeqID_46070
  Gene Ontology: Mol. function=two-component response regulator activity; Biological process=two-component signal transduction system (phosphorelay)
  Homolog annotation: Hit_ID=Q2RAP2; Match level="QueryCoverage=96%, HitCoverage=14%, E-value=1e-09, Identity=100%"; Hit description=Two -component response regulator ARR8, putative, expressed
IRCLEEGADEFFLKPVRLSDMSKLKPHILKS

SEQ ID NO: 112045 - protein, 212 aa, Setaria italica
  Transcript Sequence Number=SeqID_46071
  Gene Ontology: Mol. function=two-component response regulator activity; Cellular component=nucleus; Biological process=two -component signal transduction system (phosphorelay)
  Homolog annotation: Hit_ID=Q9FRY9; Match level="QueryCoverage=93%, HitCoverage=85%, E-value=2e-79, Identity=76%"; Hit description =Response regulator 6
  Pfam annotation: Domain name=Response_reg; Domain location=23-150; Score=67.5; E_value=4.8e-17; Accession=PF00072.16; Description =Response regulator receiver domain
SDTRTRAGGVSSMAVATETPFHVLAVDDSLPDRKLIERLLKTSSFHVTTVDSGSKALEFLGIHGEDSSPVSVHADQLEVAVNLIITDYCMPGMTGYDLLKKIKESSSLRDIPVVIMSSENIPSRINRCLEEGADEFFLKPVRLSDMSKLKPHILKSRCKEHYQEQHQQSDSNSNECSNPTNDSSSSDNSNSRKREAEDNEEILPQRNRSRHS

SEQ ID NO: 112046 - protein, 52 aa, Setaria italica
  Transcript Sequence Number=SeqID_46072
SLTNSKLGNPYGYKYCFPFENWSLESKRLDSGEHHSNPWKYLVKLWARQWNA

SEQ ID NO: 112047 - protein, 73 aa, Setaria italica
  Transcript Sequence Number=SeqID_46073
  Subcellular localization annotation: CTP_CleavageSite=11; ConfidenceScore=5.01e-01
SLVAGRRRPAAASHRRGTTVRHQLAIRVVALCTVALMAACYRSSLAAGHRPPPRMFPWPPLLRLAYDECSGWP

SEQ ID NO: 112048 - protein, 242 aa, Setaria italica
  misc_feature (36)..(36): Xaa can be any naturally occurring amino acid
  misc_feature (133)..(133): Xaa can be any naturally occurring amino acid
  Transcript Sequence Number=SeqID_46074
  Gene Ontology: Mol. function=DNA binding; Biological process =regulation of transcription
  Homolog annotation: Hit_ID=B9RZ09; Match level="QueryCoverage=30%, HitCoverage=21%, E-value=7e-23, Identity=77%"; Hit description =Transcription factor, putative
  Pfam annotation: Domain name=Myb_DNA-binding; Domain location=15-66; Score=40.8; E_value=5.5e-09; Accession=PF00249.23; Description=Myb -like DNA-binding domain
GIGSGGGKRSSRAPRMRWTTALHAHFVHAVELLGGXERATPKSVLELMNVKDLTLAHVKSHLQMYRTVKGTTADRSCAAGHVQMRDMGFLQRGCEVNGFEAFNHITTSNTRMLAAGKQEVAWCLRPPFAHQSXLPLPLPCPYLMSAHHNRYLLSQDHHQGWRRGAQQDVLGQDNVARRLHTGLADTAVRRSNWSAGVASRWSSTAVPSPSMTGGRSISGSSEQGCWMTAMNKQQQQQAPSRI

SEQ ID NO: 112049 - protein, 83 aa, Setaria italica
  Transcript Sequence Number=SeqID_46075
SDLQMPPSVNSGGSSEILDPETGSPPNNSVNMPPAELPVEAKGIQLFGATINPHVVQRATNGASEEVNGAINGVVDENVGKDL

SEQ ID NO: 112050 - protein, 569 aa, Setaria italica
  Transcript Sequence Number=SeqID_46076
  Gene Ontology: Mol. function=ATPase activity, coupled to transmembrane movement of substances; Cellular component=integral to membrane; Biological process=transport
  Homolog annotation: Hit_ID=Q6Z894; Match level="QueryCoverage=97%, HitCoverage=84%, E-value=0.0, Identity=88%"; Hit description =Putative MDR-like ABC transporter
  Pfam annotation: Domain name=ABC_membrane; Domain location=3-278; Score=131.8; E_value=2.2e-36; Accession=PF00664.15; Description=ABC transporter transmembrane region
  Pfam annotation: Domain name=ABC_tran; Domain location=348-532; Score= 223.4; E_value=6e-64; Accession=PF00005.19; Description=ABC transporter
  Pfam module annotation: Pfam domain module=ABC_membrane::ABC_tran; Domain location=3-278::348-532
VSGTLSAFVAGSQMPLFALGVTQALVSYYMGWETTKQEVRKISVLFCCGAVLTVVFHVIEHLSFGIMGERLTLRVREKMFSAILRNEIGWFDDTSNTSAMLSSRLEADATLVRTIVVDRSTILLQNVGMIVTSLIIAFILNWRITLVVLATYPLMVSGHISEKMFMKGYGGNLGKSYLKANMLAAEAVSNIRTVAAFCSEEKVIKLYADELKEPSKRSFRRGQGAGLFYGVSQFFLFSSYALALWYGSQLMSKELATFKSVMKSFMVLIVTALAMGETLAMAPDIIKGNQMVSSVFDILDRKTDVRIDTGEDIKRVEGLIELRGVEFRYPARPDVTVFKGLDLLMKAGKSMALVGMSGSGKSTVLSLILRFYDPIAGRILIDGKDIKKLKLKSLRKHIGLVQQEPALFATTIYENILYGKDGATEAEVIEAAKLANAHSFISSLPEGYQTKVGERGVQLSGGQKQRIAIARAIVKDPAILLLDEATSALDVESERVVQQALDRVMKNRTTVMVAHRLSTIKNADVISVLQDGKIIEQGGHQQLIENRNGAYHKLVSLQQQQQQQSQQSS

SEQ ID NO: 112051 - protein, 55 aa, Setaria italica
  misc_feature (12)..(12): Xaa can be any naturally occurring amino acid
  Transcript Sequence Number=SeqID_46077
  Gene Ontology: Cellular component=membrane
FSQYWLNLYAVXKRGPVYPPMFSTLSAVFIIILGTLLLGESLTAGSLLGSFLVLS

SEQ ID NO: 112052 - protein, 280 aa, Setaria italica
  Transcript Sequence Number=SeqID_46078
  Gene Ontology: Mol. function=protein tyrosine kinase activity; Cellular component=integral to membrane; Biological process=protein amino acid phosphorylation
  Homolog annotation: Hit_ID=Q10M75; Match level="QueryCoverage=100%, HitCoverage=60%, E-value=5e-78, Identity=57%"; Hit description =Leucine Rich Repeat family protein, expressed
  Pfam annotation: Domain name=LRR_1; Domain location=17-39; Score =15.0; E_value=0.32; Accession=PF00560.25; Description=Leucine Rich Repeat
  Pfam annotation: Domain name=LRR_1; Domain location=41-63; Score =12.5; E_value=1.2; Accession=PF00560.25; Description=Leucine Rich Repeat
  Pfam annotation: Domain name=LRR_1; Domain location=65-84; Score =12.1; E_value=1.5; Accession=PF00560.25; Description=Leucine Rich Repeat
  Pfam annotation: Domain name=LRR_1; Domain location=87-109; Score =11.2; E_value=2.2; Accession=PF00560.25; Description=Leucine Rich Repeat
  Pfam module annotation: Pfam domain module=LRR_1::LRR_1::LRR_1::LRR _1; Domain location=17-39::41-63::65-84::87-109
  Subcellular localization annotation: CTP_CleavageSite=48; ConfidenceScore=5.32e-01
KNSTSIDLSIFPVRTSNLSFVDLSNNSLNGSLPTGIGDLSALTLLNLRQNNFTGQIPRAITKLKNLLYIDLSSNHFNGSIPDGLPDELVEFNVSYNNLSGSVPSNLLKFPDSSFHPGNELLILPRSESLNGSDKSDEGRHGMKRGILYALIVCVVVFVTGIIVLLLVHWKINSWKSSEKGTNQGKQPVTQGQSAHRSAETSTTEMHDVSLGSSPTAQSGAVSLPGRERHPESQDVPVDVAYFNEPIGSSSALKDSATSSMPSLSSSPPDACTQHRHSIFR

SEQ ID NO: 112053 - protein, 72 aa, Setaria italica
  Transcript Sequence Number=SeqID_46079
  Subcellular localization annotation: CTP_CleavageSite=45; ConfidenceScore=5.73e-01
LPPELIISPPPATPPPSRSSHKNHSCSLLRSRKQNRQSFTRVRLRVAMRRRPPFHSRAAAAVLLLLVLLTPA

SEQ ID NO: 112054 - protein, 468 aa, Setaria italica
  Transcript Sequence Number=SeqID_46080
  Gene Ontology: Mol. function=nucleotidyltransferase activity; Cellular component=nucleus; Biological process=DNA replication
  Homolog annotation: Hit_ID=B9SE42; Match level="QueryCoverage=82%, HitCoverage=70%, E-value=1e-138, Identity=63%"; Hit description =Nucleic acid binding protein, putative
  Pfam annotation: Domain name=NTP_transf_2; Domain location=62-175; Score=47.9; E_value=4e-11; Accession=PF01909.15; Description =Nucleotidyltransferase domain
  Pfam annotation: Domain name=PAP_assoc; Domain location=231-289; Score=53.0; E_value=1.2e-12; Accession=PF03828.11; Description =PAP25A associated domain
  Pfam module annotation: Pfam domain module=NTP_transf_2::PAP_assoc; Domain location=62-175::231-289
SAATPSSSRAAEEQPAQGSERAWFRGGRRFRSPMLQLHKEIIDFCDFISPSTEEQSSRTAAVQAVSDVVKHIWPQCKVEVFGSFRTGLYLPTSDIDVVIFDSRVKTPQVGLYALAKALSQKGVAKKIQVIAKARVPIVKFVETKSGIAFDISFDVDGGPQAADFIKDAVKKLPALRPLCMILKVFLHQRELNEVYSGGIGSYALLTMLITHLQLIWGGKDILGYRQAKEHNLGILLVKFFDFYGRKLNHYDVGISCNSAKTFFLKIDKDFMNLDRPHLLSIQDPMAPDNDIGKNSFNYFKVKSAFSKAYSLLTDANLITNLGPKKSILGTIVRPDSILLDRKGWNNEDQLPDMLTEPWEPVTRQFDSENDVVYNWHVIDEDEPLPRNSQSTSEDTSSSPSKKRKSSKSKQKSRKKSKADVTGSSNAANGFREDRASKREAGSSKRRKGPREYDRFTNTLPQYTHVSRW

SEQ ID NO: 112055 - protein, 272 aa, Setaria italica
  Transcript Sequence Number=SeqID_46081
  Gene Ontology: Mol. function=receptor activity; Biological process =proteolysis
  Homolog annotation: Hit_ID=B6TX00; Match level="QueryCoverage=83%, HitCoverage=58%, E-value=2e-44, Identity=48%"; Hit description=F-box domain containing protein
  Pfam annotation: Domain name=F-box; Domain location=26-73; Score =38.3; E_value=3.1e-08; Accession=PF00646.25; Description=F-box domain
SPAAGRADSQSEAWTWGTVLTAERGAAADGLPDDALVEILSRVPVRSLHRFKCVSRTWRDLIADPLNRKRLPQTLEGFFCSAGTGADFHGRFISLPGRSAPLVDPSFSFLTKLPGIENFKLLGSCNGLFLFEHGWNSGIGGPDYAVCNPATEQWVTVASSGCPLDPPSEAADTYLIFDPAVSPHFHLVHMCQKDCMGEIEVRAYSSETRVWSDRTSQQSRCQDEGGLEQLVNGGAILNPTWGSAFVNGMLHLVIYHVAGEYVIAAEYVIAAM

SEQ ID NO: 112056 - protein, 107 aa, Setaria italica
  misc_feature (99)..(99): Xaa can be any naturally occurring amino acid
  Transcript Sequence Number=SeqID_46082
MENVLLDRSSGSFEFPKRSLGRSRRGLAARPAAPGGAYSSFPTYQPPYSGAWTSAPALPYARPPIYSSPSLPLLPSNQPPLLPLPPTATKYATFPCLPXAAAPPPSP

SEQ ID NO: 112057 - protein, 65 aa, Setaria italica
  Transcript Sequence Number=SeqID_46083
RLQVGRSKLNGSAEEATNLQLESNSGCSESLLDELCRCLSLFIILRCKERRSPCIEQPCDECLWF

SEQ ID NO: 112058 - protein, 555 aa, Setaria italica
  Transcript Sequence Number=SeqID_46084
  Gene Ontology: Cellular component=plasma membrane
  Homolog annotation: Hit_ID=B6TZP2; Match level="QueryCoverage=100%, HitCoverage=100%, E-value=0.0, Identity=74%"; Hit description =Calmodulin binding protein
  Pfam annotation: Domain name=IQ; Domain location=103-123; Score=28.3; E_value=3e-05; Accession=PF00612.19; Description=IQ calmodulin -binding motif
  Pfam annotation: Domain name=IQ; Domain location=125-145; Score=21.5; E_value=0.0034; Accession=PF00612.19; Description=IQ calmodulin -binding motif
  Pfam annotation: Domain name=IQ; Domain location=151-171; Score=4.8; E_value=9.4; Accession=PF00612.19; Description=IQ calmodulin-binding motif
  Pfam module annotation: Pfam domain module=IQ::IQ::IQ; Domain location=103-123::125-145::151-171
  Subcellular localization annotation: CTP_CleavageSite=25; ConfidenceScore=5.20e-01
MGKSPGKWIKSVLLGKKSTKSGSTKANESKAANNNGYSTGEERALSENSPVISEPVLVNPHKNGAVSANVKAENVNLPGDRAGQQNQSIVESETSGPGQLGEDQAAVKAQAAFRGYLARRSFRALKGIIRLQALIRGHLVRRQAVSTLRTTWLIVKFQALVRGRNVRLSGSDMQFNLKFGQHSLGGARSSDAWKDKLSSNAYVRKLLSSPIVLEPLHFQYDKRDPNSTYNWLERWTLGCIWKSVSQPKRVPDGKLLVRKASYAMETESAKLKRNIRKGSGATVESLPSESEKLKRNPKKSSNFPADSVPDSQLSELEKVKRNLRKVTNSMAEASKISSSRVDSSKVSDSTPDVPKVSNPVAEISKTSSLLNGISDHQDSQCEKALNEAQEYSGNGHLLEYSNIDNFDLVPGLKSDLETQFDSVSIGENVDEPTVVAPAVDIMPLQNIENEDNVLRKKEEARSQEEHLSNGSHRTSKRKSSFPNKSEYVENGTHTTPVRPRQPSYMAATESLKAKLRAQVSPKLDSDSSAEKNGFTRRHSLPSSTNSRAVKAEWKR

SEQ ID NO: 112059 - protein, 71 aa, Setaria italica
  Transcript Sequence Number=SeqID_46085
SAISAKENFIGLFYRMLIKMDRQEPCPCQAKWPQTYRLSISSVGNILGHAIWWFTTNWISCHPKRKLYFFL

SEQ ID NO: 112060 - protein, 203 aa, Setaria italica
  misc_feature (26)..(26): Xaa can be any naturally occurring amino acid
  misc_feature (73)..(73): Xaa can be any naturally occurring amino acid
  misc_feature (132)..(132): Xaa can be any naturally occurring amino acid
  Transcript Sequence Number=SeqID_46086
  Gene Ontology: Mol. function=hydrolase activity; Cellular component =lysosome; Biological process=protein deglycosylation
  Homolog annotation: Hit_ID=Q5CAG8; Match level="QueryCoverage=80%, HitCoverage=17%, E-value=6e-39, Identity=57%"; Hit description =OSJNBa0065H10.15 protein
  Pfam annotation: Domain name=Asparaginase_2; Domain location=16-203; Score=-134.1; E_value=0.0024; Accession=PF01112.10; Description =Asparaginase
MDSMGRSSVRLLVAVGLLLLRFNWCXVGGAFPMVVSTWPFREAVRAAWEVVSASDGGGSAVDAVVAGCSACEXLRCDGTVGPGGSPDENGETTLDALIMNGVTAVLPTHATVHVDILFQFIVDVIHCIIFAXENWQATMEIGAVAAMRYVKDGIKAAKLVMDHSLHTLLVGEKATDFAISMGLPGPINLSFPEVRLAVVSCSS

SEQ ID NO: 112061 - protein, 123 aa, Setaria italica
  misc_feature (15)..(15): Xaa can be any naturally occurring amino acid
  Transcript Sequence Number=SeqID_46087
  Gene Ontology: Mol. function=hydrolase activity; Cellular component =lysosome
  Homolog annotation: Hit_ID=Q5CAG8; Match level="QueryCoverage=95%, HitCoverage=15%, E-value=2e-48, Identity=78%"; Hit description =OSJNBa0065H10.15 protein
QALDSVKHEVEGSQXRRCLDWFQSDNLLEPINSHLKFIDRHNHDTISMAVIDKMGHIAVGTSTNGATFKIPGRVGDGPIPGSSSYGDDEVGACGASGDGDIMMRFLPCYQVVESMRRGMEPPG

SEQ ID NO: 112062 - protein, 95 aa, Setaria italica
  Transcript Sequence Number=SeqID_46088
EFGGMADRLCSGYVCVCSVLCSSFRYCLSLAFERTFSIFPFTLCDIQSNGAQQQQLLVRYRTTEQSNRRDTSAIKKGSMVTYFNNYHLASGSKHP

SEQ ID NO: 112063 - protein, 393 aa, Setaria italica
  Transcript Sequence Number=SeqID_46089
  Gene Ontology: Mol. function=hydrolase activity; Cellular component =lysosome; Biological process=protein deglycosylation
  Homolog annotation: Hit_ID=Q5CAG8; Match level="QueryCoverage=88%, HitCoverage=45%, E-value=1e-139, Identity=70%"; Hit description =OSJNBa0065H10.15 protein
  Pfam annotation: Domain name=Asparaginase_2; Domain location=22-387; Score=251.8; E_value=1.6e-72; Accession=PF01112.10; Description =Asparaginase
MDSMGRSSVRLLVAVGLLLLRFNWCLAVDGGGVAEVGGAFPMVVSTWPFREAVRAAWEVVSASDGGGSAVDAVVAGCSACEVLRCDGTVGPGGSPDENGETTLDALIMNGATMEIGAVAAMRYVKDGIKAAKLVMDHSLHTLLVGEKATDFAISMGLPGPINLSSPESLEKWANWRQNHCQPNFWKNVAPAGSCGPYRPINLAQALDSVKHEVEGSQGGVCQDWFQSDNLLEPINSHLKFIDRHNHDTISMAVIDKMGHIAVGTSTNGATFCTAGIATEHSNSSSWVGDGPIPGSSSYGDDEVGACGASGDGDIMMRFLPCYQVVESMRRGMEPQDAARDAISRIARKYPDFVGAVFAVNRKGVHAGACHGWTFQYSVMNSSMHDVEVITVYP

SEQ ID NO: 112064 - protein, 72 aa, Setaria italica
  Transcript Sequence Number=SeqID_46090
  Homolog annotation: Hit_ID=B6U664; Match level="QueryCoverage=100%, HitCoverage=52%, E-value=1e-33, Identity=97%"; Hit description=Rapid alkalinization factor 1
  Pfam annotation: Domain name=RALF; Domain location=6-72; Score=130.9; E_value=4.2e-36; Accession=PF05498.3; Description=Rapid ALkalinization Factor (RALF)
VDAEGEGDVAGMATGGSKRRVLQGGSGYIGYDALRRDNVPCSQRGASYYNCQPGAEANPYSRGCNAITQCRG

SEQ ID NO: 112065 - protein, 194 aa, Setaria italica
  misc_feature (166)..(166): Xaa can be any naturally occurring amino acid
  Transcript Sequence Number=SeqID_46091
  Gene Ontology: Mol. function=helicase activity; Cellular component =mitochondrion
  Homolog annotation: Hit_ID=A2Q513; Match level="QueryCoverage=96%, HitCoverage=56%, E-value=1e-49, Identity=36%"; Hit description =Pentatricopeptide repeat
  Pfam annotation: Domain name=PPR; Domain location=129-163; Score =16.1; E_value=0.11; Accession=PF01535.12; Description=PPR repeat
  Pfam annotation: Domain name=PPR; Domain location=17-51; Score=42.7; E_value=1.4e-09; Accession=PF01535.12; Description=PPR repeat
  Pfam annotation: Domain name=PPR; Domain location=52-86; Score=25.2; E_value=0.00028; Accession=PF01535.12; Description=PPR repeat
  Pfam module annotation: Pfam domain module=PPR::PPR::PPR; Domain location=129-163::17-51::52-86
LELLDRMTKEKKLPNTITYSSVIDGLCKECRLSEAMEVLDRMRLQGRKPDAGLFGKLIVGLCNAGRAVEAANYLDEMVLAGIEPNRLTWSLHARINNTVLTALCTKGELGRAFRVYQSTRTRSISTEPATFHLLVKSFSEKNNLEKAAHVVLDMLSERCIPESETXWDVIISGYWGRKNVRQEAKEIWNQLTVS

SEQ ID NO: 112066 - protein, 367 aa, Setaria italica
  misc_feature (355)..(355): Xaa can be any naturally occurring amino acid
  Transcript Sequence Number=SeqID_46092
  Gene Ontology: Mol. function=4 iron, 4 sulfur cluster binding; Cellular component=integral to membrane; Biological process=protein -chromophore linkage
  Homolog annotation: Hit_ID=P56766; Match level="QueryCoverage=90%, HitCoverage=44%, E-value=1e-178, Identity=92%"; Hit description =Photosystem I P700 chlorophyll a apoprotein A1
  Pfam annotation: Domain name=PsaA_PsaB; Domain location=3-367; Score =304.0; E_value=3.2e-88; Accession=PF00223.11; Description =Photosystem I psaApsaB protein
FLIFGSNFFLFIFLWLSGMYFHGARFSNYEAWLSDPTHIGPSAQVVWPIVGQEILNGDVGGGFRGIQITSGFFQIWRASGITSELQLYCTAIGALIFASLMLFAGWFHYHKAAPKLAWFQDVESMLNHHLAGLLGLGSLSWAGHQIHVSLPINQFLDAGVDPKEIPLPHEFILNRDLLAQLYPSFAEGATPFFTLNWSKYAEFLSFRGGLDPITGGLWLSDIAHHHLAIAILFLIAGHMYRTNWGIGHGLKDILEAHKGPFTGQGHKGLYEILTTSWHAQLSLNLAMLGSTTIVVAHHMYSMPPYPYLATDYGTQLSLFTHHMWIGGFLIVGAAAHAAIFMVRVLRSFLTYFVLXNDLLDRVLRHRE

SEQ ID NO: 112067 - protein, 138 aa, Setaria italica
  Transcript Sequence Number=SeqID_46093
  Subcellular localization annotation: CTP_CleavageSite=95; ConfidenceScore=5.70e-01
MASCSSPPWPPIPLLLLLFFLLSSSFSFSVLTASAAQASSRQAESGGNATATAAQGTETAAWTPRLRKTFLDGGVERWRGRRLVGRFQVCAVCTCCGGPHGMCIPAPCCYAINCNIPNRPFGVCSFTPRTCNCLNCHL

SEQ ID NO: 112068 - protein, 52 aa, Setaria italica
  Transcript Sequence Number=SeqID_46094
  Gene Ontology: Mol. function=lyase activity
  Homolog annotation: Hit_ID=B6SL02; Match level="QueryCoverage=98%, HitCoverage=10%, E-value=1e-15, Identity=82%"; Hit description =Ribosomal RNA apurinic site specific lyase
ASVDEMLTKLKSLTTAKRASECPTLLAVARDGDSAWCFQRASDLSVSDPFDW

SEQ ID NO: 112069 - protein, 253 aa, Setaria italica
  misc_feature (11)..(11): Xaa can be any naturally occurring amino acid
  misc_feature (76)..(76): Xaa can be any naturally occurring amino acid
  Transcript Sequence Number=SeqID_46095
  Gene Ontology: Mol. function=nucleotide binding; Cellular component =intrinsic to membrane; Biological process=defense response
  Homolog annotation: Hit_ID=B9V0H6; Match level="QueryCoverage=94%, HitCoverage=16%, E-value=5e-66, Identity=54%"; Hit description=NBS -LRR disease resistance protein family-4
  Pfam annotation: Domain name=NB-ARC; Domain location=1-198; Score= -6.5; E_value=7.1e-09; Accession=PF00931.14; Description=NB-ARC domain
LKKLLAGKKIXIVLDDLWERDPYKLTDLKTMLRLGGTENTIVIVTTRDERVAKEVGTIEPYKIELLSKEVCWDIIXKQKCGFEDRDDKEQLKDIGLEIASKCGGVPLAAQSLGYTLRSKDLNGWEKVNESDVWNETNSMDGSLHNQVLAALKLSYSSMNRLVRPCFTYCAIFPKGHNIVKDDLSRQWISLGFIRPMRVHIKKHQLSEQYIAQLLGMSFLQPSMLPPTSGTYHEGIALFTMHDLVHDFARLILD

SEQ ID NO: 112070 - protein, 116 aa, Setaria italica
  Transcript Sequence Number=SeqID_46096
VLVLARLHISIHFSDSYTSIPIHFSIRISINQHEHIQINVTDPFSIPLSRKSTCARKTSPFHFFQVVDSRDVQMRFWPDQRSTWELARNLLKGGLALSSQESGTWSCSWNMHENLS

SEQ ID NO: 112071 - protein, 185 aa, Setaria italica
  misc_feature (134)..(134): Xaa can be any naturally occurring amino acid
  misc_feature (178)..(178): Xaa can be any naturally occurring amino acid
  Transcript Sequence Number=SeqID_46097
  Homolog annotation: Hit_ID=B6SWY6; Match level="QueryCoverage=100%, HitCoverage=61%, E-value=1e-73, Identity=59%"; Hit description =Pentatricopeptide repeat protein PPR1106-17
  Pfam annotation: Domain name=PPR; Domain location=100-134; Score =16.8; E_value=0.088; Accession=PF01535.12; Description=PPR repeat
CLEASLSSGEQGRSNKSKSHRVRAQAFKSKNQSLLSQSHRGDGHGDPADEDRGGDLPGSAAPSLPDSEAVAFLLRSCRSKMGVRRAHAVALRSLDSLGVFVSNNLISAYVKFDEVADAKKVFDEMGDRSVVSWXTAMMNGYQKLGRHSEVVRLFLDMLATGVQGNSLTFVCLLKSCGXQCDAKLG

SEQ ID NO: 112072 - protein, 46 aa, Setaria italica
  Transcript Sequence Number=SeqID_46098
  Gene Ontology: Mol. function=protein kinase activity; Biological process=protein amino acid phosphorylation
  Homolog annotation: Hit_ID=Q53P28; Match level="QueryCoverage=95%, HitCoverage=14%, E-value=4e-15, Identity=88%"; Hit description =Protein kinase domain containing protein, expressed
EAVLRDAGARKEVIAAFHVALGCVEADPERRPRMKAVSDSLDKIGA

SEQ ID NO: 112073 - protein, 113 aa, Setaria italica
  Transcript Sequence Number=SeqID_46099
CQQLQLHPLISMTRAALHLGFACLMVIQFYGLDDAKRDYQCRVQKICRSFHGANHEFVHLSAYQLNMLIMFGYWSPSEFPLPASLVSFCVICSSQTSQIPYFHRPLFPCTRKL

SEQ ID NO: 112074 - protein, 197 aa, Setaria italica
  misc_feature (88)..(88): Xaa can be any naturally occurring amino acid
  Transcript Sequence Number=SeqID_46100
  Gene Ontology: Mol. function=mRNA (2'-O-methyladenosine-N6-) -methyltransferase activity; Cellular component=nucleus; Biological process=nucleobase, nucleoside, nucleotide and nucleic acid metabolic process
  Homolog annotation: Hit_ID=B6SVX1; Match level="QueryCoverage=86%, HitCoverage=24%, E-value=1e-27, Identity=46%"; Hit description=N6 -adenosine-methyltransferase MT-A70-like protein
PETSSASEAERAALADLAAELGGSAHAAVALALRRIAEDSGALQIEEAIIGGKQMMMVWAIDRSKLLKELPESASVPQAQPPPTPQAXPSETDANSAIIPRPPPLQQPDMWGHPMPPMFPRPRGMGMPRMPPGLMPLQRPFMPPGAVMPMGGGPGPGPNQLKQRTEEDDLKDLELLLNKKTYREKQNTKTGEELLDL

SEQ ID NO: 112075 - protein, 159 aa, Setaria italica
  Transcript Sequence Number=SeqID_46101
  Gene Ontology: Biological process=biosynthetic process
  Homolog annotation: Hit_ID=B9T3U9; Match level="QueryCoverage=100%, HitCoverage=16%, E-value=4e-20, Identity=38%"; Hit description =Transferase, transferring glycosyl groups, putative
HIKLLESVIHFPSYAKLPSSASKVQERTWLWDPFEMKAALENSLLEDESHTSIKTLDILRDFPQSNQTTYSGTNDTSYDYPNLSDWNDLSEIEIFEDIERREMEEIDERVERPLLSWDEVYRNARKSERLKPEVNERDEGELERTGQPVCIYEIYNGEG

SEQ ID NO: 112076 - protein, 261 aa, Setaria italica
  misc_feature (33)..(33): Xaa can be any naturally occurring amino acid
  misc_feature (52)..(52): Xaa can be any naturally occurring amino acid
  Transcript Sequence Number=SeqID_46102
  Gene Ontology: Mol. function=protein serine/threonine kinase activity; Biological process=protein amino acid phosphorylation
  Homolog annotation: Hit_ID=Q2R2M7; Match level="QueryCoverage=92%, HitCoverage=86%, E-value=2e-55, Identity=44%"; Hit description =Protein kinase domain containing protein
  Pfam annotation: Domain name=APH; Domain location=42-213; Score= -14.9; E_value=0.026; Accession=PF01636.15; Description =Phosphotransferase enzyme family
  Pfam annotation: Domain name=Pkinase; Domain location=39-248; Score =88.8; E_value=1.9e-23; Accession=PF00069.17; Description=Protein kinase domain
  Pfam annotation: Domain name=Pkinase_Tyr; Domain location=37-252; Score=56.8; E_value=1.7e-17; Accession=PF07714.9; Description =Protein tyrosine kinase
  Pfam module annotation: Pfam domain module=APH::Pkinase::Pkinase_Tyr; Domain location=42-213::39-248::37-252
MDLQKDKEPIQDAHRSKCSVHSNYDIRCFTGSXIERITNNYETILGKGGFGXEVFKGVLEDESEVAVKRLIRNVTENFHQELTVHREINHRNVVRLIGYCKEENALMMVTEYIPNGNLCDALHRGKIPIPLDIRLRIAADCAEALAYMHSHMNTQVIHGDIKPANILLDDNFTAKISDFGIARLVDIDKTLFTEFARGSIGYMDPLLTRDARLTVKSDVYSFGVVLFELITRKKATEIDGKANFLDHFIGALAGGIKGVRE

SEQ ID NO: 112077 - protein, 132 aa, Setaria italica
  Transcript Sequence Number=SeqID_46103
KGVGRGGDCLERSAHPISRTGVVQLEQTHRKRRVWSRHNSLSLTFQHFARVKGQTQELTLFTAVFQTQRVLDSRLTYYNSFQNLGCRGVPQKNESLVTLHLQMDTMSRRRGAVFFNVHTRRSLILLGVLLSF

SEQ ID NO: 112078 - protein, 188 aa, Setaria italica
  Transcript Sequence Number=SeqID_46104
KLRTRLHDLDPYTYMESNSMAPQQREDDVMEVPEIDGDLLVELLDASLAAEDNAGQALGFAADVDGDCWIDSQEPSCGIHAHQDCEDCGLDGILSDFEEYGSARARPFPAPYAFFGDEDTLEWAETTDAVMGPFAGGCMGDWYMDGMVMAMEWEEEEEGGEGSAFSFEPCYGGGEAGAEQVYGSPLWE

SEQ ID NO: 112079 - protein, 102 aa, Setaria italica
  Transcript Sequence Number=SeqID_46105
VNQFSIRTRQEIIFMGFSYHNIWNINHEQSISFAPDRQSGSPFQHPCNPQKLCLGNLDKRSYRNSNDYALGTVLPSHNEISKNSSILFELQVYACTNKDTRY

SEQ ID NO: 112080 - protein, 53 aa, Setaria italica
  Transcript Sequence Number=SeqID_46106
GIRLIHPIQEHVVARKKGAQTNINNGRSLIDSSGLSLRLHSRDRTHRSNLVSN

SEQ ID NO: 112081 - protein, 86 aa, Setaria italica
  Transcript Sequence Number=SeqID_46107
CRSCFVQGLKGIPFSSRLQVRSSRIAWVMERRQKGLLASCLGDAKRERGFLPGWTTLLRHARRWVRSWISGRGNAGAGDEGTGRLP

SEQ ID NO: 112082 - protein, 109 aa, Setaria italica
  Transcript Sequence Number=SeqID_46108
FTVIWFSESESKPFGVHPQVDKPDTQNNKHLMESLLNRQLHTLMSVLRQVKNRKVQWALIMLKVKLQNNLHTLVTQLLQREQQRLIKIGLHHLEPRKYNQVSRMPRSKL

SEQ ID NO: 112083 - protein, 75 aa, Setaria italica
  Transcript Sequence Number=SeqID_46109
TVLIIYIVLKPVTSIERGDTLRCTGTGISTKMCMYYILLFLTSCLVLRTTIMLRMSRELQDVLPYPFPKHCAFDP

SEQ ID NO: 112084 - protein, 82 aa, Setaria italica
  Transcript Sequence Number=SeqID_46110
  Homolog annotation: Hit_ID=B9S5I4; Match level="QueryCoverage=97%, HitCoverage=16%, E-value=2e-18, Identity=48%"; Hit description =Pentatricopeptide repeat-containing protein, putative
TLLASRRTVLPNKHSVRLAVAFGLISSEAGAPVLVKKNVRVCNQCHHALKLISKYSRRKIVVGDAKIYHVFSDGSCCCGDYW

SEQ ID NO: 112085 - protein, 44 aa, Setaria italica
  Transcript Sequence Number=SeqID_46111
NFKRRSCLVSVIKKFHLHIHYPLFSLEIQLDNLLPQFTLFDKFQ

SEQ ID NO: 112086 - protein, 102 aa, Setaria italica
  Transcript Sequence Number=SeqID_46112
LPKILDESTSFSTSFGGIDNDSRGYVQNHDKDGTKSRDKCSTAKKLFADTTAEDGESNIRCLAGLSYIGSQEPGDLSQANAFDVVDKLISINGGLSSQETNP

SEQ ID NO: 112087 - protein, 51 aa, Setaria italica
  Transcript Sequence Number=SeqID_46113
VISCALLDVTVYLILIKSSNHAMGQSYSLCNKVHLNMSIFIHCNIKCTSQQ

SEQ ID NO: 112088 - protein, 94 aa, Setaria italica
  Transcript Sequence Number=SeqID_46114
  Gene Ontology: Cellular component=endosome membrane; Biological process=autophagy
  Homolog annotation: Hit_ID=Q4A192; Match level="QueryCoverage=82%, HitCoverage=16%, E-value=6e-34, Identity=87%"; Hit description =Beclin 1 protein (Fragment)
YFHCHLKNNHFTVQEERDAVFAKIEVSQVHLELLKRTNVLNDAFYISHDGVIGTINNFRLGRLSNVEVEWDEINAAWGSKSCLLVLFCSYYLIW

SEQ ID NO: 112089 - protein, 98 aa, Setaria italica
  Transcript Sequence Number=SeqID_46115
  Gene Ontology: Biological process=autophagy
  Homolog annotation: Hit_ID=Q4A193; Match level="QueryCoverage=98%, HitCoverage=19%, E-value=2e-32, Identity=70%"; Hit description =Beclin 1 protein
TQYDEAMKWFLMCLQEFVDFAESLDKENNVPPDELLKLPYKIDGDKVGGYRVVLGDFNTRENSTKALKNMLRDLNWVLFWFIGTTSFALPSGALHTQI

SEQ ID NO: 112090 - protein, 102 aa, Setaria italica
  Transcript Sequence Number=SeqID_46116
  Gene Ontology: Biological process=autophagy
  Homolog annotation: Hit_ID=Q4A192; Match level="QueryCoverage=50%, HitCoverage=11%, E-value=7e-17, Identity=79%"; Hit description =Beclin 1 protein (Fragment)
VFILVPYFGKLFKVVTKLFLVIVLHFNISQYGVFGTINNLRLGHTHVVEWDEINAAWGQAALLLHTMAQYYTPKFQYPWHIMMFFYQVYVPIILLRTICHLS

SEQ ID NO: 112091 - protein, 378 aa, Setaria italica
  misc_feature (34)..(34): Xaa can be any naturally occurring amino acid
  Transcript Sequence Number=SeqID_46117
  Gene Ontology: Mol. function=protein binding; Cellular component =endosome membrane; Biological process=autophagy
  Homolog annotation: Hit_ID=Q4A193; Match level="QueryCoverage=99%, HitCoverage=75%, E-value=0.0, Identity=83%"; Hit description=Beclin 1 protein
  Pfam annotation: Domain name=APG6; Domain location=29-362; Score =203.9; E_value=4.3e-58; Accession=PF04111.4; Description=Autophagy protein Apg6
  Subcellular localization annotation: CTP_CleavageSite=35; ConfidenceScore=5.59e-01
SEGGGAQLTPPGVNSSSPSPGNNSGFHSSVTVLXRAFEIASSQTQVEQPLCLECMRVLSDKMDKEIEDVNADIKAYEASLQRLEQEPYNILSETDFQKEKQKIEEEEKKLKAAIEEAEKLYSEVTSEMKDLEIKSKQFEELEERYWHEFNSFQFQLKSHQEERDAVFAKIEVSQVHLELLKRTNVLNDAFYISHDGVIGTINNFRLGRLSNVEVEWDEINAAWGQAALLLHTMAQYFTPKFQYRIKIHPMGSYPRVTDIHNNTYELFGPVNLFWSTRFDKAMTWFLTCLQEFAEFAVSLDKENNVPSEKSLKLPYKIDGDKVGSHTIVLSFNKNENWTKALKYMLCNLKWVLYWFIGNTSFAPPSGPVRAQSLKNKSS

SEQ ID NO: 112092 - protein, 59 aa, Setaria italica
  Transcript Sequence Number=SeqID_46118
STVPGQSAHQLETNRHESWLCHGMRFKADVLMVLDRSYWAKDKWLSVDVDFDFLLCAPG

SEQ ID NO: 112093 - protein, 130 aa, Setaria italica
  Transcript Sequence Number=SeqID_46119
  Gene Ontology: Mol. function=structural constituent of ribosome; Cellular component=ribonucleoprotein complex; Biological process =translation
  Homolog annotation: Hit_ID=Q5I7L4; Match level="QueryCoverage=94%, HitCoverage=56%, E-value=2e-46, Identity=75%"; Hit description=60S ribosomal protein L6
  Pfam annotation: Domain name=Ribosomal_L6e; Domain location=72-130; Score=40.7; E_value=1.2e-10; Accession=PF01159.11; Description =Ribosomal protein L6e
  Subcellular localization annotation: CTP_CleavageSite=32; ConfidenceScore=5.36e-01
KPAAVAEPKFYPADDVKPRKPSTRKPKPTKLRSSITPGTVLILLAGRFMGKRVVFLKQLKSGMLLVTGPFKINGVPIRRVNQTYVIATSTKVDISGVNVEKFDDAYFARDKKQKAKKTVGLNFFVVLVVR

SEQ ID NO: 112094 - protein, 165 aa, Setaria italica
  misc_feature (62)..(62): Xaa can be any naturally occurring amino acid
  Transcript Sequence Number=SeqID_46120
  Gene Ontology: Mol. function=structural constituent of ribosome; Cellular component=ribonucleoprotein complex; Biological process =translation
  Homolog annotation: Hit_ID=Q0JCF8; Match level="QueryCoverage=98%, HitCoverage=66%, E-value=1e-77, Identity=90%"; Hit description=60S ribosomal protein L6 (Fragment)
  Pfam annotation: Domain name=Ribosomal_L6e; Domain location=63-165; Score=208.4; E_value=1.9e-59; Accession=PF01159.11; Description =Ribosomal protein L6e
  Subcellular localization annotation: CTP_CleavageSite=73; ConfidenceScore=5.33e-01
TVVKPSTRKPKPTKLRSSITPGTVLILLAGRFMGKRVVFLKQLKSGMLLVTGPFKIQTVYPXIRRVNQTYVIATSTKVDISGVNVEKFDDAYFARDKKQKAKKTEGELFETEKEATKDLPQFKKDDQKTVDAELIKAIEAVPDLKTYLGARFSLRDGDKPHEMVF

SEQ ID NO: 112095 - protein, 242 aa, Setaria italica
  Transcript Sequence Number=SeqID_46121
  Gene Ontology: Mol. function=structural constituent of ribosome; Cellular component=ribonucleoprotein complex; Biological process =translation
  Homolog annotation: Hit_ID=Q0JCF8; Match level="QueryCoverage=88%, HitCoverage=90%, E-value=4e-92, Identity=80%"; Hit description=60S ribosomal protein L6 (Fragment)
  Pfam annotation: Domain name=Ribosomal_L6e; Domain location=135-242; Score=236.3; E_value=7.5e-68; Accession=PF01159.11; Description =Ribosomal protein L6e
  Pfam annotation: Domain name=Ribosomal_L6e_N; Domain location=12-72; Score=41.9; E_value=2.4e-09; Accession=PF03868.7; Description =Ribosomal protein L6, N-terminal domain
  Pfam module annotation: Pfam domain module=Ribosomal_L6e::Ribosomal _L6e_N; Domain location=135-242::12-72
SSASTPCRRRRRRPAAAAPRDDPMAPSSKLSMGIKKASRSHAYHRRGLWAIKAKHGGAFPKAEKPAAVAEPKFYPADDVKPRKPSTRKPKPTKLRSSITPGTVLILLAGRFMGKRVVFLKQLKSGMLLVTGPFKINGVPIRRVNQTYVIATSTKVDISGVNVEKFDDAYFARDKKQKAKKTEGELFETEKEATKDLPQFKKDDQKTVDAELIKAIEAVPDLKTYLGARFSLRDGDKPHEMVF

SEQ ID NO: 112096 - protein, 122 aa, Setaria italica
  Transcript Sequence Number=SeqID_46122
  Homolog annotation: Hit_ID=B6SQP1; Match level="QueryCoverage=68%, HitCoverage=35%, E-value=4e-27, Identity=71%"; Hit description=FAD binding protein
FVHHWGRSFCSNIPFTNHLHSVLFNREYLAVYNDEVRWKPGNMLHLLQEDKSADQLDSDVFLVTVMIIVHNMLELDYAMQENIVGALSLKTLPSELEGYCLMWDLRPYIDFDVMHLAWEMCP

SEQ ID NO: 112097 - protein, 173 aa, Setaria italica
  Transcript Sequence Number=SeqID_46123
  Gene Ontology: Mol. function=iron-sulfur cluster binding; Cellular component=peroxisome; Biological process=oxidation reduction
  Homolog annotation: Hit_ID=Q6Z351; Match level="QueryCoverage=100%, HitCoverage=12%, E-value=5e-69, Identity=73%"; Hit description =Putative aldehyde oxidase-like protein
  Pfam annotation: Domain name=Ald_Xan_dh_C2; Domain location=1-173; Score=-278.9; E_value=0.018; Accession=PF02738.10; Description =Aldehyde oxidase and xanthine dehydrogenase, molybdopterin binding domain
FSKGMAEADHKILSTEVKLASQYYFYMETQTALAIPDEDKTMVVYSSSQYPELAQTVIAKCLGIPFGNVRVITRRVGGGFGGKGYRSFPVATAAALCAYKLQCPVRMCLNRNTDMIMVGSRHPIKSHYSVGFKSDGKITALHLDLLIDAGISEDLSPIIPNGVISGLKKYNWG

SEQ ID NO: 112098 - protein, 100 aa, Setaria italica
  Transcript Sequence Number=SeqID_46124
MAGYPPHGSGYPYGPGAGGGGGYGAPPPYGSSPAPSAPPYGEKPPKEGKTSSSSSVPPYYGAPPSSQPYGGGGYGAPPAGQQYGAPYGAPPPSSAPYGAP

SEQ ID NO: 112099 - protein, 63 aa, Setaria italica
  Transcript Sequence Number=SeqID_46125
  Gene Ontology: Cellular component=chloroplast
LYEDMRSSPDPPLSLPFRVILKGLVPYPELREKIKQDFLELFPDMIVYDPPGSLSDVDDEFKF

SEQ ID NO: 112100 - protein, 32 aa, Setaria italica
  Transcript Sequence Number=SeqID_46126
NELIIKLITLEMNLLSLINPSLAHVYCSTTLS

SEQ ID NO: 112101 - protein, 86 aa, Setaria italica
  Transcript Sequence Number=SeqID_46127
  Gene Ontology: Mol. function=coproporphyrinogen oxidase activity; Cellular component=chloroplast; Biological process=porphyrin biosynthetic process
  Homolog annotation: Hit_ID=P35055; Match level="QueryCoverage=91%, HitCoverage=18%, E-value=8e-14, Identity=53%"; Hit description =Coproporphyrinogen-III oxidase, chloroplastic
LSLTFALMERETPEPAAPATFLRGEEGASPESARARFERMIRRVQAEVCAELEAVEGGASDGGGGGALFREDAWTRPGGGGGISRV

SEQ ID NO: 112102 - protein, 76 aa, Setaria italica
  Transcript Sequence Number=SeqID_46128
LSVNANALFIQSYESSFALDFDMPKYGELFIDHLKRGEGKNMIQNSNEVQSFAGQDNVLSTSNAELCPACNIVQKA

SEQ ID NO: 112103 - protein, 114 aa, Setaria italica
  Transcript Sequence Number=SeqID_46129
SYAKERVEFQVDWTQKSPFNLPKGKMLTSNVRDDRGLENSRKSNKEGLREGVRAQAYKSNNMTPSPTGSVKTRAPAPPPPPPPLRRPSCFERKLNASNLPAVGRKPKASTPHWH

SEQ ID NO: 112104 - protein, 666 aa, Setaria italica
  misc_feature (41)..(41): Xaa can be any naturally occurring amino acid
  misc_feature (104)..(104): Xaa can be any naturally occurring amino acid
  Transcript Sequence Number=SeqID_46130
  Gene Ontology: Mol. function=nucleic acid binding; Cellular component= cytoplasm; Biological process=multicellular organismal development
  Homolog annotation: Hit_ID=Q5Z5B2; Match level="QueryCoverage=100%, HitCoverage=63%, E-value=0.0, Identity=91%"; Hit description=Protein argonaute 1D
  Pfam annotation: Domain name=PAZ; Domain location=2-139; Score=178.6; E_value=1.7e-50; Accession=PF02170.14; Description=PAZ domain
  Pfam annotation: Domain name=Piwi; Domain location=292-613; Score =520.4; E_value=2.3e-153; Accession=PF02171.9; Description=Piwi domain
  Pfam module annotation: Pfam domain module=PAZ::Piwi; Domain location= 2-139::292-613
PLPVIDFVAQLLNTDIHSRPLSDAERVKIKKALRGVKVEVXHRGNMRRKYRIAGLTSQATRELTFPVDQGGTVKSVVQYFQETYGFAIQHTYLPCLQVGNQQRXSYLPMEVCKIVEGQRYSKRLNQSQIRALLEETCQRPHDRERDIIQMVNHNSYHEDPYAKEFGIKISERLASVEARILPAPRLKYNETGREKDCLPRVGQWNMMNKKMVNGGRVRSWFCVNFARNVQESVASGFCRELARMCQASGMDFALEPILPPMYAHPDQVERALKARFHDVMNMLGPQRKELDLLIGILPDNNGSLYGDLKRVCEIDLGIVSQCCCAKQVFKMNKQILANLALKLNVKVGGRNTVLVDAVSRRIPLVTDRPTIIFGADVTHPHPGEDSSPSIAAVVASQDWPEVTKYAGLVSAQSHRQELIEDLYKVTHDPQRGTICGGMIRELLISFKRSTGQKPQRILFYRDGVSEGQFYQVLLHELDAIRRACASLEANYQPQVTFIVVQKRHHTRLFAHNHNDQNSVDRSGNILPGTVVDSKICHPTEFDFFLCSHAGIKGTSRPAHYHVLWDENNFTADALQTLTNNLCYTYARCTRSVSIVPPAYYAHLAAFRARFYMEPDSSESGSLASGVRGGGAPSSSSTSRSTRAATGGAVRPLPALKDSVKNVMFYC

SEQ ID NO: 112105 - protein, 79 aa, Setaria italica
  Transcript Sequence Number=SeqID_46131
  Gene Ontology: Mol. function=transferase activity, transferring glycosyl groups; Biological process=metabolic process
  Homolog annotation: Hit_ID=Q6AVQ5; Match level="QueryCoverage=81%, HitCoverage=13%, E-value=1e-14, Identity=73%"; Hit description =Putative UDP-glycosyltransferase
MAVMAAQKSVILYPSLGVGHLNPMVELAKLFLRRGLAVVIAVVDSPDKDSVSADAIARLAAANPDIAFRLLPVPSCGRE

SEQ ID NO: 112106 - protein, 336 aa, Setaria italica
  misc_feature (7)..(7): Xaa can be any naturally occurring amino acid
  misc_feature (166)..(166): Xaa can be any naturally occurring amino acid
  Transcript Sequence Number=SeqID_46132
  Gene Ontology: Mol. function=GTPase activator activity; Cellular component=chloroplast; Biological process=regulation of GTPase activity
  Homolog annotation: Hit_ID=Q6NUV0; Match level="QueryCoverage=89%, HitCoverage=36%, E-value=2e-30, Identity=29%"; Hit description=Rab3 GTPase-activating protein catalytic subunit
VPPPSLXDRVMKDLFSDEAGNSNYMEAENKHSRAMRGAPADSLFGQFCLHALWFGNCNIRAIAVLWIDFVREIRWCWEESERLPRMKSSSSIDLSSCLIHQKLQMLAICIERKKSLNREKGAGHKDETSNATAVNKTRKGSAGVVPKMMLLNTFQEMHAPYTQFLXDAPLMTEDMHEERLHAAEAFGNAIGLSGQLERDILSSDMSAFKAANPDAVFEDFIRWHSPGDWVSEDKADGNSGWPPKGKLSQRMSEHGNMWRKIWNDAPPLPVSEQKSLLDPVREGEKVLHYLETLRPQQLLEQMVCTAFKSSADILNKTTYGGFKLMKTKMDQLYATM

SEQ ID NO: 112107 - protein, 248 aa, Setaria italica
  misc_feature (168)..(168): Xaa can be any naturally occurring amino acid
  misc_feature (188)..(188): Xaa can be any naturally occurring amino acid
  Transcript Sequence Number=SeqID_46133
  Gene Ontology: Cellular component=chloroplast
LFLVTKYLLLLVDPIQKGVRVLHYLETLRPQQLLEQMVCTAFKSSADILNKTTYGGFKLMKTKMDQLYATMASTLKSLQGNSDISDLAGDLKRLCQVFEHIEKLLILAASIHRKLIDAPRLAQAIFADYFNYYLPKMGSTLESICYEKEFTTKEKVGMHERDAVSNLXFPPPTANQSWRKVLSMGNLXNGHEPMQREIIFSVKERISNGHYSSPTPLCTDDEQIQTHRMYISGTSNDLWVALSVTSWD

SEQ ID NO: 112108 - protein, 97 aa, Setaria italica
  Transcript Sequence Number=SeqID_46134
  Subcellular localization annotation: CTP_CleavageSite=57; ConfidenceScore=5.68e-01
SSSSTSSSSSSSSSESTVRPIVLERSQPNERRNRAECGRISTPRRSGTSRGRRLRKRATLLRERRPRRKEASLAAARNPAARRHSNGLRPNRGRIEG

SEQ ID NO: 112109 - protein, 97 aa, Setaria italica
  Transcript Sequence Number=SeqID_46135
  Homolog annotation: Hit_ID=B6TT53; Match level="QueryCoverage=61%, HitCoverage=41%, E-value=2e-17, Identity=65%"; Hit description =SAUR36-auxin-responsive SAUR family member
  Pfam annotation: Domain name=Auxin_inducible; Domain location=1-59; Score=75.9; E_value=1.5e-19; Accession=PF02519.6; Description=Auxin responsive protein
LVLTTADGKRFEVPLVYLNTNVFGELLRMSEDEFGFTSEDRITVPCEAAVMEYVMRLLRRKPSEEVESAVLSSVVKHNYMSSMTMVSKGLSQSLSIF

SEQ ID NO: 112110 - protein, 108 aa, Setaria italica
  Transcript Sequence Number=SeqID_46136
  Subcellular localization annotation: CTP_CleavageSite=55; ConfidenceScore=5.26e-01
RTTTEADQGTITEVSHIHTHLAEMSSTTVLFSPSSSLFLTKPSPLTKSRAAAAVRCSNEPALSVSREEEGVEMMGRRRSLISAAAAACGASVLGFAGAMAWPPLRPAG

SEQ ID NO: 112111 - protein, 53 aa, Setaria italica
  Transcript Sequence Number=SeqID_46137
KQLVRRKGADGSGFKSCGVEKKRNQGILGLKKALFFSGCRPNPLSLARKRTDF

SEQ ID NO: 112112 - protein, 70 aa, Setaria italica
  Transcript Sequence Number=SeqID_46138
  Subcellular localization annotation: CTP_CleavageSite=64; ConfidenceScore=5.03e-01
CHNIVQLMFLELNSNKNLSLGKLGIKSQIRTTIVTTSDRTMLQFSLCFGSPLIGVPESCLFRVLLQSRWP

SEQ ID NO: 112113 - protein, 61 aa, Setaria italica
  Transcript Sequence Number=SeqID_46139
  Homolog annotation: Hit_ID=B6TBA2; Match level="QueryCoverage=70%, HitCoverage=10%, E-value=7e-10, Identity=73%"; Hit description=Kelch motif family protein
RTTGTPQSGEWCQITWEGGERKRLGPVAALSADNGRITEVFMLDGNHVCRLLVKPEVHGGS

SEQ ID NO: 112114 - protein, 86 aa, Setaria italica
  Transcript Sequence Number=SeqID_46140
  Subcellular localization annotation: CTP_CleavageSite=41; ConfidenceScore=5.17e-01
TKSAQKHRMESLATVPKVQFWSSLINDVLRVRNFLVCRPAQSASVSCWVLCCICKRIQFQGNERQVAPTVPCQRSRLHQLMGGLKS

SEQ ID NO: 112115 - protein, 54 aa, Setaria italica
  misc_feature (23)..(23): Xaa can be any naturally occurring amino acid
  Transcript Sequence Number=SeqID_46141
  Homolog annotation: Hit_ID=Q6EN70; Match level="QueryCoverage=96%, HitCoverage=10%, E-value=3e-11, Identity=61%"; Hit description =Streptococcal hemagglutinin-like protein
ERLCSVVNVQIPYLDQWSDVEGXHLSCLGGVSTALHNASLRLPVIGNVKATQGE

SEQ ID NO: 112116 - protein, 156 aa, Setaria italica
  misc_feature (48)..(48): Xaa can be any naturally occurring amino acid
  misc_feature (117)..(117): Xaa can be any naturally occurring amino acid
  misc_feature (143)..(143): Xaa can be any naturally occurring amino acid
  Transcript Sequence Number=SeqID_46142
  Gene Ontology: Mol. function=protein serine/threonine kinase activity; Cellular component=cell surface; Biological process =protein amino acid phosphorylation
  Homolog annotation: Hit_ID=B9RVX8; Match level="QueryCoverage=85%, HitCoverage=16%, E-value=9e-29, Identity=51%"; Hit description=S -receptor kinase, putative
  Pfam annotation: Domain name=B_lectin; Domain location=66-156; Score =41.5; E_value=3.4e-09; Accession=PF01453.16; Description=D-mannose binding lectin
MLILVFLLLSSFNLQTTGAIDTLTLGQSLPWNQTLVSKGGNFELGLFXPGKSKKYYIGIWFKKVSKQTVVWVANRERPILEPSASRFTLSDRGELLVVQVTPSNTLLWSSNASATSXPRATVATLQDDGNLVVRSNATASASXPVVWQSFDHPRNN

SEQ ID NO: 112117 - protein, 124 aa, Setaria italica
  Transcript Sequence Number=SeqID_46143
  Gene Ontology: Mol. function=protein serine/threonine kinase activity; Biological process=protein amino acid phosphorylation
  Homolog annotation: Hit_ID=B9R6R5; Match level="QueryCoverage=95%, HitCoverage=12%, E-value=1e-24, Identity=44%"; Hit description =Receptor protein kinase, putative
  Pfam annotation: Domain name=LRRNT_2; Domain location=2-35; Score =11.0; E_value=0.07; Accession=PF08263.4; Description=Leucine rich repeat N-terminal domain
YLARMKEQFPGPGMSRWDFSSPAPDYCRFQGVACDEGGNVTGIDVTSWRLVGRLPPGVCASLPALRELRMACNDVRGGFPAGLLNCTYLEVLNVSYSGMSGTVPDLSPLRALRVLDMSSNLFTG

SEQ ID NO: 112118 - protein, 108 aa, Setaria italica
  Transcript Sequence Number=SeqID_46144
  Gene Ontology: Mol. function=hydrolase activity; Biological process =metabolic process
  Homolog annotation: Hit_ID=B6TKK2; Match level="QueryCoverage=99%, HitCoverage=29%, E-value=3e-37, Identity=71%"; Hit description =Gibberellin receptor GID1L2
DFSWTVFLPVGATRDHPAAHVTDENADLAEEFPPAMVVIGGFDPLMDWQRRYADVLRRKGGRGGGGVPRACFHGFYGFPEIPEATTVLHDMKAFVDRHRATPPKTDAA

SEQ ID NO: 112119 - protein, 142 aa, Setaria italica
  misc_feature (121)..(121): Xaa can be any naturally occurring amino acid
  Transcript Sequence Number=SeqID_46145
  Homolog annotation: Hit_ID=Q9LPT5; Match level="QueryCoverage=81%, HitCoverage=16%, E-value=8e-12, Identity=33%"; Hit description =F11F12.2 protein
RRHLQAQLLRKDPLGHHCHLKDDISSPNSVLEPHSGELHKVHLRLASGMEDATKWEPISIKSIEPDGAYVIASQLNLVEEQHGGSYVANLEMELQQARDRVSKLEAERVSAKKQLDHLFKXLAEEKAAWRNREHKRFEPFLK

SEQ ID NO: 112120 - protein, 77 aa, Setaria italica
  Transcript Sequence Number=SeqID_46146
ERALYQQVCTKALATYKYATYSSITNKVPVIGTGYRESPKKLSLGKALLSTNHARSRQEPIKESHSPKTHARVFKES

SEQ ID NO: 112121 - protein, 57 aa, Setaria italica
  Transcript Sequence Number=SeqID_46147
LQVDIGLSVHTTKLRWARLADHLLEMFDGPRNQGGFARAWVCHIWACSDTCTVACRL

SEQ ID NO: 112122 - protein, 329 aa, Setaria italica
  Transcript Sequence Number=SeqID_46148
  Gene Ontology: Mol. function=catalytic activity; Biological process =cellular metabolic process
  Homolog annotation: Hit_ID=B6T8C4; Match level="QueryCoverage=100%, HitCoverage=90%, E-value=1e-166, Identity=86%"; Hit description =Dihydroflavonol-4-reductase
  Pfam annotation: Domain name=3Beta_HSD; Domain location=10-279; Score= -90.4; E_value=0.00018; Accession=PF01073.11; Description=3-beta hydroxysteroid dehydrogenaseisomerase family
  Pfam annotation: Domain name=Epimerase; Domain location=9-255; Score =64.8; E_value=3.2e-16; Accession=PF01370.13; Description=NAD dependent epimerasedehydratase family
  Pfam annotation: Domain name=KR; Domain location=7-154; Score=-73.4; E_value=0.0086; Accession=PF08659.2; Description=KR domain
  Pfam annotation: Domain name=NAD_binding_4; Domain location=11-239; Score=-27.5; E_value=2e-07; Accession=PF07993.4; Description=Male sterility protein
  Pfam annotation: Domain name=adh_short; Domain location=7-141; Score=- 20.4; E_value=0.0003; Accession=PF00106.17; Description=short chain dehydrogenase
  Pfam module annotation: Pfam domain module=3Beta_HSD::Epimerase::KR::N AD_binding_4::adh_short; Domain location=10-279::9-255::7-154::11 -239::7-141
MVTSNKGKVCVTGASGFIASWLIKQLLESGYHVVGTVRDPGNRQKVAHLWKLPGAKERLQIVRADLLEEGSFDEAVMSCDGVFHTASPVLAKSDSSSKEATLVPAVNGTLNVLRSCKKNPFLKRVVLTSSSSAVRIRDDAQPNISLDETIWSSVPLCEKMQLWYGLAKVFAEKAAWEFAKENGIDLVTVLPSFVIGPSLSHELCVTASDVLGLLQGDTARFSCYGRMGYVHIDDVASSHILVYETPEATGRYLCSSVVLDNDELVSFLAKRYPIFPIPRRLDKPYGKQTYQLNTSKLQGLGFKFRGLQEMFDDCVQSLKDQGHLLECPL

SEQ ID NO: 112123 - protein, 120 aa, Setaria italica
  Transcript Sequence Number=SeqID_46149
  Gene Ontology: Mol. function=nucleoside-triphosphatase activity; Biological process=defense response
  Homolog annotation: Hit_ID=Q84KC2; Match level="QueryCoverage=99%, HitCoverage=7%, E-value=2e-28, Identity=56%"; Hit description=NBS -LRR disease resistance protein homologue
LRQLAHDADDVLDELDYFRIQDALDGTYHAADTPADGCAKSLALNTLYTARALAGKLKLTSGSGDAANRGDPDDQEDDDAKRGRLSGVPCSCGGRAVTSSPPSPTNNGDQKASGKCLPKF

SEQ ID NO: 112124 - protein, 59 aa, Setaria italica
  Transcript Sequence Number=SeqID_46150
  Gene Ontology: Mol. function=acyl-[acyl-carrier-protein] desaturase activity; Biological process=fatty acid metabolic process
  Homolog annotation: Hit_ID=B6TWQ9; Match level="QueryCoverage=74%, HitCoverage=10%, E-value=4e-17, Identity=93%"; Hit description=Acyl -desaturase
GEWRSSRGLSGEGRRAQDYVCGLPRKIRRMEELAHDRAAQKETQSVSFSWLFDRPVRLH

SEQ ID NO: 112125 - protein, 91 aa, Setaria italica
  Transcript Sequence Number=SeqID_46151
SERTEYIRNNASNCLEKDYMANSPIRHCPRELLTDANSLESIEELRASVPDLVAKFRLENKLDEVGKGKQLSDQRTRTPRSPLMPVNHYVE

SEQ ID NO: 112126 - protein, 102 aa, Setaria italica
  Transcript Sequence Number=SeqID_46152
SDHLELLNEKHSERTEYIRNNASNCLEKDYMANSPIRHCPRELLTDANSLESIEELRASVPDLVAKFRLENKLDEVGKGKQLSDQRTRTPRSPLMPVNHYVE

SEQ ID NO: 112127 - protein, 129 aa, Setaria italica
  Transcript Sequence Number=SeqID_46153
  Gene Ontology: Cellular component=nucleus; Biological process =regulation of transcription, DNA-dependent
  Homolog annotation: Hit_ID=Q8GT03; Match level="QueryCoverage=90%, HitCoverage=26%, E-value=8e-56, Identity=93%"; Hit description =SCARECROW-like
IAGAAANQCILEAMESEKIVHVIDLGGADATQWLELLHLLAARPEGPPHLRLTAVHEHKDVLAQTAMALTKEAERLDVPFQFNPVVCRLDALDVESLRVKTGEALAITSSLQLHCLLASDDDSAAGAGK

SEQ ID NO: 112128 - protein, 249 aa, Setaria italica
  Transcript Sequence Number=SeqID_46154
  Gene Ontology: Mol. function=transferase activity
  Homolog annotation: Hit_ID=B9SGR5; Match level="QueryCoverage=91%, HitCoverage=30%, E-value=8e-90, Identity=66%"; Hit description =Pentatricopeptide repeat-containing protein, putative
  Pfam annotation: Domain name=PPR; Domain location=130-163; Score =30.3; E_value=7.8e-06; Accession=PF01535.12; Description=PPR repeat
  Pfam annotation: Domain name=PPR; Domain location=166-200; Score =44.8; E_value=3.3e-10; Accession=PF01535.12; Description=PPR repeat
  Pfam annotation: Domain name=PPR; Domain location=201-235; Score=8.5; E_value=0.88; Accession=PF01535.12; Description=PPR repeat
  Pfam annotation: Domain name=PPR; Domain location=24-58; Score=32.6; E_value=1.6e-06; Accession=PF01535.12; Description=PPR repeat
  Pfam annotation: Domain name=PPR; Domain location=59-93; Score=27.2; E_value=6.8e-05; Accession=PF01535.12; Description=PPR repeat
  Pfam annotation: Domain name=PPR; Domain location=95-129; Score=38.5; E_value=2.7e-08; Accession=PF01535.12; Description=PPR repeat
  Pfam module annotation: Pfam domain module=PPR::PPR::PPR::PPR::PPR::PP R; Domain location=130-163::166-200::201-235::24-58::59-93::95-129
NVVTMLRAMRREAETAPASRPDHVTYTTVVSALAAAGDMARAHAVLDEMAAAGVPANRVTYNILLKGYCQQLQISKAKELFEEMVTGAGIQPGVVTYNILMDGCVLTDDSAGALAFFNEMRSRGIAPSTVSYTTLMKAFAMSGQPKMAHKVFEEMERDPRVTVDRAAWNMLVEGYCRLGLVETAKQVVERMKERGVQPDVATYGSLAKGVAAARKPGEALVLWNEVQERCLEEADEELLGALADVCVRA

SEQ ID NO: 112129 - protein, 156 aa, Setaria italica
  Transcript Sequence Number=SeqID_46155
  Homolog annotation: Hit_ID=Q8SB83; Match level="QueryCoverage=78%, HitCoverage=77%, E-value=4e-11, Identity=36%"; Hit description =Putative cytochrome b
PAPDGSIKRRKRKRKPKTNASEEARSREEVLSRIVAGDGPSPPEARTVAERSLEGLVSFLTSYFRYLPNWDALRYLSLARADLLVAVSLIQKDHCYRYKDQFRICSPAVKTSLKCAAWSARQPNFDGFLAGCFALVPHINKITQTLSAEGRCRLTA

SEQ ID NO: 112130 - protein, 79 aa, Setaria italica
  Transcript Sequence Number=SeqID_46156
  Gene Ontology: Mol. function=nucleotide binding; Cellular component =intracellular
  Homolog annotation: Hit_ID=B9SUF2; Match level="QueryCoverage=70%, HitCoverage=7%, E-value=1e-23, Identity=89%"; Hit description=GTP -binding protein typa/bipa, putative
  Pfam annotation: Domain name=EFG_C; Domain location=4-70; Score=1.9; E_value=0.00034; Accession=PF00679.16; Description=Elongation factor G C-terminus
YFGLQITLYLNPATFKPLVCRPPTLLKYKIPTRGLIGLRNAILTASRGRAILNTIFDSYGPWAGDLSSRDQGSLVAFED

SEQ ID NO: 112131 - protein, 136 aa, Setaria italica
  misc_feature (43)..(43): Xaa can be any naturally occurring amino acid
  Transcript Sequence Number=SeqID_46157
  Gene Ontology: Mol. function=nucleotide binding; Cellular component =intracellular
  Homolog annotation: Hit_ID=Q9FNA8; Match level="QueryCoverage=100%, HitCoverage=25%, E-value=7e-38, Identity=57%"; Hit description=GTP -binding protein typA (Tyrosine phosphorylated protein A)
  Pfam annotation: Domain name=GTP_EFTU; Domain location=1-106; Score= -56.4; E_value=4.9e-05; Accession=PF00009.19; Description=Elongation factor Tu GTP binding domain
NIIDTPGHSDFGGEVERVLNMVEGVLLVVDSVEGPMPQTRFVXSVAFNSINSSNVEFTTNSGRAAGLSILFTTTTTACPNSRAFFRTNLVCGIGPLFEAILRCIPEPRIEKDGALQMLVSNTEYDEHKGRIAIGRL

SEQ ID NO: 112132 - protein, 81 aa, Setaria italica
  Transcript Sequence Number=SeqID_46158
  Gene Ontology: Mol. function=nucleotide binding; Cellular component =intracellular
  Homolog annotation: Hit_ID=B9SUF2; Match level="QueryCoverage=70%, HitCoverage=8%, E-value=4e-24, Identity=89%"; Hit description=GTP -binding protein typa/bipa, putative
  Pfam annotation: Domain name=EFG_C; Domain location=14-75; Score=1.5; E_value=0.00036; Accession=PF00679.16; Description=Elongation factor G C-terminus
RRRRRRSRAAEEWILGGWIGEAHGREGTTLLKYKIPTRGLIGLRNAILTASRGRAILNTIFDSYGPWAGDLSSRDQGSLVV

SEQ ID NO: 112133 - protein, 672 aa, Setaria italica
  Transcript Sequence Number=SeqID_46159
  Gene Ontology: Mol. function=nucleotide binding; Cellular component =intracellular
  Homolog annotation: Hit_ID=B9SUF2; Match level="QueryCoverage=89%, HitCoverage=85%, E-value=0.0, Identity=82%"; Hit description=GTP -binding protein typa/bipa, putative
  Pfam annotation: Domain name=Arf; Domain location=115-259; Score= -101.8; E_value=0.092; Accession=PF00025.13; Description=ADP -ribosylation factor family
  Pfam annotation: Domain name=EFG_C; Domain location=471-560; Score =115.7; E_value=1.6e-31; Accession=PF00679.16; Description=Elongation factor G C-terminus
  Pfam annotation: Domain name=GTP_EFTU; Domain location=79-272; Score =241.7; E_value=1.8e-69; Accession=PF00009.19; Description=Elongation factor Tu GTP binding domain
  Pfam annotation: Domain name=GTP_EFTU_D2; Domain location=295-365; Score=42.8; E_value=1.4e-09; Accession=PF03144.17; Description =Elongation factor Tu domain 2
  Pfam annotation: Domain name=MMR_HSR1; Domain location=82-207; Score =18.3; E_value=2.1e-05; Accession=PF01926.15; Description=GTPase of unknown function
  Pfam annotation: Domain name=Miro; Domain location=83-207; Score= -4.0; E_value=0.026; Accession=PF08477.5; Description=Miro-like protein
  Pfam module annotation: Pfam domain module=Arf::EFG_C::GTP_EFTU::GTP _EFTU_D2::MMR_HSR1::Miro; Domain location=115-259::471-560::79 -272::295-365::82-207::83-207
  Subcellular localization annotation: CTP_CleavageSite=52; ConfidenceScore=5.71e-01
MQMQQTLTLRGVPSARRAAPPPASSAHLGSSPCLLRVPRSLRRRRPRSLRASASLEQEVKEVAASPAPSAGKSTQATRRDVRNIAIVAHVDHGKTTLVDSMLRQAKVFRDNQVVQERIMDSNDLERERGITILSKNTSITYKGTKINIIDTPGHSDFGGEVERVLNMVEGVLLVVDSVEGPMPQTRFVLKKALEFGHAVVVVVNKIDRPAARPEFVVNSTFELFIELNATDEQCDFQTVYASGIKGKAGLDPENLADDLGPLFEAILRCIPEPRIEKDGALQMLVSNTEYDEHKGRIAIGRLHAGELQRGLEVKVCTPDDACRVGKISELFVYQNFSRVPVESVGAGDICAVCGMNDIMIGETIADKVTGTPLPTIKVEEPTVRMSFSINTSPFVGKEGKYVTSRNLRDRLYRELERNLAMKVEDGETADTFLVSGRGTLHLTILIENMRREGYEFMIGPPKVINKTVDGKQLEPYEIAAVEVPEEYMGSVVELLGKRRGQMVNMEASGPEGTTLLKYKIPTRGLIGLRNAILTASRGRAILNTIFDSYGPWAGDLSSRDQGSLVAFEDGSTTSYALLNAQERGLLFVQPGQDVYKGQIVGIHQRPGDLAINVCKKKAATNVRSNKETTVVLDEPLSYSLDDCIEFIQEDELVEVTPASIRMCKNPKISKRK

SEQ ID NO: 112134 - protein, 99 aa, Setaria italica
  Transcript Sequence Number=SeqID_46160
  Gene Ontology: Mol. function=hydrolase activity, hydrolyzing O -glycosyl compounds; Cellular component=cell wall; Biological process= carbohydrate metabolic process
  Homolog annotation: Hit_ID=B6TJ72; Match level="QueryCoverage=98%, HitCoverage=29%, E-value=3e-49, Identity=92%"; Hit description =Glycosyl hydrolases family 16 protein
  Pfam annotation: Domain name=XET_C; Domain location=41-96; Score =72.6; E_value=1.5e-18; Accession=PF06955.4; Description=Xyloglucan endo-transglycosylase (XET)
WRVKTDWSHAPFEATFREVRVDGCVWAANATDGDAGEVSRCTGSSWGKEGRYWWKEKEMSELSVHQSHQLVWARAHHLVYDYCVDTDRFPVQPPECAGR

SEQ ID NO: 112135 - protein, 327 aa, Setaria italica
  Transcript Sequence Number=SeqID_46161
  Gene Ontology: Mol. function=hydrolase activity, hydrolyzing O -glycosyl compounds; Cellular component=extracellular region; Biological process=cell wall organization and biogenesis
  Homolog annotation: Hit_ID=B6TJ72; Match level="QueryCoverage=88%, HitCoverage=89%, E-value=1e-137, Identity=81%"; Hit description =Glycosyl hydrolases family 16 protein
  Pfam annotation: Domain name=Glyco_hydro_16; Domain location=40-237; Score=288.6; E_value=1.4e-83; Accession=PF00722.13; Description =Glycosyl hydrolases family 16
  Pfam annotation: Domain name=XET_C; Domain location=269-324; Score =74.4; E_value=4.1e-19; Accession=PF06955.4; Description=Xyloglucan endo-transglycosylase (XET)
  Pfam module annotation: Pfam domain module=Glyco_hydro_16::XET_C; Domain location=40-237::269-324
MALRNGGRRGWGAAASLAVVVAAVAAVLGAGAAVAAAAKFDDVVQPSWANDHMVYDGDLLKLRLDANSGGGFVSKNKFLYGKASADLKLVPGDSAGVVTAFYLSSGGEKHNEFDFEFLGNTSGEPYLVQTNLYIDGVGNREQRIDLWFDPTADFHTYAVLWNPSQVVFMVDDTPIRVYENTSSRHVHGHHRHAANTSTTDSSPPPFPGPQPMAVYSSIWNADDWATQGGRVKTDWSHAPFEATFREVRVDGCVWAANATDGDAGEVSRCTGSSWGKEGRYWWKEKEMSELSVHQSHQLVWARAHHLVYDYCVDTERFPVQPPECAGR

SEQ ID NO: 112136 - protein, 320 aa, Setaria italica
  misc_feature (207)..(207): Xaa can be any naturally occurring amino acid
  misc_feature (278)..(278): Xaa can be any naturally occurring amino acid
  misc_feature (286)..(286): Xaa can be any naturally occurring amino acid
  Transcript Sequence Number=SeqID_46162
  Gene Ontology: Mol. function=catalytic activity; Cellular component =plasma membrane
  Homolog annotation: Hit_ID=B4FWJ2; Match level="QueryCoverage=97%, HitCoverage=72%, E-value=1e-148, Identity=84%"; Hit description =Protein phosphatase 2C ABI1
  Pfam annotation: Domain name=PP2C; Domain location=1-175; Score= -48.1; E_value=0.0043; Accession=PF00481.13; Description=Protein phosphatase 2C
AFVKTDKDFQRLAGTSGTTVTFVIVDEWVVTVASVGDSRCILESADGSFYYLSADHRFDSNPDEVERVTACGSKVGKMDIVGGPEVGPLRCWPGGLCLSRSIGDFDVGECIIPVPHVKQVKLSNAGGRIIIASDGVWDDLSCEMALDCSRGFPSDVAANRIVNEAIRPRGIRDDTTCIVIDILPPEKLAPTPPKRQGKIAFNNMFRXKSPDVPFKTDSEYAEPDVVEEIFEDGSAMLSKRLTTGYALEKNFGRSSCAVCLSRLKPGQGISLHANPLQXEKLQGWQXGPFLCHVCHDKKEAMEGKRRRKRFFTNCLWSHVL

SEQ ID NO: 112137 - protein, 164 aa, Setaria italica
  misc_feature (104)..(104): Xaa can be any naturally occurring amino acid
  Transcript Sequence Number=SeqID_46163
  Gene Ontology: Mol. function=aspartic-type endopeptidase activity; Cellular component=chromatin; Biological process=DNA integration
  Homolog annotation: Hit_ID=Q2QW16; Match level="QueryCoverage=96%, HitCoverage=8%, E-value=7e-72, Identity=84%"; Hit description =Retrotransposon protein, putative, unclassified
PLPDGCPGAAHFVGYSDSDHAGDIDTSKSTSGILFFLGKCLVSWQSIKQQVVALSSCEAEYIAASTASTQALWLARLLGDLLGRDTTAVELRVDSKSALALAKXPVFHERSKHIRVRYHFIRGCLKEGSIKASYINTKDQLADLLTKPLGRIKFLELCSRTGMV

SEQ ID NO: 112138 - protein, 369 aa, Setaria italica
  misc_feature (311)..(311): Xaa can be any naturally occurring amino acid
  misc_feature (328)..(328): Xaa can be any naturally occurring amino acid
  misc_feature (344)..(344): Xaa can be any naturally occurring amino acid
  Transcript Sequence Number=SeqID_46164
  Homolog annotation: Hit_ID=B2Z6N3; Match level="QueryCoverage=55%, HitCoverage=8%, E-value=2e-60, Identity=53%"; Hit description =Neuroblastoma-amplified gene
AIVYPVRQDWRDQTEILVKQSTGFSWPSVAELCEWYKNRARDIDCLSGQLENCLAMIELACQKGIAELQPFFDDIKCLYQVVYSNELNEFIMNLVTWEDLPDYEKFKIILKGVKEDTVVQRLEENAIPFMKKRFHLISSSNERKQEESYLVRWLKEVAAENELSICLAVVENGCGELPIYGLFKDLAEMIETSVHCIYMCSATNQWNTMSSILSKLLHKTKREKSLLASEEECNLKDAKQALGSSVVSYDEMQCVCADILSALGNGPEDFYHYDSASYKLNNVKYLDILEKRLKVAEGHVEVGRLFAYYQXVPTTHFFLSAHLDKKNXKSKLIRLLLSKFGRRXPVRSDNEWANMWRDLKLLPRKRQFP

SEQ ID NO: 112139 - protein, 53 aa, Setaria italica
  Transcript Sequence Number=SeqID_46165
IYLVSKFCRLFMHKLLGCHLWNIYIVNYRQENILWWLSQYLNHKHTIKCLEGT

SEQ ID NO: 112140 - protein, 66 aa, Setaria italica
  misc_feature (1)..(3): Xaa can be any naturally occurring amino acid
  misc_feature (7)..(7): Xaa can be any naturally occurring amino acid
  Transcript Sequence Number=SeqID_46166
  Subcellular localization annotation: CTP_CleavageSite=48; ConfidenceScore=5.19e-01
XXXFCFXFFVFCFLVFSIWKYLKVWPYGSSMFTRKQNCSLSVRLHQCSVQTTSKIHFVDRWTIKRK

SEQ ID NO: 112141 - protein, 68 aa, Setaria italica
  Transcript Sequence Number=SeqID_46167
ASQLLVDISRVLGYLASSNWYSLPKRSTMCYLLERFFEFQFFFILYLFTSQFHFSKSFTKYFKLEFFS

SEQ ID NO: 112142 - protein, 107 aa, Setaria italica
  Transcript Sequence Number=SeqID_46168
  Homolog annotation: Hit_ID=B6T0D7; Match level="QueryCoverage=81%, HitCoverage=81%, E-value=4e-28, Identity=74%"; Hit description =Catalytic/ oxidoreductase, acting on NADH or NADPH
  Pfam annotation: Domain name=Complex1_LYR; Domain location=2-69; Score=12.9; E_value=0.0056; Accession=PF05347.7; Description=Complex 1 protein (LYR family)
MAAAAEGLAAYRLVLRAARRTFAGDRLMLQESAVEIRRRFEDHRGLAPGSDELARALEDAREAAFFIGHGIVQATRGPSGSFVVKPESAHAGATLEVPSEEILSKLK

SEQ ID NO: 112143 - protein, 69 aa, Setaria italica
  Transcript Sequence Number=SeqID_46169
AEYGCEFFVSILVKPSAFPYFNFDRISSEGTSSVAPACALSGFTTAKPFMKVMIADWTVKEQQCKHIRA

SEQ ID NO: 112144 - protein, 78 aa, Setaria italica
  Transcript Sequence Number=SeqID_46170
GVVFLACEKMEREHHSTTKQVLLHTISCNLRSSPITIIKFTLTISSLFFWRLLTGTRTRQVKHSRNWNSGYDCDGGRW

SEQ ID NO: 112145 - protein, 103 aa, Setaria italica
  Transcript Sequence Number=SeqID_46171
VGGRRADRHLRRPDHRRALLRPRKPPAHLSRIGLLLFPPGVVADRFGLQASASPVLERMIDRAWRGGQCTIRVLGVPSDAVLTFLHLLYASRVDPGTGAEEEV

SEQ ID NO: 112146 - protein, 178 aa, Setaria italica
  Transcript Sequence Number=SeqID_46172
  Gene Ontology: Mol. function=histone acetyltransferase activity; Cellular component=nucleus; Biological process=regulation of transcription, DNA-dependent
  Homolog annotation: Hit_ID=B6SMS2; Match level="QueryCoverage=85%, HitCoverage=42%, E-value=3e-32, Identity=64%"; Hit description =Protein binding protein
  Pfam annotation: Domain name=BTB; Domain location=7-120; Score=27.4; E_value=6e-05; Accession=PF00651.23; Description=BTBPOZ domain
MALYADLDALRASAADVRIVTSDGQTIAAHSYVLASASPVLERMIDRAWRGGQCTIRVLGVPSDAVLTFLHLLYASRVDPGTGAEEEVVAAHGPQLLALAHAYRVGWLKRAAEAVVSARLTPDRAVDMLKLAGLCDAPRLRAACARVADRDLAAVEASDGWRFARRHDPALELELLQL

SEQ ID NO: 112147 - protein, 147 aa, Setaria italica
  Transcript Sequence Number=SeqID_46173
  Gene Ontology: Mol. function=histone-lysine N-methyltransferase activity; Cellular component=intracellular; Biological process =chromatin modification
  Homolog annotation: Hit_ID=Q84XG3; Match level="QueryCoverage=95%, HitCoverage=11%, E-value=4e-60, Identity=79%"; Hit description=SET domain protein SDG117
YNDPALDQQVSRKRPKLEVRRGETQISHMGEVGQTAKEDPNPNNLPSNSVMHETVGALEVINQNNAGTFPGNSGANETTASGSANPALQNARLELDSFKSSRQCSAYIEAKGRQCGRWANDGDIYCCVHQSMHFLDHSRRTRHLLLK

SEQ ID NO: 112148 - protein, 47 aa, Setaria italica
  Transcript Sequence Number=SeqID_46174
CSSGTASEGDGGGNLRLIHCWLSAVGCGNSLLLLAKEAQASETQMTR

SEQ ID NO: 112149 - protein, 77 aa, Setaria italica
  Transcript Sequence Number=SeqID_46175
  Subcellular localization annotation: CTP_CleavageSite=18; ConfidenceScore=5.01e-01
LWRVNDASANNASAIMTCCATRKSFGAVCFQPSGIFVQDIIFSSIVREESHLVSVLEEEEQHEAKASTRTSNMANLW

SEQ ID NO: 112150 - protein, 78 aa, Setaria italica
  Transcript Sequence Number=SeqID_46176
  Subcellular localization annotation: CTP_CleavageSite=56; ConfidenceScore=5.29e-01
ICDVQFRSFNPFEALYSSPIGGVVFVQAVHHGLTAINTARQYSRNSRRCCRRRRPLCFSRSSSSSLPPAPSPRPMPRL

SEQ ID NO: 112151 - protein, 53 aa, Setaria italica
  Transcript Sequence Number=SeqID_46177
VQYTTSNIRLFKLKLHNSFKHGLSHLCIILKQYWRKTSLKPHRFYYFLVFVLL

SEQ ID NO: 112152 - protein, 69 aa, Setaria italica
  Transcript Sequence Number=SeqID_46178
  Gene Ontology: Mol. function=structural constituent of ribosome; Cellular component=ribonucleoprotein complex; Biological process =translation
  Homolog annotation: Hit_ID=Q8GVY2; Match level="QueryCoverage=78%, HitCoverage=78%, E-value=1e-16, Identity=74%"; Hit description=60S ribosomal protein L38, putative, expressed
  Pfam annotation: Domain name=Ribosomal_L38e; Domain location=13-69; Score=85.2; E_value=2.4e-22; Accession=PF01781.10; Description =Ribosomal L38e protein family
MGTCSGSSGLGSEQRRREEAGDKKMRRAKGAVKFKVRCSRYLYTLCVHDADKANKLKQSLPPGLSVQEI

SEQ ID NO: 112153 - protein, 69 aa, Setaria italica
  Transcript Sequence Number=SeqID_46179
  Gene Ontology: Mol. function=structural constituent of ribosome; Cellular component=ribonucleoprotein complex; Biological process =translation
  Homolog annotation: Hit_ID=Q8GVY2; Match level="QueryCoverage=100%, HitCoverage=100%, E-value=9e-30, Identity=91%"; Hit description=60S ribosomal protein L38, putative, expressed
  Pfam annotation: Domain name=Ribosomal_L38e; Domain location=2-69; Score=169.6; E_value=9.3e-48; Accession=PF01781.10; Description =Ribosomal L38e protein family
MPKQIHEIKDFLLTARRKDARSVRIKRAKGAVKFKVRCSRYLYTLCVHDADKANKLKQSLPPGLSVQEI

SEQ ID NO: 112154 - protein, 67 aa, Setaria italica
  Transcript Sequence Number=SeqID_46180
LVLGLQIVKQPKLCYAYLHVPRSLFYLKFDQINSGETIYVPKGLHNTIYVLTFKEICFIYRQTFPYT

SEQ ID NO: 112155 - protein, 172 aa, Setaria italica
  misc_feature (43)..(43): Xaa can be any naturally occurring amino acid
  misc_feature (88)..(88): Xaa can be any naturally occurring amino acid
  Transcript Sequence Number=SeqID_46181
  Gene Ontology: Mol. function=RNA-directed DNA polymerase activity; Biological process=RNA-dependent DNA replication
  Homolog annotation: Hit_ID=Q9FW98; Match level="QueryCoverage=97%, HitCoverage=11%, E-value=6e-14, Identity=32%"; Hit description =Putative non-LTR retroelement reverse transcriptase
RNETRNSKITVCPNSQGDNQEIQAYVDMIVLHCLKLSHHSSRXCAVPKHIQKWTPPPAGWLCLNVDAVFSSSSSSAAVVVVRDHMADXLMGCRRSFQGITVREDAEALALRCVMVLALVEGFHKVIIQSDCLSLIQKGIVPNRDCSVISPFVADIKSLATKFVCITFSSCKP

SEQ ID NO: 112156 - protein, 110 aa, Setaria italica
  Transcript Sequence Number=SeqID_46182
  Gene Ontology: Mol. function=ion channel activity; Cellular component= integral to membrane; Biological process=ion transport
  Homolog annotation: Hit_ID=Q6ZG24; Match level="QueryCoverage=100%, HitCoverage=16%, E-value=2e-43, Identity=74%"; Hit description =Putative cyclic nucleotide-gated calmodulin-binding ion channel
FLEYKWISTQGVEEDSILKQLPVDLRRKIKQWLCLDLVQRVPLFSAIDHQLLDAICWSLFFIICTEGTYIIHEGGPVKVMTFIFRGKLESCTTDGGRTDFFNSIILKPGD

SEQ ID NO: 112157 - protein, 148 aa, Setaria italica
  Transcript Sequence Number=SeqID_46183
  Gene Ontology: Mol. function=hydrolase activity, acting on ester bonds; Biological process=lipid metabolic process
  Homolog annotation: Hit_ID=B9S7Q1; Match level="QueryCoverage=89%, HitCoverage=36%, E-value=7e-53, Identity=69%"; Hit description=Zinc finger protein, putative
ELALRGSRAGECDAELQRAAALYNPQLVDMIRGLNADLGADVFVAVNAHRMHMDFISDPAAYGFVTSKVACCGQGPYNGVGLCTAASSVCPDRSLYAFWDNFHPTERANRIIVSQFMDGTQEYMHPLNLTTILAVDARAAAAADATFN

SEQ ID NO: 112158 - protein, 117 aa, Setaria italica
  Transcript Sequence Number=SeqID_46184
  Homolog annotation: Hit_ID=B6U9B2; Match level="QueryCoverage=69%, HitCoverage=65%, E-value=1e-30, Identity=72%"; Hit description=Lipid binding protein
  Pfam annotation: Domain name=Tryp_alpha_amyl; Domain location=37-112; Score=22.9; E_value=0.0013; Accession=PF00234.14; Description =Protease inhibitorseed storageLTP f
MTQLKTAALLAATLLVLLAAAAAVSGQPSPHFDVPNCQNDIDALWRTCKQYVKKEGPKQKPSSDCCKTVQAADAHSSCICDYLGSPDARENLSLEKVFYVTKQCGVTIPAGCGSKRF

SEQ ID NO: 112159 - protein, 102 aa, Setaria italica
  Transcript Sequence Number=SeqID_46185
MAAGETTTPPFSSVHVNRRLATANRLMAAVHAALAAAAIAHRALHLHQLSGGVARNAAMVAADLTLLFLWTLSQSGLWRPVSRAAFPDRLLESRRRGDLPAV

SEQ ID NO: 112160 - protein, 131 aa, Setaria italica
  Transcript Sequence Number=SeqID_46186
MSSPPPPKDHSKGRSPALELLDEYWFFSNTLANSNNKPPRSPNNKDWERREDSKGSCSAGLSRLYASGGRRLLRTPSLPSPSKLSKDVDDDDLAPVAARRQDAAGSGNRQQQQEEHEVEEDDLNWSSIYEG

SEQ ID NO: 112161 - protein, 154 aa, Setaria italica
  misc_feature (129)..(129): Xaa can be any naturally occurring amino acid
  Transcript Sequence Number=SeqID_46187
  Gene Ontology: Mol. function=nuclease activity; Cellular component =intracellular; Biological process=metabolic process
  Homolog annotation: Hit_ID=Q8W0T1; Match level="QueryCoverage=98%, HitCoverage=34%, E-value=4e-56, Identity=73%"; Hit description =Putative AP endonuclease
SASSSPCKFLTWNANSLLLRMKSDWPAFSQFVARLDPDVICVQEVRMPAAGSKGAPKNPSELKDDTNSSRDEKQVVLRALSSSPFKDYRVWWSLSDSKYAGTAMFIKKKFEPKKVSFNLDKTSSKHETXGRVIIVEFESFLLLNTYAPNNGWKE

SEQ ID NO: 112162 - protein, 502 aa, Setaria italica
  Transcript Sequence Number=SeqID_46188
  Gene Ontology: Mol. function=protein serine/threonine kinase activity; Cellular component=plasma membrane; Biological process =protein amino acid phosphorylation
  Homolog annotation: Hit_ID=C4P7T3; Match level="QueryCoverage=94%, HitCoverage=91%, E-value=0.0, Identity=88%"; Hit description=CBL -interacting protein kinase 12
  Pfam annotation: Domain name=NAF; Domain location=369-426; Score =101.5; E_value=2.9e-27; Accession=PF03822.6; Description=NAF domain
  Pfam annotation: Domain name=Pkinase; Domain location=30-284; Score =363.4; E_value=4.2e-106; Accession=PF00069.17; Description=Protein kinase domain
  Pfam annotation: Domain name=Pkinase_Tyr; Domain location=30-282; Score=50.8; E_value=4.2e-17; Accession=PF07714.9; Description =Protein tyrosine kinase
  Pfam module annotation: Pfam domain module=NAF::Pkinase::Pkinase_Tyr; Domain location=369-426::30-284::30-282
FPTTARWRPPRRRGQARTGRAPGACWMGKYELGRLLGHGTFAKVYLARHVGSGESVAIKVLDKEKAVKSGLVSHIKREIAVLRRVRHPNIVHLFEVMATKTKIYFVMELVRGGELFSRVSKGRLREDTARRYFQQLVSAVAFCHARGVFHRDLKPENLLVGEDGNLKVSDFGLSAVADQFRPDGLLHTFCGTPAYVAPEVLGRRGYDGAKADVWSCGVILFVLMAGYLPFHDKNLMAMYKKIYKGEFRCARWFSKDLTSLLMRILDTNPNTRITLPEIMESRWFKKGFKPVKFYIEDDKLHSVIDDEDGLLDMGPADPVPHSLPSPPRPLPPQKVDGDDSGSESDSSISSCPASVLSDESQRSRGSLPRPASLNAFDIISFSRGFNLSGLFEEKGDEVRFVSAEPMSDILMKLEEIAKLKSFKLRRKDWRICLEGTREGVKGPLTIGAEIFELTPPLVMVEVKKKAGDNEEYEDFCNKELKPGMQHLVHHMVRTPSMPTDAK

SEQ ID NO: 112163 - protein, 102 aa, Setaria italica
  Transcript Sequence Number=SeqID_46189
  Gene Ontology: Mol. function=nucleotide binding; Biological process =defense response
  Homolog annotation: Hit_ID=B2LTJ0; Match level="QueryCoverage=82%, HitCoverage=7%, E-value=8e-13, Identity=42%"; Hit description=Pc protein B
  Pfam annotation: Domain name=LRR_1; Domain location=22-44; Score =15.6; E_value=0.21; Accession=PF00560.25; Description=Leucine Rich Repeat
  Pfam annotation: Domain name=LRR_1; Domain location=46-69; Score=7.9; E_value=9.5; Accession=PF00560.25; Description=Leucine Rich Repeat
  Pfam module annotation: Pfam domain module=LRR_1::LRR_1; Domain location=22-44::46-69
ELLITEWTELSDLQERMRHLTSLEELSLYQCPSITELPEWLGDLAALKEIVISDCRGIKYLPKSVFKVSNLKEISIYDCPDWCELEENKKKLVHICWKGHQY

SEQ ID NO: 112164 - protein, 52 aa, Setaria italica
  Transcript Sequence Number=SeqID_46190
HADFTVKANESIVLVFWFPSYILITLNWCILVNLNYQFLASVLRNKLNRIES

SEQ ID NO: 112165 - protein, 330 aa, Setaria italica
  Transcript Sequence Number=SeqID_46191
  Gene Ontology: Cellular component=chloroplast
  Homolog annotation: Hit_ID=Q9LDG2; Match level="QueryCoverage=99%, HitCoverage=70%, E-value=4e-39, Identity=30%"; Hit description =F28L1.1 protein
  Pfam annotation: Domain name=DUF231; Domain location=173-330; Score =218.6; E_value=1.6e-62; Accession=PF03005.7; Description=Arabidopsis proteins of unknown function
DNRRPLYSGFGCKQWLSESWSCRLTQRTDFAYEQFRWQPEACEMPEFEASQFLRRMQDKTIAYVGDSLGRQMFQSMMCMVTGGKQRPDVEDVGAEYGFVLAPGAKRPDGWAYRFPSTNTTILYHWSSTLCDLEPLNPSDHATSYAMHLDRPPAFLKNNLHRFHVLILNTGHHWNRGKLKANKWEMYLGGAPNNNRNIAVIWKAKNFTIHSVINWLDAQLPNHPQLKVFYRSISPRHFFNGDWNTGGRCDNTNPLAKGSGIHLNHSEDTDAEGAVRGTRINLLDVTALSRLRDEGHISRYSIKATPGVQDCLHWCLPGVPDTWNEILAAQL

SEQ ID NO: 112166 - protein, 76 aa, Setaria italica
  Transcript Sequence Number=SeqID_46192
  Gene Ontology: Cellular component=chloroplast; Biological process =translation
  Homolog annotation: Hit_ID=A3BLC3; Match level="QueryCoverage=100%, HitCoverage=28%, E-value=4e-24, Identity=78%"; Hit description =Ribosome-recycling factor, chloroplastic
  Pfam annotation: Domain name=RRF; Domain location=1-74; Score=-35.5; E_value=9e-05; Accession=PF01765.11; Description=Ribosome recycling factor
RKELAKTVAKLAEDGKVAIRNIRRDAIKAYDKLQKEKKLSEDNVKDLSADLQKVTDGYMKKIESIQKQKEEELMKI

SEQ ID NO: 112167 - protein, 76 aa, Setaria italica
  Transcript Sequence Number=SeqID_46193
  Gene Ontology: Cellular component=chloroplast; Biological process =translation
  Homolog annotation: Hit_ID=B6TQ52; Match level="QueryCoverage=86%, HitCoverage=25%, E-value=1e-21, Identity=77%"; Hit description =Ribosome recycling factor
SSLACDSHVIRAVLTHATIEEIEAEKSVIEEQAKEKMEKAIETVQTNFNTVRTGRANPAMLDRIEVEYYGTPVNLK

SEQ ID NO: 112168 - protein, 263 aa, Setaria italica
  Transcript Sequence Number=SeqID_46194
  Gene Ontology: Cellular component=chloroplast; Biological process =translation
  Homolog annotation: Hit_ID=B6TQ52; Match level="QueryCoverage=100%, HitCoverage=100%, E-value=1e-105, Identity=78%"; Hit description =Ribosome recycling factor
  Pfam annotation: Domain name=RRF; Domain location=97-261; Score =275.8; E_value=9.9e-80; Accession=PF01765.11; Description=Ribosome recycling factor
  Subcellular localization annotation: CTP_CleavageSite=44; ConfidenceScore=5.27e-01
MALHAVSPAAVSSPLRALAHRLAQRPVSYFVGCGCLPKQLVSIYSSANFAGLQAGPLVLRHSDKRAVLTHATIEEIEAEKSVIEEQAKEKMEKAIETVQTNFNTVRTGRANPAMLDRIEVEYYGTPVNLKSIAQISTPDATSLLIQPYDKSSLKLIEKTIVAANLGVTPSNDGEVIRVTVPPLTSDRRKELAKTVAKLAEDGKVAIRNIRRDAIKAYDKLQKEKKLSEDNVKDLSADLQKVTDGYMKKIESIQKQKEEELMKI

SEQ ID NO: 112169 - protein, 158 aa, Setaria italica
  Transcript Sequence Number=SeqID_46195
  Homolog annotation: Hit_ID=A2T1U2; Match level="QueryCoverage=75%, HitCoverage=31%, E-value=6e-12, Identity=48%"; Hit description=OR -LDel
AVAGERQGEDPVAGCGRRQLVLQRCSPAGESRVAGDGGVSSFCIIEGPETIEDFVQMQSHEIQNNIKSRRNKIFLLMEEVRRLRVQQRIRTSESKGPSSEENEMPEIPSTIPFMPHASAKTMKQLYMTSFSVISGIIIFGGLIAPVLELKLGLGGTSY

SEQ ID NO: 112170 - protein, 151 aa, Setaria italica
  Transcript Sequence Number=SeqID_46196
  Gene Ontology: Mol. function=nucleotide binding; Biological process =defense response
  Homolog annotation: Hit_ID=Q6ZD17; Match level="QueryCoverage=86%, HitCoverage=14%, E-value=9e-39, Identity=62%"; Hit description =Putative disease resistance protein RPM1
KNKKDFEAVIKLRNVSRVDGEDQLVTKIREYLTGKRYFILLDDIWDVQTWNSIKDIFPMTSCGSKIITTTCTNDVAQECCRSSTNGHIYNITPLSMADSTQLFYRRLFNPEEKCPSHLEEISGQILEKCAGLLLAITAISGLCPARKKQGE

SEQ ID NO: 112171 - protein, 358 aa, Setaria italica
  Transcript Sequence Number=SeqID_46197
  Gene Ontology: Mol. function=nucleotide binding; Biological process =defense response
  Homolog annotation: Hit_ID=Q6ZD17; Match level="QueryCoverage=91%, HitCoverage=34%, E-value=9e-91, Identity=55%"; Hit description =Putative disease resistance protein RPM1
  Pfam annotation: Domain name=NB-ARC; Domain location=1-212; Score= -1.4; E_value=3.5e-09; Accession=PF00931.14; Description=NB-ARC domain
LVLGVGILTLFTKIQGITFTGKRYFHFCFDDIWDVQTWNSIKDIFPMTSCGSKIITTTCTNDVAQECCRSSTNGHIYNITPLSMADSTQLFYRRLFNPEEKCPSHLEEISGQILEKCAGLLLAITAISGLLSSKKKTKEKWDRVKKLIGCGLERNSSDEVMSKILSLSYFDLPLHLKACLLYLSIFPKYYTIGKQNLIRRWIGEGFIHEQNGISAAYDLGERCFNDLINRSLIQPAGRDKFFEVNSCRVHDTVFDFIVSKAIEENFVTLIGVPGVNPIAGNKVRRLSIQNDGEIPSELVLSSVRSLNVFGGNMEIPSLLEFRLLHVLAFEDCKQLKDDHLADVGNLLHLRHLRLNHAN

SEQ ID NO: 112172 - protein, 94 aa, Setaria italica
  Transcript Sequence Number=SeqID_46198
MASVVDGNGCGGGGGRVVMELSHIKDLVRQLEGHLGGGSQLQAQEVCRSLASQISSLTERSITLITSYYCLDAGRKRSAAASLLSDVSDAPFKT

SEQ ID NO: 112173 - protein, 116 aa, Setaria italica
  Transcript Sequence Number=SeqID_46199
  Gene Ontology: Mol. function=catalytic activity; Cellular component =peroxisome; Biological process=metabolic process
  Homolog annotation: Hit_ID=B6SV29; Match level="QueryCoverage=100%, HitCoverage=20%, E-value=8e-53, Identity=88%"; Hit description=Acyl -activating enzyme 11
APVVFSILLEGDDATSSKRQLEAPVHVLTGGAPPPAALLERVERIGFRVTHAYCLTEATGPALACEWRDQWDRLPLPERARLKARQGVSVLSLADADVKNADTMASVPRDGKTLGE

SEQ ID NO: 112174 - protein, 86 aa, Setaria italica
  Transcript Sequence Number=SeqID_46200
  Subcellular localization annotation: CTP_CleavageSite=41; ConfidenceScore=5.22e-01
PPRLLPALGALPLLLCLCTLPAPARSQNATAPAPASVQGFNCSRNSTYPCQAYALYRAGFAGVPLEFAAIGDLFGVSRFMVAHANN

SEQ ID NO: 112175 - protein, 51 aa, Setaria italica
  Transcript Sequence Number=SeqID_46201
SNTREDLFHFDRNVLSLTIPESLCNKGRLKNFPARNLSFTFTSSCIVPMEN

SEQ ID NO: 112176 - protein, 50 aa, Setaria italica
  Transcript Sequence Number=SeqID_46202
FLNCSYNQQILQSMHPIKCPLGAPTSPWSKIFAHVCNKLCVQSSLMPLLD

SEQ ID NO: 112177 - protein, 48 aa, Setaria italica
  misc_feature (3)..(3): Xaa can be any naturally occurring amino acid
  Transcript Sequence Number=SeqID_46203
TPXPPPVRIFFIGLSSVNKWLGSFFTINDWSIESFRTKHYYITNRTIS

SEQ ID NO: 112178 - protein, 133 aa, Setaria italica
  Transcript Sequence Number=SeqID_46204
  Gene Ontology: Mol. function=magnesium ion binding; Cellular component=integral to membrane; Biological process=photosynthesis, light harvesting
  Homolog annotation: Hit_ID=B6SZ08; Match level="QueryCoverage=88%, HitCoverage=48%, E-value=3e-58, Identity=94%"; Hit description =Chlorophyll a-b binding protein 2
  Pfam annotation: Domain name=Chloroa_b-bind; Domain location=64-131; Score=18.5; E_value=1e-06; Accession=PF00504.13; Description =Chlorophyll A-B binding protein
MAAATMALTSRALVGKPAASTRDVFGEGRITMRKTGGAKPKPAASGSPWYGPDRVLYLGPLSGEPPSYLTGEFPGDYGWDTAGLSADPETFAKNRELEVIHSRWAMLGALGCVFPELLRPDKRTYKVTDEGPY

SEQ ID NO: 112179 - protein, 52 aa, Setaria italica
  Transcript Sequence Number=SeqID_46205
HLFLMVGNNYLTAVYFSETCIKIVNLLFLFILAMHTIKLLYSLFFSITTVNF

SEQ ID NO: 112180 - protein, 97 aa, Setaria italica
  Transcript Sequence Number=SeqID_46206
MNRVLYKLALVPMKNYPFFLAQFATFGYVLVYFSILFIRFRAGIVTREMLALPKAQFMLIGLLEALGAASGMAAAAMLPGPSIPVLSQSFLVWQLIL

SEQ ID NO: 112181 - protein, 241 aa, Setaria italica
  Transcript Sequence Number=SeqID_46207
  Gene Ontology: Mol. function=transporter activity; Cellular component= membrane; Biological process=oligopeptide transport
  Homolog annotation: Hit_ID=B6SXM6; Match level="QueryCoverage=100%, HitCoverage=43%, E-value=2e-75, Identity=62%"; Hit description =Peptide transporter PTR2
  Pfam annotation: Domain name=PTR2; Domain location=29-238; Score= -30.1; E_value=2.3e-05; Accession=PF00854.13; Description=POT family
ANGVTNWLGTSSITPLVAAFLADAFLGRYWTIALFLVISVVAYAVLAASAAAALESAAFYAGLYLLALGGALQPVLTSFGAGQFDEADEAERRRQSSFFNWFYMSINVGSLVGGTVLVWVQSSVSWGLGYGIPALLSVVSVAVFLAGTTTYQSHQPPGGSPISRVAQVVVAAVRKCRVEAPDDAAELHEYEADDGMSAIQGSRRLAHTDQFRFLDKAAVETAGDKARPSPWRLCTVTQVEE

SEQ ID NO: 112182 - protein, 229 aa, Setaria italica
  Transcript Sequence Number=SeqID_46208
  Gene Ontology: Mol. function=metal ion binding; Cellular component =cytoplasm; Biological process=ubiquitin-dependent protein catabolic process
  Homolog annotation: Hit_ID=B4FYL2; Match level="QueryCoverage=100%, HitCoverage=100%, E-value=1e-119, Identity=89%"; Hit description =Protein binding protein
  Pfam annotation: Domain name=zf-C3HC4; Domain location=179-219; Score= 21.2; E_value=0.00038; Accession=PF00097.17; Description=Zinc finger, C3HC4 type (RING finger)
MGGFCCCFSTEDFEEYVHPSNPIYRQCISLRHFFHNIFGGYTATFQRLESRPSNPAQGAASLGSTNPSASLNDNSLDETYRLVSRPPPYDTDPRYARVQREGLVSRREKSINLAQEESLALRRNASSSGIEHLAAQKKRSSTENEGEYKVHRSESTKSLSAKAYNSSYAAVGSEDEDVCPTCLEEYTPDNPKIITKCCHHFHLGCIYEWMERSDTCPMCGKEMEFCESP

SEQ ID NO: 112183 - protein, 522 aa, Setaria italica
  misc_feature (271)..(271): Xaa can be any naturally occurring amino acid
  misc_feature (301)..(301): Xaa can be any naturally occurring amino acid
  Transcript Sequence Number=SeqID_46209
  Gene Ontology: Mol. function=metal ion binding; Cellular component =chloroplast; Biological process=protein amino acid phosphorylation
  Homolog annotation: Hit_ID=B9RG78; Match level="QueryCoverage=100%, HitCoverage=32%, E-value=0.0, Identity=64%"; Hit description=Ankyrin- repeat containing protein, putative
  Pfam annotation: Domain name=Ank; Domain location=342-374; Score=0.8; E_value=28; Accession=PF00023.22; Description=Ankyrin repeat
  Pfam annotation: Domain name=Ank; Domain location=385-417; Score =35.3; E_value=2.4e-07; Accession=PF00023.22; Description=Ankyrin repeat
  Pfam annotation: Domain name=Ank; Domain location=418-450; Score=6.2; E_value=4.7; Accession=PF00023.22; Description=Ankyrin repeat
  Pfam annotation: Domain name=Ank; Domain location=453-485; Score =22.8; E_value=0.0014; Accession=PF00023.22; Description=Ankyrin repeat
  Pfam annotation: Domain name=Ank; Domain location=486-518; Score =10.7; E_value=1; Accession=PF00023.22; Description=Ankyrin repeat
  Pfam annotation: Domain name=Pkinase; Domain location=9-300; Score =85.4; E_value=2.1e-22; Accession=PF00069.17; Description=Protein kinase domain
  Pfam annotation: Domain name=Pkinase_Tyr; Domain location=9-300; Score=8.2; E_value=2.8e-14; Accession=PF07714.9; Description=Protein tyrosine kinase
  Pfam module annotation: Pfam domain module=Ank::Ank::Ank::Ank::Ank::Pk inase::Pkinase_Tyr; Domain location=342-374::385-417::418-450::453 -485::486-518::9-300::9-300
FDLASHPDLKLARRIGSGPPGPAGQEVWAGTLSRGGRGSGAKRCKHQVAVKRVPVAAGDGLEGVQEEVERLRRASTWCRNVCAFHGTVRVGGHLCFVMDRYAGSVQAEMRQNGGRLTLEQILRYGADIARGVAELHAAGIVCMSIKPSNILLDASGRAVVSDYGLSAILKNLTSRKVPDDSSAGIDATLLSPNYTAPEAWGPLKKSLNMFWDSANGISPESDAWSFGCTLVEMCTGAVPWAGLSAEEICKSVVKEKKPPPQYSRVVGVGLXPGELWKMIGDCLQFRASRRPSFQDMLKTFXLRHLLDIPRSPPASPENDFPNESLPNGIEPPTTSIQEMVHDNPNALHRFVCEGDAAGVRDLLAKAASERNGSLIRSLLEAQNTDGHTALHLACRRGSAELVEAIVAYQENVDILDKDEDPPIVFALAAGSPRCVRALVGRSSCINSRLREGLGPTLAHVCAHHGQPECMQELLIAGADPNAVDGEGESVLHIAVARRYTDCAIVILENGGCRSMGIPNSQQ

SEQ ID NO: 112184 - protein, 334 aa, Setaria italica
  misc_feature (46)..(46): Xaa can be any naturally occurring amino acid
  misc_feature (333)..(333): Xaa can be any naturally occurring amino acid
  Transcript Sequence Number=SeqID_46210
  Gene Ontology: Mol. function=zinc ion binding; Cellular component =intracellular
  Homolog annotation: Hit_ID=B3GS43; Match level="QueryCoverage=30%, HitCoverage=8%, E-value=5e-13, Identity=41%"; Hit description =Methylcytosine binding domain protein
  Pfam annotation: Domain name=zf-C2H2; Domain location=36-59; Score =14.0; E_value=0.36; Accession=PF00096.18; Description=Zinc finger, C2H2 type
  Pfam annotation: Domain name=zf-C2H2; Domain location=82-104; Score =19.9; E_value=0.011; Accession=PF00096.18; Description=Zinc finger, C2H2 type
  Pfam module annotation: Pfam domain module=zf-C2H2::zf-C2H2; Domain location=36-59::82-104
MKAQDSFTYVLVMVLIMFWVLKIRLVQVIYFQFASLSCQKCNWTFXDQTAYEQHHFSCHEMSAKRRRTGKFGEPVVGRDGKFECPICQKTFEEESRYFGHVGSHARYQGLTPEAFFDKATSARVINGSLAEVSFSLQELTDSRGQNKVSDGEAGFQHHNHSNGLFTELFSTNCSDNYIGPNKVTDVPSVCRYPSDTGHAAATIPKRALNTSHQSLSNANGFAGVNIFNGQLGNNHVGRLTAFGTANHYQDRIVDHGIAAPKHADSNAVKARDVNLNSSLDTISFPIASANNETSAALNEVNQSSFTAKCFRGSFNNNDGASSASSCSGSSNKXS

SEQ ID NO: 112185 - protein, 82 aa, Setaria italica
  Transcript Sequence Number=SeqID_46211
  Gene Ontology: Mol. function=transferase activity, transferring glycosyl groups; Biological process=metabolic process
  Homolog annotation: Hit_ID=B6SU01; Match level="QueryCoverage=100%, HitCoverage=17%, E-value=3e-30, Identity=79%"; Hit description =Anthocyanidin 3-O-glucosyltransferase
GWNSITEGLACGVRLVLLPLMFDQGINARLLVEKKVGVEVARDEEDGSFTPNDIAAALRRVVVEDEGEVFGNKVKELAKVFG

SEQ ID NO: 112186 - protein, 109 aa, Setaria italica
  Transcript Sequence Number=SeqID_46212
  Subcellular localization annotation: CTP_CleavageSite=79; ConfidenceScore=5.63e-01
PIFHFFFLSLYFSSLFFLTYPDPLFPSFLILFNRGRVKTGPCASVPTAAWRPGLAPSPAPRSRRQAVRSPKLATSLVLRGHVVWPYLRLTVNASRTILLSLAPLSACSL

SEQ ID NO: 112187 - protein, 115 aa, Setaria italica
  Transcript Sequence Number=SeqID_46213
MLAGHILSLLCTAHSDEFCHCQGCVGKYTLLRDEENPRLAIFERRLPCCGCGIGWSSFFRFLCPLIWYFAATLYCCKYYNKDPRERPGLAASAVAALIFTVLAIITLAVTLIICA

SEQ ID NO: 112188 - protein, 109 aa, Setaria italica
  Transcript Sequence Number=SeqID_46214
MGEAHSDEFCHCQGCVGKYTLLRDEENPRLAIFERRLPCCGCGIGWSSFLLGFLCPLIWYFAATLYCCKYYNKDPRERPGLAASAVAALIFTVLAIITLAVTLIICAYK

SEQ ID NO: 112189 - protein, 77 aa, Setaria italica
  Transcript Sequence Number=SeqID_46215
  Subcellular localization annotation: CTP_CleavageSite=35; ConfidenceScore=5.35e-01
TSHINPINDHTLTKSQLSNSQRDFLLPNTSPQRTQQQHSSTGSDESHDAASTHDSTNSGPPIRPNLKQRSGLSPTSE

SEQ ID NO: 112190 - protein, 151 aa, Setaria italica
  misc_feature (6)..(6): Xaa can be any naturally occurring amino acid
  Transcript Sequence Number=SeqID_46216
  Gene Ontology: Mol. function=metal ion binding
  Homolog annotation: Hit_ID=Q7XQ90; Match level="QueryCoverage=100%, HitCoverage=33%, E-value=5e-73, Identity=58%"; Hit description =OSJNBa0018M05.18 protein
HAKQLXWFPEQQGQPSVQWMMSLWNFLRHSCEDISIFAKWPILPLLDGKVVQLGNASNVVRDDGWSENMYSLLQKLGCFFLRSDMQIEHPQLASFVQESTAAGVLNAVQSVASNLQDINELFVGISLAEAHELRSFIFQSKWFSGNQITSS

SEQ ID NO: 112191 - protein, 179 aa, Setaria italica
  Transcript Sequence Number=SeqID_46217
GSASRPPWKVCFSPSRRGGEGIPYRGAFFRVVDELDSCGFAPGRRFRRRRRFLLGQAGDGDSRCAPEGRCLAASKSWRSRRLAWPGFCPGRQASSPSPVDQEEVQRLGLPLEDLRSFSSNSFLFRVLCVFVHLWSLWLWCALYFFLRQGVLCKGHVSMNMGSSPFDKKKILRESNKFLC

SEQ ID NO: 112192 - protein, 83 aa, Setaria italica
  Transcript Sequence Number=SeqID_46218
PDGRLRSDLALHRRHHRLRHPPDQPPGLITRKTFIKTSSAPSPPTNQTQMQQREEMAACVHCTDSPAPLGGWRRDEDDAREGK

SEQ ID NO: 112193 - protein, 53 aa, Setaria italica
  Transcript Sequence Number=SeqID_46219
  Gene Ontology: Mol. function=glutamate-ammonia ligase activity; Cellular component=chloroplast; Biological process=nitrogen compound metabolic process
  Homolog annotation: Hit_ID=P14655; Match level="QueryCoverage=100%, HitCoverage=12%, E-value=2e-25, Identity=98%"; Hit description =Glutamine synthetase, chloroplastic
QGDWNGAGCHTNYSTKSMREDGGFELIKKAILNLSLRHDLHISAYGEGNERRL

SEQ ID NO: 112194 - protein, 117 aa, Setaria italica
  misc_feature (43)..(43): Xaa can be any naturally occurring amino acid
  misc_feature (80)..(80): Xaa can be any naturally occurring amino acid
  Transcript Sequence Number=SeqID_46220
  Gene Ontology: Mol. function=aspartic-type endopeptidase activity; Cellular component=integral to membrane; Biological process =regulation of neuron apoptosis
  Homolog annotation: Hit_ID=Q2HPK6; Match level="QueryCoverage=99%, HitCoverage=57%, E-value=6e-38, Identity=71%"; Hit description =Putative aspartic protease A22B (Fragment)
  Pfam annotation: Domain name=Peptidase_A22B; Domain location=2-117; Score=-94.2; E_value=2.2e-05; Accession=PF04258.5; Description =Signal peptide peptidase
VDKWSLPNNEIIIPFFWKAPLIHSLSVEFTKSQIVASVPGFFXCMWYASKKHWLANNVLGIAFCIQGIEMLSLGSFKTGXILLAGLFVYDIFWVVRSLPVMVSVAKSFDAPIKLLFP

SEQ ID NO: 112195 - protein, 270 aa, Setaria italica
  misc_feature (117)..(117): Xaa can be any naturally occurring amino acid
  misc_feature (126)..(126): Xaa can be any naturally occurring amino acid
  misc_feature (248)..(248): Xaa can be any naturally occurring amino acid
  Transcript Sequence Number=SeqID_46221
  Gene Ontology: Mol. function=nucleic acid binding
  Homolog annotation: Hit_ID=B6TKT9; Match level="QueryCoverage=92%, HitCoverage=75%, E-value=1e-119, Identity=86%"; Hit description=CID11
  Pfam annotation: Domain name=RRM_1; Domain location=184-252; Score =38.1; E_value=3.4e-08; Accession=PF00076.14; Description=RNA recognition motif. (a.k.a. RRM, RBD, o
  Pfam annotation: Domain name=RRM_1; Domain location=85-154; Score =50.1; E_value=8.8e-12; Accession=PF00076.14; Description=RNA recognition motif. (a.k.a. RRM, RBD, o
  Pfam module annotation: Pfam domain module=RRM_1::RRM_1; Domain location=184-252::85-154
  Subcellular localization annotation: CTP_CleavageSite=71; ConfidenceScore=5.01e-01
PAALAPAPLSPAAYGYYPANGGFAVASPGHRGVVGFPAVADGHAGRGRKKGGAAGGFGGHGHPGRRRTNSRTSMAQRDEVIRRTVYVSDIDHQVTEENLAALFINCGQVVDCRMCGXDPNSVLRFXAFIEFTDEEGARTALNLSGTVLGYYPVRVLPSKTAIAPVNPTFLPRSDDEREMCARTIYCTNIDKKVTQADLKLFFESICGEVFRLRLLGDYHHSTRIAFVEFVMAESATAALNCSGVILGXLPIRVSPSKTPVRPRAPRQLMH

SEQ ID NO: 112196 - protein, 432 aa, Setaria italica
  Transcript Sequence Number=SeqID_46222
  Gene Ontology: Mol. function=protein binding
  Homolog annotation: Hit_ID=B6TMF8; Match level="QueryCoverage=99%, HitCoverage=99%, E-value=0.0, Identity=91%"; Hit description=VTC2
MEMKLTIRRVPTVVSNYQEDADKPRAGCGRNCLGDCCLPVSKLPLYAFKANPAKPSQEDASSTKSLVNILLTEWEDRMARGLFRYDVTACETKVIPGNLGFVAQLNEGRHLKKRPTEFRVDRVLQPFDPAKFNFTKVGQEEVLFQFENGAGDDSYFLNNAPITVADRAPNVVAINVSPIEYGHVLLIPRVLDGLPQRIDPESFLLALQMAAEAASPYFRLGYNSLGAFATINHLHFQAYYLSVPFPVEKAATHKIPLSEDTMKSGVTVSKLINYPVRGLVFEGGNTLNDLANVVSSACIWLQDNNVPYNVLISDCGKRIFLFPQCYAEKQALGEVSQELLDTQVNPAVWEISGHIVLKRRNDYEEASETSAWKLLAEVSLSEERFEEVKAYIFTAAGLVQADEEKVSEGEEATYTPVPVAPLPIAEGCLVLQ

SEQ ID NO: 112197 - protein, 345 aa, Setaria italica
  Transcript Sequence Number=SeqID_46223
  Gene Ontology: Mol. function=aspartic-type endopeptidase activity; Cellular component=integral to membrane; Biological process =regulation of neuron apoptosis
  Homolog annotation: Hit_ID=A8IGT6; Match level="QueryCoverage=83%, HitCoverage=78%, E-value=4e-76, Identity=51%"; Hit description =Signal peptide peptidase, eukaryotic-type
  Pfam annotation: Domain name=DUF1119; Domain location=63-307; Score= -109.5; E_value=0.016; Accession=PF06550.3; Description=Protein of unknown function (DUF1119)
  Pfam annotation: Domain name=Peptidase_A22B; Domain location=47-321; Score=428.1; E_value=1.4e-125; Accession=PF04258.5; Description =Signal peptide peptidase
  Pfam module annotation: Pfam domain module=DUF1119::Peptidase_A22B; Domain location=63-307::47-321
  Subcellular localization annotation: CTP_CleavageSite=53; ConfidenceScore=5.07e-01
MKTHERAANLALAALSLAPLVVNVNPNVNVILTACLTVYVGCYRSVKPTPPTETMSKEHAMRFPLVGSAMLLSLFLLFKFLSKDLVNAVLTAYFFILGIVALSATLLPSIKRFLPKEWNDNLIVWQAPLIHSLSVEFTKSQIVASVPGFFFCMWYASKKHWLANNVLGIAFCIQGIEMLSLGSFKTGAILLAGLFVYDIFWVFFTPVMVSVAKSFDAPIKLLFPTAHAARPFSMLGLGDIVIPGIFVALALRFDVSRGIKNRYFNSAFLGYTLGLTVTIIVMNWFQAAQPALLYIVPGVIGFVAVHCLWNGEVKQLLEFDESKAEAEEAGEEEQDDKSEENKKVD

SEQ ID NO: 112198 - protein, 429 aa, Setaria italica
  misc_feature (34)..(34): Xaa can be any naturally occurring amino acid
  Transcript Sequence Number=SeqID_46224
  Gene Ontology: Mol. function=glutamate-ammonia ligase activity; Cellular component=chloroplast; Biological process=nitrogen compound metabolic process
  Homolog annotation: Hit_ID=P14655; Match level="QueryCoverage=96%, HitCoverage=96%, E-value=0.0, Identity=84%"; Hit description =Glutamine synthetase, chloroplastic
  Pfam annotation: Domain name=Gln-synt_C; Domain location=160-412; Score=299.2; E_value=8.9e-87; Accession=PF00120.16; Description =Glutamine synthetase, catalytic domain
  Pfam annotation: Domain name=Gln-synt_N; Domain location=74-154; Score=152.1; E_value=1.7e-42; Accession=PF03951.11; Description =Glutamine synthetase, beta-Grasp domain
  Pfam module annotation: Pfam domain module=Gln-synt_C::Gln-synt_N; Domain location=160-412::74-154
  Subcellular localization annotation: CTP_CleavageSite=46; ConfidenceScore=5.52e-01
MAQAVVPAMQCQVGAKAAVRARPAAGAGGRVWGXVRRTGRGTSGFKVMAISTASTGVVPRLEQMLNLDTKPYTDKIIAEYIWVGGSGIDLRSKSRTIEKPVEDPSELPKWNYDGSSTGQAPGEDSEVILYPQAIFKDPFRGGNNILVMCDTYTPAGEPIPTNKRHRAAQIFSDPRVVEQVPWFGIEQEYTLLQRDVNWPLGWPVGGYPGPQGPYYCAVGAEKSFGRDISDAHYKACLYAGINISGTNGEVMPGQWEYQVGPSVGIEAGDHIWISRYLLERITEQAGVVLTLDPKPIPGDWNGAGCHTNYSTKSMREDGGFELIKKAILNLSLRHDLHISAYGEGNERRLTGLHETASIDTFSWGVANRGCSIRVGRDTEAKGKGYLEDRRPASNMDPYIVTGLLAETTILWEPTLEAEALAAKKLALKV

SEQ ID NO: 112199 - protein, 159 aa, Setaria italica
  Transcript Sequence Number=SeqID_46225
  Gene Ontology: Mol. function=nucleic acid binding
  Homolog annotation: Hit_ID=Q8LEE4; Match level="QueryCoverage=100%, HitCoverage=40%, E-value=2e-59, Identity=69%"; Hit description=Zinc finger protein
  Pfam annotation: Domain name=zf-CCHC; Domain location=127-144; Score =19.5; E_value=0.00035; Accession=PF00098.15; Description=Zinc knuckle
ESIDEQPWEKVRSSSPLKVKEDDEVDKLEIKINTPKRSKRTYPSPSPEVAMKISRSLRSLNAQTGLFTKHMKIIHQDPELHAQRVAAIKRTKGTAAARKHASETQKAFFSNPKNRLKRSIAMKGVKFYCSRCGQEGHRSFYCPTVRKDSARVQFKCRLC

SEQ ID NO: 112200 - protein, 188 aa, Setaria italica
  Transcript Sequence Number=SeqID_46226
  Gene Ontology: Mol. function=nucleic acid binding; Cellular component= nucleus
  Homolog annotation: Hit_ID=Q8LEE4; Match level="QueryCoverage=95%, HitCoverage=45%, E-value=5e-47, Identity=56%"; Hit description=Zinc finger protein
  Pfam annotation: Domain name=zf-CCHC; Domain location=123-140; Score =16.4; E_value=0.0012; Accession=PF00098.15; Description=Zinc knuckle
  Pfam annotation: Domain name=zf-CCHC; Domain location=164-181; Score =7.1; E_value=0.047; Accession=PF00098.15; Description=Zinc knuckle
  Pfam annotation: Domain name=zf-CCHC; Domain location=67-84; Score =19.5; E_value=0.00035; Accession=PF00098.15; Description=Zinc knuckle
  Pfam annotation: Domain name=zf-CCHC; Domain location=94-111; Score =10.8; E_value=0.011; Accession=PF00098.15; Description=Zinc knuckle
  Pfam module annotation: Pfam domain module=zf-CCHC::zf-CCHC::zf -CCHC::zf-CCHC; Domain location=123-140::164-181::67-84::94-111
QIIKRLFTKHMKIIHQDPELHAQRVAAIKRTKGTAAARKHASETQKAFFSNPKNRLKRSIAMKGVKFYCSRCGQEGHRSFYCPTVRKDSARVQFKCRLCGMEGHNSRTCGKPKSEKEQRRQPRHCSRCGERGHNRRNCPRSTDADIGASGNMVNKVTGPNSGTYSCSFCLEKGHNRRTCPKRKASVGK

SEQ ID NO: 112201 - protein, 78 aa, Setaria italica
  Transcript Sequence Number=SeqID_46227
  Gene Ontology: Mol. function=metal ion binding
  Homolog annotation: Hit_ID=B6SU00; Match level="QueryCoverage=70%, HitCoverage=27%, E-value=2e-24, Identity=96%"; Hit description =Pollen-specific protein SF3
  Pfam annotation: Domain name=LIM; Domain location=42-78; Score=-7.5; E_value=0.054; Accession=PF00412.14; Description=LIM domain
MGLAVWHSFERGIVAQGKGGLAVLARSPSKAARMFSGTQDKCATCGKTAYPLEKVTVEEKAYHKSCFKCSHGGCAITP

SEQ ID NO: 112202 - protein, 177 aa, Setaria italica
  Transcript Sequence Number=SeqID_46228
  Gene Ontology: Mol. function=metal ion binding
  Homolog annotation: Hit_ID=B6SU00; Match level="QueryCoverage=90%, HitCoverage=92%, E-value=7e-88, Identity=84%"; Hit description =Pollen-specific protein SF3
  Pfam annotation: Domain name=LIM; Domain location=1-43; Score=24.5; E_ value=8.7e-06; Accession=PF00412.14; Description=LIM domain
  Pfam annotation: Domain name=LIM; Domain location=88-144; Score=68.7; E_value=2.2e-17; Accession=PF00412.14; Description=LIM domain
  Pfam module annotation: Pfam domain module=LIM::LIM; Domain location =1-43::88-144
STDGVVFHRSCFKCQHCKSTLSLSNYSSFEGVPYCKAHFEQLFKETGSYNKSFQSQSPAKLTPEKLAPELTRSPSKAARMFSGTQDKCATCGKTAYPLEKVTVEEKAYHKSCFKCSHGGCAITPSNYAALEGTLYCKHHFSQLFKEKGSYNHLIKCASVKRAEAQPEQPAQPAADSS

SEQ ID NO: 112203 - protein, 199 aa, Setaria italica
  Transcript Sequence Number=SeqID_46229
  Gene Ontology: Mol. function=metal ion binding
  Homolog annotation: Hit_ID=B6SU00; Match level="QueryCoverage=91%, HitCoverage=92%, E-value=1e-101, Identity=97%"; Hit description =Pollen-specific protein SF3
  Pfam annotation: Domain name=LIM; Domain location=110-166; Score =68.7; E_value=2.2e-17; Accession=PF00412.14; Description=LIM domain
  Pfam annotation: Domain name=LIM; Domain location=9-65; Score=54.6; E_ value=3.8e-13; Accession=PF00412.14; Description=LIM domain
  Pfam module annotation: Pfam domain module=LIM::LIM; Domain location =110-166::9-65
MFSGTQQKCKVCTKTVYPMDQLSTDGVVFHRSCFKCQHCKSTLSLSNYSSFEGVPYCKAHFEQLFKETGSYNKSFQSQSPAKLTPEKLAPELTRSPSKAARMFSGTQDKCATCGKTAYPLEKVTVEEKAYHKSCFKCSHGGCAITPSNYAALEGTLYCKHHFSQLFKEKGSYNHLIKCASVKRAEAQPEQPAQPAADSS

SEQ ID NO: 112204 - protein, 63 aa, Setaria italica
  Transcript Sequence Number=SeqID_46230
EEMQIEELGIDNITCSCMIFYIENCLRIDLIGFSAIPTFIATVTLSSVFLSYVLVIEVYLLYF

SEQ ID NO: 112205 - protein, 103 aa, Setaria italica
  Transcript Sequence Number=SeqID_46231
  Subcellular localization annotation: CTP_CleavageSite=20; ConfidenceScore=5.45e-01
QRRRRGRTTRCPYPSRPAPPAGEEPRPRPRRSRVPPCRAAYRRGARAPRSPRGRSRAASGSDPSARSRSPPPLPQSPRRGWRTPARSLARLTVFLARHRGHDR

SEQ ID NO: 112206 - protein, 37 aa, Setaria italica
  Transcript Sequence Number=SeqID_46232
IDEHVQREIMNHRPLKHPNIIRFKEVKFSEHLGKEVS

SEQ ID NO: 112207 - protein, 63 aa, Setaria italica
  Transcript Sequence Number=SeqID_46233
  Gene Ontology: Mol. function=protein serine/threonine kinase activity; Biological process=protein amino acid phosphorylation
  Homolog annotation: Hit_ID=Q75LR7; Match level="QueryCoverage=98%, HitCoverage=18%, E-value=2e-24, Identity=87%"; Hit description =Serine/threonine-protein kinase SAPK1
YRTFWCLPQRILSVQYSIPDYVRVSMECRHLLSRIFVGNPEQRITIPEIKNHPWFLKNLPIEM

SEQ ID NO: 112208 - protein, 46 aa, Setaria italica
  Transcript Sequence Number=SeqID_46234
  Gene Ontology: Mol. function=protein serine/threonine kinase activity; Biological process=protein amino acid phosphorylation
  Homolog annotation: Hit_ID=B6STS0; Match level="QueryCoverage=91%, HitCoverage=10%, E-value=3e-17, Identity=95%"; Hit description =Serine/threonine-protein kinase SAPK1
HLVFQVVLTPTHLAIVMEYAAGGELFERICTAGRFSEDEARFFFQQ

SEQ ID NO: 112209 - protein, 386 aa, Setaria italica
  Transcript Sequence Number=SeqID_46235
  Gene Ontology: Mol. function=protein serine/threonine kinase activity; Biological process=protein amino acid phosphorylation
  Homolog annotation: Hit_ID=B6STS0; Match level="QueryCoverage=89%, HitCoverage=87%, E-value=0.0, Identity=90%"; Hit description =Serine/threonine-protein kinase SAPK1
  Pfam annotation: Domain name=Pkinase; Domain location=46-302; Score =312.8; E_value=7.2e-91; Accession=PF00069.17; Description=Protein kinase domain
  Pfam annotation: Domain name=Pkinase_Tyr; Domain location=46-300; Score=-42.4; E_value=6.6e-11; Accession=PF07714.9; Description =Protein tyrosine kinase
  Pfam module annotation: Pfam domain module=Pkinase::Pkinase_Tyr; Domain location=46-302::46-300
KIKVALSFWPRRPISAPRPRLPRLLLPLCSPWPPPPLRSCAAMERYEVIRDIGSGNFGVAKLVRDVTTKELFAVKFIERGQKIDEHVQREIMNHRSLKHPNIIRFKEVVLTPTHLAIVMEYAAGGELFERICTAGRFSEDEARFFFQQLISGVSYCHSMQVCHRDLKLENTLLDGSVAPRLKICDFGYSKSSVLHSQPKSTVGTPAYIAPEVLSRKEYDGKVADVWSCGVTLYVMLVGAYPFEDPDDPRNFRKTITRILSVQYSIPDYVRVSMECRHLLSRIFVGNPEQRITIPEIKNHPWFLKNLPIEMTDDYQQSMQLADMNSSEQSLEEVMAIIQEARKPGEAMKLAGQVSCLGSMDMDLDDIDLDDIDDIDIENSGDFVCAM

SEQ ID NO: 112210 - protein, 85 aa, Setaria italica
  Transcript Sequence Number=SeqID_46236
  Gene Ontology: Mol. function=catalytic activity; Cellular component =plasma membrane; Biological process=cellular metabolic process
  Homolog annotation: Hit_ID=B6T983; Match level="QueryCoverage=100%, HitCoverage=12%, E-value=7e-39, Identity=89%"; Hit description=RHM1
RGIYNFTNPGVVSHNEILEMYKQYIHPSFKWTNFNLEEQAKVIIAPRSNNEMDASKLKKEFPELLSIKDSLIKYVFEPNQKLPIN

SEQ ID NO: 112211 - protein, 160 aa, Setaria italica
  misc_feature (41)..(41): Xaa can be any naturally occurring amino acid
  Transcript Sequence Number=SeqID_46237
  Gene Ontology: Mol. function=binding
  Homolog annotation: Hit_ID=Q2R300; Match level="QueryCoverage=100%, HitCoverage=16%, E-value=7e-66, Identity=77%"; Hit description =Importin, putative, expressed
QSVSSNACSLALRKLCEDASSFIHEPQNLEILFWISECSCXGMDKGNLRLEDEEEIVSAITHVLSSVRDKELRKSWLARLLYSSYSAVEKIIDIDRDHSLRQNPATYTQSLDLAVRGLYRMSALFGHLSTAITSGLVDDDIILCLLGIFWPLLEKLFRSS

SEQ ID NO: 112212 - protein, 71 aa, Setaria italica
  Transcript Sequence Number=SeqID_46238
  Gene Ontology: Mol. function=signal transducer activity; Biological process=response to light stimulus
  Homolog annotation: Hit_ID=Q8W0R6; Match level="QueryCoverage=95%, HitCoverage=10%, E-value=9e-15, Identity=66%"; Hit description =Putative photoreceptor-interacting protein
ELEKECSTMRQDIERLGRSKSVGKNRFPFALTAKPQVCSTKDKDTAPETSKTPAPPFTTATLSSLSVAGVF

SEQ ID NO: 112213 - protein, 653 aa, Setaria italica
  Transcript Sequence Number=SeqID_46239
  Gene Ontology: Mol. function=signal transducer activity; Biological process=response to light stimulus
  Homolog annotation: Hit_ID=Q8W0R6; Match level="QueryCoverage=100%, HitCoverage=100%, E-value=0.0, Identity=89%"; Hit description =Putative photoreceptor-interacting protein
  Pfam annotation: Domain name=BTB; Domain location=13-126; Score=5.1; E_value=0.0054; Accession=PF00651.23; Description=BTBPOZ domain
  Pfam annotation: Domain name=NPH3; Domain location=213-479; Score =434.4; E_value=1.8e-127; Accession=PF03000.6; Description=NPH3 family
  Pfam module annotation: Pfam domain module=BTB::NPH3; Domain location= 13-126::213-479
MACQKLGSRADVFRKQGQEWYCTSGLPSDISVVVGEQSFHLHKFPLLSKSDLLERCIREKIDKGEDSWVIDLSDIPGGAKAFELAAKFCYGVKFEMTASNVVHLRCAADYLEMTEEMSEGNLIAQTENFLTQTVLRSWKDSVKALQTCDDVLDIAERLQIIKRCVDSIATRSCSDPDLFGWPVAQYGGPMQSPGGSLLWNGISTGARPRNSSPDWWYDDVSCLSLPLYKKLISAMEYRGISQEIIVGSLNHYAKRRLPGLNRRKSISDVSNCLSMTSLTSIPSEDDQKYLLEEIDRLLPFQRGVTSCKLLFGLLRTAIFLKASPSCLSNLERRIGMQLDKASLEDLLIPNISESVETLYDVDCVQRIVDHFLAMDQETGGASPGLGEDGQILASPSLMPITMVAKLIDGYLAEVAPDENLKLPKFRSLAAAIPDYARPIDDGLYRAIDIYLKAHPYLSESDKEELCRVMDCQKLSLEACTHAAQNERLPLRIIVQVLFFEQLQLRSSIAECLMISEPLDGGISRQLGGMPVSGEHHRGGGAGWPLAARENQTLREGMDSMKQRVAELEKECSTMRQDIERLGRSKSVGKNRFPFALTAKPQVCSTKDKDTAPETSKTPATESEDKVAVVKGGAGGEGAPQLKLRKHKMNLSTC

SEQ ID NO: 112214 - protein, 143 aa, Setaria italica
  misc_feature (90)..(90): Xaa can be any naturally occurring amino acid
  Transcript Sequence Number=SeqID_46240
  Subcellular localization annotation: CTP_CleavageSite=43; ConfidenceScore=5.60e-01
TNNSASSGGAVDQNKGNGGGLSSSKAGGSSGSPASSAAGDRTVAKASEQSVDTSNKQPGSGSGDPSNATAGQGSTVKAEAKVGGGVPSNXSAGSSSSGKVDLSTGSSNTQAGSGIGIPTSGSASGNISSVKAEAEGAVGAGSS

SEQ ID NO: 112215 - protein, 85 aa, Setaria italica
  Transcript Sequence Number=SeqID_46241
  Gene Ontology: Cellular component=integral to membrane
  Homolog annotation: Hit_ID=B6TTZ1; Match level="QueryCoverage=80%, HitCoverage=23%, E-value=2e-29, Identity=88%"; Hit description =Tetraspanin family protein
MQQAVLFLLALVVRAMNKPAEYDSDDEIIAIGRSPTLRQPLIHGQNVPATGVPVPTLDQRASRNDAWSQRMREKVHYLLDRFQHH

SEQ ID NO: 112216 - protein, 181 aa, Setaria italica
  Transcript Sequence Number=SeqID_46242
  Gene Ontology: Cellular component=integral to membrane
  Homolog annotation: Hit_ID=B6TTZ1; Match level="QueryCoverage=90%, HitCoverage=58%, E-value=2e-65, Identity=78%"; Hit description =Tetraspanin family protein
  Pfam annotation: Domain name=Tetraspannin; Domain location=6-181; Score=63.5; E_value=8e-16; Accession=PF00335.12; Description =Tetraspanin family
MAACRGFFECLLRLLNFVLTVAGLAMVGYGIYLLVEWMKISKGGGGGTPAEVLVLGRPLLGAVALGDSFLDKLPKAWFIYLFIGVGAIVFLVSLFGCIGAGTRNTCCLCFYAFLVLLLILAEGGAAAFIFFDNSWKDVIPKDKTHNFDVMYDFLKDNWEIARWVALGVVVFEAVLFLLALV

SEQ ID NO: 112217 - protein, 278 aa, Setaria italica
  Transcript Sequence Number=SeqID_46243
  Gene Ontology: Cellular component=integral to membrane
  Homolog annotation: Hit_ID=B6TTZ1; Match level="QueryCoverage=100%, HitCoverage=100%, E-value=1e-124, Identity=78%"; Hit description =Tetraspanin family protein
  Pfam annotation: Domain name=Tetraspannin; Domain location=6-187; Score=76.9; E_value=7.5e-20; Accession=PF00335.12; Description =Tetraspanin family
MAACRGFFECLLRLLNFVLTVAGLAMVGYGIYLLVEWMKISKGGGGGTPAEVLVLGRPLLGAVALGDSFLDKLPKAWFIYLFIGVGAIVFLVSLFGCIGAGTRNTCCLCFYAFLVLLLILAEGGAAAFIFFDNSWKDVIPKDKTHNFDVMYDFLKDNWEIARWVALGVVVFEAVLFLLALVVRAMNKPAEYDSDDEIIAIGRSPTLRQPLIHGQNVPATGVPVPTLDQRASRNDAWSQRMREKYGLDTSQFTYNPSDPSRYQQNGAPQAEERSRCTIL

SEQ ID NO: 112218 - protein, 106 aa, Setaria italica
  Transcript Sequence Number=SeqID_46244
IFGKCLVPDYESSGKHLVLDLESFGKRLVPDHFVRMTNWLVKAKGLGYVLILLRKIRSKGLALDVCVFNSLVRIFCWEGYCKHENFYEVSLILDSMLDCLSSQQTT

SEQ ID NO: 112219 - protein, 52 aa, Setaria italica
  Transcript Sequence Number=SeqID_46245
YLNRPNLAANSSSMHISVESASQFSRTMIKVLYMHICRLLLYPLSLLSFPPL

SEQ ID NO: 112220 - protein, 207 aa, Setaria italica
  misc_feature (198)..(198): Xaa can be any naturally occurring amino acid
  Transcript Sequence Number=SeqID_46246
  Homolog annotation: Hit_ID=B6TBF4; Match level="QueryCoverage=100%, HitCoverage=39%, E-value=2e-16, Identity=34%"; Hit description=IWS1 C-terminus family protein
MDDLFDEDGEALMDPDARDPSPEPEPYVGLEDDLGDGDDWNRERSPTPVHGDDGGVGSSSKPRKRLLKKGGGGGDGMPGDDGLEDFGLEDADADPAAEAKKRKGSSALRDLARGGAGKEKKEKKRRREDDGRGRDSGMAREKRGSGGAGRGGGGEVQDDGEREIQELWDTIAGGDSEDDQEGVRTVDDDNFIDDTLGXDPADRYGSD

SEQ ID NO: 112221 - protein, 160 aa, Setaria italica
  misc_feature (8)..(8): Xaa can be any naturally occurring amino acid
  Transcript Sequence Number=SeqID_46247
  Gene Ontology: Mol. function=protein binding; Biological process =protein amino acid phosphorylation
  Homolog annotation: Hit_ID=Q2R0X3; Match level="QueryCoverage=98%, HitCoverage=46%, E-value=2e-20, Identity=36%"; Hit description =Leucine Rich Repeat family protein
  Pfam annotation: Domain name=LRR_1; Domain location=102-124; Score =3.2; E_value=75; Accession=PF00560.25; Description=Leucine Rich Repeat
  Pfam annotation: Domain name=LRR_1; Domain location=126-148; Score =10.5; E_value=2.9; Accession=PF00560.25; Description=Leucine Rich Repeat
  Pfam annotation: Domain name=LRR_1; Domain location=29-51; Score =12.5; E_value=1.2; Accession=PF00560.25; Description=Leucine Rich Repeat
  Pfam annotation: Domain name=LRR_1; Domain location=5-27; Score=14.2; E_value=0.55; Accession=PF00560.25; Description=Leucine Rich Repeat
  Pfam annotation: Domain name=LRR_1; Domain location=53-75; Score=8.2; E_value=8.2; Accession=PF00560.25; Description=Leucine Rich Repeat
  Pfam annotation: Domain name=LRR_1; Domain location=77-100; Score =7.6; E_value=11; Accession=PF00560.25; Description=Leucine Rich Repeat
  Pfam module annotation: Pfam domain module=LRR_1::LRR_1::LRR_1::LRR _1::LRR_1::LRR_1; Domain location=102-124::126-148::29-51::5-27::53 -75::77-100
SKLVNLTXLSMENNLLSGSIPSAIGKLHSLFMLNLSNNTISGQIPSSVGNITQLGKLFLHDNDLSGNIPSSLGQCLQLLQLNLSSNSLDGFLPKELFARPPLSLGLDLSHNNLIGEIPEEIGKLEHIILLKVSNNLFSGGLPSSFGGLESIRYINLSRNN

SEQ ID NO: 112222 - protein, 58 aa, Setaria italica
  misc_feature (51)..(51): Xaa can be any naturally occurring amino acid
  Transcript Sequence Number=SeqID_46248
VAEEAPGTLSLLKLSFLEVNDLTSQLKNLRKSLTISRFGKQASTKASSRTXWPKQGNT

SEQ ID NO: 112223 - protein, 104 aa, Setaria italica
  Transcript Sequence Number=SeqID_46249
EGKDALAPHHHPPTHTCFLGSPIVVHPLLRVPQPCSVELADNALCSYRQNDNNTNSKATTQHEAIILSLYITSAVKRRRKKICSCRMRDAWTFNPCKNQAIWSR

SEQ ID NO: 112224 - protein, 109 aa, Setaria italica
  Transcript Sequence Number=SeqID_46250
  Homolog annotation: Hit_ID=Q67UH6; Match level="QueryCoverage=100%, HitCoverage=23%, E-value=5e-12, Identity=38%"; Hit description =Mitochondrial transcription termination factor-like
SKPEAVLAFFADSGLAKAAVAAAVAREPRLLCSKLEKSLKPRLALLRDIGLSPPQISSLITIAPDVFLCPTKIPRLAFYLSFLGSYDKVYTALRRSPLLLGHDLQSVVK

SEQ ID NO: 112225 - protein, 106 aa, Setaria italica
  Transcript Sequence Number=SeqID_46251
  Gene Ontology: Mol. function=protein serine/threonine kinase activity; Biological process=protein amino acid phosphorylation
  Homolog annotation: Hit_ID=Q2L391; Match level="QueryCoverage=95%, HitCoverage=22%, E-value=1e-25, Identity=59%"; Hit description =Cyclin dependent protein kinase
  Pfam annotation: Domain name=Pkinase; Domain location=1-106; Score= -71.1; E_value=0.00029; Accession=PF00069.17; Description=Protein kinase domain
YVTVLTVMWQLLTGAKAMHEKHIFHRDIKPENLLISDDGRTVKICDFGMAMSLSEAPPYEPDAGTLWYMAPELLLEKEDYNALVDTWALGCVMAELINGKMLFDEG

SEQ ID NO: 112226 - protein, 49 aa, Setaria italica
  Transcript Sequence Number=SeqID_46252
NCTNDILTMLANLGNQLETTLSPNRSVLYAENSHVIILVYLAYGKVIMS

SEQ ID NO: 112227 - protein, 114 aa, Setaria italica
  Transcript Sequence Number=SeqID_46253
  Homolog annotation: Hit_ID=B6U9B2; Match level="QueryCoverage=64%, HitCoverage=62%, E-value=7e-13, Identity=45%"; Hit description=Lipid binding protein
  Pfam annotation: Domain name=Tryp_alpha_amyl; Domain location=48-108; Score=13.2; E_value=0.017; Accession=PF00234.14; Description=Protease inhibitorseed storageLTP f
MYKQMMSSGSRSLAATLLLLLAAAATAQAAPAAGTACHNDIVALRSTCYQYVQDDGPMVQPSPHCCATVRGIANATCVCDYFSSLDRINLDRVFYVAGQCHVAIPWSCGDKNQV

SEQ ID NO: 112228 - protein, 47 aa, Setaria italica
  Transcript Sequence Number=SeqID_46254
VKNVTSSKEIACVISKNTWKADMRLLPQPRAILLSHDADEVNITAIL

SEQ ID NO: 112229 - protein, 142 aa, Setaria italica
  Transcript Sequence Number=SeqID_46255
MQDPSGDDFPAPKLHKKKVVYRPHSSGQLKGEPELLRRDVPHSSGMAQKPPKRSLKSERPATPPSDRGTPDSLPDSGPTDEYRALRRKYMMLEEENFALDNELRMEDEEIKALEEEKLALLDELVVLEGLVEPSQLQFQRRP

SEQ ID NO: 112230 - protein, 101 aa, Setaria italica
  misc_feature (31)..(31): Xaa can be any naturally occurring amino acid
  Transcript Sequence Number=SeqID_46256
  Subcellular localization annotation: CTP_CleavageSite=24; ConfidenceScore=5.19e-01
MDRASAAWWTETPRQRPRPGKSVACTAASAXAPSSPDGFSCGLSLGLQRLKACGLQVLSPSAQGSRLPRLREWRPPLLDPALQPPIRLLVNSRQHPSSGIV

SEQ ID NO: 112231 - protein, 204 aa, Setaria italica
  Transcript Sequence Number=SeqID_46257
  Gene Ontology: Mol. function=phosphatidylcholine-sterol O -acyltransferase activity; Biological process=lipid metabolic process
  Homolog annotation: Hit_ID=Q6K3D9; Match level="QueryCoverage=98%, HitCoverage=32%, E-value=1e-107, Identity=85%"; Hit description =Phosphatidylcholine acyltransferase-like
GIDSKTEVGYYFAPSGKPYPDNWIITDVIYEFEGALLSRSGNSVSGKPNNSSGDGTVSFNSLSWCKNWLGPKVNITRAPQAEHDGSDLQTTMNIDHHHGQDIVPNMTRAPHVKYITYYEDAESLPGWRTAVWELDKANHRNIVRMPVLMRELWLEMWHDMHPESKSKFVTKAFRGPLRNEDCRWDYSKARCGFPEHCEYRLLLF

SEQ ID NO: 112232 - protein, 86 aa, Setaria italica
  Transcript Sequence Number=SeqID_46258
NLYLFVTSNPTLLILALSHFFYQHIYCLLWSGTAVGNNNYTDEVYCSMEQGQDVVLDDTSMVSSKPNYVPEDEDKLSFRIADDLFP

SEQ ID NO: 112233 - protein, 411 aa, Setaria italica
  misc_feature (130)..(130): Xaa can be any naturally occurring amino acid
  misc_feature (211)..(211): Xaa can be any naturally occurring amino acid
  Transcript Sequence Number=SeqID_46259
  Gene Ontology: Mol. function=actin binding; Cellular component =cytoskeleton
  Homolog annotation: Hit_ID=Q84TX2; Match level="QueryCoverage=100%, HitCoverage=18%, E-value=4e-67, Identity=42%"; Hit description=SCAR -like protein 1
VPPRTTKLKSRHPRSPDHKTISRICREHLLEVISSQQKIFSRYSGRQCHVRFRSTDSSETGEMENFGAIVQSSGKLELTKIVPINESNTMEIISAPTDGSAYLELGDKQILGKQHEPLEKNGMVRDLGKXRIVQTSRLVKVITARIQDMKRNTFLAGVPADQDADGCRPDDICSDQDNFIDALNNMGPEGEADPEIETEFDPSANVEQIEXLRDSKEGEDALYAESPQVGPAIDSSPGFNSSCNAEEATCMDLPSDSANPAVSASNGPSSVSQSGRQLNDVDWIKDEEPFDDEDLMDVSSSSSVASVNAVLQTDEDLYGCQQHQEKAYHYQSSDNAAVIHSSDKHSPKTSSDLDGTAVGNNNYTDEVYCSMEQGQDVVLDDTSMVSSKPNYVPEDEDKLSFRIADDLFPHP

SEQ ID NO: 112234 - protein, 56 aa, Setaria italica
  Transcript Sequence Number=SeqID_46260
  Subcellular localization annotation: CTP_CleavageSite=32; ConfidenceScore=5.82e-01
TCSASTSSAPGSSSSPPASSSRHSSSSPSRCSCSSASSAWRSYSSSGTASPSSSPA

SEQ ID NO: 112235 - protein, 479 aa, Setaria italica
  Transcript Sequence Number=SeqID_46261
  Gene Ontology: Mol. function=drug transporter activity; Cellular component=membrane; Biological process=multidrug transport
  Homolog annotation: Hit_ID=Q6K702; Match level="QueryCoverage=97%, HitCoverage=84%, E-value=1e-149, Identity=56%"; Hit description=MATE efflux protein-like
  Pfam annotation: Domain name=BCCT; Domain location=67-399; Score= -446.5; E_value=0.08; Accession=PF02028.9; Description=BCCT family transporter
  Pfam annotation: Domain name=MatE; Domain location=253-415; Score =105.2; E_value=2.3e-28; Accession=PF01554.10; Description=MatE
  Pfam annotation: Domain name=MatE; Domain location=33-193; Score =160.1; E_value=6.5e-45; Accession=PF01554.10; Description=MatE
  Pfam module annotation: Pfam domain module=BCCT::MatE::MatE; Domain location=67-399::253-415::33-193
MQVADDTPPVRSAGDAARMVWAETKLLWGIGLPIGVSMLSMYAISSITQMFIGHLGNLPLAAASIGLSVFSTFALGFLLGMGSALETLCGQAFGAGQVDMLGVYLQRSWIILIASSFLIAPFFVFAEPLLLLIGQDPDVARESGRFTLYILPSVFAMAINFAAVKFLQAQSKVRAPAWIGLGALLANLLLNYLFVVVLGWGLPGAAAAYDVAHLAIALGQVAYIVGWCRDGWRGWSSAAFHDIWSFVRLSLESAVMLCLEIWYIGLITVLTGDLDDAQIAVDSLGICMNINGWEGMIFIGLNAAISVRVSNELGSGRPRAAWNAVMVVVVEALLIGLLCMALILIFRDSFSIIFTSDDNLRRAVSKIAGLLGLTMVLNSVQPVVTGVAIGGGWQGLVAYINLGCYYVFGLPLGFLLGYKLNFGVGGIWSGMLCGIAVQTLILLIVVWRTDWKAEAAQAASRVQKWGGKATDQLNKPLLE

SEQ ID NO: 112236 - protein, 135 aa, Setaria italica
  Transcript Sequence Number=SeqID_46262
  Homolog annotation: Hit_ID=UPI00001634E0; Match level="QueryCoverage =77%, HitCoverage=8%, E-value=8e-21, Identity=51%"; Hit description =pentatricopeptide (PPR) repeat-containing protein
  Pfam annotation: Domain name=DUF1685; Domain location=6-95; Score =104.8; E_value=3e-28; Accession=PF07939.3; Description=Protein of unknown function (DUF1685)
EEEGGGSPGAAALGREGSGGVGRARSLTDDDLEELKGCVDLGFGFSYHEIPELCGTLPALELCYSMSQRFLDEHQPQPGKHEEAPAATPALAPASPAQPVATNWKISSPGDSPDEVKARLKYWAQAVACTVRLCS

SEQ ID NO: 112237 - protein, 88 aa, Setaria italica
  Transcript Sequence Number=SeqID_46263
RLRTAAPAADGFAFGSHSHDSDMDLAMLVTDFLENGGSAGGDSRASSDSDSGLSDLAHLADNIAVPCTSLLLHRPAVFPLFSFYFISR

SEQ ID NO: 112238 - protein, 206 aa, Setaria italica
  misc_feature (141)..(141): Xaa can be any naturally occurring amino acid
  misc_feature (185)..(185): Xaa can be any naturally occurring amino acid
  misc_feature (201)..(201): Xaa can be any naturally occurring amino acid
  Transcript Sequence Number=SeqID_46264
  Gene Ontology: Mol. function=ATPase activity, coupled to transmembrane movement of ions, phosphorylative mechanism; Cellular component=integral to membrane; Biological process=phospholipid transport
  Homolog annotation: Hit_ID=Q10LU3; Match level="QueryCoverage=100%, HitCoverage=15%, E-value=1e-111, Identity=93%"; Hit description =Phospholipid-translocating P-type ATPase, flippase family protein, expressed
DGYEDWRRHRSDRNENNREALVLQHGDFRLKKWKNICAGEVVKIHANETMPCDMVLLGTSDPNGIAYIQTMNLDGESNLKTRYARQETTSMICDASYSGLIKCEQPNRNIYEFTATMELNSQRVPLGQSNIVLRGCQLKNXEWIIGVVVYAGQETKAMLNSTISPSKSSNLESYMNRETLWLSAXFLLIICSVVATGMGVXLFKNS

SEQ ID NO: 112239 - protein, 220 aa, Setaria italica
  Transcript Sequence Number=SeqID_46265
  Gene Ontology: Mol. function=GTP binding; Cellular component=plastid outer membrane; Biological process=protein transport
  Homolog annotation: Hit_ID=B9T0W6; Match level="QueryCoverage=92%, HitCoverage=19%, E-value=4e-65, Identity=55%"; Hit description =Protein translocase, putative
  Pfam annotation: Domain name=AIG1; Domain location=7-179; Score= -46.0; E_value=1.2e-06; Accession=PF04548.8; Description=AIG1 family
  Pfam annotation: Domain name=MMR_HSR1; Domain location=9-111; Score= -12.2; E_value=0.013; Accession=PF01926.15; Description=GTPase of unknown function
  Pfam module annotation: Pfam domain module=AIG1::MMR_HSR1; Domain location=7-179::9-111
GWGKEVQRINSIFGEDKSKTNAFLPATSSVKEITGVVDGVKFRVIDTPGLGTSAKDEKSNRRVLNSVKRYMKRCPPDIILYVDRIDTQRQEANSLSLLRAITSVLGLSIWSRTIITLTHSGAAPPEGPSGSAMNYDMVVTHRTHAIQQSIRQVTNDPRIENPVALVENHHLCQRNTEGEKVLPDGLTWRRLLLLLCYSKKIIAEIESLSNRRGSSASSLG

SEQ ID NO: 112240 - protein, 126 aa, Setaria italica
  Transcript Sequence Number=SeqID_46266
  Homolog annotation: Hit_ID=Q5JN76; Match level="QueryCoverage=38%, HitCoverage=34%, E-value=2e-17, Identity=83%"; Hit description =Allergen-like protein
DDGRLGAVACAFVVAAALVVVSLCFVGAALVSDPRRKTEEAAAVGAHPGAQAVTEWMQVQEPAVRYGGRRLLSGGPGSHPPRCTSKCGSCSPCYPVHVSVPPGVLVTTEYYPEAWRCKCRNQLYMP

SEQ ID NO: 112241 - protein, 232 aa, Setaria italica
  Transcript Sequence Number=SeqID_46267
  Gene Ontology: Mol. function=calcium ion binding; Cellular component =plasma membrane
  Homolog annotation: Hit_ID=B9R838; Match level="QueryCoverage=94%, HitCoverage=26%, E-value=5e-72, Identity=58%"; Hit description =Tetratricopeptide repeat protein, tpr, putative
  Pfam annotation: Domain name=TPR_1; Domain location=117-150; Score =12.3; E_value=0.19; Accession=PF00515.20; Description=Tetratricopepti de repeat
  Pfam annotation: Domain name=TPR_1; Domain location=151-184; Score =9.5; E_value=0.42; Accession=PF00515.20; Description=Tetratricopeptid e repeat
  Pfam annotation: Domain name=TPR_1; Domain location=193-226; Score =8.0; E_value=0.65; Accession=PF00515.20; Description=Tetratricopeptid e repeat
  Pfam annotation: Domain name=TPR_2; Domain location=117-150; Score =18.9; E_value=0.022; Accession=PF07719.9; Description=Tetratricopepti de repeat
  Pfam annotation: Domain name=TPR_2; Domain location=151-184; Score =20.1; E_value=0.0093; Accession=PF07719.9; Description =Tetratricopeptide repeat
  Pfam annotation: Domain name=TPR_2; Domain location=193-226; Score =20.9; E_value=0.0054; Accession=PF07719.9; Description =Tetratricopeptide repeat
  Pfam module annotation: Pfam domain module=TPR_1::TPR_1::TPR_1::TPR _2::TPR_2::TPR_2; Domain location=117-150::151-184::193-226::117 -150::151-184::193-226
SRAAAAAAPAWATSPNHGIAFDSSWGLLDDLEILVKRLRSKQQRKGSIDGSVGGGAGNSNFDSFSEAGWSREISGAVDSASSAAPWDETSRDYLTFVKELAVLRTRADASRSREEAFDNHMVIGRALSEHRLFRDALASFRRACELQPTDVRPHFRAGNCLYALGRHAEAKEEYLLALEAAEAGGSQSADILPQIHVNLGIAMEAEGMVLGACEHYREAAILCPSHARALKL

SEQ ID NO: 112242 - protein, 81 aa, Setaria italica
  Transcript Sequence Number=SeqID_46268
  Gene Ontology: Mol. function=methyltransferase activity; Cellular component=nucleus
  Homolog annotation: Hit_ID=Q6L446; Match level="QueryCoverage=91%, HitCoverage=9%, E-value=2e-27, Identity=72%"; Hit description =Putative methyltransferase family protein
FNSTKIGRCDVEDILLEMDRILRPEGAVILRDSVDVLNKVRSTVGGMRWKSKLLDHEDGPHVPEKILISVKEYWVGGEENS

SEQ ID NO: 112243 - protein, 76 aa, Setaria italica
  Transcript Sequence Number=SeqID_46269
  Gene Ontology: Mol. function=catalytic activity; Cellular component =peroxisome; Biological process=metabolic process
  Homolog annotation: Hit_ID=B6TNE1; Match level="QueryCoverage=86%, HitCoverage=11%, E-value=3e-22, Identity=80%"; Hit description=4 -coumarate--CoA ligase 2
EAGEVPASSVVRRRTAAESEADVMAYVAARVASYKKLRLLRFVDAIPKSVSGKILRRQLRDEFLERAKAAAAAEGK

SEQ ID NO: 112244 - protein, 107 aa, Setaria italica
  Transcript Sequence Number=SeqID_46270
  Gene Ontology: Mol. function=nucleotide binding; Cellular component =nucleus; Biological process=regulation of transcription, DNA -dependent
  Homolog annotation: Hit_ID=Q852D5; Match level="QueryCoverage=58%, HitCoverage=4%, E-value=2e-10, Identity=50%"; Hit description =Powdery mildew resistance protein PM3b, putative, expressed
QPFGGAEIATICHYIKKKIPFWYNARTQPTSRSAFPALRKMTLHELNVFERWEAGEGISGEEVTFPQLEELLIWSCRSLSALPKGPLWLSNHLAELKLCAAALHFQH

SEQ ID NO: 112245 - protein, 349 aa, Setaria italica
  misc_feature (174)..(174): Xaa can be any naturally occurring amino acid
  Transcript Sequence Number=SeqID_46271
  Gene Ontology: Mol. function=nucleotide binding; Cellular component =nucleus; Biological process=regulation of transcription, DNA -dependent
  Homolog annotation: Hit_ID=Q852D5; Match level="QueryCoverage=100%, HitCoverage=26%, E-value=4e-79, Identity=50%"; Hit description =Powdery mildew resistance protein PM3b, putative, expressed
LPALWELPALQILHLEGLESLHCLCSGGATPVTFPNLKVLTLFRMAEFEAWCETHEVQGDEPIFPKVEELVIEECESLTALPKAASVITELSGRVDNKCRSAFPALRKLTLGELTVFERWEAAEGPPGEGVTFPLLEDLKIDDCPKLTDLPETPKLSELSIIRKVGGLGQQQQXSLEAASRCIPSLSRLNLEVSPDETETTLLHVKNKLNGTLALRAMRLDRCDLFFSSRSSALALWTCFAQLVDLEIWNCDALVYWPENVFQVLVCLRNLLIFGCSKLTGRTQASDEQSAPAPERGGLLPCLKSLQIIDCRSLVEVPNLPTSLKTLFFWVGNRNVGSIVFGHQEDTRL

SEQ ID NO: 112246 - protein, 66 aa, Setaria italica
  Transcript Sequence Number=SeqID_46272
NCGVSTLRVRLVACFYLGQAPRMQNLFDWLPAPLLSPASLDAKCHRSARLLGNEDGGRFPRARVAV

SEQ ID NO: 112247 - protein, 76 aa, Setaria italica
  Transcript Sequence Number=SeqID_46273
  Gene Ontology: Mol. function=ATP binding; Biological process=apoptosis
  Homolog annotation: Hit_ID=Q8H5J9; Match level="QueryCoverage=97%, HitCoverage=13%, E-value=5e-15, Identity=51%"; Hit description =Fusarium resistance protein I2C-5-like
ALLLIIELPKDIDEDTWKNIYSTYVGGIASGSKVIITCQSRKIIEFGTTQALVLNHLTRMPFWYFFKVLTFGSTDP

SEQ ID NO: 112248 - protein, 478 aa, Setaria italica
  Transcript Sequence Number=SeqID_46274
  Gene Ontology: Mol. function=histone-lysine N-methyltransferase activity; Cellular component=nucleus; Biological process=chromatin modification
  Homolog annotation: Hit_ID=Q8LPU2; Match level="QueryCoverage=99%, HitCoverage=69%, E-value=0.0, Identity=89%"; Hit description=SET domain protein 105
  Pfam annotation: Domain name=Pre-SET; Domain location=198-298; Score =142.4; E_value=1.5e-39; Accession=PF05033.8; Description=Pre-SET motif
  Pfam annotation: Domain name=SET; Domain location=300-456; Score =164.1; E_value=4.1e-46; Accession=PF00856.20; Description=SET domain
  Pfam annotation: Domain name=YDG_SRA; Domain location=16-171; Score =329.4; E_value=7.1e-96; Accession=PF02182.9; Description=YDGSRA domain
  Pfam module annotation: Pfam domain module=Pre-SET::SET::YDG_SRA; Domain location=198-298::300-456::16-171
GLAPIMMASNIRANSGKRVGTVPGVEIGDIFYFRMELCIIGLHAPSMGGIDYMTTKFGNDEDSVAICIVSAGGYENEDDDTDVLVYSGQGGNSRNTEERHDQKLERGNLALERSLHRKNEIRVVRGFKDPFCITGKIYVYDGLYKIHESWKERTKSGINCFKYKLLREPGQRDGAAIWKVTQKWITNPTTRGNVLLADLSSKAEMLPVCLVNEVDHEKGPGHFTYTNQVKYLRPLSSMKKLQGCGCQSVCLPGDSSCACGQSNGGDLPYSSSGLLACRKPIIYECGDSCNCSTNCRNRVTQKGARLHFEVFRTTNRGWGLRCWDPIRAGAFICEYAGEVIDELKVNLNDSEDDYIFQTVCPGDKTLKWNCGPELIGEESTYVTADEFEPMPIKISAKNMGNVSRFMNHSCSPNVFWQPVQYDHGDDRHPHIMFFALKHIPPMTELTYDYGVAGAESSGSGSRRTRNCMCGSRNCRGLF

SEQ ID NO: 112249 - protein, 79 aa, Setaria italica
  misc_feature (1)..(1): Xaa can be any naturally occurring amino acid
  Transcript Sequence Number=SeqID_46275
XFLTNYTKEYLAFVAIAICERFFPYFYDLSIPKKKIVTTPREHRNKYPNYLQAVQDTSMTTCPCKDLLRRKQNVEFSHR

SEQ ID NO: 112250 - protein, 115 aa, Setaria italica
  Transcript Sequence Number=SeqID_46276
  Gene Ontology: Mol. function=peptidase activity
  Homolog annotation: Hit_ID=Q654G4; Match level="QueryCoverage=100%, HitCoverage=20%, E-value=1e-45, Identity=76%"; Hit description =Putative potyviral helper component protease-interacting protein 2
RVNGLEMVLDEISRDLAASSGRIPNSEPDTNACCILSPKFWRRHDGGRYTSRYSVSDAPNYSEESKTSYKWERQKFGAQGGFVTNPLAEPNTSSVRSTGITQEGRRRDSAQYRSR

SEQ ID NO: 112251 - protein, 216 aa, Setaria italica
  Transcript Sequence Number=SeqID_46277
  Gene Ontology: Mol. function=peptidase activity; Cellular component =microtubule
  Homolog annotation: Hit_ID=Q654G4; Match level="QueryCoverage=99%, HitCoverage=38%, E-value=2e-88, Identity=73%"; Hit description =Putative potyviral helper component protease-interacting protein 2
GGKVTSVRAVLQKTGEKGYKKLVGPKSGSRVVPYNGDGDLEETALTEDAPDELQSAHKDEDLSKIRMQLVQIENQQASLLNLLQKFMGSSQNGIRSLETRVNGLEMVLDEISRDLAASSGRIPNSEPDTNACCILSPKFWRRHDGGRYTSRYSVSDAPNYSEESKTSYKWERQKFGAQGGFVTNPLAEPNTSSVRSTGITQEGRRRDSAQYRSRLG

SEQ ID NO: 112252 - protein, 106 aa, Setaria italica
  Transcript Sequence Number=SeqID_46278
  Homolog annotation: Hit_ID=B4F879; Match level="QueryCoverage=61%, HitCoverage=17%, E-value=1e-31, Identity=98%"; Hit description =Integral membrane protein
LWLLFLLDAWALIVWRCSLVFSSFDKLVSVLIHLLPGIVLFTIRWWNPQTFAAMHPEGRAARVTWPYVEDKSYLWTWLFLFLSPNSPLSLHQMLFAFCAFFESSLY

SEQ ID NO: 112253 - protein, 107 aa, Setaria italica
  Transcript Sequence Number=SeqID_46279
GVGRLIHLAFLEPTSLNCVHASSCFAWSLRSFPKYKSFICKVAHCICKASSGNRRFLHTANMHGFFQKHHHNPAFNILLQSPPLLVLLLGCVLVVVTRRIITPIVCW

SEQ ID NO: 112254 - protein, 374 aa, Setaria italica
  Transcript Sequence Number=SeqID_46280
  Gene Ontology: Cellular component=endoplasmic reticulum membrane
  Homolog annotation: Hit_ID=B4F879; Match level="QueryCoverage=100%, HitCoverage=99%, E-value=0.0, Identity=88%"; Hit description =Integral membrane protein
MASEVEDEAAAAGSPLVANGTADVRRRRDQAKEMLSKQAVKIATKAEEHERFIFKVTHLLGVLGFGGFCYLLGARPQDVPYVYCLFYVIFVPLRWIYYRYKKWHYYLLDFCYYANTFLVVMILFYPKDEKLFMVCFSFAEGPLAWALIVWRCSLVFSSFDKLVSVLIHLLPGIVLFTIRWWNPQTFAAMHPEGRAARVTWPYVEDKSYLWTWLFFVPLAAYTLWQLMYFLIVNVLRRQRLLRDPEVMTSYRELSKKAQKANNIWWRLSGLLGDRNRQVMYILLQALFTVATMALTVPIFLSYRMHIVFQILKVCASTWNGGSFILEVMPRQVVQKQQKKKLNMKPIKQVNSTQHVESDDTSGNHHEHTTEEQNQ

SEQ ID NO: 112255 - protein, 118 aa, Setaria italica
  Transcript Sequence Number=SeqID_46281
  Gene Ontology: Mol. function=transferase activity, transferring glycosyl groups; Biological process=metabolic process
  Homolog annotation: Hit_ID=B6SSB3; Match level="QueryCoverage=98%, HitCoverage=23%, E-value=7e-41, Identity=69%"; Hit description =Anthocyanidin 5,3-O-glucosyltransferase
VGLLRGPPAGSSSMYPTDADLDELLPDGFLTRTQGRGLVWSAWAPQKEVLAHPAVGGFVTHCGWNSTLESLWFGVPMVPWPLYAEQHLNAFELVRVMGVAVQLKNMEVSEVEPFVEAA

SEQ ID NO: 112256 - protein, 275 aa, Setaria italica
  misc_feature (187)..(187): Xaa can be any naturally occurring amino acid
  Transcript Sequence Number=SeqID_46282
  Gene Ontology: Mol. function=transferase activity, transferring glycosyl groups; Biological process=metabolic process
  Homolog annotation: Hit_ID=B6T3B8; Match level="QueryCoverage=97%, HitCoverage=56%, E-value=9e-98, Identity=72%"; Hit description =Anthocyanidin 3-O-glucosyltransferase
AETDGIIVNTAAELEQSALAAIANGRCTRGARAPKVYPIGPVISFAPAPEQPHECVRWLDAQSPASVVLLCFGSGGFFAAPQAREIAHGLERSGHRFLWVLRGPPAPGGGRHPTDANLAELLPDGFLDRTKDRGLVWPTWAPQKEILAHAAVGGFVTHGGWNSILESLWHGVPMAPWPLYAEQPLNXFELVACYGSSPSSLVSARKRDNFVEAVELERAVKELMGGGEEGRKAREKAMEMKVACRNAVEEGGSSYAALQSLSEALYKGAVVVGTN

SEQ ID NO: 112257 - protein, 468 aa, Setaria italica
  Transcript Sequence Number=SeqID_46283
  Gene Ontology: Mol. function=transferase activity, transferring glycosyl groups; Biological process=metabolic process
  Homolog annotation: Hit_ID=B6T3B8; Match level="QueryCoverage=93%, HitCoverage=90%, E-value=1e-141, Identity=58%"; Hit description =Anthocyanidin 3-O-glucosyltransferase
  Pfam annotation: Domain name=UDPGT; Domain location=8-463; Score= -32.7; E_value=1.3e-09; Accession=PF00201.10; Description=UDP -glucoronosyl and UDP-glucosyl transferase
MSMLESCKRVLLSGGGGGKAFSITLLVVRPPTDEATSEVEAHVRREAASGLDIRFHRLPAVDPPAGDLGVEEFSALYLSLHAPHVRDAIAGMECPVAALVLDLFAATLVDVARDLGVPSYVFMSSTGAMLALMLHLPVLHERFTVEFDEVEGEIEVPGLPPVPPANMPCPVVDKKSPNYTWFVRLGDSFMDATGIIANTADALEPGPLAAIAEGRCVPGRPPPPVYPVGPVLSLGDRSPSHECVKWLDAQPPASVVFLCFGSMGWFDPPQVVEITAALERSGQRFLWVLRGPPSSETGAGSPDGSEHPTDANLDEILPEGFLERTKGRGMVWPKWAPQKDILAHPAVGGFVTHGGWNSVLESLWHGVPMAPWPLYAEQHLNAFELVADMGVAVPLKVDRKRDNFVDAAELEGTVKELMGGGEVGRKAREKAKQMMAVCREAAAEGGSSHAALQRLAQALHDGAAMPKK

SEQ ID NO: 112258 - protein, 174 aa, Setaria italica
  Transcript Sequence Number=SeqID_46284
  Gene Ontology: Mol. function=catalytic activity; Cellular component =chloroplast; Biological process=metabolic process
  Homolog annotation: Hit_ID=Q69LA9; Match level="QueryCoverage=100%, HitCoverage=33%, E-value=2e-78, Identity=81%"; Hit description =Putative fatty acyl coA reductase
  Pfam annotation: Domain name=NAD_binding_4; Domain location=1-174; Score=47.0; E_value=1.6e-12; Accession=PF07993.4; Description=Male sterility protein
LAGDVVYKNLGLDNAKLTELSKEIDIIVNGAATTNFYERYDVAFDTNVMGAKHICKFAKRCNKLKMLLHVSTAYVAGEQEGILPEKPFLVGETLREGGDLDIESELNLIKEIRIDMETNCSPEKVEKRTMKELGLKRAREFGWPNTYVFTKAMGEMILGHLRGDLPVVIIRPSI

SEQ ID NO: 112259 - protein, 132 aa, Setaria italica
  Transcript Sequence Number=SeqID_46285
  Gene Ontology: Mol. function=metal ion binding; Biological process =metal ion transport
  Homolog annotation: Hit_ID=B9RCH3; Match level="QueryCoverage=52%, HitCoverage=53%, E-value=2e-16, Identity=62%"; Hit description=Metal ion binding protein, putative
  Pfam annotation: Domain name=HMA; Domain location=5-74; Score=23.9; E_ value=0.00067; Accession=PF00403.18; Description=Heavy-metal -associated domain
MSKKIVVRLELHDNKDKQKAIKAVSVLVGIDAISVDMAARKMTVIGTVDPVDVVSKLRKSWAAHIDSIGPAKEPEKKEEKKEEKKEGEGKKEEGDGKKEGDGKKEGDGKKEEGGDGKKDGDGKKEDGGEGKK

SEQ ID NO: 112260 - protein, 163 aa, Setaria italica
  Transcript Sequence Number=SeqID_46286
  Gene Ontology: Mol. function=catalytic activity; Cellular component =peroxisome; Biological process=metabolic process
  Homolog annotation: Hit_ID=Q0DV32; Match level="QueryCoverage=100%, HitCoverage=29%, E-value=1e-70, Identity=75%"; Hit description=4 -coumarate--CoA ligase-like 1
FLCFLPMFHLFGLSVVTLGQLQRGNAVVVMPRFAVDDAMAAVQRHRVTYLCCVPPVMIALAKHGRTGSYDLSSLKFILSGAAPLGKDLMEAVAKDFPDAEIVQGYGMTETCGIITLENPERVKVRQLGSTGTLVIQVEAKIVDVETLKHLPPNQLGEICARGP

SEQ ID NO: 112261 - protein, 72 aa, Setaria italica
  Transcript Sequence Number=SeqID_46287
WTLPHWCNTVLVTTLLLSSFLSFYYFRGCEALGLFLGYLENCLEITITLIRFCNVEVDDGAGDSVNTDRWFL

SEQ ID NO: 112262 - protein, 270 aa, Setaria italica
  Transcript Sequence Number=SeqID_46288
  Gene Ontology: Mol. function=protein binding; Biological process =ubiquitin-dependent protein catabolic process
  Homolog annotation: Hit_ID=B9S0Z8; Match level="QueryCoverage=100%, HitCoverage=57%, E-value=3e-90, Identity=60%"; Hit description =Protein AFR, putative
  Pfam annotation: Domain name=Kelch_1; Domain location=106-152; Score =6.7; E_value=0.53; Accession=PF01344.17; Description=Kelch motif
  Pfam annotation: Domain name=Kelch_1; Domain location=58-104; Score =52.3; E_value=1.9e-12; Accession=PF01344.17; Description=Kelch motif
  Pfam annotation: Domain name=Kelch_1; Domain location=9-56; Score =28.5; E_value=2.8e-05; Accession=PF01344.17; Description=Kelch motif
  Pfam annotation: Domain name=Kelch_2; Domain location=106-152; Score =2.1; E_value=23; Accession=PF07646.7; Description=Kelch motif
  Pfam annotation: Domain name=Kelch_2; Domain location=155-195; Score =15.7; E_value=0.19; Accession=PF07646.7; Description=Kelch motif
  Pfam annotation: Domain name=Kelch_2; Domain location=58-104; Score =19.8; E_value=0.011; Accession=PF07646.7; Description=Kelch motif
  Pfam annotation: Domain name=Kelch_2; Domain location=9-56; Score =16.1; E_value=0.14; Accession=PF07646.7; Description=Kelch motif
  Pfam module annotation: Pfam domain module=Kelch_1::Kelch_1::Kelch _1::Kelch_2::Kelch_2::Kelch_2::Kelch_2; Domain location=106-152::58 -104::9-56::106-152::155-195::58-104::9-56
PCRDRACPRGFGCVAVPGDGALLVCGGLVSDMDCPLHLVLRYDVYRNRWTVVTRMLAARSFFAGGVIDGRVYVAGGYSTNQFELNSAEVLDPDKGVWQPIASMGINMASSDSAVISGRLYVTEGCAWPFFSSPRGQIYDPKINQWEAMPVGMREGWTGQSVVIDGRLFVISEYERMKVKIYDPETDSWDSVSGPPMPERIMKPFSVSCLDSRIVVVGRGLHVAIGHVDKQPAGGGNSGNRSSSYSVCWQDVDVPKEFSDLTPSSSQILHA

SEQ ID NO: 112263 - protein, 78 aa, Setaria italica
  Transcript Sequence Number=SeqID_46289
ADEVKPIPTSMQGETSASSAKGFAFDLNFPPPLDDGACPDALIRAGRIFADEEFALVEINPTLLLLYIKKGWPVWRSC

SEQ ID NO: 112264 - protein, 149 aa, Setaria italica
  misc_feature (60)..(60): Xaa can be any naturally occurring amino acid
  Transcript Sequence Number=SeqID_46290
  Gene Ontology: Mol. function=serine-type carboxypeptidase activity; Cellular component=extracellular region; Biological process =proteolysis
  Homolog annotation: Hit_ID=B9SCM6; Match level="QueryCoverage=100%, HitCoverage=35%, E-value=2e-32, Identity=46%"; Hit description =Retinoid-inducible serine carboxypeptidase, putative
  Pfam annotation: Domain name=Peptidase_S10; Domain location=3-148; Score=-209.6; E_value=0.0066; Accession=PF00450.14; Description =Serine carboxypeptidase
RSPQRVSTPARPWPTVLWLQGGPGGSGVGHGNFLEIGPLDVNLQPRQWTWLKVADLIFVXDAPVGVGYSYTENPSALVRTDSQAVKDLAVIVESLLNDELPALEHSPMYIVGESYGGKHAAMLGVSLSRAIRAGTLKLTLGGVLLGDYW

SEQ ID NO: 112265 - protein, 85 aa, Setaria italica
  Transcript Sequence Number=SeqID_46291
TTKYCSSIFLFLYSVPLCPNLLGTERLCCCCILHHCVVACFSYPFHLLPDWKCKVNFWTMPCLRNCQRLIFEKLGFACHRYHITV

SEQ ID NO: 112266 - protein, 123 aa, Setaria italica
  Transcript Sequence Number=SeqID_46292
  Gene Ontology: Mol. function=oxidoreductase activity, acting on the CH-CH group of donors; Cellular component=peroxisome; Biological process=fatty acid metabolic process
  Homolog annotation: Hit_ID=B6U7U8; Match level="QueryCoverage=69%, HitCoverage=12%, E-value=8e-23, Identity=69%"; Hit description=Acyl -coenzyme A oxidase 2
  Subcellular localization annotation: CTP_CleavageSite=11; ConfidenceScore=5.07e-01
MDPALSPAGRRAATIARHLAGALPSPPPLAATVALLGPSPCLSYALPESTEPAPAFPPAELRALLDGHHLWERDWVFRVMEESQLFCPRQRCSGSRVFVAPDYNDGKEAQREATMRRVAHLAR

SEQ ID NO: 112267 - protein, 53 aa, Setaria italica
  Transcript Sequence Number=SeqID_46293
KRTALATSYLVDLSIVMQNSIWSYCFLIWLVAERVEKTDGPLCVSFGQWWVLQ

SEQ ID NO: 112268 - protein, 63 aa, Setaria italica
  Transcript Sequence Number=SeqID_46294
  Gene Ontology: Mol. function=oxidoreductase activity; Biological process=oxidation reduction
  Homolog annotation: Hit_ID=B6SUG7; Match level="QueryCoverage=80%, HitCoverage=12%, E-value=5e-15, Identity=76%"; Hit description =Mannitol dehydrogenase
TMDGIINTVSANIPMAPYMSMLKPYGKMIMVGLPDKPLEIPPFDLMTGKSSPNDLRSCFDPWN

SEQ ID NO: 112269 - protein, 89 aa, Setaria italica
  Transcript Sequence Number=SeqID_46295
  Gene Ontology: Mol. function=oxidoreductase activity; Biological process=oxidation reduction
  Homolog annotation: Hit_ID=Q8S411; Match level="QueryCoverage=53%, HitCoverage=12%, E-value=7e-19, Identity=83%"; Hit description =Cinnamyl alcohol dehydrogenase
  Pfam annotation: Domain name=ADH_N; Domain location=34-88; Score= -20.3; E_value=0.088; Accession=PF08240.4; Description=Alcohol dehydrogenase GroES-like doma
LAQCLVALFVTTFPVVPLFEHIIKFQLLKILNYLFLVHDESHEIAGVVTEVGKNVTKFKAGDRVGVGCIVNSCQSCDSCNEGFENHWPG

SEQ ID NO: 112270 - protein, 353 aa, Setaria italica
  misc_feature (321)..(321): Xaa can be any naturally occurring amino acid
  Transcript Sequence Number=SeqID_46296
  Gene Ontology: Mol. function=oxidoreductase activity; Cellular component=cytoplasm; Biological process=oxidation reduction
  Homolog annotation: Hit_ID=B6SUG7; Match level="QueryCoverage=89%, HitCoverage=75%, E-value=1e-138, Identity=76%"; Hit description =Mannitol dehydrogenase
  Pfam annotation: Domain name=2-Hacid_dh_C; Domain location=167-332; Score=-87.8; E_value=0.0051; Accession=PF02826.11; Description=D -isomer specific 2-hydroxyacid dehydr
  Pfam annotation: Domain name=ADH_N; Domain location=65-180; Score =134.8; E_value=2.7e-37; Accession=PF08240.4; Description=Alcohol dehydrogenase GroES-like doma
  Pfam annotation: Domain name=ADH_zinc_N; Domain location=211-346; Score=127.3; E_value=4.9e-35; Accession=PF00107.18; Description=Zinc- binding dehydrogenase
  Pfam module annotation: Pfam domain module=2-Hacid_dh_C::ADH_N::ADH _zinc_N; Domain location=167-332::65-180::211-346
STSISRHLRVQILKGKAFRWLPRWRRRAAATAAKPQHTGKAAALAAHDASGHLAPLTITRRSTGDDDVAIKILYCGICHSDLHSIKNEWHNAMYPVVPGHEIAGVVTEVGKNVTKFKAGDRVGVGCIVNSCQSCDSCNEGFENHCRGMIFTYNSVDLDGTVTYGGYSSNVVVHERFVVRFPDAMPLDQGAPLLCAGITVYSPMKHHGLNVPGKHVGVVGLGGLGHVAVKFAKAFGMKVTVISSSPAKKQEALERHGADAFIVSRNDDEMKAAAGTMDGIINTVSANIPMAPYMSMLKPYGKMIMVGLPDKPLEIPPFDLMXGSKTLAGSCIGGMRDTQEMIDVAAKHGVNGGQ

SEQ ID NO: 112271 - protein, 435 aa, Setaria italica
  misc_feature (113)..(113): Xaa can be any naturally occurring amino acid
  Transcript Sequence Number=SeqID_46297
  Gene Ontology: Mol. function=protein tyrosine kinase activity; Cellular component=integral to membrane; Biological process=protein amino acid phosphorylation
  Homolog annotation: Hit_ID=B9SB23; Match level="QueryCoverage=93%, HitCoverage=38%, E-value=1e-156, Identity=68%"; Hit description =Protein binding protein, putative
  Pfam annotation: Domain name=Pkinase; Domain location=153-432; Score=- 3.7; E_value=2.9e-08; Accession=PF00069.17; Description=Protein kinase domain
  Pfam annotation: Domain name=Pkinase_Tyr; Domain location=151-432; Score=-15.2; E_value=1e-12; Accession=PF07714.9; Description=Protein tyrosine kinase
  Pfam module annotation: Pfam domain module=Pkinase::Pkinase_Tyr; Domain location=153-432::151-432
KSLSTGAKIGIVAASIVILVILILIAIVCHYKRISRQFPSSEKVSDKNLHRATKDSASTKGKDNKGGLVSADELVTPRKGSTSEAHSQEEKSAVGGLFTIPRASRYSWSPDSXGEAYGQEGLARLDVRSPDRLAGELHFLDETITLTPEELSRAPAEVLGRSSHGTSYRATLENGVFLTVKWLREGVARPKKEFAKEAKKFANIRHPNVVGLRGYYWGPTPHEKLILSDYVAPGSLASFLYDRPSRRGPPLTWAQRLKIAVDVARGLNYLHFDRAMPHGNLKATNILLDGLDLNARVADYCLHRLMTQAGVVEQILDLGVLGYRAPELAASKKPSPSFKSDVYAFGVVLLELLTGRCAGDVVSGSEGGVDLTDWVRLRVAEGRGSDCFDPAMASDSENQQAVKGMKEALGIALRCIRPVSERPGIKSVYEDLSSI

SEQ ID NO: 112272 - protein, 55 aa, Setaria italica
  Transcript Sequence Number=SeqID_46298
IRVLLSSRWNPPVAGFLFPSTVTPPDPGHRHCKLYLSDCNLVFGKHNTTEYRLMY

SEQ ID NO: 112273 - protein, 90 aa, Setaria italica
  Transcript Sequence Number=SeqID_46299
  Subcellular localization annotation: CTP_CleavageSite=44; ConfidenceScore=5.18e-01
KILSQNKVLGAMLKNFPSKNISAHSRMLKANLPIFQIGPRHHIRSILKSVFLLSSVGTLLSPAFYFPAPSRRRTPGHRHCKLSGSEFLTL

SEQ ID NO: 112274 - protein, 219 aa, Setaria italica
  Transcript Sequence Number=SeqID_46300
  Gene Ontology: Mol. function=N-acetyltransferase activity; Biological process=metabolic process
  Homolog annotation: Hit_ID=B6TUM7; Match level="QueryCoverage=98%, HitCoverage=73%, E-value=9e-92, Identity=83%"; Hit description =Histone acetyltransferase HPA2 and related acetyltransferases
  Pfam annotation: Domain name=Acetyltransf_1; Domain location=103-188; Score=61.2; E_value=3.9e-15; Accession=PF00583.16; Description =Acetyltransferase (GNAT) family
MRGSAAAGVAREEEDDDEYLAREAGWGVRQMGRVGEEMRRVAQVQAKAFHVPVALFNDFFFDFFKAEVLSALIYRVRNSPPDRYACLVAEEAEPTTQLSQAPYEKIVGVVDCTVQDEDDILKHLQGADEYLYVSGIAVLPSFRRRKVGTALLKACEALGFQWRHRFMVLRAYEDDDGARGLYAKAGYRVVSRDPDWVTWVGRRRRVLMIKELPLHDNQI

SEQ ID NO: 112275 - protein, 210 aa, Setaria italica
  misc_feature (12)..(12): Xaa can be any naturally occurring amino acid
  Transcript Sequence Number=SeqID_46301
  Gene Ontology: Mol. function=protein serine/threonine kinase activity; Biological process=protein amino acid phosphorylation
  Homolog annotation: Hit_ID=B6SP13; Match level="QueryCoverage=99%, HitCoverage=30%, E-value=1e-111, Identity=92%"; Hit description =Receptor-like serine-threonine protein kinase
  Pfam annotation: Domain name=Pkinase; Domain location=1-196; Score =62.1; E_value=2e-15; Accession=PF00069.17; Description=Protein kinase domain
  Pfam annotation: Domain name=Pkinase_Tyr; Domain location=3-208; Score=-19.8; E_value=2.1e-12; Accession=PF07714.9; Description =Protein tyrosine kinase
  Pfam module annotation: Pfam domain module=Pkinase::Pkinase_Tyr; Domain location=1-196::3-208
EKIELVLVAKLXQHKNLVRLVGVCLEDHERLLVYEYMPNKSLDTILFDSERCGELDWGKRFKIVNGIARGLQYLHEDSQVKIIHRDLKASNVLLDYDFNPKISDFGLARLFENDQTQDVTNRVVGTYGYMAPEYAMRGHYSIKSDVFSFGVLILEIVTGRRNGGSYSTDESADLLSLVWEHWTTGTLVEIMDSSLSSLAPRDQMLKCIHI

SEQ ID NO: 112276 - protein, 96 aa, Setaria italica
  Transcript Sequence Number=SeqID_46302
  Homolog annotation: Hit_ID=Q10EN9; Match level="QueryCoverage=91%, HitCoverage=25%, E-value=1e-41, Identity=93%"; Hit description =Lysine Decarboxylase, putative
  Pfam annotation: Domain name=Lysine_decarbox; Domain location=1-96; Score=100.6; E_value=5.2e-27; Accession=PF03641.6; Description =Lysine decarboxylase family
YLKRCQGDIGEVQVVRDMHERKSEMAKHADAFIALPGGYGTIEELLEIIAWAQLGIHNKPVGLLNVDGFYNSLLSLFDKGVEEGFIDAKARNIFVL

SEQ ID NO: 112277 - protein, 165 aa, Setaria italica
  Transcript Sequence Number=SeqID_46303
  Homolog annotation: Hit_ID=B6T9H8; Match level="QueryCoverage=94%, HitCoverage=63%, E-value=8e-64, Identity=79%"; Hit description =Carboxy-lyase
  Pfam annotation: Domain name=Lysine_decarbox; Domain location=70-163; Score=100.4; E_value=6.3e-27; Accession=PF03641.6; Description=Lysine decarboxylase family
MEENQEKFADTESGGGRGGGRWPAVRAICVFCGSRPGNRPSFSAAALDLGKQLVERQINLVYGGGSGGLMGLVSKAVYDGGRHVLGVIPSALLPEEVSGETLGEVKVVRDMHERKSEMAKHADAFIALPGGYGTIEELLEIIAWAQLGIHNKPVTLSYLTAVCIL

SEQ ID NO: 112278 - protein, 81 aa, Setaria italica
  Transcript Sequence Number=SeqID_46304
CLQTTIRCLTTDGRFMTHLGSHDVAEKPYTRTSHSIIFIQGTSSIQMKNTTIDNNNTVVPNLSLHKYNNQRKCGFQQLFAI

SEQ ID NO: 112279 - protein, 129 aa, Setaria italica
  Transcript Sequence Number=SeqID_46305
  Gene Ontology: Mol. function=metal ion binding
  Homolog annotation: Hit_ID=B1PVT0; Match level="QueryCoverage=70%, HitCoverage=78%, E-value=2e-28, Identity=56%"; Hit description=LIM domain protein 2b
  Pfam annotation: Domain name=LIM; Domain location=29-85; Score=53.2; E_value=1e-12; Accession=PF00412.14; Description=LIM domain
LPTGPKANNEQSKVPNKLSSLFCGTQDKCAACNKTVYPLEKITLEGEPYHKTCFKCARGGCLLTTARYASHNGILYCQIHFWQVFKETGSYSNLLKPAPAKNAAGEPEAAKAEAAKEEASPEQVPEAPE

SEQ ID NO: 112280 - protein, 393 aa, Setaria italica
  Transcript Sequence Number=SeqID_46306
  Gene Ontology: Mol. function=molecular_function; Cellular component =cellular_component; Biological process=biological_process
  Homolog annotation: Hit_ID=B9RDD1; Match level="QueryCoverage=100%, HitCoverage=89%, E-value=1e-144, Identity=64%"; Hit description =Nucleotide binding protein, putative
  Pfam annotation: Domain name=WD40; Domain location=132-188; Score =2.0; E_value=23; Accession=PF00400.24; Description=WD domain, G-beta repeat
  Pfam annotation: Domain name=WD40; Domain location=192-230; Score =8.8; E_value=3.6; Accession=PF00400.24; Description=WD domain, G -beta repeat
  Pfam annotation: Domain name=WD40; Domain location=242-280; Score =46.7; E_value=8.8e-11; Accession=PF00400.24; Description=WD domain, G-beta repeat
  Pfam annotation: Domain name=WD40; Domain location=34-72; Score=33.2; E_value=1e-06; Accession=PF00400.24; Description=WD domain, G-beta repeat
  Pfam annotation: Domain name=WD40; Domain location=340-386; Score =19.6; E_value=0.013; Accession=PF00400.24; Description=WD domain, G -beta repeat
  Pfam module annotation: Pfam domain module=WD40::WD40::WD40::WD40::WD4 0; Domain location=132-188::192-230::242-280::34-72::340-386
PKHVRPSNQAHHKKGHARPHHNAADKDAAKKHHHLDVNTLRGHTDSVTALHFSNDGANLATVCADGAVRVFRIDDTSSKSFKILRINLPAGAHPTGVAFSEGSSSVVVAAQALLGSSLYMYADVSAPPTAQNKQQGKLSPPEIKWSHQKIHGKESVLNLAAARATHGPGDGSTIIISCSEATDIKVWHGKSGKELGTVDTNQLKNNMADISPNGRFIAAAAFTADVKVWEIVYSKDSSVKEVNKVMQLMGHKSAVTSLCFAPNSEQIITASKDGSIRVWNINVRYHLDEDPKTLRVLSIPLHDSKGSVCQYDHMSISPDGKILAVTSGSTLQWLCVETGAVLDTAEKAHEGDITGIAWAPRTILNGGVPAFILGSAGVDKKVKLWLAPEAGST

SEQ ID NO: 112281 - protein, 432 aa, Setaria italica
  Transcript Sequence Number=SeqID_46307
  Gene Ontology: Mol. function=hydrolase activity, hydrolyzing O -glycosyl compounds; Cellular component=anchored to membrane; Biological process=carbohydrate metabolic process
  Homolog annotation: Hit_ID=B9RKF7; Match level="QueryCoverage=92%, HitCoverage=78%, E-value=0.0, Identity=73%"; Hit description=Glucan endo-1,3-beta-glucosidase, putative
  Pfam annotation: Domain name=Glyco_hydro_17; Domain location=1-281; Score=315.2; E_value=1.4e-91; Accession=PF00332.10; Description =Glycosyl hydrolases family 17
  Pfam annotation: Domain name=X8; Domain location=301-386; Score =177.7; E_value=3.2e-50; Accession=PF07983.5; Description=X8 domain
  Pfam module annotation: Pfam domain module=Glyco_hydro_17::X8; Domain location=1-281::301-386
IKAFANTGVELMVGVPNSDLLAFAQYQSNVNTFLKNSILPYYPATMITYITVGAEVTESPVNVSGLVVPAMRNVHTALKKAGLHKKITISSTHSLGILSRSFPPSAGAFNSSYAHFLKPLLEFLVENQAPFMVDLYPYYAYQNSPSNVSLNYALFSPQSQDVIDPNTGLVYSNMFDAQVDSIFFALMALNFKTLKIMVTESGWPNKGAAKETGATPDNAQTYNTNLIRHVVNDSGTPAKPGEEIDVYIFSLFNENRKPGIESERNWGLFFPDQSSIYSLDWTGRGNVDVMTGANITSANGTWCIASANASETDLQNALNWACGPGNVDCSAIQPSQPCYQPDTLASHASYAFNSYYQQNGANVVACDFGGAGIRTTKDPSYDTCVYLAAGSKMSTMNSTSLPARSGSSPNPSAKCVTSLLFMLAVAVAAVML

SEQ ID NO: 112282 - protein, 312 aa, Setaria italica
  Transcript Sequence Number=SeqID_46308
THKPVDGKVNPSLAQLSVDEKVLRESNKYFDARMAAEAAFKSASFAAMAARAAVELSRTESQGKGPRGGGYDKARPVRTTAATEQGTAPPSWRPQKSPSPSPSWSDRSTATSVGSDAAYKGKEVLFDQSDEELEDVVWPPPPQRRPSYSRAASTVGTGVGAGASPWHGDARTRPFQDGVPENNHPQHRRHATEFAGGNARAPALHDALGGGQRGQYVAPPYRRNPAANTGRSSDAGAGAGAYESSAYVHPPYARIVSALERSNEHIARHEEVRRIGTDARVLQERVYGAAAPGHGHGPLNPEGRTNSVRTRR

SEQ ID NO: 112283 - protein, 88 aa, Setaria italica
  Transcript Sequence Number=SeqID_46309
  Gene Ontology: Mol. function=hydrolase activity, acting on ester bonds; Biological process=lipid metabolic process
  Homolog annotation: Hit_ID=B6T560; Match level="QueryCoverage=59%, HitCoverage=14%, E-value=2e-09, Identity=66%"; Hit description=GSDL -motif lipase
ASTILLANKLCKLAMGDDLVLCLLVVSMQVLVPVVVASRRPPAIYVFGDSTLDVGNNNYLPGKDVARANRSPYGVDFPGVPTGRFSNG

SEQ ID NO: 112284 - protein, 56 aa, Setaria italica
  Transcript Sequence Number=SeqID_46310
MRPAPGSSMLQILPSLDVQRSGAVSVEAWQSVLPHKLHLCQLCILAQSLTVLQCSN

SEQ ID NO: 112285 - protein, 46 aa, Setaria italica
  Transcript Sequence Number=SeqID_46311
LPILIRHASFCSLAILPILLKKTSKYHDGILLGPVSLFINSAIFFT

SEQ ID NO: 112286 - protein, 53 aa, Setaria italica
  Transcript Sequence Number=SeqID_46312
CGRLFAIVSLYVKEPMDVPYHPARATVFTQLDRYMYASRQLSSLNKYNKQQFL

SEQ ID NO: 112287 - protein, 62 aa, Setaria italica
  Transcript Sequence Number=SeqID_46313
ISVTIILHTQIYDPQIDAMQSYMFSFLGALMLRAKSLLQYLFLLGLWSRSTKRRSSFLIIYN

SEQ ID NO: 112288 - protein, 106 aa, Setaria italica
  Transcript Sequence Number=SeqID_46314
ENLHRVRKSGMLNYPGTKHTMRGVMDAKQLLEMRFTYRDHGEPKHSPGWFGNSINLSSGLISLPEPITSWKMSKWRSCSRSGDWIFEQQSSHRDHVETWRWYTGML

SEQ ID NO: 112289 - protein, 68 aa, Setaria italica
  Transcript Sequence Number=SeqID_46315
ISELCDSSMILWHLFPVRYFPSILLYSGINFQKKTCITSQVMCLSGFIGIYLLFGNVVILSYYILPWS

SEQ ID NO: 112290 - protein, 120 aa, Setaria italica
  Transcript Sequence Number=SeqID_46316
  Gene Ontology: Mol. function=nucleic acid binding; Cellular component= ribonucleoprotein complex; Biological process=rRNA processing
  Homolog annotation: Hit_ID=Q7X8Z7; Match level="QueryCoverage=93%, HitCoverage=12%, E-value=7e-38, Identity=72%"; Hit description =OSJNBa0070C17.5 protein
  Pfam annotation: Domain name=RRM_1; Domain location=14-89; Score =51.2; E_value=4e-12; Accession=PF00076.14; Description=RNA recognition motif. (a.k.a. RRM, RBD, o
  Subcellular localization annotation: CTP_CleavageSite=42; ConfidenceScore=5.09e-01
MLKRYYHFLQSRSVFVKNLNFKTTDESLSQHFSTKIKSGSLKSVKVKKHVKNGKIVSMGFGFVEFDSVETATSVCKDLQGTVLDGHALILQLCHGKKDGQAAKKNGKDQSSTKLLVRNVA

SEQ ID NO: 112291 - protein, 166 aa, Setaria italica
  misc_feature (44)..(44): Xaa can be any naturally occurring amino acid
  Transcript Sequence Number=SeqID_46317
  Gene Ontology: Mol. function=nucleic acid binding; Cellular component= nucleus; Biological process=molting cycle, collagen and cuticulin -based cuticle
  Homolog annotation: Hit_ID=Q7X8Z7; Match level="QueryCoverage=99%, HitCoverage=18%, E-value=2e-83, Identity=92%"; Hit description =OSJNBa0070C17.5 protein
  Pfam annotation: Domain name=RRM_1; Domain location=45-113; Score =79.6; E_value=1.1e-20; Accession=PF00076.14; Description=RNA recognition motif. (a.k.a. RRM, RBD, o
TTSVCKDLQGTVLDGHALILQLCHGKKDGQAAKKNGKDQSSTKXLLVRNVAFEATEKDLRQLFSPFGQIKSLRLPMKFGSHRGFAFVEYVTKQEAQNALQALASTHLYGRHLVIERAKEGETLEELRARTAAQFVDEHSGFQRMSKKRKQSSLVDEGSVKISRILE

SEQ ID NO: 112292 - protein, 190 aa, Setaria italica
  Transcript Sequence Number=SeqID_46318
DDLKVDRENQAMAVQYLPFLHLGETPRPPVVAMEDAEMSTSPRGEIKAASSDASKNASTTSTVSDDRAVSASAGAVEKPVDEATTVPMSCRSPDTPTSCSGERADDVFKSPLGGIDMEAEQSAMQRQIMEMYVKSMRQFSESLPKVQLPLELDGVVVQKEEKPDDKVIHIQKQQVKKDGARVFYGSRAFF

SEQ ID NO: 112293 - protein, 92 aa, Setaria italica
  Transcript Sequence Number=SeqID_46319
RGKIFDLLERSMVILFSFITISLCLALAKTHNKHSCDLAQEHKIINTRSIWILKHISAPNIAAALILAWEEAELWCLAGAKGLTLLTARGVG

SEQ ID NO: 112294 - protein, 161 aa, Setaria italica
  Transcript Sequence Number=SeqID_46320
  Gene Ontology: Mol. function=protein serine/threonine kinase activity; Biological process=protein amino acid phosphorylation
  Homolog annotation: Hit_ID=B6UIQ8; Match level="QueryCoverage=99%, HitCoverage=23%, E-value=1e-58, Identity=70%"; Hit description =Receptor-like protein kinase RK20-1
  Pfam annotation: Domain name=DUF26; Domain location=88-144; Score =47.0; E_value=7.4e-11; Accession=PF01657.9; Description=Domain of unknown function DUF26
  Subcellular localization annotation: CTP_CleavageSite=56; ConfidenceScore=5.02e-01
DAALVYNQCYVRVAVTDFLSSPNNTGMVPLISGTSIPAGVNVSAYDGAVTRLLNATAAHAVDRSSPSSPRLYFATGQLVGLDPRVPNIWSMAQCAGDLSPAQCRGCLHDLVTLWWNGSGFKPNGEGARLAGSRCNLRSELGDKFYTGAPMVKLQMNGEAAV

SEQ ID NO: 112295 - protein, 203 aa, Setaria italica
  Transcript Sequence Number=SeqID_46321
  Gene Ontology: Cellular component=vacuole
  Pfam annotation: Domain name=DUF2404; Domain location=29-119; Score =107.6; E_value=4.2e-29; Accession=PF10296.1; Description=Putative integral membrane protein con
SVSSNSQLSDSSHTNVEEKLADEGTLCWNLLFSRLFFDAKMNGEVTKAIKARIQRTLSNTRTPAYIGEITLAGLSLGKLPPYLHRMRVIPLDLNELWAFEVDFNYSSGMLLHIETRLEIQEPELEKDIMRTSLKDDSNGDVGSDVLDSIEQYGNQFRSSEALDSVVGDDDEADALRKSKSTGWTSTYMSRWKRILHSIADQVS

SEQ ID NO: 112296 - protein, 102 aa, Setaria italica
  misc_feature (1)..(30): Xaa can be any naturally occurring amino acid
  Transcript Sequence Number=SeqID_46322
XXXXXXXXXXXXXXXXXXXXXXXXXXXXXXVKLPSIIKHVHPYTEKLHHTATNHQKVLGDVQEKQQDSRMFMRTPRKLQVTAKNHQKVLSDVQETQQDFVDS

SEQ ID NO: 112297 - protein, 92 aa, Setaria italica
  Transcript Sequence Number=SeqID_46323
MKRDGNIASLFQKHEAKRKAAAAAATSNRSSDPVVPMVEEQTRERVVEEIETHILAPPPPPPPQPSSVPPVYDINRLPQDPGERRPILSYPT

SEQ ID NO: 112298 - protein, 276 aa, Setaria italica
  Transcript Sequence Number=SeqID_46324
  Pfam annotation: Domain name=RWP-RK; Domain location=7-61; Score =44.0; E_value=5.7e-10; Accession=PF02042.7; Description=RWP-RK domain
VQQPKPTKVSLSYEEILQAILPPHGADSEAASILGVGTSVLKRICRSHGIVRWPYRKLVSGKAGDDTKGPEREKAKELLELSKIAKQKASSSSGSSIVSSSTSQGAAKSQQGSSKAGQVSVSPPAGKQNASPSLAHGSQTKAIPGYMDDFKYGFPSSGLPCETMKWWGGSSDTDCELTKDGNREAHGEASKGMTDDDELDWGADEGEAEADGAVTAEASAQLCSLRRKAVDDGRKLLNGDTRRGQEFSRLNKRQKLALAQVFGASLPDVVLLVFSE

SEQ ID NO: 112299 - protein, 133 aa, Setaria italica
  misc_feature (113)..(113): Xaa can be any naturally occurring amino acid
  Transcript Sequence Number=SeqID_46325
  Gene Ontology: Mol. function=RNA-directed DNA polymerase activity; Cellular component=chromatin; Biological process=RNA-dependent DNA replication
  Homolog annotation: Hit_ID=Q01N39; Match level="QueryCoverage=96%, HitCoverage=10%, E-value=3e-23, Identity=40%"; Hit description =H0215A08.3 protein
  Subcellular localization annotation: CTP_CleavageSite=41; ConfidenceScore=5.24e-01
AISSFLVSETLGTRFASFAYLPSVGASGGILVACKGPEVCCTVMNSGRFSVTVNIAVEATNEQWVLTTVYGPQPDTDKIKFLAELRSIHALLTGHWIIVGDFNLLLHASDKNXVNINQRNLGRFRRFVVDLQL

SEQ ID NO: 112300 - protein, 483 aa, Setaria italica
  Transcript Sequence Number=SeqID_46326
  Gene Ontology: Mol. function=argininosuccinate synthase activity; Cellular component=chloroplast; Biological process=amino acid biosynthetic process
  Homolog annotation: Hit_ID=Q2QVC1; Match level="QueryCoverage=91%, HitCoverage=92%, E-value=0.0, Identity=92%"; Hit description =Argininosuccinate synthase
  Pfam annotation: Domain name=Arginosuc_synth; Domain location=89-479; Score=710.4; E_value=1.5e-210; Accession=PF00764.11; Description =Arginosuccinate synthase
  Subcellular localization annotation: CTP_CleavageSite=57; ConfidenceScore=5.59e-01
MASAGGPSGVVGISVRPDSSAACLFQKVGARSNSLPGAAPVQVRRCHNKARNGQAIRCAMATGKEQGAVTTTSSDQHKGGLRGKLNKVVLAYSGGLDTSVIVPWLRENYGCEVVCFTADVGQGAIELEGLEKKAKASGACQLVVKDLREEFVSEYIYPCLRAGAVYERKYLLGTSMARPVIAKAMVDVAKEVGADAVAHGCTGKGNDQVRFELTFYALNPELKVVAPWREWDITGREDAIEYAKKHNVPVPVSKKSIYSRDRNLWHLSHEGDILEDPANEPKEDMYMMSVAPENAPSEPEYLEIGIIAGVPVSINGRDLSPASLLAELNEIGGKHGIGRIDMVENRLVGMKSRGVYETPGGTIMAAAVRELEALTLDRETMQWKDMVALKYAELVYAGRWFDPLRQSFDAFMENITATTTGSVTLKLYKGSVNVASRKSPYSLYREDISSFENGEIYNQADAEGFIRLYGLPTRVRAMLEKGI

SEQ ID NO: 112301 - protein, 179 aa, Setaria italica
  misc_feature (13)..(13): Xaa can be any naturally occurring amino acid
  misc_feature (106)..(106): Xaa can be any naturally occurring amino acid
  Transcript Sequence Number=SeqID_46327
  Gene Ontology: Mol. function=nucleotide binding; Biological process =defense response
  Homolog annotation: Hit_ID=Q2QU56; Match level="QueryCoverage=98%, HitCoverage=22%, E-value=1e-69, Identity=69%"; Hit description=NB -ARC domain containing protein
  Pfam annotation: Domain name=NB-ARC; Domain location=1-179; Score= -52.1; E_value=4.3e-06; Accession=PF00931.14; Description=NB-ARC domain
CQVSRNPNIAKIXTDMLKELGSCIDPSDDERQLIDKLRAFLQDKRYFIIVDDIWSTQAWELVKSALPENNLNSRIITTTRIDIVAESCCSSLTGYVHKIKPLSDQXTHQLFFKRVFGDASACPPHFEEMSHGILKKCHGLPLATITIASLLAGKSNRDEWEQVYNSISSAFSHQGMRDI

SEQ ID NO: 112302 - protein, 142 aa, Setaria italica
  misc_feature (94)..(94): Xaa can be any naturally occurring amino acid
  misc_feature (106)..(106): Xaa can be any naturally occurring amino acid
  Transcript Sequence Number=SeqID_46328
  Gene Ontology: Mol. function=ubiquitin-protein ligase activity; Cellular component=nucleus; Biological process=ubiquitin-dependent protein catabolic process
  Homolog annotation: Hit_ID=B3F0L4; Match level="QueryCoverage=100%, HitCoverage=45%, E-value=9e-77, Identity=94%"; Hit description =Ubiquitin ligase SINAT2
  Pfam annotation: Domain name=Sina; Domain location=1-133; Score =125.5; E_value=1.8e-34; Accession=PF03145.8; Description=Seven in absentia protein family
NDHKVDLHEGCTFNHRYVKPNPYEVENATWMLTVFKCFGQHFCLHFEAFLLGMAPVYMAFLRFMGEESEAQGFGYSLEVGGGGRKLTWQGTPRXAIRDSHRKVRDXFDGLIIHRNMALFFSGGSRQELKLRITGRIWREQAQ

SEQ ID NO: 112303 - protein, 72 aa, Setaria italica
  Transcript Sequence Number=SeqID_46329
PMSHLGVVIALTIPALLEKSKLYCHILLGRFSGCSGMRATMQRVEQGTGKRRGSIDNGYAYAVIHRNLYHVS

SEQ ID NO: 112304 - protein, 76 aa, Setaria italica
  Transcript Sequence Number=SeqID_46330
YVALGNAGVAEFGKENATGLFEVEVAVAGEVRYQAHFTKCKLAATCPLKLQLAPPGTPAVVFQKVKCKLAKPDKNC

SEQ ID NO: 112305 - protein, 94 aa, Setaria italica
  misc_feature (72)..(72): Xaa can be any naturally occurring amino acid
  Transcript Sequence Number=SeqID_46331
  Gene Ontology: Mol. function=histamine receptor activity; Cellular component=integral to membrane; Biological process=G-protein coupled receptor protein signaling pathway
  Homolog annotation: Hit_ID=B9RYU6; Match level="QueryCoverage=89%, HitCoverage=15%, E-value=4e-09, Identity=41%"; Hit description =Valacyclovir hydrolase, putative
PPAAPALTVSPAIAEMIRGKMDRPPRPPRQAPCWSDCDCKVCHAWSAAPRSASHLYVHVQAPPPGAPAAGGXAVEDVVFIHGFISSSVFWNGDG

SEQ ID NO: 112306 - protein, 107 aa, Setaria italica
  Transcript Sequence Number=SeqID_46332
  Subcellular localization annotation: CTP_CleavageSite=67; ConfidenceScore=5.19e-01
AERLLGGVLGLDAPEPLLQVALHPPPTHRPSPPLPGNCNCSCSLLRVRSSLDLGVRSAGRTSTNQARARARGVCGPVAVGGGGGDGVLGAAVLVPASSDRRAGEEGA

SEQ ID NO: 112307 - protein, 217 aa, Setaria italica
  Transcript Sequence Number=SeqID_46333
  Gene Ontology: Mol. function=hydrolase activity
  Homolog annotation: Hit_ID=Q9LMJ5; Match level="QueryCoverage=100%, HitCoverage=65%, E-value=4e-61, Identity=46%"; Hit description =F10K1.27 protein
NGNHETMNVEGDFRYVDPGGFDECIRFLEYLDECDGNWEEVFLNWVDVSERRKKEYRASPNSDWRPWNFVNKQRGFAARSSLFKRGGPLACELARHPVVLKINDWVFCHGGLLPHHVEYGIERMNREVSMWMKCSGEDSDDEQTLKSVGAKGMVVGHTPQIGGVNCKCDGKVWCVDVGMSYGVLYSRPEVLEIVNDRPRVLKKRRDSYDEMEVLDYL

SEQ ID NO: 112308 - protein, 68 aa, Setaria italica
  Transcript Sequence Number=SeqID_46334
  Gene Ontology: Mol. function=nucleoside-triphosphatase activity; Cellular component=membrane; Biological process=proteolysis
  Homolog annotation: Hit_ID=A3BXL8; Match level="QueryCoverage=58%, HitCoverage=2%, E-value=7e-15, Identity=87%"; Hit description=PDR20
LPQRSRKTFARVSGYCEQNDIHSPNVTVYESLAFSAWLRLPPEGSSDLSFPTEYSQTFITQCFACLCH

SEQ ID NO: 112309 - protein, 490 aa, Setaria italica
  misc_feature (91)..(91): Xaa can be any naturally occurring amino acid
  Transcript Sequence Number=SeqID_46335
  Gene Ontology: Mol. function=nucleoside-triphosphatase activity; Cellular component=membrane; Biological process=proteolysis
  Homolog annotation: Hit_ID=A3BXL8; Match level="QueryCoverage=100%, HitCoverage=33%, E-value=0.0, Identity=84%"; Hit description=PDR20
  Pfam annotation: Domain name=ABC_tran; Domain location=237-427; Score= 101.9; E_value=2.2e-27; Accession=PF00005.19; Description=ABC transporter
  Pfam annotation: Domain name=PDR_assoc; Domain location=68-132; Score= 133.5; E_value=6.8e-37; Accession=PF08370.3; Description=Plant PDR ABC transporter associated
  Pfam module annotation: Pfam domain module=ABC_tran::PDR_assoc; Domain location=237-427::68-132
FRFIAGMARHQVVASTLGSFGILIFMLLGGFLLARENVKKWWIWGYWISPLMYAQNAISVNEFLGDSWNKILPGSTEPLGKLVLESRGLFXEAKWYWIGVGALIGYVLLFNTLYTVCLTFLKPFDSNQPTISEETLKIKQANLTGEVLEASSRGRVASNTVTTQSTVDENNDEATSNHATVNSSPVNKGMVLPFVPLSITFEDIRYSVDMPEEIRAQGVTETRLELLKGISGSFRPGVLTALMGVSGAGKTTLMDVLAGRKTSGYIEGNITISGYPKKQETFARVSGYCEQNDIHSPNVTVYESLAFSAWLRLPADVDSSTRKMFIDEVMELVELLPLKDALVGLPGVSGLSTEQRKRLTIAVELVANPSIIFMDEPTSGLDARAAAIVMRAIRNTVDTGRTVVCTIHQPSIDIFESFDELFLMKRGGEEIYVGPLGQSICIVIKYFEAIEGVSNIKDGYNPSTWMLEVTSTMQEQITGVNFSDVYKNSE

SEQ ID NO: 112310 - protein, 301 aa, Setaria italica
  misc_feature (179)..(179): Xaa can be any naturally occurring amino acid
  misc_feature (294)..(294): Xaa can be any naturally occurring amino acid
  Transcript Sequence Number=SeqID_46336
  Gene Ontology: Mol. function=binding; Cellular component=meiotic cohesin complex; Biological process=chromosome segregation
  Homolog annotation: Hit_ID=B9S3Y7; Match level="QueryCoverage=99%, HitCoverage=26%, E-value=1e-120, Identity=69%"; Hit description =Stromal antigen, putative
  Pfam annotation: Domain name=HEAT; Domain location=205-242; Score =11.4; E_value=2; Accession=PF02985.14; Description=HEAT repeat
  Pfam annotation: Domain name=HEAT; Domain location=244-281; Score =10.7; E_value=2.4; Accession=PF02985.14; Description=HEAT repeat
  Pfam annotation: Domain name=STAG; Domain location=84-199; Score =188.4; E_value=2e-53; Accession=PF08514.3; Description=Stromal antigen (SASTAG) protein
  Pfam module annotation: Pfam domain module=HEAT::HEAT::STAG; Domain location=205-242::244-281::84-199
ACLSVSQQALIDIIKHNGRLINHAVKKLVEDYESNKNSVIFQILAMLFEACGAKHEIYPDYLHESDVDDIVLSLVELARKGLVEDNYSTKQKDLKHFKENLVSFWDSFVLECQNGPLFDDILFQKIKDYVVALSCTPPRVYRQVASLVGLQLVTSFISVAKTLSGQRETTQRQLNAEKXKQSDGPLVESLNNRLTLTHEHITYLEEYMRKIFSGLFMHRYRDVDPEIRMACIKSLGIWVVSYPSLFLQDIYLKYLGWTLNDKNAGVRRASILALQSLYEVDDNIPSLGLFTERXFYSRMIQ

SEQ ID NO: 112311 - protein, 887 aa, Setaria italica
  Transcript Sequence Number=SeqID_46337
  Gene Ontology: Mol. function=protein binding; Cellular component =nucleus; Biological process=chromosome segregation
  Homolog annotation: Hit_ID=B9S3Y7; Match level="QueryCoverage=95%, HitCoverage=76%, E-value=0.0, Identity=59%"; Hit description=Stromal antigen, putative
  Pfam annotation: Domain name=HEAT; Domain location=105-141; Score =1.5; E_value=32; Accession=PF02985.14; Description=HEAT repeat
  Pfam annotation: Domain name=HEAT; Domain location=22-59; Score=11.4; E_value=2; Accession=PF02985.14; Description=HEAT repeat
  Pfam annotation: Domain name=HEAT; Domain location=61-98; Score=10.7; E_value=2.4; Accession=PF02985.14; Description=HEAT repeat
  Pfam module annotation: Pfam domain module=HEAT::HEAT::HEAT; Domain location=105-141::22-59::61-98
LLEQTRIKLLNYNRNNNITYLEEYMRKIFSGLFMHRYRDVDPEIRMACIKSLGIWVVSYPSLFLQDIYLKYLGWTLNDKNAGVRRASILALQSLYEVDDNIPSLGLFTERFYSRMIQLADDIDVSVAVSAIGLIKQLLRHQLLSDDDLGPLYDLLIDEPPMIRRAIGELVYDHLIAQNIKTSHPGGRDGENEPSEVHIGRMLQILREFSDDPVLSSYVIDDIWDDMKAMRDWRCMISLLLDENPAIELTDMDGTNLVRMLQASAKKAVGERIIPAMDNRKLYYNKGQKETLENSRREITVALLTRYPQLLRKYMSDKAKISPLVDMMVLLKLEMYSFKRQEKHFKAAIDLIYDAFFKHGEKDALRSCIKALAFCCTECQADLKDYAENKLKNLEDELVLKVKTAIKEVEAGDDEYSLLVNLKRLYELQLSKPVKNDSLFEDMYRILSHLREMDNEVKSFLLLNMYLQVAWCLHAIDGENPSETSIDELLSKQSSLFDQLYYYLVVLPTYQKEGRSTTVLSCRVCIITAEMWCLFKKSKYSSTRLESLGYLPQLDMVQKFWKLCEQQLNISDETEDEDANEEYVEDTNRDAVMIAAAKLVLADTVPKDYLGPEIVSHYVSHGTSTTEIIKHLITSLKKNADFDMAALFFEALKRAYERYMTHVNDGENQTLTGKSYSECQDLASRLAGSYVGAARNKNKSEIFKIIQDGVSFAFADLPNQLPFLEAALLPFVSKLPSADIPDILADVEKRTQDADMNGDESAWRPYFTFVEHLREKHAKNEVLHEEEEKPVKRRGRPRKVRDVPEAPNIPDVRGKKLFKDDGHNSSDEESISASDHHGHGEDDDSDDDANQPLINTIRSSSAKLRSLKVSQQGTSSRKGAPGPSGSNS

SEQ ID NO: 112312 - protein, 71 aa, Setaria italica
  Transcript Sequence Number=SeqID_46338
ASKSLNFIELIHDGASRDRYDRAASSNLGTLASCKASCFPGPDWGYSSPPSPSWMRRQRKPSRSSTTLVRL

SEQ ID NO: 112313 - protein, 233 aa, Setaria italica
  misc_feature (201)..(201): Xaa can be any naturally occurring amino acid
  Transcript Sequence Number=SeqID_46339
  Gene Ontology: Mol. function=oxidoreductase activity; Biological process=oxidation reduction
  Homolog annotation: Hit_ID=B6VC74; Match level="QueryCoverage=90%, HitCoverage=65%, E-value=4e-84, Identity=72%"; Hit description=Ted2
  Pfam annotation: Domain name=ADH_zinc_N; Domain location=43-188; Score=138.5; E_value=2e-38; Accession=PF00107.18; Description=Zinc -binding dehydrogenase
EQIIPASVAIPIPPAIDYKTAASVLLKGMTAYVLVRQAFKVQRGHTVLVHAAAGGVGSLLCQWANALGATVIGTVSTEEKAAQATQDGCQHVIVYTMEDFVTRVTEITSGLGVHVVYDAVGKDTFKGSLACLMPRGCMISYGQSSGSRPDPVRLSDLAPKSLILGRPGLMHYTTNRNELLLWSSEVFASVMAGVLQVRANXVYLLSEAARAHTDLEARRTSGSIVLVPDSQWL

SEQ ID NO: 112314 - protein, 44 aa, Setaria italica
  Transcript Sequence Number=SeqID_46340
RATSKHFRNSKFELLFTALFKFGEHYLNSWHYLNMSTRFIRRGR

SEQ ID NO: 112315 - protein, 71 aa, Setaria italica
  Transcript Sequence Number=SeqID_46341
IYLTNNLLIFQCYWRTKFAVPLVFTQALLEICIIVPSSNLLALTYIVLINTSYFVQNRKRTSCFSCPKCHL

SEQ ID NO: 112316 - protein, 48 aa, Setaria italica
  Transcript Sequence Number=SeqID_46342
  Gene Ontology: Mol. function=protein serine/threonine phosphatase activity; Cellular component=protein serine/threonine phosphatase complex
  Homolog annotation: Hit_ID=Q7XUC5; Match level="QueryCoverage=91%, HitCoverage=11%, E-value=2e-13, Identity=81%"; Hit description =Probable protein phosphatase 2C 43
RRYFHDDITVVVVFIDHELRQEGPASVPELSVRGFVDAGGPSSFFRVE

SEQ ID NO: 112317 - protein, 78 aa, Setaria italica
  Transcript Sequence Number=SeqID_46343
  Subcellular localization annotation: CTP_CleavageSite=40; ConfidenceScore=5.36e-01
ANPKSSNLYLCSQKIPSYSSSQPKNSNLDPNVTNKSSFCSQQQAKACDFHNFQGYVILHINQINNHHCKEQLVLQVQI

SEQ ID NO: 112318 - protein, 115 aa, Setaria italica
  Transcript Sequence Number=SeqID_46344
  Subcellular localization annotation: CTP_CleavageSite=73; ConfidenceScore=5.70e-01
RSASLSFVTFFKFSISADCNLRVDSDSSVFFFKVANSCWSATNHCQSCTPSCLSVSTCSLSTLLHKDLVELLECSAVSSGFFSARSNIDLRTSILEMDLTGATTDVDPLAGSNRI

SEQ ID NO: 112319 - protein, 117 aa, Setaria italica
  Transcript Sequence Number=SeqID_46345
  Gene Ontology: Mol. function=transferase activity, transferring glycosyl groups; Cellular component=cytoplasm; Biological process =carbohydrate metabolic process
  Homolog annotation: Hit_ID=A6N1N2; Match level="QueryCoverage=97%, HitCoverage=54%, E-value=3e-55, Identity=91%"; Hit description =Phosphorylase (Fragment)
  Pfam annotation: Domain name=Phosphorylase; Domain location=1-113; Score=-631.6; E_value=0.092; Accession=PF00343.12; Description =Carbohydrate phosphorylase
SCWLRKDRENGLFKPDPRFEEAKQLIRSGAFGSYNYEPLLDSLEGNSGFGRGDYFLVGYDFPGYIDAQDRVDAAYKDKKKWIKMSILNTAGSGKFSSDRTIAQYAKEIWDIKASPVA

SEQ ID NO: 112320 - protein, 262 aa, Setaria italica
  misc_feature (60)..(60): Xaa can be any naturally occurring amino acid
  misc_feature (222)..(222): Xaa can be any naturally occurring amino acid
  misc_feature (244)..(244): Xaa can be any naturally occurring amino acid
  misc_feature (248)..(248): Xaa can be any naturally occurring amino acid
  Transcript Sequence Number=SeqID_46346
  Gene Ontology: Mol. function=transferase activity, transferring glycosyl groups; Cellular component=cytoplasm; Biological process =carbohydrate metabolic process
  Homolog annotation: Hit_ID=Q9LKJ3; Match level="QueryCoverage=80%, HitCoverage=25%, E-value=6e-99, Identity=80%"; Hit description=Alpha- glucan phosphorylase, H isozyme
  Pfam annotation: Domain name=Phosphorylase; Domain location=131-262; Score=-579.5; E_value=0.0007; Accession=PF00343.12; Description =Carbohydrate phosphorylase
AVLRVVGDVSGDVGGLLRRGLRRLHLLAARVRPEPRGPRARPRWSPADIAGNISYHAQYXFSPLAFGPEEAFYATAESVRDHLIERWNDTYVHFHKTDPKQTYYLSMEYLQGRALTNAVGNLGITGAYAEAVKKFGYELEVLAGQEKDAALGNGGLGRLASCFLDSMATLNLPAWGYGLRYRYGLFKQHIAKEGQEETAEDWLDKFSPWEIPRHDVVFPVRXFGHVEILPDGSRKWVGGEVLNXVRLXVPIPGYKTAQPAAC

SEQ ID NO: 112321 - protein, 208 aa, Setaria italica
  misc_feature (25)..(25): Xaa can be any naturally occurring amino acid
  Transcript Sequence Number=SeqID_46347
  Homolog annotation: Hit_ID=Q6ASW5; Match level="QueryCoverage=100%, HitCoverage=29%, E-value=5e-90, Identity=81%"; Hit description =Putative microtubule-associated protein
HDLTIRRMNEYKARLTRSPRKEKSXDRLHKVLEHVTEVHSLCDMLGEDFIALVNEVHPGLHETADPGKPTSISDSTLGSLAQVVAMLTSEKAKRAAMLREAVAPLVELWELMDSPEEERRGFRKVTAVLNPEKESLSSGVLSVATIKKTEEEVERLTRLKAGRMKELVLKRRLELENICRNMHVEPDASTVPEKSIALIDSGLVNPSE

SEQ ID NO: 112322 - protein, 333 aa, Setaria italica
  misc_feature (311)..(311): Xaa can be any naturally occurring amino acid
  misc_feature (321)..(321): Xaa can be any naturally occurring amino acid
  Transcript Sequence Number=SeqID_46348
  Homolog annotation: Hit_ID=Q6ASW5; Match level="QueryCoverage=93%, HitCoverage=47%, E-value=1e-145, Identity=75%"; Hit description =Putative microtubule-associated protein
EKIAAEIAGRSYGYEGSPRASEVEEHDLTIRRMNEYKARLTSLQKEKSDRLHKVLEHVTEVHSLCDMLGEDFIALVNEVHPGLHETADPGKPTSISDSTLGSLAQVVAMLTSEKAKRAAMLREAVAPLVELWELMDSPEEERRGFRKVTEEEVERLTRLKAGRMKELVLKRRLELENICRNMHVEPDASTVPEKSIALIDSGLVNPSELMANIDEQIARAREELQSRKDIMDRINKWLLACEEEQWLEEYNQDENRFSTGRIARLNLKRAEKARLIITKIPAIVDNLMSRTLAWESERKKPFLYDGTSATXVGELVRLSRXLRQEEERRRLRE

SEQ ID NO: 112323 - protein, 645 aa, Setaria italica
  Transcript Sequence Number=SeqID_46349
  Gene Ontology: Mol. function=transferase activity, transferring glycosyl groups; Cellular component=cytoplasm; Biological process =carbohydrate metabolic process
  Homolog annotation: Hit_ID=Q9LKJ3; Match level="QueryCoverage=99%, HitCoverage=77%, E-value=0.0, Identity=88%"; Hit description=Alpha -glucan phosphorylase, H isozyme
  Pfam annotation: Domain name=Phosphorylase; Domain location=1-641; Score=1330.4; E_value=0; Accession=PF00343.12; Description =Carbohydrate phosphorylase
CCVPSLDFFGHVEILPDGLRKWVGGEVLKALAYDVPIPGYKTKNAISLRLWEAKATAEDFNLFQFNDGQYESAAQLHARAQQICAVLYPGDATEEGKLLRLKQQFFLCSASLQDMIARFKERKADRASGKWSEFPTKVAVQLNDTHPTLAIPELMRLLMDEEGLGWDEAWDITYRTVSYTNHTVLPEALEKWSQIVMRKLLPRHMEIIEEIDKRFRELVISKHKEMEGKIDSMKVLDSSNPQKPVVRMANLCVVSSHTVNGVAELHSNILKQELFADYVSIWPNKFQNKTNGITPRRWLKFCNPELSEIVTKWLKTDQWTSNLDLLTGLRKFADDEKLHAEWAAAKLACKKRLAKHVLDVTGVTIDPTSLFDIQIKRIHEYKRQLLNILGAVYRYKKLKEMSAEEKQKVTPRTVMLGGKAFATYTNAKRIVKLVNDVGAVVNNDPEVNKYLKVVFIPNYNVSVAEVLIPGSELSQHISTAGMEASGTSNMKFSLNGCVIIGTLDGANVEIREEVGEDNFFLFGAKADEVAGLRKDRENGLFKPDPRFEEAKQLIRSGAFGSYNYEPLLDSLEGNSGFGRGDYFLVGYDFPGYIDAQDRVDAAYKDKKKWIKMSILNTAGSGKFSSDRTIAQYAKEIWDIKASPVA

SEQ ID NO: 112324 - protein, 109 aa, Setaria italica
  Transcript Sequence Number=SeqID_46350
  Gene Ontology: Mol. function=serine-type endopeptidase activity; Cellular component=cell wall; Biological process=negative regulation of catalytic activity
  Homolog annotation: Hit_ID=Q38708; Match level="QueryCoverage=95%, HitCoverage=13%, E-value=9e-31, Identity=65%"; Hit description =Subtilisin-like protease
PVPGASFFGYAAGTARGMAPRARVAVYKALWDEGTYPSDILAAIDQAIADGVDVISLSLGQNGVPLYKDPIAIGSFAAMQRGVFVSTSAGNDGPELGFLHNGTPWNVRW

SEQ ID NO: 112325 - protein, 105 aa, Setaria italica
  Transcript Sequence Number=SeqID_46351
TVQRYMLQIRDYAPETILPELTRPMSLPFYFEKTLCHFQNTMAYCPRPVCWLLIHATSPVAGLVPMSSPATIQNEPSYHHRKKVSWQVIIGNIYYVRGSALVWRS

SEQ ID NO: 112326 - protein, 345 aa, Setaria italica
  Transcript Sequence Number=SeqID_46352
MGNTLGLGAGAGLGLGLCFGAAALMQAVGANAEHLNKGREAHANRVVTPQRQYNVHSAEDIDESSAERLYDAMRYAKANAMLIQVPVLGTAKKFWRLSDKATRISRKLALILSSQHKIGKYLTAPLQLSDVWIGNNGSVKLRGVSFTARGFSIERVRDDYKYLAKVLIELIKFSGGDINNLPPDYREFLLLIGRGTVTMRDELLIVNNVALLPMENRTEVFLMLHDRIVNYRGREDEAKRKRILSKLPYKKDWLDTARANARINEWVTFPKKGMNQGVENVREYRRTPFDLLRLNRNIRCHLHQHNNDDIEETLYCEWPELLMVMEKMLYLEGELVATDIQNKFG

SEQ ID NO: 112327 - protein, 62 aa, Setaria italica
  Transcript Sequence Number=SeqID_46353
  Homolog annotation: Hit_ID=Q9LNI0; Match level="QueryCoverage=87%, HitCoverage=12%, E-value=1e-14, Identity=60%"; Hit description =F6F3.23 protein
LTKYLLQLLRRPDGHVGPYRTPYPFAKDSKDAASIQNDCLHWCVPGPIDAWNDLVMKMVLDQ

SEQ ID NO: 112328 - protein, 43 aa, Setaria italica
  Transcript Sequence Number=SeqID_46354
SWRRGGYNHMKKKSTSQDTMPDVAAEEQPPEPAPPQEEKGEDN

SEQ ID NO: 112329 - protein, 54 aa, Setaria italica
  Transcript Sequence Number=SeqID_46355
SSDLWWSSQILYRPAYNWWWSAIRQKRYIDFTFPLGAYVALIANQCHTRSGSSF

SEQ ID NO: 112330 - protein, 53 aa, Setaria italica
  Transcript Sequence Number=SeqID_46356
NSNFQFIILKSKILRFPHWISETLTSARFILTIPMVNSLEWFLDCVKSKYMLL

SEQ ID NO: 112331 - protein, 132 aa, Setaria italica
  Transcript Sequence Number=SeqID_46357
  Gene Ontology: Mol. function=DNA-directed RNA polymerase activity; Biological process=transcription
  Homolog annotation: Hit_ID=C0JR65; Match level="QueryCoverage=100%, HitCoverage=9%, E-value=4e-53, Identity=75%"; Hit description=DNA -directed RNA polymerase
NNPQFSVLASSLVSSRVSECLKSSKLYSKKTDVETSTDTYGMKWLKDAVLSKRSDNAFRSIMVGDPKIRLWEIGIPENLASNLVVSEHVSSYNLENINLKCNLHLLAKEELLIRRNGKLMFIRKANQLEVGD

SEQ ID NO: 112332 - protein, 197 aa, Setaria italica
  misc_feature (121)..(121): Xaa can be any naturally occurring amino acid
  Transcript Sequence Number=SeqID_46358
  Gene Ontology: Mol. function=nucleic acid binding
  Homolog annotation: Hit_ID=Q8LJR0; Match level="QueryCoverage=67%, HitCoverage=29%, E-value=1e-51, Identity=80%"; Hit description=Water- stress protein
LDYSPRVPVDRRPSFRDDYSPRGSGYSDLGPRSAPRLSERRAYPDDSYGGKFDRPLPAYRESRGRDYDTISGSKRPYADMDDAPRYQDISVRQSKARLDYDVGGSSARPGRSHVGYSGSRXSTGHDSAYGSSRHGMGYGGSASGGDAGGMYSSSYSGSYTSRGSDVGGSSYSSLYSGRNLGSSSGGYYGGSGSSSYY

SEQ ID NO: 112333 - protein, 755 aa, Setaria italica
  Transcript Sequence Number=SeqID_46359
  Gene Ontology: Mol. function=nucleic acid binding; Cellular component= ribonucleoprotein complex; Biological process=interspecies interaction between organisms
  Homolog annotation: Hit_ID=Q8LJR0; Match level="QueryCoverage=54%, HitCoverage=84%, E-value=0.0, Identity=83%"; Hit description=Water -stress protein
  Pfam annotation: Domain name=RRM_1; Domain location=174-244; Score =85.7; E_value=1.7e-22; Accession=PF00076.14; Description=RNA recognition motif. (a.k.a. RRM, RBD, o
  Pfam annotation: Domain name=RRM_1; Domain location=254-322; Score =11.9; E_value=0.016; Accession=PF00076.14; Description=RNA recognition motif. (a.k.a. RRM, RBD, o
  Pfam annotation: Domain name=RRM_1; Domain location=351-421; Score =37.2; E_value=6.4e-08; Accession=PF00076.14; Description=RNA recognition motif. (a.k.a. RRM, RBD, o
  Pfam module annotation: Pfam domain module=RRM_1::RRM_1::RRM_1; Domain location=174-244::254-322::351-421
ASAEEAPPAEEAPAEEVKIAEEAPRVVEEPKRQLSPPPSQQQAVEEKGSDATANGETHAEEEGGAKETYEEEDKGERLEFEDEPEYEEEAAVDYDEKDLEQYEEQYEDGDEEVEYTEDVVEVETDMVDEELDEGGDDGEGEGYENADEEHHVDVDDEEHNEMVKEHRKRKEFEVFVGGLDKDATENDLRKVFGEVGEITEVRLMMNPVTKKNKGFAFLRYATVEQARRAVSELKNPLVRGKQCGVAPSHDNDTLFVGNICKTWTKEHLKDKLKSYGVENFDDLLLVEDTNNPGMNRGYALLEFSTRPEAMDAFRILQKRDVVFGVDRSAKVSFADSYPQVDDEIMAQVRTVFIDGLPPSWDEDRVKKYLKRYGAIEKVELARNMPAAKRKDFGFVTFDTHDNAVACAEGISNSEIGEGDHKAKVRARLSRPLQRPPRMKHGLRGNFRVGHAASRGGRLPYARPPPPRRPPPRLVRPAVSRLPPIRSHPLKRPVDIRDRRPVMSMPDRARRLPPPERSYDRRPPAPVYPKKSPRREYGRRDELPPPRSRAALDYSPRVPVDRRPSFRDDYSPRGSGYSDLGPRSAPRLSERRAYPDDSYGGKFDRPLPAYRESRGRDYDTISGSKRPYADMDDAPRYQDISVRQSKARLDYDVGGSSARYGDTYSERPGRSHVGYSGSRSISGHDSAYGSSRHGMGYGGSASGGDAGGMYSSSYSGSYTSRGSDVGGSSYSSLYSGRNLGSSSGGYYGGSGSSSYY

SEQ ID NO: 112334 - protein, 128 aa, Setaria italica
  Transcript Sequence Number=SeqID_46360
  Gene Ontology: Mol. function=2 iron, 2 sulfur cluster binding; Cellular component=chloroplast envelope; Biological process =oxidation reduction
  Homolog annotation: Hit_ID=Q10BT2; Match level="QueryCoverage=100%, HitCoverage=36%, E-value=5e-46, Identity=66%"; Hit description=Cell death suppressor protein Lls1, putative, expressed
SSDTMVVAFRNWFRKYCKNRVGWATPQPDQLPPTATKDAVLERYWSHVVQCTSCSAALKAIRALEVALQVASVAIVGFLAVAKETLVKSVARKIMAVSAAALCFAASRWLSNFIEKNFFFQDYSHAYK

SEQ ID NO: 112335 - protein, 105 aa, Setaria italica
  Transcript Sequence Number=SeqID_46361
  Homolog annotation: Hit_ID=Q8S615; Match level="QueryCoverage=92%, HitCoverage=10%, E-value=7e-24, Identity=56%"; Hit description =Putative polyprotein
ILSIQEVNESFYEELPSLLPILEKDSVRRFLRLFSQVGLSMGWGFIITPQTFTQMVKQNALKCAKVALEGKAPELTWFRANPNCMNRHGYFPLHQAAEMFSVDMV

SEQ ID NO: 112336 - protein, 201 aa, Setaria italica
  misc_feature (7)..(7): Xaa can be any naturally occurring amino acid
  misc_feature (27)..(27): Xaa can be any naturally occurring amino acid
  Transcript Sequence Number=SeqID_46362
  Gene Ontology: Mol. function=actin binding; Cellular component =cytoskeleton; Biological process=cytoskeleton organization and biogenesis
  Homolog annotation: Hit_ID=Q6Z3N3; Match level="QueryCoverage=95%, HitCoverage=21%, E-value=3e-96, Identity=86%"; Hit description =Putative villin
  Pfam annotation: Domain name=Gelsolin; Domain location=62-144; Score =8.9; E_value=0.063; Accession=PF00626.14; Description=Gelsolin repeat
FKSKFKXEWPQTPDLKLSSEDGRGKVXQGLNVKGLMKAAPAKEEPQSYIDCTGNLQVWRVNDKDKALLSSSDQSKFYTGDCHIFQYTYPGDDKEECLIGTWFGKKSVEEDRVTAVSLASKMVESTKFQAVQARLYEGKEPIQFFVIFQSLQVFKGGLSSGYKKFIAENGIDDSYSEEGLALFRVQGSGPENNAKQITKLET

SEQ ID NO: 112337 - protein, 112 aa, Setaria italica
  misc_feature (29)..(29): Xaa can be any naturally occurring amino acid
  misc_feature (49)..(49): Xaa can be any naturally occurring amino acid
  Transcript Sequence Number=SeqID_46363
  Gene Ontology: Mol. function=actin binding; Cellular component =cytoskeleton; Biological process=cytoskeleton organization and biogenesis
  Homolog annotation: Hit_ID=Q6Z3N3; Match level="QueryCoverage=61%, HitCoverage=7%, E-value=2e-28, Identity=89%"; Hit description =Putative villin
  Subcellular localization annotation: CTP_CleavageSite=57; ConfidenceScore=5.54e-01
MIELVLILMRYQKPKRRTPVYSGRSTAQXKSQRSRSMSFSPERVRVRGXRSPAFTALAANFESSSNRNLSTPPPVVKKLYPKSLTPDSSNTSSKSSPICRSSWSWFLLVFVP

SEQ ID NO: 112338 - protein, 960 aa, Setaria italica
  Transcript Sequence Number=SeqID_46364
  Gene Ontology: Mol. function=actin binding; Cellular component =cytoskeleton; Biological process=cytoskeleton organization and biogenesis
  Homolog annotation: Hit_ID=Q6Z3N3; Match level="QueryCoverage=98%, HitCoverage=96%, E-value=0.0, Identity=79%"; Hit description =Putative villin
  Pfam annotation: Domain name=Gelsolin; Domain location=150-230; Score= 50.1; E_value=8.5e-12; Accession=PF00626.14; Description=Gelsolin repeat
  Pfam annotation: Domain name=Gelsolin; Domain location=262-340; Score= 36.9; E_value=8.1e-08; Accession=PF00626.14; Description=Gelsolin repeat
  Pfam annotation: Domain name=Gelsolin; Domain location=28-111; Score =74.1; E_value=5.2e-19; Accession=PF00626.14; Description=Gelsolin repeat
  Pfam annotation: Domain name=Gelsolin; Domain location=404-486; Score= 8.9; E_value=0.063; Accession=PF00626.14; Description=Gelsolin repeat
  Pfam annotation: Domain name=Gelsolin; Domain location=532-602; Score= 1.8; E_value=0.31; Accession=PF00626.14; Description=Gelsolin repeat
  Pfam annotation: Domain name=Gelsolin; Domain location=635-715; Score= 41.0; E_value=4.7e-09; Accession=PF00626.14; Description=Gelsolin repeat
  Pfam annotation: Domain name=VHP; Domain location=925-960; Score =65.7; E_value=1.7e-16; Accession=PF02209.11; Description=Villin headpiece domain
  Pfam module annotation: Pfam domain module=Gelsolin::Gelsolin::Gelsoli n::Gelsolin::Gelsolin::Gelsolin::VHP; Domain location=150-230::262 -340::28-111::404-486::532-602::635-715::925-960
MSVSMKDLDPAFRGSGQKDGLEIWRVEDFKPVPVPASSFGKFFMGDSYIILKTTALKNGSLRHDIHYWIGKDTSQDEAGTAAILTVELDAALGGRAVQYREIQGNETEKFLSYFRPCIMPQPGGVASGFKHVEVNAQDHETRLYVCQGKHVVHVKEVPFARSSLNHDDIFILDTKSKIFQFNGSNSSIQERAKALEVVQYIKDTFHEGKCEIASVEDGRMMADAEAGEFWGFFGGFAPLPRRAPAEGNEKHEETAFKLLCFDQGKPEPVNYESLAHELLETNKCYFLDCGAELYVWMGRTTSLQERKGASEAAEKLLSDSNRTKTHIIKVIEGFETVTFKSKFKEWPQTPDLKLSSEDGRGKVAALLKRQGLNVKGLMKAAPAKEEPQSYIDCTGNLQVWRVNDKDKALLSSSDQSKFYTGDCHIFQYTYPGDDKEECLIGTWFGKKSVEEDRVTAVSLASKMVESTKFQAVQARLYEGKEPIQFFVIFQSLQVFKGGLSSGYKKFIAENGIDDSYSEEGLALFRVQGSGPENMQAIQVEPVASSLNSSYCYILHDGNTVFTWAGNLTTALDQELMERQLDVIKPNTQSRSQKEGSETDQFWSLLGGKSEYSSQKMVRELESDPHLFSCILLKGNLKVKEIHHFTQDDLMTEDVFILDCHTSIFVWVGQQVDVKVRLQALDVGEKFVVLDSLMEKLSRETPIFTVTEGSEPPFFTRFFTWDSAKSLMHGNSYQRKLAIVKGGGAPALDKPKRRTPVYSGRSTAQDKSQRSRSMSFSPERVRVRGRSPAFTALAANFESSSNRNLSTPPPVVKKLYPKSLTPDSSNTSSKSSPIAALAGSLDRPTQSPTPESVKDGSESERAKQEEDAKDGAATMTSRVESLTINEDVKENEPEDDEGLPIYPYDRLKTTAADPVTEIDVTRRETYLSLAEFKEKFGMTKEAFSKLPKWKQNRLKIALQLF

SEQ ID NO: 112339 - protein, 85 aa, Setaria italica
  Transcript Sequence Number=SeqID_46365
RTKNALLRTRFRGKLRIQIESVRDLGGNHTKVAHKDPSNIFPPTTLARFGSNTKDENSHETAPKNSKKKTEETSKNTRFSHGFKR

SEQ ID NO: 112340 - protein, 94 aa, Setaria italica
  Transcript Sequence Number=SeqID_46366
SASTTDTESAHRRHSGDPPPPRMSEESVVATDAEEATPPPKSKGKKKKSRPCFPVARIRPRASVPPSSGPQPPSPATFACALKALFSSARLQRK

SEQ ID NO: 112341 - protein, 160 aa, Setaria italica
  Transcript Sequence Number=SeqID_46367
  Gene Ontology: Mol. function=serine-type carboxypeptidase activity; Biological process=proteolysis
  Homolog annotation: Hit_ID=B6TG69; Match level="QueryCoverage=98%, HitCoverage=29%, E-value=4e-44, Identity=58%"; Hit description =Serine carboxypeptidase 1
PYLHGMGLVSDELYENARGNCGGKYSAPSNAACTEAIQAIKNCTRDLSGQHILEPACPDVVWSTKTVALADGISRVMLESAEFLSGFKCPEAEYVLSDIWGNDATIQESLGVRKGTIGEWRRFNHGLSYTEDIQSAVEYHSRLATKGYAALIYSGDHDPS

SEQ ID NO: 112342 - protein, 33 aa, Setaria italica
  Transcript Sequence Number=SeqID_46368
  Gene Ontology: Mol. function=receptor activity; Cellular component =integral to membrane
ISRVPERWRPGVFDVVGHSHQIFHVLVLVGAVR

SEQ ID NO: 112343 - protein, 176 aa, Setaria italica
  Transcript Sequence Number=SeqID_46369
  Gene Ontology: Mol. function=structural molecule activity; Cellular component=integral to membrane; Biological process=cell adhesion
  Homolog annotation: Hit_ID=B9SIR5; Match level="QueryCoverage=100%, HitCoverage=32%, E-value=1e-66, Identity=71%"; Hit description =Triose phosphate/phosphate translocator, non-green plastid, chloroplast, putative
PFLMNTVHFTMQAVASRAIVWVSQGNPRALEGRGQVKMTWKDYSLRVVPTALATALDINLSNISLVFITVTFATMCKSAAPIFILLFAFMFRLEKPSFSLLGIMLIVSFGVLLTVAKETEFNLWGFIFIMLAAVMSGFRWSMTQILLQKEEYGLKNPFTLMSHVTPVMAIVTAIIS

SEQ ID NO: 112344 - protein, 469 aa, Setaria italica
  Transcript Sequence Number=SeqID_46370
  Gene Ontology: Cellular component=integral to membrane
  Homolog annotation: Hit_ID=Q5JNH9; Match level="QueryCoverage=64%, HitCoverage=99%, E-value=1e-126, Identity=76%"; Hit description =Phosphate translocator-related-like
  Pfam annotation: Domain name=DUF6; Domain location=137-271; Score =2.2; E_value=0.057; Accession=PF00892.12; Description=Integral membrane protein DUF6
  Pfam annotation: Domain name=DUF6; Domain location=289-428; Score =17.5; E_value=0.0076; Accession=PF00892.12; Description=Integral membrane protein DUF6
  Pfam annotation: Domain name=DUF606; Domain location=312-425; Score= -42.8; E_value=0.0014; Accession=PF04657.5; Description=Protein of unknown function, DUF606
  Pfam annotation: Domain name=TPT; Domain location=280-428; Score =172.0; E_value=1.8e-48; Accession=PF03151.8; Description=Triose -phosphate Transporter family
  Pfam annotation: Domain name=UAA; Domain location=130-434; Score= -111.0; E_value=8.4e-05; Accession=PF08449.3; Description=UAA transporter family
  Pfam module annotation: Pfam domain module=DUF6::DUF6::DUF606::TPT::UA A; Domain location=137-271::289-428::312-425::280-428::130-434
MGDCAVEDGHGNPHPKEEEGEAPVAAVELDERAGEPREEASGQRKKAGGIRREPSFSRWCRDPSAATPSNGLAAAATSDGDDSEEFELPLLPNAPGGGGSSSLPMDIEAGAAARSEDLPMSPWLIAKVIGLIASWYTLSTCLTLYNKEMLGKHMWKFPAPFLMNTVHFTMQAVASRAIVWFQHRGLEGGASKMTWKDYSLRVVPTALATALDINLSNISLVFITVTFATMCKSAAPIFILLFAFMFRLEKPSFSLLGIMLIVSFGVLLTVAKETEFNLWGFIFIMLAAVMSGFRWSMTQILLQKEEYGLKNPFTLMSHVTPVMAIVTAIISIAMDPWHDFRASHFFDSSAHIIRSSLLLLLGGALAFFMVLTEYVLVSVTSAVTVTVAGIVKEAVTILVAVLFFNDPFTWLKGLGLAIIIFGVSLFNLYKYKRFKKGHHNEEAGTNIQSSNGTSKYVILDDTEDQDDTG

SEQ ID NO: 112345 - protein, 61 aa, Setaria italica
  Transcript Sequence Number=SeqID_46371
  Homolog annotation: Hit_ID=B6UAN0; Match level="QueryCoverage=80%, HitCoverage=11%, E-value=5e-11, Identity=64%"; Hit description=DNA binding protein
MVPSSICHKNNSSDWDCSCSVVWDPIHADCAVPQELDTDEVLEQLKYINKLKKRLGSNQKC

SEQ ID NO: 112346 - protein, 289 aa, Setaria italica
  Transcript Sequence Number=SeqID_46372
  Homolog annotation: Hit_ID=B6UAN0; Match level="QueryCoverage=88%, HitCoverage=59%, E-value=3e-65, Identity=48%"; Hit description=DNA binding protein
  Pfam annotation: Domain name=ELM2; Domain location=170-213; Score =14.2; E_value=0.0071; Accession=PF01448.16; Description=ELM2 domain
  Pfam annotation: Domain name=PHD; Domain location=78-126; Score=38.7; E_value=2.3e-08; Accession=PF00628.21; Description=PHD-finger
  Pfam annotation: Domain name=zf-CW; Domain location=222-275; Score =12.2; E_value=0.00064; Accession=PF07496.7; Description=CW-type Zinc Finger
  Pfam module annotation: Pfam domain module=ELM2::PHD::zf-CW; Domain location=170-213::78-126::222-275
MVSPNVEIPAGPHSNGNNGHQQGTFASPIAKPITELTSARDLCISILKSEIFPTKGSELSRTSSTIDHDDNQSSPLFECVRCGSMEDPSKMLICDCCEGAFHLSCCDPRVKKIPEEEWYCLVCKKKKPKRQRGKLTSPKRVLPKDIQRPRRGLGPIRDMLVDPESYVTDVRIGSKFQADVPEWSGPISSSKDQFPEPTELDPNETTMLGCLQRFEDKKTSVGNWIQCREVLDAGVVCGKWRRAPLFVVQSSDWDCSCSVVWDPIHADCAVPQELDTDEVLEQLKYINKV

SEQ ID NO: 112347 - protein, 88 aa, Setaria italica
  Transcript Sequence Number=SeqID_46373
  Gene Ontology: Mol. function=serine-type carboxypeptidase activity; Cellular component=extracellular region; Biological process =proteolysis
  Homolog annotation: Hit_ID=B6SWY3; Match level="QueryCoverage=98%, HitCoverage=17%, E-value=1e-33, Identity=78%"; Hit description =Serine carboxypeptidase
RTWLYSGDIDAVCPVTSTLYSLDILGLQINSPWRAWYSDDGEVGGYVVEYKGLVFATVRGAGHMVPTYQPQRALTLFSSFLQGKMPPE

SEQ ID NO: 112348 - protein, 160 aa, Setaria italica
  Transcript Sequence Number=SeqID_46374
  Gene Ontology: Mol. function=nucleotide binding; Biological process =defense response
  Homolog annotation: Hit_ID=Q5Z5Z4; Match level="QueryCoverage=58%, HitCoverage=8%, E-value=7e-17, Identity=50%"; Hit description =Putative Pib
RTKFVLAWIDQLFILRKLKLRLTMITQHEVDLLRDLPNLNTLCLCFKDFEYGELRFSGTGCRFRLLWVLEIACNSRLQSVTFADNAMPGLEVLKIRCYNVPSSLKFYGLEKLQGLREILLSGLYDDKVKQHLQDQLKEHPREMKPVLKEEAGSSRWALIS

SEQ ID NO: 112349 - protein, 94 aa, Setaria italica
  misc_feature (18)..(18): Xaa can be any naturally occurring amino acid
  Transcript Sequence Number=SeqID_46375
DFPRRSPILVLLSPKHAXLRSSDGIRCFSAGMIASDILATLLALMPAPRRAARAAWAPHPRSSVRVASPFYPSDHERTRKSPKMSEECGEMEGQ

SEQ ID NO: 112350 - protein, 121 aa, Setaria italica
  Transcript Sequence Number=SeqID_46376
  Gene Ontology: Mol. function=iron ion binding; Cellular component =integral to membrane; Biological process=transport
  Homolog annotation: Hit_ID=Q7XRV2; Match level="QueryCoverage=100%, HitCoverage=17%, E-value=2e-59, Identity=90%"; Hit description =Probable metal-nicotianamine transporter YSL6
WTAALEKLGVVSRPFTKQENTVIQTCVVACYGLAFSGGFGSYMLAMDQRTYELIGPDYPGNRAVDVKNPSLGWMIGFMFVVSFLGLFSLVALRKVMVIDYKLTYPSGTATAMLINSFHTST

SEQ ID NO: 112351 - protein, 82 aa, Setaria italica
  Transcript Sequence Number=SeqID_46377
  Gene Ontology: Mol. function=iron ion binding; Cellular component =integral to membrane; Biological process=transport
  Homolog annotation: Hit_ID=Q7XRV2; Match level="QueryCoverage=100%, HitCoverage=12%, E-value=7e-41, Identity=96%"; Hit description =Probable metal-nicotianamine transporter YSL6
CGFDKFPSLGLEAFKNTFYFDFSPTYIGCGLICPHIVNCSTLLGAIISWGFLWPYISTKAGDWYPANLGSNDFKGLYGYKVW

SEQ ID NO: 112352 - protein, 541 aa, Setaria italica
  Transcript Sequence Number=SeqID_46378
  Gene Ontology: Mol. function=iron ion binding; Cellular component =integral to membrane; Biological process=transport
  Homolog annotation: Hit_ID=Q7XRV2; Match level="QueryCoverage=99%, HitCoverage=79%, E-value=0.0, Identity=91%"; Hit description =Probable metal-nicotianamine transporter YSL6
  Pfam annotation: Domain name=OPT; Domain location=1-523; Score=358.3; E_value=1.4e-104; Accession=PF03169.7; Description=OPT oligopeptide transporter protein
NTSLIPDYPGNRAVDVKNPSLGWMIGFMFVVSFLGLFSLVALRKVMVIDYKLTYPSGTATAMLINSFHTSTGAELADKQVRCLGKYLSISFIWNCFKWFFSGVGDSCGFDKFPSLGLEAFKNTFYFDFSPTYIGCGLICPHIVNCSTLLGAIISWGFLWPYISTKAGDWYPANLGSNDFKGLYGYKVFISVSVILGDGLYNLIKIIYATIKEIMNARAKQGRLPLGRVQDDDEGSKLSAEEKFLNETFIKDSIPPWLAGSGYVGLAAISTATVPMIFPQIKWYLVLSAYVVAPLLAFCNSYGTGLTDWNLASTYGKIGLFIFASWVGQNGGVIAGLAACGVMMSIVSTAADLMQDFKTGYLTLSSPRSMFVSQLIGTALGCVIAPLTFWLYWSAFDIGNPDGPFKAPYAVIFREMSILGVEGFSALPQHCLAICSFFFIASLVINLLRDVTPKNVSRFIPIPMAMAIPFYIGAYFAIDMFVGTVILFVWERMNRKECEDFAGAVASGLICGDGIWTVPSAILSILRIDPPICMYFKPSLAS

SEQ ID NO: 112353 - protein, 42 aa, Setaria italica
  Transcript Sequence Number=SeqID_46379
  Gene Ontology: Mol. function=serine-type carboxypeptidase activity; Cellular component=extracellular region; Biological process =proteolysis
  Homolog annotation: Hit_ID=B6TSK4; Match level="QueryCoverage=100%, HitCoverage=8%, E-value=4e-13, Identity=88%"; Hit description=Serine carboxypeptidase K10B2.2
EERGRALFYWLTEADGDAASKPLVLWLNGGPGCSSVAYGASE

SEQ ID NO: 112354 - protein, 65 aa, Setaria italica
  Transcript Sequence Number=SeqID_46380
  Subcellular localization annotation: CTP_CleavageSite=38; ConfidenceScore=5.09e-01
TPIASSALPHLTQQFRSNVNQGLSRNPKMTKHINKYTRTTAEAKKWEWITHRQAEDDHLLREEGG

SEQ ID NO: 112355 - protein, 425 aa, Setaria italica
  Transcript Sequence Number=SeqID_46381
  Homolog annotation: Hit_ID=B8Q893; Match level="QueryCoverage=99%, HitCoverage=85%, E-value=1e-103, Identity=51%"; Hit description=SKIP interacting protein 7 (Fragment)
RYHHEIDSLARQVTEDKMARRNKDQEKIKAAIRSLQEELEDERRLRKHSEALHRKLGKELSDMKSSFCKAAKALEKEKNTTCLLEDLCDEFAKGIRNYEEEVRMLKQKHVKEYEHKFDKSVVHISEAWLDERMQMQKTGTREDLSGKTSITERLSSEIESFLHHAKRFGNCKNDNLDIGNEKRDASFCQQSLESVHLNGATSAPRLAEDDDGSSIASDLHCFELNMHGGAIKSHDLAGTRRRVISSMHSPMRRLEYSNGVSVEGSPMSNAPTCSRKDKARSSIGRQQFIASTPEISSRNDAGLASTDEQNETVMTQVSRQLRDDLLKIKSEAPQHAYLGHRSNQPRTNQFHEYTTARDLCDVRSPARHLNNPAKSLECEISESPAHQLVGAKENTLKAKLLQARLEGQHARMSSSVFPLISTRRK

SEQ ID NO: 112356 - protein, 138 aa, Setaria italica
  misc_feature (8)..(8): Xaa can be any naturally occurring amino acid
  Transcript Sequence Number=SeqID_46382
AVTKSEPXEKALSSDAQPTQVITELRRSYTSKLEESEKRKQELLAQLAAEEQHGHELTKIVRELLPTPKKTANLQRQPRHRRRSNDRSKVSKRLTEEAEQYFEDFLSNVEDTDFSSFDGERSDTSSTRKDVLHHAMME

SEQ ID NO: 112357 - protein, 381 aa, Setaria italica
  Transcript Sequence Number=SeqID_46383
  Subcellular localization annotation: CTP_CleavageSite=64; ConfidenceScore=5.66e-01
GGITITKSSSGNSLQNSFNKPSKANQALKRSTSQKDFFYSRDSSSSHSSLTDDDSRSSHSFHIRNQKAVYGLDKDHQIGDEAGNVLYDVMRKEVRQAVEEIRTQLEKAVTKSEPPEKALSSDAQPTQVITELRRSYTSKLEESEKRKQELLAQLAAEEQHGHELTKIVRELLPTPKKTANLQRQPRHRRRSNDRSKVSKRLTEEAEQYFEDFLSNVEDTDFSSFDGERSDTSSTRKDVLHHAMMETPVALPKVASPAEADGVVLPWLQWETANDLQTSPCKTKAEGESMACSTSNQTVSSRGSWSPGDYSTSTASKDKLLARFEEVGIRQSSCPHFAGTSSFHIDDYLHLRQSEDLLFEKWRQKQRIESGGLFLCSRPTIL

SEQ ID NO: 112358 - protein, 62 aa, Setaria italica
  Transcript Sequence Number=SeqID_46384
LSIISQCLTGDEAMKSKKTSGRPRTNVHFLVTTTLCCCCFILLFFLFWVHVKGIFDHLFLGT

SEQ ID NO: 112359 - protein, 79 aa, Setaria italica
  Transcript Sequence Number=SeqID_46385
  Homolog annotation: Hit_ID=Q7XKR2; Match level="QueryCoverage=83%, HitCoverage=9%, E-value=4e-17, Identity=66%"; Hit description =OSJNBa0053B21.9 protein
CSRLAEKRRSEAKLHPCDNNIKLNGVLSDKPGKGVKLCNSRIVDTQVPGTDDTNPEQRRVPVSIDVRVWDINGHRTHAS

SEQ ID NO: 112360 - protein, 378 aa, Setaria italica
  misc_feature (3)..(3): Xaa can be any naturally occurring amino acid
  misc_feature (24)..(24): Xaa can be any naturally occurring amino acid
  misc_feature (33)..(33): Xaa can be any naturally occurring amino acid
  misc_feature (58)..(58): Xaa can be any naturally occurring amino acid
  misc_feature (217)..(217): Xaa can be any naturally occurring amino acid
  misc_feature (342)..(342): Xaa can be any naturally occurring amino acid
  Transcript Sequence Number=SeqID_46386
  Gene Ontology: Mol. function=heat shock protein binding; Biological process=response to stress
  Homolog annotation: Hit_ID=Q7XKR2; Match level="QueryCoverage=98%, HitCoverage=51%, E-value=1e-162, Identity=74%"; Hit description =OSJNBa0053B21.9 protein
VEXVAATAGMTVIADAGRVNGTVXEKFRSGSKXGEKANVLREIFQLDTRALLLEKAKXLSVSSKLQGLNILSSSQFAEKRKTDRREKHVENNIKVNGIFSDNPINKCKKYSSKYADVEIPATDELNPEQKRVPVSIDVPDPDFHDFDKDRTERAFGNDQVWATYDSEDGMPRLYAMVQKVISMKPFRIRMSFLNSKSNSELAPINWIASGFTKTCGXFRVGRYQITETVNIFSHRVSWTKGPRGIIRIIPKKGDTWAVYRNWSSDWNELTPDDVIYKYEIVEVIDDFTEEQGVNVIPLLKVAGFKAVFHRHTGPDVVRRIPKEELFRFSHRVPSRLLTGEEXNNAPKGCHELDPAATPVDLLKVIEDVKEDTVQGSSD

SEQ ID NO: 112361 - protein, 733 aa, Setaria italica
  Transcript Sequence Number=SeqID_46387
  Gene Ontology: Mol. function=heat shock protein binding; Biological process=response to stress
  Homolog annotation: Hit_ID=Q7XKR2; Match level="QueryCoverage=99%, HitCoverage=100%, E-value=0.0, Identity=77%"; Hit description =OSJNBa0053B21.9 protein
  Pfam annotation: Domain name=DnaJ; Domain location=68-129; Score =108.3; E_value=2.7e-29; Accession=PF00226.23; Description=DnaJ domain
MSEEYNMDEALKAKDVAENKFRAHDIRGARKYAIKAQTLCPSLEGISQMVSTLEVHLAAESKIDGESDWYRILSLGAFADEEEVKKQYRKLALLLHPDKNKSVGAEEAFKLISEAWSVLSDESRKMLYDEKRRNHSVVNVTNGIYTYDKKANKRARKNAAAAAAAAAAAAAAEATTRPVGADTFWTSCNRCRMQYEYLRIYLNHNLLCPNCHHAFLAVETGFPCNGTSSSFSWSTKQQPQQNHNSTKHSYGSTSRTSSIPGTGNGGYQQDNTYDSYSNQSFQWNHYSKTAPAAGTNVYSTQASEKQRRKHDESYSYNYSASENTYVHEKTASRRGRFSKRRRHNYDGYTAMDYGGDNKETVAASTEPTATFTDVGRVNGTSVERFRSAVSGRRANILGEIAQIDTRGLLLEKAKAALREKLQELNITSSRLAEKRRSEAKLHPCDNNIKLNGVLSDKPGKGVKLCNSRIVDTQVPGTDDTNPEQRRVPVSIDVPDPDFHDFDKDRTERAFDSDQVWATYDSEDGMPRLYVMVQKVLSMRPFRIRMSFLNSKSNIELAPINWVASGFQKTCGDFRVGRYQVTETVNIFSHRVSWTKGPRGIIRIIPKKGDTWAVYRNWSSDWNELTPDDVIYKYEIVEVIDDFTEEQGLTIIPLLKVAGFKAVFHRHMDPKEVRRIPKEELFRFSHRVPSRLLTGEEGNNAPKGCHELDPAATPVDLLKVVTEVKEDAAAQTAK

SEQ ID NO: 112362 - protein, 149 aa, Setaria italica
  Transcript Sequence Number=SeqID_46388
IVINRRVCPHNAPVGADEFDFDNFVPEEKEFEDQKITEKGLSDAYQNVLERLAQLKKHGKVSKGADRRKRWKGGLELEPWMDSVDDGWKKDMLLEDVVDIDIGYDAPPPSFTAGMELKKQRRARIEAAKLRIDAIRKAPAAPRLSTKVT

SEQ ID NO: 112363 - protein, 59 aa, Setaria italica
  Transcript Sequence Number=SeqID_46389
  Subcellular localization annotation: CTP_CleavageSite=50; ConfidenceScore=5.27e-01
SPVTPWSSLNPPTTLNNAGQGSRCWPTDQPKASLEMLRRFTQGKLKESVPESMVFKAVM

SEQ ID NO: 112364 - protein, 499 aa, Setaria italica
  Transcript Sequence Number=SeqID_46390
  Gene Ontology: Mol. function=serine-type carboxypeptidase activity; Cellular component=vacuole; Biological process=proteolysis
  Homolog annotation: Hit_ID=P37891; Match level="QueryCoverage=94%, HitCoverage=95%, E-value=0.0, Identity=88%"; Hit description=Serine carboxypeptidase 3
  Pfam annotation: Domain name=Peptidase_S10; Domain location=77-483; Score=610.1; E_value=2.2e-180; Accession=PF00450.14; Description =Serine carboxypeptidase
MATSRLLVFLCFAAAVAVAAAGEDTLHLPRDASFPAAQAERLIRALNLLPKEAGPAGSGDAPSVAPGELLERRVRLPGVPDGIQDLGHHAGYFRLPHTHDARMFYFFFESRGKKEDPVVIWLTGGPGCSSELAVFYENGPFTIANNMSLAWNKFGWDTISNIIFVDQPTGTGFSYSSDDRDTRHDETGVSNDLYDFLQVFFKKHPEFAKNDFYITGESYAGHYIPAFASRVHQGNKANEGIHINLKGFAIGNGLTDPQIQYKAYTDYALEMNLIGKSDYERINRFIPPCELAIKMCGTDGKASCMAAYMVCNNIFNSIMKLVGTKNYYDVRKECEGKLCYDFSNLEKFFGDKAVKEALGVGDIEFVSCSSTVYEAMLTDWMRNLEVGIPALLEDGINVLIYAGEYDLICNWLGNSRWVHSMEWSGQKDFVSSSESSFVVDGAEAGVLKSHGPLSFLKVHDAGHMVPMDQPKASLEMLRRFTEGKLKESVPESMVFKAVM

SEQ ID NO: 112365 - protein, 147 aa, Setaria italica
  Transcript Sequence Number=SeqID_46391
HFIEHVLLYLKSKSLLHDIAIVEMMISRCLERHIARSIRAIVMEYGVDIQMSTALSMLCGSECMTMPLQILSQVSIDAVAKEGENEEDVISSEERLVIHVCGSKVWPLISSILLVLQVDAHLYLFSCCAVRWAYGVLRTWEDIKPLR

SEQ ID NO: 112366 - protein, 168 aa, Setaria italica
  Transcript Sequence Number=SeqID_46392
KWENSHWDVVKYSRHFIEHVLLYLKSKSLLHDIAIVEMMISRCLERHIARSIRAIVMEYGVEGMLSTAWGCFEGSECMTMPLQILSQVSIDAVAKEGENEEDVISSEERLVIHVCGSKSGGLMVYSELGRTYNPSDDLASEESNGLPAAPIVRNLSLAGLKDFLEQKG

SEQ ID NO: 112367 - protein, 146 aa, Setaria italica
  Transcript Sequence Number=SeqID_46393
  Gene Ontology: Mol. function=nucleic acid binding
PCVCRRGECAVRRDEQGRWTYVCSSQPKCKYVALCEEAGLSPESQPAVRSHPKPSNPCVFNIPSNHVPEPRTPVDNVNPRGAGATTPINVSPQAPLNSTFQGAGTATPVHVPVPRTPVNNVNLRGAGATTPVNVNPRAPLNSTFQG

SEQ ID NO: 112368 - protein, 163 aa, Setaria italica
  misc_feature (79)..(79): Xaa can be any naturally occurring amino acid
  Transcript Sequence Number=SeqID_46394
  Gene Ontology: Mol. function=oxidoreductase activity
  Homolog annotation: Hit_ID=B6ST46; Match level="QueryCoverage=100%, HitCoverage=28%, E-value=1e-61, Identity=71%"; Hit description =Oxidoreductase
DIPVKPRKGHLLVVEKFDKVKLNHALMEVGYVDHQVAKSSSTHMASESSEDEHGALSISMTATLDTKGNLVLETRIPFXGTYRKWLNILQLYVTGSSREFKGFSREVDKSVVKCIWERAGEFFPAMKNVPLDIDQNTQIRIGHRPYMPDGKPVIGFIPDLPNV

SEQ ID NO: 112369 - protein, 256 aa, Setaria italica
  misc_feature (48)..(48): Xaa can be any naturally occurring amino acid
  Transcript Sequence Number=SeqID_46395
  Gene Ontology: Mol. function=protein serine/threonine kinase activity; Cellular component=plasma membrane; Biological process =protein amino acid phosphorylation
  Homolog annotation: Hit_ID=B3GN93; Match level="QueryCoverage=99%, HitCoverage=43%, E-value=5e-97, Identity=67%"; Hit description =Calcium-dependent protein kinase 21
  Pfam annotation: Domain name=efhand; Domain location=129-157; Score =16.4; E_value=0.12; Accession=PF00036.24; Description=EF hand
  Pfam annotation: Domain name=efhand; Domain location=165-193; Score =29.6; E_value=1.2e-05; Accession=PF00036.24; Description=EF hand
  Pfam annotation: Domain name=efhand; Domain location=201-229; Score =35.7; E_value=1.8e-07; Accession=PF00036.24; Description=EF hand
  Pfam annotation: Domain name=efhand; Domain location=93-121; Score =25.9; E_value=0.00017; Accession=PF00036.24; Description=EF hand
  Pfam module annotation: Pfam domain module=efhand::efhand::efhand::efh and; Domain location=129-157::165-193::201-229::93-121
RGGINLQRDPWPNGLPECKDLVKKMLDPDPRTRLTAKQVLEHPWLKNXADKASNVSLGEVVRAKLKQFSSMNKFKKKALGVVAMNLPVEEIDKYTQMFNTMDKDNDGNLSLEELKEGFRINGHPVPEEEIKMLLEAGDIHGNGTLECEEFVTVLLHIKKMNNDEYLPKAFKFFDKDGNGFIEMEELMEALGDGELKPNGQVVNDIIREVDKDKDGRISYPEFESMMKGGSDWRNGSRRYSRANFDSLSHKLCKDIL

SEQ ID NO: 112370 - protein, 275 aa, Setaria italica
  Transcript Sequence Number=SeqID_46396
  Gene Ontology: Mol. function=oxidoreductase activity; Cellular component=glycerol-3-phosphate dehydrogenase complex; Biological process=glycerol-3-phosphate metabolic process
  Homolog annotation: Hit_ID=B6ST46; Match level="QueryCoverage=100%, HitCoverage=56%, E-value=1e-140, Identity=86%"; Hit description =Oxidoreductase
  Pfam annotation: Domain name=DAO; Domain location=8-254; Score=-20.5; E_value=0.00025; Accession=PF01266.16; Description=FAD dependent oxidoreductase
LFLPQDCQIDAFQAVSLIEKTNNSYSSEGRYMELYNDPAMSLIRSEVTGAVEAVQTSSNILYGRKAIVIASGAWTRSLLHSFLEPALTLDIPVKPRKGHLLVVEKFDKVKLNHALMEVGYVDHQVAKSSSTHMASESSEDEHGALSISMTATLDTKGNLVLGSSREFKGFSREVDKSVVKCIWERAGEFFPAMKNVPLDIDQNTQIRIGHRPYMPDGKPVIGFIPDLPNVLIATGHEGNGLTLALGTAEMVSDMILGNPGKVDYSPFAIKHRFSG

SEQ ID NO: 112371 - protein, 64 aa, Setaria italica
  Transcript Sequence Number=SeqID_46397
  Gene Ontology: Mol. function=binding
  Homolog annotation: Hit_ID=B9V0L8; Match level="QueryCoverage=98%, HitCoverage=25%, E-value=2e-16, Identity=51%"; Hit description =Tubulin-specific chaperon-like protein
YPLVCLAYPLLRVSAALEDIQKTIRELQLDENRKRDLATALHAQFKDWLYASGNIRQLYCLQGD

SEQ ID NO: 112372 - protein, 95 aa, Setaria italica
  Transcript Sequence Number=SeqID_46398
LKVILVSFMWVLCGKLDLFSCRLTGNPSVSCPQLRAISASSTVYKAINHPMNCAHKWKYTCKTVYPLPTPKHSTIVEADLPWRLERIPPAHPASL

SEQ ID NO: 112373 - protein, 443 aa, Setaria italica
  Transcript Sequence Number=SeqID_46399
  Gene Ontology: Mol. function=binding
  Homolog annotation: Hit_ID=A2Q4U5; Match level="QueryCoverage=86%, HitCoverage=66%, E-value=1e-149, Identity=67%"; Hit description =Tubulin binding cofactor C
  Pfam annotation: Domain name=TBCC; Domain location=251-374; Score =184.8; E_value=2.4e-52; Accession=PF07986.4; Description=Tubulin binding cofactor C
PEQAALALGTLAAVLPAEDPALGDGAGDADIHDVLLFLYVQSYKRLVPRSAHKDSPAVADVWPSTSAFDGYLSALSPIQLVRSNSRRFMPSQADEEIHQLSYLQKHMANILTLLADSVEGEGDDSLVLTMETFEHLGFLVQFSEGSSLSQAATFFANSDPDMPAAPVPAAQVLDWMSQNIASALEYSAERSAAKESNQQAMSDLDVTMAEANTSHPRNSTPSSNPAYYRNVTFVEGFSKTSVVKHASDIKGNSIKVLNCHDSVIYILAPLKYATVYGCSDATIVLGAVGKVVKVEHCERVHIIAAAKRICIANCRECLFYLGCLFYLGVNHQPLVLGDNHKLQVAPFNTCYPQLRDHLIQVGVDPSVNKWDQPFALGVVDPHDSLSHPAGVSDVKAESATCLDPDLFTNFLVCEKYILGFRSVNQREYREKKGRSTDPISLPP

SEQ ID NO: 112374 - protein, 88 aa, Setaria italica
  Transcript Sequence Number=SeqID_46400
  Gene Ontology: Mol. function=binding
  Homolog annotation: Hit_ID=B9V0L8; Match level="QueryCoverage=93%, HitCoverage=28%, E-value=8e-35, Identity=66%"; Hit description =Tubulin-specific chaperon-like protein
KAFFLQIPSWFGDERQGPTTCNPFPLPEIYGACQSKKHSALEDIQKTIRELQLDENRKRDLATALHAQFKDWLYASGNIRQLYCLQGD

SEQ ID NO: 112375 - protein, 58 aa, Setaria italica
  Transcript Sequence Number=SeqID_46401
AIVHVHFFLHPCVNATGWLGEQVESSPVSREGQLRQSSNVLESAKDRQSCKVVTYQFK

SEQ ID NO: 112376 - protein, 385 aa, Setaria italica
  Transcript Sequence Number=SeqID_46402
  Gene Ontology: Mol. function=binding
  Homolog annotation: Hit_ID=A2Q4U5; Match level="QueryCoverage=100%, HitCoverage=67%, E-value=1e-135, Identity=59%"; Hit description =Tubulin binding cofactor C
  Pfam annotation: Domain name=TBCC; Domain location=151-268; Score =201.5; E_value=2.3e-57; Accession=PF07986.4; Description=Tubulin binding cofactor C
VANILTLLADSVDGEGDDSMVLTMETFEHLGFLLQLSEGTPLSQAASFFANSDPDMPAAPVPAALVHDWILQHIASTLEFMAEKSSAKENSQHNASDPDVTMSDAVTNTRIHSSSPTGTSGPNYPGHYRNTTFVEGFSKTSVVKQASDMTGHSIKVLNCHDSVIYILAPLKYATIYGCSDTTIVLGAIGKVVKVEHCERVHIIAAAKRICIANCRECLFYLGVNHQPLVLGDNHKLQVAPFNTCYPQLRDHLIQVGVDPSVNQWDQPFVLGVVDPHDSLSHPAGVSDVKAESATCLDPDLFMNFLIPSWFEPQGPTKYNPFTLPEVYWASQRKKHASLEDIQKNIRELEIDDNRKKELACALHAQFKDWLYASGNIRQLYCLQGE

SEQ ID NO: 112377 - protein, 61 aa, Setaria italica
  Transcript Sequence Number=SeqID_46403
GAVLSATLIVFNIQSMVKNFCLKNLLYCYRASFPVLSYGVVRIFTDLDITVCSSTSATESE

SEQ ID NO: 112378 - protein, 153 aa, Setaria italica
  misc_feature (95)..(95): Xaa can be any naturally occurring amino acid
  Transcript Sequence Number=SeqID_46404
MHMSSDRPLEALLAAARGAIADLHLPTIHIPGSNSRSPNPNPDCLLHLHVVVTNFFHRPLRSLARCFRGDDAKPKRRGGKHSRPLRDRERSAAAXPAAQQLELLLCIAFDAFDACKHKGAEFGIATRQSNQFQLLRKVIDGKRADFDGFLSNL

SEQ ID NO: 112379 - protein, 78 aa, Setaria italica
  Transcript Sequence Number=SeqID_46405
TLLPATVTAGTGRMHGMMMTRCCVQAIINVDPRLQATIDGSLLDGGKILLVIILFYKKNKVIILGGNHARRRGYVMTT

SEQ ID NO: 112380 - protein, 51 aa, Setaria italica
  Transcript Sequence Number=SeqID_46406
  Gene Ontology: Mol. function=threonine-type endopeptidase activity; Cellular component=proteasome core complex; Biological process =ubiquitin-dependent protein catabolic process
  Homolog annotation: Hit_ID=P52428; Match level="QueryCoverage=94%, HitCoverage=17%, E-value=7e-22, Identity=91%"; Hit description =Proteasome subunit alpha type-1
CCCRFCTQRSWKRPYGVGFLVAGLDETGAHLYYNCPSGNYFEYQAFAIGSR

SEQ ID NO: 112381 - protein, 161 aa, Setaria italica
  misc_feature (59)..(59): Xaa can be any naturally occurring amino acid
  Transcript Sequence Number=SeqID_46407
  Gene Ontology: Mol. function=threonine-type endopeptidase activity; Cellular component=proteasome core complex; Biological process =ubiquitin-dependent protein catabolic process
  Homolog annotation: Hit_ID=P52428; Match level="QueryCoverage=99%, HitCoverage=58%, E-value=5e-81, Identity=90%"; Hit description =Proteasome subunit alpha type-1
  Pfam annotation: Domain name=Proteasome; Domain location=1-155; Score= 145.4; E_value=1.8e-40; Accession=PF00227.18; Description=Proteasome A-type and B-type
GKVFRVADHAGVALAGLTADGRVLSRFLRNECINHSLVYEAPLPVSRLALRLADKAQVXARQRSWKRPYGVGFLVAGLDETGAHLYYNCPSGNYFEYQAFAIGSRSQVAKTFLERRFKGYKDYTPEQLIKDALSAIKETLQGEKLTSSNCTVAIIGQKADG

SEQ ID NO: 112382 - protein, 67 aa, Setaria italica
  Transcript Sequence Number=SeqID_46408
PYIFAFKISRDEKDKRLYEFLSRNFQESCTPCCCLATGVCHRIVGEQGPITKPFGQTRTLQEHLFEN

SEQ ID NO: 112383 - protein, 66 aa, Setaria italica
  Transcript Sequence Number=SeqID_46409
  Gene Ontology: Mol. function=aspartyl esterase activity; Cellular component=cell wall; Biological process=cell wall modification
NIIIPRGWYNRGAPAGGGTVFYGQYKCTGPGASYAGRVAWSRELTDDEAKPFISLSFIDGTEWVRL

SEQ ID NO: 112384 - protein, 116 aa, Setaria italica
  Transcript Sequence Number=SeqID_46410
RQVGGGPALHALAAGNSFFPQQFYSDDDDLLESKKHDNLFSSILPPLESPTAAIAACAQQRAAAHVVASENDDELMVQGGGGHAAAAAAGAIDWNFLDTLLSTTTSQLLEPSTLLQ

SEQ ID NO: 112385 - protein, 97 aa, Setaria italica
  misc_feature (73)..(73): Xaa can be any naturally occurring amino acid
  Transcript Sequence Number=SeqID_46411
  Gene Ontology: Mol. function=hydrolase activity, acting on acid anhydrides, catalyzing transmembrane movement of substances; Cellular component=integral to membrane; Biological process=copper ion transport
  Homolog annotation: Hit_ID=B9SCE3; Match level="QueryCoverage=100%, HitCoverage=9%, E-value=1e-28, Identity=62%"; Hit description=Copper- transporting atpase p-type, putative
VDTIEMGGNGRLKAQVQNPYTRGASNDAHEASKMLNLLRSSLFLSIPVFFIRMVCPSIPFLSTLLSMHCGPFXYGDLLKWILVSIVQFVVGKRFYVA

SEQ ID NO: 112386 - protein, 117 aa, Setaria italica
  Transcript Sequence Number=SeqID_46412
  Gene Ontology: Mol. function=hydrolase activity, acting on acid anhydrides, catalyzing transmembrane movement of substances; Cellular component=integral to membrane; Biological process=copper ion transport
  Homolog annotation: Hit_ID=Q655X4; Match level="QueryCoverage=94%, HitCoverage=11%, E-value=3e-49, Identity=86%"; Hit description =Putative ATP dependent copper transporter
SCPYVWVLAIGAGTDIAIEAADYVLVRNNLEDVITAIDLSRKTFSRIRWNYFFAMAYNVVAIPVAAGALFPFTGLQMPPWLAGACMAFSSVSVVCSSLLLRRYRKPRLTTVLQITVE

SEQ ID NO: 112387 - protein, 222 aa, Setaria italica
  Transcript Sequence Number=SeqID_46413
  Gene Ontology: Mol. function=hydrolase activity, acting on acid anhydrides, catalyzing transmembrane movement of substances; Cellular component=integral to membrane; Biological process=copper ion transport
  Homolog annotation: Hit_ID=Q655X4; Match level="QueryCoverage=100%, HitCoverage=23%, E-value=1e-113, Identity=90%"; Hit description =Putative ATP dependent copper transporter
  Pfam annotation: Domain name=Hydrolase; Domain location=1-119; Score =9.3; E_value=0.0069; Accession=PF00702.18; Description=haloacid dehalogenase-like hydrolase
VDLESNAKTGILVAYDGDFVGLMGITDPLKREAAVVVEGLKKLGVHPVMLTGDNWRTAQAVAKEVGIEDVRAEVMPAGKADVIRSLQKDGSVVAMVGDGINDSPALAAADVGMAIGAGTDIAIEAADYVLVRNNLEDVITAIDLSRKTFSRIRWNYFFAMAYNVVAIPVAAGALFPFTGLQMPPWLAGACMAFSSVSVVCSSLLLRRYRKPRLTTVLQITVE

SEQ ID NO: 112388 - protein, 180 aa, Setaria italica
  Transcript Sequence Number=SeqID_46414
  Gene Ontology: Mol. function=hydrolase activity, acting on acid anhydrides, catalyzing transmembrane movement of substances; Cellular component=integral to membrane; Biological process=copper ion transport
  Homolog annotation: Hit_ID=Q655X4; Match level="QueryCoverage=95%, HitCoverage=18%, E-value=7e-78, Identity=80%"; Hit description =Putative ATP dependent copper transporter
EKAVVTTAKVFSGMDLGDFLTLVASAEASSEHPLAKAVLDYAYHFHFFGKFPSSKDGIEQRRDEVLSKWLLEAEDFSAVPGKGVQCSINGKHVLVGNRTLITENGVTIPPEAESFLVDLESNAKTGILVAYDGDFVGLMGITDPLKREAAVVVQGLKKMGAHLFLVTGEQTRKELDNKDG

SEQ ID NO: 112389 - protein, 777 aa, Setaria italica
  Transcript Sequence Number=SeqID_46415
  Gene Ontology: Mol. function=hydrolase activity, acting on acid anhydrides, catalyzing transmembrane movement of substances; Cellular component=integral to membrane; Biological process=copper ion transport
  Homolog annotation: Hit_ID=Q655X4; Match level="QueryCoverage=98%, HitCoverage=82%, E-value=0.0, Identity=69%"; Hit description =Putative ATP dependent copper transporter
  Pfam annotation: Domain name=E1-E2_ATPase; Domain location=282-522; Score=263.5; E_value=5e-76; Accession=PF00122.12; Description=E1-E2 ATPase
  Pfam annotation: Domain name=HMA; Domain location=10-74; Score=66.8; E_value=8.3e-17; Accession=PF00403.18; Description=Heavy-metal -associated domain
  Pfam annotation: Domain name=HMA; Domain location=84-149; Score=1.7; E_value=1.5; Accession=PF00403.18; Description=Heavy-metal -associated domain
  Pfam annotation: Domain name=Hydrolase; Domain location=526-774; Score=106.0; E_value=1.3e-28; Accession=PF00702.18; Description =haloacid dehalogenase-like hydrolase
  Pfam module annotation: Pfam domain module=E1-E2_ATPase::HMA::HMA::Hyd rolase; Domain location=282-522::10-74::84-149::526-774
PKSQKTLSAQFRIGGMTCANCVNSVEGILKKLPGVKGAVVALATSLGEVEYDPSAISKDEIVQAIEDAGFDAVLLQSSEQNKVLLSVTGLHTEGDVDVLHDILKKIEGLRQFGVNFANSEVEIVFDPEVVGLRQIVDTIEMESNGRLKAHVQNPYSRAASNDAQEASKMLHLLRSSLLLSIPVFFIRMVCPHIPLISSFVLMHFGPFRIGDLLKWILVSMVQFVIGKRFYVAAYRALRHGSTNMDVLVVIGTTASYVYSVCALLYGAFTGFHPPIYFETSAMIITFVLFGKYLEVLAKGKTSDAIKKLVELAPATALLLLKDKEGKYSGEKEIDASLVQPGDALKVLPGSKVPADGFVIWGTSHVNESMVTGESVPISKEVSSPVIGGTMNLHGVLHIQATKVGSGTVLSQIISLVETAQMSKAPIQKFADYVASIFVPIVITLSLLTFFAWFLCGWLGAYPNSWSAETSNCFVFSLMFSISVVVIACPCALGLATPTAVMVATGVGANHGVLVKGGDALERAQNVKYVIFDKTGTLTQGKAVVTTAKVCSGMDLGEFLTLVASAEASSEHPLAKAILDYAFHFHFFGKLPSGKDSIKKRKEEILSQWLLEAADFSALPGKGIQCWISGKKILVGNRALITENGVNIPDEAEHFLVDMELSAKTGILVAYDGSFIGLIGITDPLKREAAVVVQGLKKMGVHPVMVTGDNWRTAQAVAKEVGIEDVRAEVMPAGKADVVRYLQKDGSVVAMVGDGINDSPALAAADVGIKNRVVTIPS

SEQ ID NO: 112390 - protein, 71 aa, Setaria italica
  Transcript Sequence Number=SeqID_46416
TPECSNNISEAIPFSRPLGLMSKELTMSVPFVVHQNIELQFNMVYKSNPSLLTCAEVIPCSKLTPSAIYQE

SEQ ID NO: 112391 - protein, 130 aa, Setaria italica
  Transcript Sequence Number=SeqID_46417
  Gene Ontology: Mol. function=peptidase activity; Cellular component =membrane
  Homolog annotation: Hit_ID=O81060; Match level="QueryCoverage=93%, HitCoverage=6%, E-value=3e-25, Identity=39%"; Hit description =Similar to late embryogenesis abundant proteins
  Pfam annotation: Domain name=Abi; Domain location=1-78; Score=13.4; E_ value=0.0021; Accession=PF02517.8; Description=CAAX amino terminal protease family
EMVFRSWLPEEIAVDLGYYNAILISGLVFSLIHRSLPSVPGFLLLSLVLFGLKQRTQGKLAAPIGLRSGIMTANYLIQSSRVILSKPETPFWIIGTYHLHPFDGVIGLSICSLLAILFFPQKPVQKDKSV

SEQ ID NO: 112392 - protein, 139 aa, Setaria italica
  Transcript Sequence Number=SeqID_46418
  Gene Ontology: Mol. function=zinc ion binding
  Pfam annotation: Domain name=PHD; Domain location=85-130; Score=21.9; E_value=0.0001; Accession=PF00628.21; Description=PHD-finger
DIQKRKLQYTCSKLFTGWGRAEEAKDSNKQTVAKTVAETSHAHTSDDSFSGFAAACLLSLTGKMPFCSQDQEANDSLGVSQEQDLCIKCGKDGQLLQCSSCLLSAHDSCFGSSVTFEDSGKFYCPVCICTKATEVYYLK

SEQ ID NO: 112393 - protein, 317 aa, Setaria italica
  Transcript Sequence Number=SeqID_46419
  Gene Ontology: Mol. function=zinc ion binding
FLSEQNIETNTTDIRKHSCSTSVTFEDSGKFYCPVCNCTKATEAYQKAKKTYIEARKKLAAFLGTEPLLKQHDEQQTGVLPRAANGEGQLNGCDSSKRQKSCSQTKADDLAHQGEESDPQRKKQKINVTSDTYNEVAIEKASSGKNSGVAAMNKQSVLQNNSNQPHDAEEDHHVGDAEAREDDGNGHSSHERRNSSQNRCSPAANLEVEADKEDGPTNSHHSEDSDEIEASSSNETGKRSSPPWRCMKHHKAKSQEREATVSSNSRKAFGQQDQHMPSPSRKRKYAYPPKRYSNPAAPTGRRSKLCWTEEEEAALRE

SEQ ID NO: 112394 - protein, 95 aa, Setaria italica
  Transcript Sequence Number=SeqID_46420
  Subcellular localization annotation: CTP_CleavageSite=68; ConfidenceScore=5.59e-01
SCRLDLPSAAGACAVAGLLPHGPSPPPPAIPPRPSATSTVPSTLTPARQRPTTPQVTQSPWVSGPMPRYSRGSKVIVDGFSVALGLVALVSVLAF

SEQ ID NO: 112395 - protein, 187 aa, Setaria italica
  Transcript Sequence Number=SeqID_46421
  Gene Ontology: Mol. function=protein serine/threonine kinase activity; Cellular component=nucleus; Biological process=protein amino acid phosphorylation
  Homolog annotation: Hit_ID=Q336M2; Match level="QueryCoverage=98%, HitCoverage=32%, E-value=4e-65, Identity=70%"; Hit description =Cyclin-dependent kinase E-1
  Pfam annotation: Domain name=Pkinase; Domain location=1-186; Score= -16.8; E_value=1.7e-07; Accession=PF00069.17; Description=Protein kinase domain
  Pfam annotation: Domain name=Pkinase_Tyr; Domain location=1-156; Score=-167.1; E_value=0.013; Accession=PF07714.9; Description =Protein tyrosine kinase
  Pfam module annotation: Pfam domain module=Pkinase::Pkinase_Tyr; Domain location=1-186::1-156
YLAFDYAEHDLYEIIRHHREKLNSPINAYTVKSLLWQLLNGLNYLHSNWIIHRDLKPSNILVMGEGEEHGIIKIADFGLARIYQAPLKALCNNLVVVTIWYRAPELLLGAKHYTSAVGILCWRAKTTTLLPFIYLHLIQFSYFLKSFLDMWAVGCIFAELLTLKPLFQGVEAKNSPNPFQVWALSLK

SEQ ID NO: 112396 - protein, 468 aa, Setaria italica
  Transcript Sequence Number=SeqID_46422
  Gene Ontology: Mol. function=protein serine/threonine kinase activity; Cellular component=intracellular membrane-bounded organelle; Biological process=protein amino acid phosphorylation
  Homolog annotation: Hit_ID=Q336M2; Match level="QueryCoverage=100%, HitCoverage=100%, E-value=0.0, Identity=84%"; Hit description=Cyclin- dependent kinase E-1
  Pfam annotation: Domain name=Pkinase; Domain location=18-332; Score =290.6; E_value=3.3e-84; Accession=PF00069.17; Description=Protein kinase domain
  Pfam annotation: Domain name=Pkinase_Tyr; Domain location=18-332; Score=14.4; E_value=1.1e-14; Accession=PF07714.9; Description =Protein tyrosine kinase
  Pfam module annotation: Pfam domain module=Pkinase::Pkinase_Tyr; Domain location=18-332::18-332
MGDGRAGGANRPAWLQQYELVGKIGEGTYGLVFLARLKPSHPAPGRRGPPIAIKKFKQSKEGDGVSPTAIREIMLLREINHENVVKLVNVHINHADMSLYLAFDYAEHDLYEIIRHHREKLNSPINAYTVKSLLWQLLNGLNYLHSNWIIHRDLKPSNILVMGEGEEHGIIKIADFGLARIYQAPLKALCDNGVVVTIWYRAPELLLGAKHYTSAVDMWAVGCIFAELLTLKPLFQGVEAKNTPNPFQLDQLDKIFKVLGHPTVEKWPTLANLPWWQNDQQHIQGHKYENPGLHNIVHLPQKSPAFDLLSKMLEYDPRKRITAAQALEHEYFRMDPLPGRNALLPSQPGEKIVQYPVRPVDTTTDFEGTTSLQPTQPPSGNAAQGQSVSRSMPRQMQQQPMVGMPRVAAGTNMAAFNAASQAGMAGLNPGNIPMQRGAGGQSHPHQLRRKADQGMMQNPGYPQQKRRF

SEQ ID NO: 112397 - protein, 97 aa, Setaria italica
  Transcript Sequence Number=SeqID_46423
NLRSGGLASAGCSEPMSTSRRASPGVLDHICGLLMWGRPGGAQQQQPSSTTMQGSSRQQQPSSTNMQGSSRQQGRSSTLTDERQNMLHMSTNFAAYN

SEQ ID NO: 112398 - protein, 119 aa, Setaria italica
  misc_feature (51)..(51): Xaa can be any naturally occurring amino acid
  misc_feature (64)..(64): Xaa can be any naturally occurring amino acid
  Transcript Sequence Number=SeqID_46424
  Gene Ontology: Mol. function=3'-5' exonuclease activity; Cellular component=intracellular
  Homolog annotation: Hit_ID=Q7XE52; Match level="QueryCoverage=82%, HitCoverage=10%, E-value=2e-22, Identity=65%"; Hit description =Nucleolar protein, putative, expressed
VTGTVAPSDTEQRFRSLNEERNVHQNQKIPQESEFRFLVVPFDYAEARENXLVCGEPKAEQKKXAVARPINTDSGDKRRTSNKPGAGEEGNFQHPRRRQAFPPSGNRIYLSLNSSKYCY

SEQ ID NO: 112399 - protein, 375 aa, Setaria italica
  Transcript Sequence Number=SeqID_46425
  Gene Ontology: Mol. function=3'-5' exonuclease activity; Cellular component=intracellular; Biological process=nucleobase, nucleoside, nucleotide and nucleic acid metabolic process
  Homolog annotation: Hit_ID=Q7XE52; Match level="QueryCoverage=100%, HitCoverage=42%, E-value=1e-114, Identity=62%"; Hit description =Nucleolar protein, putative, expressed
SGKLKRIVKSKNFERHLSTVINTIRDAISASGAFESVAEQLKKGKLEELTMANVKNSSEDTEMIPAVDVDNNEDPSDESAVVSTVITNVGTASPCMGTVTSEASFGNMHLEDFTPEKNSGTSSGFTGLADKEILSNGQQQVAKATVQVSKRTTAFGALFGKPAAGRRPNLFPGLSSDQGKSKVDKITSSVVLPFHNFSGSVKPPSGSIPLKEQVHSEPESVQHSDPACQMEDVIQLDTETDDPQPPESRNDDEHQEPKVMEMSKSPSDAPSDTEQRFRSLNEERNVHQNQKIPQEPEFRFPVVPFDYAEARENLVCGEPKAETKKDNAVARPINTDSGDKRRTSNKPGAGEEGNFQHPRRRQAFPPSGNRNFTYH

SEQ ID NO: 112400 - protein, 102 aa, Setaria italica
  Transcript Sequence Number=SeqID_46426
  Subcellular localization annotation: CTP_CleavageSite=52; ConfidenceScore=5.30e-01
WNHPDQIVQGVPDSRASAALPSRNAGTRMARADPDNATSSSSRFVLRSGPVKLSPGAKHILIPSENTEDGNSAPIYSCVSFGSSNGNVSAPHQNKGAGSRRF

SEQ ID NO: 112401 - protein, 469 aa, Setaria italica
  Transcript Sequence Number=SeqID_46427
YDNTNRDYQSERSSTVMSTGLFDLNKKLPDPADLNSPYDPNSEESCLQHTQVGTQCMDQQVIDNGKRSHKESSFTPYAQEEQQHAADLDNRMKSPCILRNQTVQDSVQLQNWCSMTMHHGVSQLSTGGEPSSFQFRGHNLSHSEKQIFHSEMNTQQGSRPSAGQTLRLMGRDLTVSNTRVDNWSEAAQKQPNPTKDHLTNRLVLELPRQGQPFLSLQTQSIPNISASSASTVAHISASSGSTTQAHFRHRTPHNVSHPLPAANVFPGDPRCEDRWRDFTDLQSHRNVLFGCPPLSNHGSAAFIQNSPPPWCYYSDHSTKTDSPSAPFSPINMEHVTPSSDYHANLPMSYGLYSANSSVHRNNSANFTWNHPDQIVQGVPDSRASAALPSRNAGTRMARADPDNATSSSSRFVLRSGPVKLSPGAKHILIPSENTEDGNSAPMYSCVSFGSSNGNVSAPHQNKGAGSRRF

SEQ ID NO: 112402 - protein, 226 aa, Setaria italica
  Transcript Sequence Number=SeqID_46428
  Gene Ontology: Mol. function=phosphoric diester hydrolase activity; Cellular component=anchored to membrane; Biological process =intracellular signaling cascade
  Homolog annotation: Hit_ID=B6TVN4; Match level="QueryCoverage=100%, HitCoverage=53%, E-value=1e-120, Identity=92%"; Hit description =Phospholipase C
YDFRNDIWLCHSFGGICQNFTAFQPAVNVLREVERFLSRNPAEVVTIFVEDYVESPMGLTRVLNASGLARYMFPVSRMPKSGGDWPLLSDMVRDNHRLLVFTSKSAKEAAEGIAYEWRYVVENQYGTKGMVKGTCHNRAESAAMNDLSRSLVLVNYFRDLPNFPEACKDNSAPLMDVLNVCHAKSGDRWANFIAVDFYKRSDRGGAAEATDKANGGLVCGCGSISA

SEQ ID NO: 112403 - protein, 496 aa, Setaria italica
  Transcript Sequence Number=SeqID_46429
  Gene Ontology: Mol. function=metal ion binding
  Homolog annotation: Hit_ID=B6TVQ4; Match level="QueryCoverage=99%, HitCoverage=99%, E-value=0.0, Identity=87%"; Hit description =Senescence-associated-like protein
  Pfam annotation: Domain name=DUF500; Domain location=362-494; Score =239.6; E_value=7.8e-69; Accession=PF04366.4; Description=Family of unknown function (DUF500)
  Pfam annotation: Domain name=FYVE; Domain location=181-249; Score =99.3; E_value=1.3e-26; Accession=PF01363.13; Description=FYVE zinc finger
  Pfam module annotation: Pfam domain module=DUF500::FYVE; Domain location=362-494::181-249
MSARREVVSYHPLPAPGAVNSFKDEIQSKVMETVGNAINSFDPKSLPQHIERGLGTAGNIINSFEPKWSGQKEFDFGGEADPLDGYQCPDEYWGSAPAKAQKPVNLKNLLGGAIAIIGRSLKNTEVEQPKETKTSVSFLGSSDDGNTFLHSSVYMPSAPPVLDEEALNYNIYRAVLEAEPPEWLPDSYARSCMQCAAPFTAVTRGRHHCRFCGGIFCTVCSKGRCLLPVKFRERNPQRVCDACYDRLDPLQNLLINSVSNASQTAKHDVMDWTCARGWLNLPIGLTMEHEIYKAANTLKSYSQVARINPEKSIPHAVLNGASGLAILTVVKAGAILTYKLGTGLVVARRSDGSWSAPSAILSGGFGWGAQVGGELMDFIIVLRGPEAVQTFCSRMHFSLGAGVSAAAGPVGRVLEADIRAGDKGSGVCYTYSCSKGAFIGVSLEGNLVATRIDANLRFYGDPYLTTSDILMGHVERPNAAKFLYKALDDLYSGLEC

SEQ ID NO: 112404 - protein, 76 aa, Setaria italica
  Transcript Sequence Number=SeqID_46430
  Gene Ontology: Mol. function=aspartic-type endopeptidase activity
  Homolog annotation: Hit_ID=Q7XFZ6; Match level="QueryCoverage=98%, HitCoverage=6%, E-value=7e-15, Identity=52%"; Hit description=Zinc knuckle family protein
NFTQDIIDLIWKKYAERQYKTFQDIQNYFMRLYQGIERNLGIIVTINTFPLLHLDDKLIVKPHHKFIILKADINLK

SEQ ID NO: 112405 - protein, 78 aa, Setaria italica
  Transcript Sequence Number=SeqID_46431
  Subcellular localization annotation: CTP_CleavageSite=43; ConfidenceScore=5.38e-01
KTKGAQISRRRPTTPSSQLPAPPPSRKEGTGTGIPPRRVVDPSEGARAEPADPVMNPPRRRATEPRFPSPAPRWRCRD

SEQ ID NO: 112406 - protein, 144 aa, Setaria italica
  Transcript Sequence Number=SeqID_46432
  Gene Ontology: Mol. function=metal ion binding; Biological process =metal ion transport
  Pfam annotation: Domain name=Btz; Domain location=62-144; Score=30.6; E_value=3.5e-06; Accession=PF09405.2; Description=CASC3Barentsz eIF4AIII binding
SDDEGSEDGRPRARIGPDQDDDGQGAPEAYDDEVDEEDEEYYDEEEEDVGEGFEEYEGRAAPPTEDGGGGGQESRGEDGVAGEEGLAEGEAKGEGEEKEQEPFAVPTSGAFYMHDDRFQEENRGRRRRMFGGRKLWDAKDDQAW

SEQ ID NO: 112407 - protein, 101 aa, Setaria italica
  Transcript Sequence Number=SeqID_46433
  Subcellular localization annotation: CTP_CleavageSite=5; ConfidenceScore=5.07e-01
IFRLKSSANPKNTKGINTGHKCQSQTTTISSKQTSTTNQSEVKWDEIHQKICTDEWCYFQFSPLQLQTCSIGLKLKVQSSNISFNKNIKSSPHTTLEHLNY

SEQ ID NO: 112408 - protein, 763 aa, Setaria italica
  Transcript Sequence Number=SeqID_46434
  Gene Ontology: Cellular component=integral to membrane
  Homolog annotation: Hit_ID=Q6TEP1; Match level="QueryCoverage=77%, HitCoverage=67%, E-value=8e-38, Identity=27%"; Hit description =Protein FAM91A1
RLSEEETATIDKICKEEANSYVLFDPKVVDGLYKRGLVYFDVPVFPDDRFKVSRLENFVSNKEQSYEDPIEELLYAVFVVSSANATVAELAATLQADLYQLQAAASFACRLGWAEKLVDADSVLNDEGAPAFPGSILSDDEEGSNTSINSEKSGQQLISMDSDGPRKISGTAHVGFVVDANVTSYLMMGSLSPGLKSHAVTLYEAGKLGDSCIAELCSDLASLEGKKFEGVLEEFANHAFSLRYFLECLQSGGVSSNEITNNAGEAKTPRSSSNDIENATGQLAKVNIEDGVDDNHDELPQHDQVTSELDASSDTRVLKNKRKYKVDILRCESLASLAPATLERLFLRDYDIIVSMVPLPSSSVLPGPSGPIHFGPPSYSSMTPWMKLVLYTAGNCGPVSAVFMKGLRFRLLPEPLSGCEKALIWSWDGSVVGGLGGKLEGNLVKGNLLLHCLNSMLKQSAVLVQPLGVNDLNASGNLVTVDIPLPLKNDDQSIASVVAQTNLPEEQILNLTSVLKELSNKFDMSTLGYLRLLRLHRIEASDKIDPENVSYQWVPLSLEFGIPLFNPKLCERICERVVSSHMLQKDDLNEHCDVMQNVRRHLRELCGEYQATGPIAKLFNKRGSSRDLPRVLINSISGRWNLNNDPSTPTSGGAPSENERLRFSGRQRCRTEVVSFDGSTVRSYALAPEHNEATSRLTSEEQSSLHDVKSEQEDTDSKDVVLPGVNLIFDGAELHPFDIAACLQARQPLWLIAESSAASSALL

SEQ ID NO: 112409 - protein, 52 aa, Setaria italica
  misc_feature (11)..(11): Xaa can be any naturally occurring amino acid
  Transcript Sequence Number=SeqID_46435
RGCVMLRRKKXPLCCPSITQPLPHLMTFDSKGDVSFFVAYTDSICSSAGTLP

SEQ ID NO: 112410 - protein, 159 aa, Setaria italica
  Transcript Sequence Number=SeqID_46436
  Homolog annotation: Hit_ID=Q01JP4; Match level="QueryCoverage=100%, HitCoverage=15%, E-value=5e-70, Identity=79%"; Hit description =OSIGBa0139P06.4 protein
LETDVDLMQQDLAMLKDLFIAEGQGLPLDVVEREAKQAQQILDLYMLKADIIIEMLINASDQMSHHLEVSSARRRHVHDAHTLLRVLCHKKDKIASTFLRIQYHLPRSSDYDDLPVKDVSSKVPMFSDMLKRGTSFNWSETGQQSFRVMKKKLQEATWQ

SEQ ID NO: 112411 - protein, 55 aa, Setaria italica
  Transcript Sequence Number=SeqID_46437
HFFIANSCALKLTFFYCQFLCIKTDIFFRSNFLRSWNTYISIELKGFAGLPPASN

SEQ ID NO: 112412 - protein, 208 aa, Setaria italica
  Transcript Sequence Number=SeqID_46438
  Gene Ontology: Mol. function=cysteine-type peptidase activity; Cellular component=VCB complex; Biological process=ubiquitin -dependent protein catabolic process
  Homolog annotation: Hit_ID=Q0J0M6; Match level="QueryCoverage=53%, HitCoverage=10%, E-value=2e-27, Identity=56%"; Hit description =Ubiquitin carboxyl-terminal hydrolase
  Pfam annotation: Domain name=UCH; Domain location=1-111; Score=-62.9; E_value=0.0034; Accession=PF00443.21; Description=Ubiquitin carboxyl -terminal hydrolase
SLVVTLKRFTYCSSRSEKLKVDVRFKEMFDMQPFMENRSIVANTLYRLVGVVQHQGTPAQGHYVAYVRANKMGSQMNNNDDSKSWYYVSDENVLEASLDQVLSCEPYILFYEKSQLTDINTEPHSSANPTVEETQLRTGAPVSDLSSPPLDELRPWEYQRSWNPHRQARNETYKDNDLLGQKSRCVPKQFYSPQRHKSILLLGADYDV

SEQ ID NO: 112413 - protein, 207 aa, Setaria italica
  misc_feature (48)..(48): Xaa can be any naturally occurring amino acid
  Transcript Sequence Number=SeqID_46439
  Gene Ontology: Mol. function=catalytic activity
  Homolog annotation: Hit_ID=Q84S82; Match level="QueryCoverage=95%, HitCoverage=22%, E-value=9e-24, Identity=38%"; Hit description =Aminotransferase-like protein
LSQYRIGGKPHRTARCTSFGEAASAFSGFQYSATKVAEYIRCFYNGFXRKTTSWFPYQRSEPLLELPSCFDSMTNTFDDDLTDELIKPGILPTNFFSGKDAPTYEFYNPSAAARQFGLGQLPIYAFFAGRAKFRDELTNGLGYSRLYDRVPDSSTIDLTNWIVAPFAVQQFKLWWAECKQHLFCAFPAIYYNILDPDNIDPNAESES

SEQ ID NO: 112414 - protein, 69 aa, Setaria italica
  misc_feature (29)..(29): Xaa can be any naturally occurring amino acid
  Transcript Sequence Number=SeqID_46440
  Subcellular localization annotation: CTP_CleavageSite=33; ConfidenceScore=5.68e-01
QQLAPSPSDPSPAPLKVTPAASSSPPSRXGTMSLSESSGGPPSPPHGGASGGGSHGQQQSGGFSGLSWK

SEQ ID NO: 112415 - protein, 206 aa, Setaria italica
  Transcript Sequence Number=SeqID_46441
  Gene Ontology: Mol. function=hydrogen ion transporting ATP synthase activity, rotational mechanism; Cellular component=proton -transporting two-sector ATPase complex; Biological process=ATP synthesis coupled proton transport
  Homolog annotation: Hit_ID=B6TZM0; Match level="QueryCoverage=100%, HitCoverage=100%, E-value=3e-64, Identity=63%"; Hit description=ATP synthase
  Pfam annotation: Domain name=OSCP; Domain location=16-191; Score= -25.4; E_value=3.2e-05; Accession=PF00213.10; Description=ATP synthase delta (OSCP) subunit
  Subcellular localization annotation: CTP_CleavageSite=61; ConfidenceScore=5.38e-01
MNILNQPINPGGHPVFPAAKESGHLAPSSVRFDGAPAQPSTAAAGRSSANYPRWQAQTLPRASSYVGIEHDGATAAPAPFRPPTLDFLRSLLDNCSVSSALAGGEASAPPAQAPQLLALRVVVTSAVELDARQTELIARKMRLLTGFVNLTVVNVVDPSLIAGFVISYGSDDSYVIDLSVKGQLAALKNRVDSIDQTAHAHGHPHH

SEQ ID NO: 112416 - protein, 62 aa, Setaria italica
  Transcript Sequence Number=SeqID_46442
NFKFSINVLNNLGGITESHLKIKHFVRALHITNLSYLVECRIFSSALLKLKKNHFSFFFWRL

SEQ ID NO: 112417 - protein, 116 aa, Setaria italica
  Transcript Sequence Number=SeqID_46443
TSITLDPSQAGLAKHQIDGAIAGYYSLGSVTNGPESWSCRISVSLLDFSHQSSYASVVPLIDSYLVFSPLNLQLEQYMEKLANSKRKRIPAAAGSRLPLRYLAFRCSSAGTSSSVS

SEQ ID NO: 112418 - protein, 96 aa, Setaria italica
  misc_feature (87)..(87): Xaa can be any naturally occurring amino acid
  Transcript Sequence Number=SeqID_46444
  Gene Ontology: Cellular component=integral to membrane
  Homolog annotation: Hit_ID=B6TAB6; Match level="QueryCoverage=100%, HitCoverage=40%, E-value=2e-17, Identity=50%"; Hit description =Cytochrome b561
LALRSQDKQLIFNVHPVLMLLGPIVLAGEAILCYRSLPLLSRGARKKAHLALHAAGLGAGALGVYAVFKFHVESGIPNLYSLHSWIXVIATISLYA

SEQ ID NO: 112419 - protein, 114 aa, Setaria italica
  misc_feature (30)..(30): Xaa can be any naturally occurring amino acid
  Transcript Sequence Number=SeqID_46445
  Homolog annotation: Hit_ID=B6TUV8; Match level="QueryCoverage=92%, HitCoverage=35%, E-value=1e-37, Identity=75%"; Hit description=SHI
  Pfam annotation: Domain name=DUF702; Domain location=36-114; Score =92.0; E_value=2e-24; Accession=PF05142.4; Description=Domain of unknown function (DUF702)
HPAQEHHHFYAPNIIRFADDPAAGSSRGGXGSASGAGAGTISCQDCGNQAKKDCAHMRCRTCCKSRGFDCPTHVKSTWVPAAKRRERQQQLTTSGGGAEPSKRPRDTQPSSTTA

SEQ ID NO: 112420 - protein, 241 aa, Setaria italica
  misc_feature (235)..(235): Xaa can be any naturally occurring amino acid
  Transcript Sequence Number=SeqID_46446
  Gene Ontology: Mol. function=adenylosuccinate lyase activity; Cellular component=chloroplast; Biological process=purine ribonucleotide biosynthetic process
  Homolog annotation: Hit_ID=B4F8Z3; Match level="QueryCoverage=91%, HitCoverage=40%, E-value=1e-102, Identity=83%"; Hit description =Adenylosuccinate lyase
  Subcellular localization annotation: CTP_CleavageSite=33; ConfidenceScore=5.47e-01
PPATAAAVSPRTAAAPRATGLRSACARPTRRLQCSAPAAVAGGSAEMDDSAPGWAERSLEELGSLPDNDTFCLMALSPLDGRYGRFIRDLMPFFSEFGLIRYRVLIEVKWLLKLSQIPEITEVPPFSEEAQLFLNGIIQDFCIDDAKVVKKIEKTTNHDVKAVEYFLKQRCSSNPEIAKVSEFFHFGCTSEDINNLSHALALKEGVNEVMFPTMINICKALCSLATQNFAYPMLXRTHGSQ

SEQ ID NO: 112421 - protein, 354 aa, Setaria italica
  Transcript Sequence Number=SeqID_46447
  Gene Ontology: Mol. function=adenylosuccinate lyase activity; Cellular component=chloroplast; Biological process=purine ribonucleotide biosynthetic process
  Homolog annotation: Hit_ID=B4F8Z3; Match level="QueryCoverage=98%, HitCoverage=64%, E-value=0.0, Identity=88%"; Hit description =Adenylosuccinate lyase
  Pfam annotation: Domain name=ASL_C; Domain location=217-331; Score =304.1; E_value=2.9e-88; Accession=PF08328.3; Description =Adenylosuccinate lyase C-terminal
  Pfam annotation: Domain name=Lyase_1; Domain location=1-207; Score= -34.0; E_value=2.2e-08; Accession=PF00206.12; Description=Lyase
  Pfam module annotation: Pfam domain module=ASL_C::Lyase_1; Domain location=217-331::1-207
SFRANACDRLLISSEVHALALKEGVNEVMFPTMINICKALCSLATQNSAYPMLSRTHGQPASPTTVGKEMANFVARLSDIGKSFSEVNILGKFAGAVGNYNAHVVAYPEVDWPKVAEEFVRSLGLQFNSYVTQIEPHDYISKLFNLFSQFNNVLIDFDRDMWSYISLGYFKQVPKAGEVGSSTMPHKINPIDFENSEGNLFLANGTLSAISMKLAISRMQRDLTDSTVLRNLGVGLGHSLLAYKATMRGISKVQVNESRLAEDLEQTWEVLAEPIQTVMRRYGIPEPYEKLKELTRGQAVTKDSMQQFIDGLDIPEEVRSKLSKLTPHSYTGLAEDLAKNIEKFVDLESGFMIK

SEQ ID NO: 112422 - protein, 83 aa, Setaria italica
  Transcript Sequence Number=SeqID_46448
  Subcellular localization annotation: CTP_CleavageSite=47; ConfidenceScore=5.81e-01
SPWATSGSRASCGGGGGDRRRRRRTPRRRRRSSARRHGARRRRPRRRARARRTPPESPPRGRVPGPRRRLRLHLRPASNIAGP

SEQ ID NO: 112423 - protein, 121 aa, Setaria italica
  Transcript Sequence Number=SeqID_46449
  Gene Ontology: Mol. function=receptor activity
  Homolog annotation: Hit_ID=Q9SR02; Match level="QueryCoverage=85%, HitCoverage=5%, E-value=4e-29, Identity=55%"; Hit description =F7O18.23 protein
KIPGLKVNYWLDEKSTSTAEPDSSPFIKIEAGQDMQIKCQHSSFVLDPFTDKEANLSLDLSCIDVEQLILRAITCNRHTRLLNIQRQLCKNVQVSQSPKDVILKRDVTAAKDPKKNAEKKA

SEQ ID NO: 112424 - protein, 217 aa, Setaria italica
  misc_feature (26)..(26): Xaa can be any naturally occurring amino acid
  Transcript Sequence Number=SeqID_46450
  Gene Ontology: Mol. function=receptor activity; Cellular component =mediator complex; Biological process=positive regulation of transcription from RNA polymerase II promoter
  Homolog annotation: Hit_ID=Q9SR02; Match level="QueryCoverage=100%, HitCoverage=12%, E-value=4e-65, Identity=53%"; Hit description =F7O18.23 protein
  Pfam annotation: Domain name=MED14; Domain location=1-82; Score= -59.0; E_value=0.0083; Accession=PF08638.3; Description=Mediator complex subunit MED14
IEVMLTGGYHRLPKCIEDIGSQNRLXPDEEKRALRKLDASVRYKVLVTPRPKEVSNVSVTDGIAVLRVDGEFKVLLTLGYRGNVDLWRILHMELLVGEKKGPIKLDESRRFALGDDIERRMAASENPFTVLYAILHEFCISLAMDTIIRQANALRQGRWKDAIRSELISDSATGQIGNASLMQLVQDGELDSSGFKIPGLKVNYWLDVSSTSTADLK

SEQ ID NO: 112425 - protein, 106 aa, Setaria italica
  Transcript Sequence Number=SeqID_46451
KNCRLQFSACHQELNSQHLHSLQDSEILAAADKLAECQETITILSKQLQALKVPTTSSGPLDGSICNPRPSSAKSDYKPQSLASILAEEFAYAEGSRSSYVPTQTR

SEQ ID NO: 112426 - protein, 388 aa, Setaria italica
  Transcript Sequence Number=SeqID_46452
  Homolog annotation: Hit_ID=Q9SLN1; Match level="QueryCoverage=66%, HitCoverage=29%, E-value=2e-14, Identity=30%"; Hit description =Filament-like plant protein 7
  Pfam annotation: Domain name=DUF869; Domain location=5-271; Score= -247.5; E_value=0.0023; Accession=PF05911.3; Description=Plant protein of unknown function (DUF869)
VVHKHEASGESIETILEEIQKAISNKREDSEVPFDRSEIEKTVRDLIERITPMIGTSAGDNVARSGPLLHGKSELCSRLEQLVQVCHDLLHGKAKLEKFIDEVCLILKYIVEQYLSNQDLSDTADGDEKNFDEDKSPGTVNTEGKQDIQIAEAAATPDIQKEAQEGPNQPAEDHIMATHQEKLDEELALVVLAQDDNILPGRKSACCEIESTTAEASVQHCAAQEESHLATDSEILAAADKLAECQETITILSKQLQALKVPTTSSGPLDGSICNPRPSSAKSDYKPQSLASILAEEFAYAEGSRSPTTPKQEQLKKDEDEVYATKMRSTAQGQKNAGADDEESTQVVVHPVFAEARKEDEASADPKRKKKRSQSLLGRIIFRKKVEG

SEQ ID NO: 112427 - protein, 51 aa, Setaria italica
  Transcript Sequence Number=SeqID_46453
DSCLPLIVFVFVFARYRRYMTSKKKSVTLSPIGNMLLCIDLDLLFLYFIFI

SEQ ID NO: 112428 - protein, 238 aa, Setaria italica
  misc_feature (154)..(154): Xaa can be any naturally occurring amino acid
  misc_feature (200)..(200): Xaa can be any naturally occurring amino acid
  Transcript Sequence Number=SeqID_46454
  Gene Ontology: Mol. function=hydrolase activity
  Homolog annotation: Hit_ID=Q7XPW3; Match level="QueryCoverage=88%, HitCoverage=47%, E-value=1e-78, Identity=70%"; Hit description =OSJNBa0032F06.18 protein
  Pfam annotation: Domain name=Asparaginase_2; Domain location=28-234; Score=-106.4; E_value=4.4e-05; Accession=PF01112.10; Description =Asparaginase
MATGGGGASETAVGAGEENTGASRSPSRRFFVALHVGAGFHAPANEKAYRRAMKRACLAAAAVLRESSGTSLDAVAAAINVLEDDPITNAGRGSNLTESGHVECDASIMDGSTGSFGAVGAIQGVKNPIQVALHLAKEQIAGSSLLGRIPPMFXVGEGAYKWAKSKGMDLLESTSEANSWLVTENARAQWVKYTALLVNXKKLLEHNTGSGSEHDSVQLEAPGTDSENTADGKKMFTQ

SEQ ID NO: 112429 - protein, 521 aa, Setaria italica
  misc_feature (495)..(495): Xaa can be any naturally occurring amino acid
  misc_feature (502)..(502): Xaa can be any naturally occurring amino acid
  Transcript Sequence Number=SeqID_46455
  Gene Ontology: Mol. function=nucleic acid binding
  Homolog annotation: Hit_ID=Q9SFY4; Match level="QueryCoverage=29%, HitCoverage=8%, E-value=3e-24, Identity=37%"; Hit description =T22C5.20
  Pfam annotation: Domain name=RRM_1; Domain location=206-270; Score =32.8; E_value=1.4e-06; Accession=PF00076.14; Description=RNA recognition motif. (a.k.a. RRM, RBD, o
  Pfam annotation: Domain name=RRM_1; Domain location=42-106; Score =9.4; E_value=0.026; Accession=PF00076.14; Description=RNA recognition motif. (a.k.a. RRM, RBD, o
  Pfam module annotation: Pfam domain module=RRM_1::RRM_1; Domain location=206-270::42-106
GGSTSLTSPGQHYGKAKHIYSEPFDIYGPSVKRDVISVSKELWVGLLGNRAAEALVRSKFEEFGPLANFLFYPSKDFSLVEYRNIMHALRACGYMQGSSIWGGFLQIRYLDRLIGSKGFIHGIAIGESRHIYVAKVQNQKDKDEVFDELKAAGLKRPCGVTDLSGENALLLEFETAVDAATAKVYIRSQAPADVCSRDKNAPGHQLLVQNIDNSVPDMELINAFSRFGEVIRCQFNRSDGNCFIVYRSQDAAACAKSHLHGARFGMKSIVIESRTWSAGSVHDKTVLPVAPLLGQSFPDNSIHQDIRHPRVSGYHAGYAAPGGRPIYGPPPPNTNRAPQGILPCPPVSTHRGSVIPPPPIQTSFVRPVYHGPGSPWENTTPNPPPFSHVSPRMMPGSNFRANPTLPFIPSSVTPIVQLPGGSAQHSEKMPPPPPLPNVAPPQFTPPPPLPISQPPSVPPPPNSPPPVQPIADSSDFQNPCPHPRWQGFLAKSSMXYCRVYAXRVELDACRYENAVSEPADG

SEQ ID NO: 112430 - protein, 118 aa, Setaria italica
  Transcript Sequence Number=SeqID_46456
ADGGSGDCGADAPATAPQSPEPPPADQQQTPPQAPGPTPPPPRRRGSPHRRPPGQAPPKQDPAPPKQGAEPAPPRLVVPPQDSPAPPPPSMINRTTGCTTLLVLGDSTVDPGNNNHLP

SEQ ID NO: 112431 - protein, 165 aa, Setaria italica
  Transcript Sequence Number=SeqID_46457
RGFQLLVLVALLIGELHCARTAPPTAADAPATAPQSPEPPPADQQQTPPQAPGPTPPPPRRRGSPHRRPPGQAPPKQDPAPPKQGAEPAPPRLVVPPQDSPAPPPPSMINRTPPSTLVTTLLVLGDSTVDPGNNNHLPTTARANFLPYGLNFYGRRPTGRFTNGR

SEQ ID NO: 112432 - protein, 142 aa, Setaria italica
  Transcript Sequence Number=SeqID_46458
  Gene Ontology: Mol. function=binding; Cellular component=plasma membrane; Biological process=ethylene mediated signaling pathway
  Homolog annotation: Hit_ID=Q8L7J9; Match level="QueryCoverage=100%, HitCoverage=99%, E-value=3e-74, Identity=65%"; Hit description =Protein phosphatase 2A regulatory A subunit (Fragment)
  Pfam annotation: Domain name=HEAT; Domain location=107-139; Score =16.6; E_value=0.1; Accession=PF02985.14; Description=HEAT repeat
  Pfam annotation: Domain name=HEAT; Domain location=29-65; Score=18.1; E_value=0.037; Accession=PF02985.14; Description=HEAT repeat
  Pfam annotation: Domain name=HEAT; Domain location=68-104; Score =20.6; E_value=0.0064; Accession=PF02985.14; Description=HEAT repeat
  Pfam module annotation: Pfam domain module=HEAT::HEAT::HEAT; Domain location=107-139::29-65::68-104
MQWLEDKVFSIRDAAANNLKRLAEEFGPEWAMQHIIPQVLEKINNPHYLYRMTILQAISLLAPVMGAEITCQKLLPVIINSSKDRVPNIKFNVAKVLQSLIPILDQSTVKPCLVELSEDPDVDVRYYANQALQACDQMMVSS

SEQ ID NO: 112433 - protein, 143 aa, Setaria italica
  misc_feature (72)..(72): Xaa can be any naturally occurring amino acid
  misc_feature (124)..(124): Xaa can be any naturally occurring amino acid
  misc_feature (132)..(132): Xaa can be any naturally occurring amino acid
  Transcript Sequence Number=SeqID_46459
  Gene Ontology: Mol. function=binding; Cellular component=plasma membrane; Biological process=ethylene mediated signaling pathway
  Homolog annotation: Hit_ID=Q8L7J9; Match level="QueryCoverage=100%, HitCoverage=49%, E-value=3e-68, Identity=88%"; Hit description =Protein phosphatase 2A regulatory A subunit (Fragment)
  Pfam annotation: Domain name=HEAT; Domain location=108-141; Score =7.5; E_value=5.9; Accession=PF02985.14; Description=HEAT repeat
  Pfam annotation: Domain name=HEAT; Domain location=29-65; Score=18.1; E_value=0.037; Accession=PF02985.14; Description=HEAT repeat
  Pfam annotation: Domain name=HEAT; Domain location=69-105; Score =18.8; E_value=0.023; Accession=PF02985.14; Description=HEAT repeat
  Pfam module annotation: Pfam domain module=HEAT::HEAT::HEAT; Domain location=108-141::29-65::69-105
MQWLEDKVFSIRDAAANNLKRLAEEFGPEWAMQHIIPQVLEKINNPHYLYRMTILQAISLLAPVMGAEITCXKKLLPVIINSSKDRVPNIKFNVAKVLQSLIPILDQSTVKPCLVELSEDPDCXMVRYYANXALQACDQMMVS

SEQ ID NO: 112434 - protein, 114 aa, Setaria italica
  misc_feature (11)..(12): Xaa can be any naturally occurring amino acid
  misc_feature (24)..(24): Xaa can be any naturally occurring amino acid
  Transcript Sequence Number=SeqID_46460
  Gene Ontology: Mol. function=binding; Cellular component=plasma membrane; Biological process=ethylene mediated signaling pathway
  Homolog annotation: Hit_ID=Q8L7J9; Match level="QueryCoverage=100%, HitCoverage=39%, E-value=3e-58, Identity=95%"; Hit description =Protein phosphatase 2A regulatory A subunit (Fragment)
  Pfam annotation: Domain name=HEAT; Domain location=16-52; Score=20.9; E_value=0.0053; Accession=PF02985.14; Description=HEAT repeat
  Pfam annotation: Domain name=HEAT; Domain location=55-91; Score=20.7; E_value=0.0063; Accession=PF02985.14; Description=HEAT repeat
  Pfam module annotation: Pfam domain module=HEAT::HEAT; Domain location=16-52::55-91
NIISKLDQVNXXIGIDLLSQSLLXAIVELAEDRHWRVRLAIIEYIPLLASQLGVGFFDDKLGALCMQWLEDKVFSIRDAAANNLKRLAEEFGPEWAMQHIIPQVLEKINNPHYL

SEQ ID NO: 112435 - protein, 135 aa, Setaria italica
  misc_feature (4)..(4): Xaa can be any naturally occurring amino acid
  Transcript Sequence Number=SeqID_46461
  Gene Ontology: Mol. function=binding; Cellular component=plasma membrane; Biological process=ethylene mediated signaling pathway
  Homolog annotation: Hit_ID=Q9FVD6; Match level="QueryCoverage=91%, HitCoverage=20%, E-value=4e-57, Identity=84%"; Hit description =Ser/Thr specific protein phosphatase 2A A regulatory subunit beta isoform
  Pfam annotation: Domain name=HEAT; Domain location=37-73; Score=23.6; E_value=0.00079; Accession=PF02985.14; Description=HEAT repeat
  Pfam annotation: Domain name=HEAT; Domain location=76-112; Score =19.0; E_value=0.02; Accession=PF02985.14; Description=HEAT repeat
  Pfam module annotation: Pfam domain module=HEAT::HEAT; Domain location=37-73::76-112
HVDXFIPVVKRLAAGEWFTARVSSCGLFHIAYPSAPDQLKTELRTIYGQLCQDDMPMVRRAAASNLGKFAATVEQSHLKTEIMSIFDDLTQDDQDSVRLLAVEGCAALGKLLEPQEYVPHNLAVPTIYQEQHVPT

SEQ ID NO: 112436 - protein, 587 aa, Setaria italica
  Transcript Sequence Number=SeqID_46462
  Gene Ontology: Mol. function=binding; Cellular component=plasma membrane; Biological process=ethylene mediated signaling pathway
  Homolog annotation: Hit_ID=Q38950; Match level="QueryCoverage=100%, HitCoverage=100%, E-value=0.0, Identity=88%"; Hit description =Serine/threonine-protein phosphatase 2A 65 kDa regulatory subunit A beta isoform
  Pfam annotation: Domain name=HEAT; Domain location=158-194; Score =22.4; E_value=0.0019; Accession=PF02985.14; Description=HEAT repeat
  Pfam annotation: Domain name=HEAT; Domain location=197-233; Score =19.4; E_value=0.015; Accession=PF02985.14; Description=HEAT repeat
  Pfam annotation: Domain name=HEAT; Domain location=236-272; Score =29.6; E_value=1.3e-05; Accession=PF02985.14; Description=HEAT repeat
  Pfam annotation: Domain name=HEAT; Domain location=275-311; Score =26.1; E_value=0.00014; Accession=PF02985.14; Description=HEAT repeat
  Pfam annotation: Domain name=HEAT; Domain location=314-350; Score =27.2; E_value=6.6e-05; Accession=PF02985.14; Description=HEAT repeat
  Pfam annotation: Domain name=HEAT; Domain location=353-389; Score =27.6; E_value=5.1e-05; Accession=PF02985.14; Description=HEAT repeat
  Pfam annotation: Domain name=HEAT; Domain location=392-428; Score =25.9; E_value=0.00016; Accession=PF02985.14; Description=HEAT repeat
  Pfam annotation: Domain name=HEAT; Domain location=43-78; Score=2.2; E_value=27; Accession=PF02985.14; Description=HEAT repeat
  Pfam annotation: Domain name=HEAT; Domain location=431-467; Score =20.7; E_value=0.0063; Accession=PF02985.14; Description=HEAT repeat
  Pfam annotation: Domain name=HEAT; Domain location=470-506; Score =18.7; E_value=0.025; Accession=PF02985.14; Description=HEAT repeat
  Pfam annotation: Domain name=HEAT; Domain location=509-545; Score =15.5; E_value=0.22; Accession=PF02985.14; Description=HEAT repeat
  Pfam annotation: Domain name=HEAT; Domain location=548-584; Score =21.6; E_value=0.0033; Accession=PF02985.14; Description=HEAT repeat
  Pfam annotation: Domain name=HEAT; Domain location=82-117; Score =18.0; E_value=0.04; Accession=PF02985.14; Description=HEAT repeat
  Pfam annotation: Domain name=HEAT_PBS; Domain location=102-132; Score= 3.6; E_value=33; Accession=PF03130.8; Description=PBS lyase HEAT-like repeat
  Pfam annotation: Domain name=HEAT_PBS; Domain location=179-209; Score= 4.1; E_value=28; Accession=PF03130.8; Description=PBS lyase HEAT-like repeat
  Pfam annotation: Domain name=HEAT_PBS; Domain location=218-252; Score= 3.2; E_value=38; Accession=PF03130.8; Description=PBS lyase HEAT-like repeat
  Pfam annotation: Domain name=HEAT_PBS; Domain location=257-287; Score= 3.9; E_value=30; Accession=PF03130.8; Description=PBS lyase HEAT-like repeat
  Pfam annotation: Domain name=HEAT_PBS; Domain location=335-369; Score= 0.9; E_value=83; Accession=PF03130.8; Description=PBS lyase HEAT-like repeat
  Pfam annotation: Domain name=HEAT_PBS; Domain location=374-400; Score= 0.8; E_value=89; Accession=PF03130.8; Description=PBS lyase HEAT-like repeat
  Pfam module annotation: Pfam domain module=HEAT::HEAT::HEAT::HEAT::HEA T::HEAT::HEAT::HEAT::HEAT::HEAT::HEAT::HEAT::HEAT::HEAT_PBS::HEAT _PBS::HEAT_PBS::HEAT_PBS::HEAT_PBS::HEAT_PBS; Domain location=158 -194::197-233::...
  Pfam module annotation: Domain location=236-272::275-311::314 -350::353-389::392-428::43-78::431-467::470-506::509-545::548-584::82- 117::102-132::179-209::218-252::257-287::335-369::374-400
MAMIDEPLYPIAVLIDELKNEDIQLRLNSIRKLSTIARALGEERTRKELIPFLSENNDDEDEVLLAMAEELGVFIPYVGGVEHAHVLLPPLETLCTVEETCVRDKAVESLCRIGAQMNESDIVDWFIPVVKRLAAGEWFTARVSSCGLFHIAYPSASESLKAELRTIYGQLCQDDMPMVRRAAASNLGKFSATVEQNHLKTEIMSIFDDLTQDDQDSVRLLAVEGCAALGKLLEPQDCAVHILPVIVNFSQDKSWRVRYMVANQLYELCEAVGPEPTRDDLVQAYVRVLRDNEAEVRIAAAGKVTKFCKILSPEIAIQHILPCVKELSSDSSQHVRSALASVIMGMAPVLGKDATIEQLLPIFLSLLKDEFPDVRLNIISKLDQVNQVIGIDLLSQSLLPAIVELAEDRHWRVRLAIIEYIPLLASQLGVGFFDDKLGALCMQWLEDKVFSIRDAAANNLKRLAEEFSPEWAMQYIIPQVLEKINNPHYLYRMTTLQAISLLAPVMGADITCQQLLPVVIASSKDRVPNMKFNVAKVLQSLIPILDQSVVEKTVKPCLVELSEDPDVDVRYYANQALQACDQMVMST

SEQ ID NO: 112437 - protein, 587 aa, Setaria italica
  Transcript Sequence Number=SeqID_46463
  Gene Ontology: Mol. function=binding; Cellular component=plasma membrane; Biological process=ethylene mediated signaling pathway
  Homolog annotation: Hit_ID=Q38950; Match level="QueryCoverage=100%, HitCoverage=100%, E-value=0.0, Identity=90%"; Hit description =Serine/threonine-protein phosphatase 2A 65 kDa regulatory subunit A beta isoform
  Pfam annotation: Domain name=HEAT; Domain location=158-194; Score =23.6; E_value=0.00079; Accession=PF02985.14; Description=HEAT repeat
  Pfam annotation: Domain name=HEAT; Domain location=197-233; Score =19.0; E_value=0.02; Accession=PF02985.14; Description=HEAT repeat
  Pfam annotation: Domain name=HEAT; Domain location=236-272; Score =31.4; E_value=3.6e-06; Accession=PF02985.14; Description=HEAT repeat
  Pfam annotation: Domain name=HEAT; Domain location=275-311; Score =28.6; E_value=2.6e-05; Accession=PF02985.14; Description=HEAT repeat
  Pfam annotation: Domain name=HEAT; Domain location=314-350; Score =26.1; E_value=0.00015; Accession=PF02985.14; Description=HEAT repeat
  Pfam annotation: Domain name=HEAT; Domain location=353-389; Score =27.6; E_value=5.1e-05; Accession=PF02985.14; Description=HEAT repeat
  Pfam annotation: Domain name=HEAT; Domain location=392-428; Score =25.9; E_value=0.00016; Accession=PF02985.14; Description=HEAT repeat
  Pfam annotation: Domain name=HEAT; Domain location=43-78; Score=2.2; E_value=27; Accession=PF02985.14; Description=HEAT repeat
  Pfam annotation: Domain name=HEAT; Domain location=431-467; Score =20.7; E_value=0.0063; Accession=PF02985.14; Description=HEAT repeat
  Pfam annotation: Domain name=HEAT; Domain location=470-506; Score =18.1; E_value=0.037; Accession=PF02985.14; Description=HEAT repeat
  Pfam annotation: Domain name=HEAT; Domain location=509-545; Score =20.6; E_value=0.0064; Accession=PF02985.14; Description=HEAT repeat
  Pfam annotation: Domain name=HEAT; Domain location=548-584; Score =21.5; E_value=0.0034; Accession=PF02985.14; Description=HEAT repeat
  Pfam annotation: Domain name=HEAT; Domain location=82-117; Score =18.0; E_value=0.04; Accession=PF02985.14; Description=HEAT repeat
  Pfam annotation: Domain name=HEAT_PBS; Domain location=102-132; Score= 3.6; E_value=34; Accession=PF03130.8; Description=PBS lyase HEAT-like repeat
  Pfam annotation: Domain name=HEAT_PBS; Domain location=179-209; Score= 5.7; E_value=16; Accession=PF03130.8; Description=PBS lyase HEAT-like repeat
  Pfam annotation: Domain name=HEAT_PBS; Domain location=218-248; Score= 3.9; E_value=30; Accession=PF03130.8; Description=PBS lyase HEAT-like repeat
  Pfam annotation: Domain name=HEAT_PBS; Domain location=257-295; Score= 1.9; E_value=61; Accession=PF03130.8; Description=PBS lyase HEAT-like repeat
  Pfam annotation: Domain name=HEAT_PBS; Domain location=335-369; Score= 0.9; E_value=83; Accession=PF03130.8; Description=PBS lyase HEAT-like repeat
  Pfam annotation: Domain name=HEAT_PBS; Domain location=374-400; Score= 0.8; E_value=89; Accession=PF03130.8; Description=PBS lyase HEAT-like repeat
  Pfam module annotation: Pfam domain module=HEAT::HEAT::HEAT::HEAT::HEA T::HEAT::HEAT::HEAT::HEAT::HEAT::HEAT::HEAT::HEAT::HEAT_PBS::HEAT _PBS::HEAT_PBS::HEAT_PBS::HEAT_PBS::HEAT_PBS; Domain location=158 -194::197-233::...
  Pfam module annotation: Domain location=236-272::275-311::314 -350::353-389::392-428::43-78::431-467::470-506::509-545::548-584::82- 117::102-132::179-209::218-248::257-295::335-369::374-400
MAMIDEPLYPIAVLIDELKNEDIQLRLNSIRRLSTIARALGEERTRKELIPFLSENNDDEDEVLLAMAEELGVFIPYVGGVEHAHVLLPPLETLCTVEETCVRDKAVESLCRIGAQMKESDIVDWFIPVVKRLAAGEWFTARVSSCGLFHIAYPSAPDQLKTELRTIYGQLCQDDMPMVRRAAASNLGKFAATVEQSHLKTEIMSIFDDLTQDDQDSVRLLAVEGCAALGKLLEPQDCVAHILPVIVNFSQDKSWRVRYMVANQLYELCEAVGPEPTRADLVPAYVRLLRDNEAEVRIAAAGKVTKFCRILSPQLAIQHILPCVKELSSDSSQHVRSALASVIMGMAPVLGKDATIEQLLPIFLSLLKDEFPDVRLNIISKLDQVNQVIGIDLLSQSLLPAIVELAEDRHWRVRLAIIEYIPLLASQLGVGFFDDKLGALCMQWLEDKVFSIRDAAANNLKRLAEEFGPEWAMQHIIPQVLEKINNPHYLYRMTILQAISLLAPVMGAEITCQKLLPVIINSSKDRVPNIKFNVAKVLQSLIPILDQSVVEKTVKPCLVELSEDPDVDVRYYANQALQACDQMMVSS

SEQ ID NO: 112438 - protein, 68 aa, Setaria italica
  Transcript Sequence Number=SeqID_46464
SLPRVTRVRPRRRRLRRTLAAAAGGHQRRGFRLFCQAGRRTVGEYLQHSALFSWVNRTCGDHSARLSQ

SEQ ID NO: 112439 - protein, 107 aa, Setaria italica
  misc_feature (2)..(2): Xaa can be any naturally occurring amino acid
  Transcript Sequence Number=SeqID_46465
LXKKSCRTFCLYKIILRDKNMEDDTKSHYTKLSEQYTVTTDSESMAMLLCQVSVHQVCNQTCTSPIIWQPFMYHILGINCKSVNGSGSIALNWIIISFEATRCGLWR

SEQ ID NO: 112440 - protein, 81 aa, Setaria italica
  Transcript Sequence Number=SeqID_46466
  Gene Ontology: Mol. function=protein tyrosine kinase activity; Cellular component=integral to membrane; Biological process=protein amino acid phosphorylation
  Homolog annotation: Hit_ID=Q84U00; Match level="QueryCoverage=91%, HitCoverage=22%, E-value=4e-27, Identity=70%"; Hit description=Ser -thr protein kinase (Fragment)
MVAYAGGWSAIAEAHFMNKVEALSKVNHKNLMNLVGYCEDETPFIRMMVFEYVSNGSLFERLHVKEAEHLDWQSRLRIAMG

SEQ ID NO: 112441 - protein, 199 aa, Setaria italica
  Transcript Sequence Number=SeqID_46467
  Gene Ontology: Mol. function=protein tyrosine kinase activity; Cellular component=integral to membrane; Biological process=protein amino acid phosphorylation
  Homolog annotation: Hit_ID=B9SQR1; Match level="QueryCoverage=96%, HitCoverage=42%, E-value=7e-47, Identity=47%"; Hit description =Receptor protein kinase, putative
LKQILIAVKEAEHLDWQSRLRIAMGVVYCLSYRHQQNIPVTLRSLNSSCIYLTEDDATKVSDISFGAGKKEDEDEDEDEDDAPDEYSTVYKFALLLLETISGRRPYSDDDGLLVLWSQRYLNGVSPVMGMVDPTLNSVPEEHVRAFSELIRLCITEDRRRRPTMAELTKRMQEITGITQDQAIPRKSALWWAELEIISA

SEQ ID NO: 112442 - protein, 105 aa, Setaria italica
  Transcript Sequence Number=SeqID_46468
SADFYQLHPPKHCSANRSISNSRTNRSIPNRDLFDSLHQLILSFFDADYIRVKIWRQHMPSSFGVKHNLYFEISFNFPSETNALKISFHFAVFYLMIAIFSKRAP

SEQ ID NO: 112443 - protein, 174 aa, Setaria italica
  misc_feature (22)..(22): Xaa can be any naturally occurring amino acid
  Transcript Sequence Number=SeqID_46469
MLLNCGSLSSWVRRFVACVGGXCFGCAQPTPIIAVDEPSKGLRIQGRSVKRRHLSDDFWSSSPHEMENSALQSRHSMSSISTAAQPNDQHAAGSSSNPNEFVNQGLLQWHQTRQQWIGKRKRNSQGQQSREPKISHYATYESLLGSTKPFAQSIPLSEMVDFLVVSWEQEGLYD

SEQ ID NO: 112444 - protein, 112 aa, Setaria italica
  Transcript Sequence Number=SeqID_46470
  Gene Ontology: Cellular component=integral to membrane
  Homolog annotation: Hit_ID=P72990; Match level="QueryCoverage=65%, HitCoverage=17%, E-value=2e-16, Identity=50%"; Hit description =Slr1603 protein
ASIVLVYTTIIAILSSSSDEDSRGRRRRSYGSTIIIPTDMFWYLDADYYRRRRVEKENGMNFIESIFSFVFGDGDPNDGLEEKRWKMIVQYISSNGGVVTAEELAPFLDVPP

SEQ ID NO: 112445 - protein, 395 aa, Setaria italica
  Transcript Sequence Number=SeqID_46471
  Gene Ontology: Cellular component=integral to membrane
  Homolog annotation: Hit_ID=Q8YWK7; Match level="QueryCoverage=99%, HitCoverage=90%, E-value=3e-67, Identity=37%"; Hit description =All1606 protein
ALAADTEGFLEVSNDGEVLYVFPKDYRTKLAGKSFRMKIEPLANKAKEVGAYLVRVSFGTALIASIVLVYTTIIAILSSSSDEDSRGRRRRSYGSTIIIPTDMFWYLDADYYRRRRVEKENGMNFIESIFSFVFGDGDPNDGLEEKRWKMIGQYISSNGGVVTAEELAPFLDVPPPSEESKDDESFILPVLLRFQGHPEVDEQGNILYRFPSLQRTASSKNGGSREYVGTKWSAMFGGVEKYLEEKLWNFSKANASEKAMVAGLGGLNLFGVIILGNLLKQMTVTPGGLISFAAQLYPLLQIYAGSFFAIPLFRWFLLRKTNNDIRKRNKAREQRAQELLSPDSSLRRKLISARDMAQRKVITPEEIVYTTEKDLLEQDYEVKEWERRFKELESE

SEQ ID NO: 112446 - protein, 101 aa, Setaria italica
  Transcript Sequence Number=SeqID_46472
TSTSASLAPLHQGSRQILQAEEAGRFFGQRKPADKLSKKLAVEFSKKPAAIRALHGCRRSRLKGRSSGCCLTGNSPRVHDGAHPDAAEGDGFSDSFSNSAI

SEQ ID NO: 112447 - protein, 62 aa, Setaria italica
  Transcript Sequence Number=SeqID_46473
  Subcellular localization annotation: CTP_CleavageSite=29; ConfidenceScore=5.02e-01
VRACALTSFNVGLPLLTRPKVERKNSNCTCVMSKTLALHVLAVSLLVRNLKNITIYLYQIRS

SEQ ID NO: 112448 - protein, 77 aa, Setaria italica
  Transcript Sequence Number=SeqID_46474
  Subcellular localization annotation: CTP_CleavageSite=61; ConfidenceScore=5.26e-01
LNFLNVTGNFSDPLAISKLFAFFSWALFKIFVPLHATIVARRYMRLVYTNLSSSLQYRILRASTLVSSYRRSHAIDT

SEQ ID NO: 112449 - protein, 82 aa, Setaria italica
  Transcript Sequence Number=SeqID_46475
  Gene Ontology: Mol. function=serine-type peptidase activity; Cellular component=integral to membrane; Biological process=proteolysis
  Homolog annotation: Hit_ID=B9SQ38; Match level="QueryCoverage=91%, HitCoverage=44%, E-value=8e-23, Identity=65%"; Hit description =Mitochondrial inner membrane protease subunit, putative
  Pfam annotation: Domain name=Peptidase_S24; Domain location=1-66; Score=13.9; E_value=0.023; Accession=PF00717.15; Description =Peptidase family S24
ANSVLQGDFVLAERRCLEKYKFSHGDVVLFKCPSNHKELFVKRLIALPGEWIQLPGSPKVTKIPEGHCWVEGDNAARSWDSR

SEQ ID NO: 112450 - protein, 113 aa, Setaria italica
  Transcript Sequence Number=SeqID_46476
  Gene Ontology: Mol. function=serine-type peptidase activity; Cellular component=integral to membrane; Biological process=proteolysis
  Homolog annotation: Hit_ID=B9SQ38; Match level="QueryCoverage=96%, HitCoverage=64%, E-value=1e-39, Identity=66%"; Hit description =Mitochondrial inner membrane protease subunit, putative
  Pfam annotation: Domain name=Peptidase_S26; Domain location=1-93; Score=-38.1; E_value=0.045; Accession=PF10502.1; Description=Signal peptidase I
FRLAERRCLEKYKFSHGDVVLFKCPSNHKELFVKRLIALPGEWIQLPGSPKVTKIPEGHCWVEGDNAARSWDSRAFGPIPIGLIQGRVTHIIWPPSKIGQVERKMPEGRISPV

SEQ ID NO: 112451 - protein, 54 aa, Setaria italica
  Transcript Sequence Number=SeqID_46477
RLQIDTLLKIVSEMQTTAGLHDLSLLTCLITLSDLIFCDLERLFKYQKVNYSNY

SEQ ID NO: 112452 - protein, 455 aa, Setaria italica
  misc_feature (444)..(444): Xaa can be any naturally occurring amino acid
  Transcript Sequence Number=SeqID_46478
  Gene Ontology: Mol. function=calcium ion binding; Cellular component =nucleus; Biological process=regulation of transcription, DNA -dependent
  Homolog annotation: Hit_ID=Q7XKR4; Match level="QueryCoverage=56%, HitCoverage=26%, E-value=5e-44, Identity=41%"; Hit description =OSJNBa0053B21.7 protein
  Subcellular localization annotation: CTP_CleavageSite=56; ConfidenceScore=5.27e-01
FVHYRDVLEGSISVSARNDSPTSNQNGSASRAEVHSSPGWTSESILPCPNSSSPGSAEEVSSQTVTINNETNSTSRFDLIQHKAALRKLEMQLSLEDKEDSYIIAEEVPTNNEHVVFPGIQNGEPDSCGNLKDIFNIQEFSGHHTKETGTHPYPSVLDVLKNSETWLEDDQLVGILHPASMTPTENQWFHIHEVSPESAFSSEITKVIVLGDFLCNPSHSSWAMLFGDVKVPVEIIQQGAIRCHTPCLNAGKVTMCLIDGNGKPCSETRVFEFHEKPTKSMIDGNGKLCNDAQAIKAHQTPMKSNDELLLLLIYMQILFDGQGCDVFAKFSPQLPNPGCGFLVNQMDIMRKTYEQLDQEKTVNSVMEVLLNDKFRQWLLSKCEQNSNGDHLLPKQYHGVIHTIAALGYDLALKPLLSSGVPINYRDANGWTALHWAARFGREEXVVALLTADAAA

SEQ ID NO: 112453 - protein, 68 aa, Setaria italica
  misc_feature (21)..(21): Xaa can be any naturally occurring amino acid
  Transcript Sequence Number=SeqID_46479
  Gene Ontology: Cellular component=photosystem I reaction center; Biological process=photosynthesis
  Homolog annotation: Hit_ID=B6STG2; Match level="QueryCoverage=73%, HitCoverage=25%, E-value=2e-10, Identity=73%"; Hit description =Photosystem I reaction center subunit XI
  Subcellular localization annotation: CTP_CleavageSite=45; ConfidenceScore=5.61e-01
TAYAPMASQVMKSGLVHSRPXGLSGAALTRRPRFTVKAIQPEKVSGSTEQRNSDASFFIVFDRFGSWL

SEQ ID NO: 112454 - protein, 147 aa, Setaria italica
  Transcript Sequence Number=SeqID_46480
  Gene Ontology: Mol. function=chlorophyll binding; Cellular component =photosystem I reaction center; Biological process=photosynthesis
  Homolog annotation: Hit_ID=P23993; Match level="QueryCoverage=100%, HitCoverage=70%, E-value=2e-63, Identity=82%"; Hit description =Photosystem I reaction center subunit XI, chloroplastic
  Pfam annotation: Domain name=PsaL; Domain location=48-147; Score =179.8; E_value=8e-51; Accession=PF02605.7; Description=Photosystem I reaction centre subunit XI
  Subcellular localization annotation: CTP_CleavageSite=26; ConfidenceScore=5.44e-01
MATAYAPMASQVMKSGLVHSRPRGLSGAALTRRPRFTVKAIQPEKTTYQVVQPINGDPFIGSLETPITSSPLIAWYLSNLPAYRTAVSPLLRGIEVGLAHGYLLVGPFALTGPLRNTPVHGQAGALGAAGLVTILSVCLTMYGVASF

SEQ ID NO: 112455 - protein, 194 aa, Setaria italica
  Transcript Sequence Number=SeqID_46481
  Pfam annotation: Domain name=zf-U1; Domain location=88-123; Score =5.3; E_value=0.03; Accession=PF06220.4; Description=U1 zinc finger
VKRLDRTHPHLLTALNGAPEQQKEVGTDSVTVAFKRKLAPESSVPQQQSSFSCSAVQRQPGNWYPLKKKVKVPHPPSHIQQCPRPNVVPSFWCKICKVDCVTEFNFGAHIGGKKHKAKKLEILGNRNTGRPGSECSGNRNPVQNSHAVSGSRNNETNVSSGIVCADLSSDSRTNVTEESGCTNPPMSSLDFTAI

SEQ ID NO: 112456 - protein, 514 aa, Setaria italica
  misc_feature (286)..(286): Xaa can be any naturally occurring amino acid
  Transcript Sequence Number=SeqID_46482
  Gene Ontology: Mol. function=nucleic acid binding; Cellular component= nucleus; Biological process=regulation of transcription, DNA-dependent
  Homolog annotation: Hit_ID=Q10LF6; Match level="QueryCoverage=96%, HitCoverage=33%, E-value=0.0, Identity=75%"; Hit description =Transcriptional activator, putative, expressed
IRKTTRKSDFRNVATLDEVEASHEYSGIECIKTHGGFNKLVASLDSTYLDMGDNIRYSIPEGYDKLASSLNLPVSSDIRVEEHFLKGMLDLRTLAAMLGTDQKFEASNRGGLSEPLPQFESLQERVKVQKFSLQVTEDPFAIPEGAAGRIRRFIISEAGNLQVHYVKVLEKGDTYEIIERSLPKKQIIKKEPSVIVKEEAEKTYKLWQSLATKSIPKHHRNFNALLKKRQVDAKRFSDSCQREVKLKVSRSLKLMRCAAIRTRKLARDMLIFWKRVDKEQYELRKXEEREAAEALKREEELREAKRQQQRLNFLLSQTELYSHFMQNKTGASAPPDEEDVPDEDEEEDPEEAQLKREALRAAQHAVSQQKMKTNAFDSEIVRLRQTSESGLPTDDSSSMDPSKIDLLHPSTMPEKSSVQTPELFKGVLKEYQLKGLQWLVNCYEQGLNGILADEMGLGKTVQAMAFLSHLAEDKNIWGPFLVVAPASVVNNWAEELIRFCPDLKILPYWGPRRR

SEQ ID NO: 112457 - protein, 134 aa, Setaria italica
  misc_feature (78)..(78): Xaa can be any naturally occurring amino acid
  Transcript Sequence Number=SeqID_46483
DRERTRVRRRPHGPCRTYALTSSPTNETRSTYLITSRDKREHEQQLQRQRSKRRGGSSLCFCMHVRAPVGLSIDHTAXVFVCIRSMCRPARIGLELDRSGTSTWPRRRRRRRARRLRPLRRRRRRAPRRRTLRR

SEQ ID NO: 112458 - protein, 266 aa, Setaria italica
  Transcript Sequence Number=SeqID_46484
PASSCGKTIDDIVEFEELFGAQDKEERDAKFQPKVQTKLLKATKSQKTNQKVEASPVDEATQKESRDNIQTRLHYDQLQDPKCHGSVQTPDSEGLLATSNNDIGNLANLDSVLEVSVQEETIAKFRPKLRPKPAMVSSKVVGTNDNTTAATLMVGICAENNDVPTKPKDQETITAPATWSPQDVDATVDLDNHNELINSPIDGTQSMVGEVSAEATCKSQPSVGREKGKGKSVSFAMPDASGVVTPTVTNSEMDNVSDSYNDKLID

SEQ ID NO: 112459 - protein, 472 aa, Setaria italica
  Transcript Sequence Number=SeqID_46485
  Gene Ontology: Mol. function=ubiquitin thiolesterase activity; Cellular component=intracellular; Biological process=ubiquitin -dependent protein catabolic process
  Homolog annotation: Hit_ID=B6U7Y7; Match level="QueryCoverage=88%, HitCoverage=75%, E-value=0.0, Identity=93%"; Hit description=USP39 protein
  Pfam annotation: Domain name=UCH; Domain location=136-468; Score =141.7; E_value=2.3e-39; Accession=PF00443.21; Description=Ubiquitin carboxyl-terminal hydrolase
  Pfam annotation: Domain name=zf-UBP; Domain location=38-102; Score =15.8; E_value=0.0023; Accession=PF02148.11; Description=Zn-finger in ubiquitin-hydrolases and other protein
  Pfam module annotation: Pfam domain module=UCH::zf-UBP; Domain location=136-468::38-102
DVRRAPERRPRQVELRRDCPYLDTVNRQVLDFDFEKFCSISLSNLNVYACLVCGKYFQGRGLKSHAYTHSLEAGHHVFINLQTERAYCLPDGYEINDPSLEDIRHVLNPRFTREQVLNLDKNKQWSRALDGSNYLPGMVGLNNIKETDFVNVTIQSLMRVTPLRNFFLIPENYQHSKSPLVHRFGELTRKIWHARNFKGQVSPHEFLQAVMKASNKRFQIGVQSDPVEFMSWLLNTLHAKLKSSKKKNRSIIHDCFQGELEVVKEVHRKHIMEKTEDGDELNGDASSVVGTDGIVTETSKVPFLMLGLDLPPPPLFKDAMEKNIIPQVPLFNILKKFDGETVTEVVRPSIARMRYRVTRLPKYLILHMRRFTKNNFFVEKNPTLVNFPVKNLELKDYIPLPKPKENHKIRSKYDLIANIVHDGKPGEGCYRVFVQRKSEEAWYEMQDLHVTETLPQMVALSEAYMQIYEQHE

SEQ ID NO: 112460 - protein, 86 aa, Setaria italica
  Transcript Sequence Number=SeqID_46486
YCWPLHNLFGRYLVICNGIFNCLGRNMFFLNMAESALSPVGLILICSSCMNNLILNLSFLLSYLFPLSSAQSKKPNNDRHAQCGSS

SEQ ID NO: 112461 - protein, 253 aa, Setaria italica
  Transcript Sequence Number=SeqID_46487
  Gene Ontology: Mol. function=catalytic activity; Biological process =trehalose biosynthetic process
  Homolog annotation: Hit_ID=B9SNF1; Match level="QueryCoverage=97%, HitCoverage=32%, E-value=1e-106, Identity=74%"; Hit description =Trehalose-6-phosphate synthase, putative
  Pfam annotation: Domain name=Hydrolase_3; Domain location=6-221; Score=-77.0; E_value=0.049; Accession=PF08282.4; Description =haloacid dehalogenase-like hydrolase
  Pfam annotation: Domain name=Trehalose_PPase; Domain location=7-240; Score=284.1; E_value=3.1e-82; Accession=PF02358.8; Description =Trehalose-phosphatase
  Pfam module annotation: Pfam domain module=Hydrolase_3::Trehalose _PPase; Domain location=6-221::7-240
AKTRAILLDYDGTLMPQAITRARPPESVRILNSLCRDKNNEVYLCSGYDRRTLHEWFPCENLGIAAEHGYFLRSKRDAEWQTCITPADCSWKQIAEPVMCLYRETTDGSTIEDRETILVWNYEDADPDFGSCQAKELVDHLESVLANEPVSVRTTPHSVEVKPQGVSKGLVARRMLASMQERGQCPDFVLCIGDDKSDEDMFQLIATAACGDSLASKAEVFACTVGRKPSKAKYYLDDAAEVVRLMQGARPTS

SEQ ID NO: 112462 - protein, 572 aa, Setaria italica
  Transcript Sequence Number=SeqID_46488
  Gene Ontology: Mol. function=catalytic activity; Biological process =trehalose biosynthetic process
  Homolog annotation: Hit_ID=Q94AH8; Match level="QueryCoverage=98%, HitCoverage=65%, E-value=0.0, Identity=74%"; Hit description=Alpha ,alpha-trehalose-phosphate synthase [UDP-forming] 6
  Pfam annotation: Domain name=Glyco_transf_20; Domain location=1-444; Score=769.7; E_value=2e-228; Accession=PF00982.13; Description =Glycosyltransferase family 20
IYIGCLRDDIPAADQDAVAQALLDTHNCVPAFLPPDIAERYYHGFCKQHLWPLFHYMLPLSPDLGGRFDRSLWQAYVSANKIFADKVLEVINPDDDFVWVHDYHLMVLPTFLRKRFNRIKLGFFLHSPFPSSEIYKTLPVREELLRALLNSDLIGFHTFDYARHFLSCCGRMLGLSYESKRGHICLEYYGRTVSIKILPVGVHMEQLKTVLGLPKTEAKVAELMEMYMGKGRVVMLGVDDMDIFKGISLKLLAMEELLRQHPEWRGKLVLVQVANPARGRGKDVAEVQAETYAMVQRINEVYGEPGYEPVVLIDEPLQFYERVAYYVIAEVCLVTAVRDGMNLIPYEYIVSRQGNEKLDRMLRQGKPEEKKSMLVVSEFIGCSPSLSGAVRVNPWNIEAVADAMESALVLPENEKKLRHDKHFRYVSTHDVGYWANSFLQDLERTCKDHSHRRCWGIGFGLRFRVVSLDRHFKKLSLESILMAYRNAKTRAILLDYDGTLMPQAINKSPSAESVRILNSLCRDKNNEVYLCSGYDRRTLHEWFPCENLGIAAEHGYFLRSKRDANVLLNSMS

SEQ ID NO: 112463 - protein, 307 aa, Setaria italica
  Transcript Sequence Number=SeqID_46489
  Gene Ontology: Mol. function=catalytic activity; Biological process =trehalose biosynthetic process
  Homolog annotation: Hit_ID=B9SNF1; Match level="QueryCoverage=87%, HitCoverage=36%, E-value=1e-114, Identity=72%"; Hit description =Trehalose-6-phosphate synthase, putative
  Pfam annotation: Domain name=Hydrolase_3; Domain location=39-254; Score=-71.2; E_value=0.025; Accession=PF08282.4; Description =haloacid dehalogenase-like hydrolase
  Pfam annotation: Domain name=Trehalose_PPase; Domain location=40-273; Score=284.2; E_value=2.9e-82; Accession=PF02358.8; Description =Trehalose-phosphatase
  Pfam module annotation: Pfam domain module=Hydrolase_3::Trehalose _PPase; Domain location=39-254::40-273
LVITVRTNLLTNETALNVKNKYGRTNILMAYRNAKTRAILLDYDGTLMPQAINKSPSAESVRILNSLCRDKNNEVYLCSGYDRRTLHEWFPCENLGIAAEHGYFLRSKRDAEWQTCITPADCSWKQIAEPVMCLYRETTDGSTIEDRETILVWNYEDADPDFGSCQAKELVDHLESVLANEPVSVRTTPHSVEVKPQGVSKGLVARRMLASMQERGQCPDFVLCIGDDKSDEDMFQLIATAACGDSLASKAEVFACTVGRKPSKAKYYLDDAAEVVRLMQGLSYVSEELALANHRDEDEDSSLDVWE

SEQ ID NO: 112464 - protein, 112 aa, Setaria italica
  Transcript Sequence Number=SeqID_46490
  Gene Ontology: Mol. function=oxidoreductase activity, acting on the CH-OH group of donors, NAD or NADP as acceptor; Cellular component =chloroplast; Biological process=L-serine biosynthetic process
  Homolog annotation: Hit_ID=B6SYR1; Match level="QueryCoverage=84%, HitCoverage=16%, E-value=1e-32, Identity=78%"; Hit description=D-3 -phosphoglycerate dehydrogenase
  Pfam annotation: Domain name=2-Hacid_dh; Domain location=27-110; Score=-2.4; E_value=0.0051; Accession=PF00389.22; Description=D -isomer specific 2-hydroxyacid dehydr
AASPSREPRSRSLTAPVAAAAGGRPTVLVTEKLGPAGLDLLRSFANVDCSYELTAEELRAKVSLVDALVVRSGTCVTREVFEAARGRLRVVGRAGVGIDNVDLQAATEAGCL

SEQ ID NO: 112465 - protein, 445 aa, Setaria italica
  Transcript Sequence Number=SeqID_46491
  Gene Ontology: Mol. function=transcription regulator activity; Cellular component=nucleus; Biological process=regulation of transcription
  Homolog annotation: Hit_ID=Q5IWM1; Match level="QueryCoverage=70%, HitCoverage=100%, E-value=1e-120, Identity=73%"; Hit description =BHLH transcription factor (Fragment)
  Pfam annotation: Domain name=HLH; Domain location=288-337; Score =49.0; E_value=1.9e-11; Accession=PF00010.18; Description=Helix-loop -helix DNA-binding domain
QAFAAGIPLWIPNTERKVFPANYCYRGFLANAAGFRTIVLVPFESGVLELGSMQHIAESSDTIQNIRSVFAGASTNKAAVQRHEGNDPTPPERSPGLAKIFGKDLNLGRPSAVPAIGGVSKVDERSWEQRSAAAGTSLLPNVQKGLQNFTWSQARGLNSHQQKFGNGVLIVSNEAAHRNNGAADSPSPSQFQLQKAPQLQKLQLQKLPHIQKTPQLVTQQPLQPQVPRQIDFSAGSSSKSGVLVTRAAVLDGESAEVDGLCKEEGPPPVIEDRRPRKRGRKPANGREEPLNHVEAERQRREKLNQRFYALRAVVPNISKMDKASLLGDAITYITDLQKKLKEMETERERLLESGMVDPRERAPRPEVDIQVVQDEVLVRVMSPMESHPVKKVFQAFEEAEVRVGESKVTGNNNGTVVHSFIIKCPGTEQQTREKVITAMSRAMSS

SEQ ID NO: 112466 - protein, 300 aa, Setaria italica
  Transcript Sequence Number=SeqID_46492
  Gene Ontology: Mol. function=single-stranded DNA binding; Biological process=DNA replication
  Homolog annotation: Hit_ID=B6TNE0; Match level="QueryCoverage=100%, HitCoverage=100%, E-value=1e-126, Identity=75%"; Hit description =Single-strand binding protein
  Pfam annotation: Domain name=SSB; Domain location=71-166; Score=86.1; E_value=1.2e-22; Accession=PF00436.17; Description=Single-strand binding protein family
  Subcellular localization annotation: CTP_CleavageSite=45; ConfidenceScore=5.43e-01
MAILAVASPLKTLNPSPADPRRRRLSYSLLRLPPPVPRGRRLWCSAQYGETAAPPTTTPRPAEIPWSRELCNSVRLIGTVGTEVELRQLPSGSAVARGRLAVWKSATETTWVTLQFWDDLALVASEHVKKGDRIFVSGRLVSDTVDEGPEKRHVYYKVAVQQLNFIESMQPVRLYEPEASDDNPGGSRGGYFDSTSSSSEDKNRDNISSSSRSTEELWQAFFANPLDWWDNRTNKKNPRYPDFKHKHTGEALWVDGRNNPNWVISQLAVLDSRMGSLQDNERKPVSYMYADDFMTLDGSR

SEQ ID NO: 112467 - protein, 208 aa, Setaria italica
  Transcript Sequence Number=SeqID_46493
MVVHLSWEYYHALPFHDLLEPEWAVLIKEALVDAAASIHNTLKQQGDEFWLHVAQHCLYYGVLYHRLQGAAGCQASTTFSVTSDELVRCLVAEELIFSTTSPTRKPAATGEKQSNYYRSAYEAGKVVVQALQEYSLLPIYSVSTPTSSTSWTATTTSASSFQDNITGVSQLAKGVSRLKQDELVPKREKLRWVSFMNGDGRHVSWDWE

SEQ ID NO: 112468 - protein, 51 aa, Setaria italica
  Transcript Sequence Number=SeqID_46494
  Subcellular localization annotation: CTP_CleavageSite=16; ConfidenceScore=5.04e-01
FAFYFPPLFIGQDLPKRMSVCSPNSLTSQRLKVLFLSTIDTSSIQITPPTW

SEQ ID NO: 112469 - protein, 124 aa, Setaria italica
  Transcript Sequence Number=SeqID_46495
RFLPDTGFCLSINLIKNPIFVLLNPSFPSLLGAGLLLLDALLLCRLLSFHVRMCVSSHHMSPSVASFPAAAASIGKWKAGAGNTNAARTHISITWKGWNSGWCHELTLFPPLAKLHMIDVNPKG

SEQ ID NO: 112470 - protein, 81 aa, Setaria italica
  Transcript Sequence Number=SeqID_46496
MMMEKAQEGQQQGAAASALVVHSQVRRIKQEEDEKVKVHETYQHHVSEMRLVLRDLGRQRSRSPLGRVVARPAAISIGGDS

SEQ ID NO: 112471 - protein, 112 aa, Setaria italica
  Transcript Sequence Number=SeqID_46497
TCKLNRRIAVTRAIRGVAWQVIWLIHQSHHIHSGSHQQGGEAKKPGEEAEKARRTEAEADAKRIPQHAFGSLLLLLLFLDGAELDLAAFRLRDGHQHRPPAPPHQQAPQPAG

SEQ ID NO: 112472 - protein, 110 aa, Setaria italica
  Transcript Sequence Number=SeqID_46498
PGDSPKCLTPMMPGIRVPASLHSDTAHWGIRNADSSSGKQPLKPCRETLWLSDKFATIGRAHRARFVCLTGMNGLIEWQSYHTVTASLGLQARQESSIPLELSLFCLYPN

SEQ ID NO: 112473 - protein, 78 aa, Setaria italica
  misc_feature (1)..(27): Xaa can be any naturally occurring amino acid
  Transcript Sequence Number=SeqID_46499
XXXXXXXXXXXXXXXXXXXXXXXXXXXFFFFRFKSVNFIEGNHFSDRFLHHAIQKILSFFYIPRSDFLTSLETKHHIN

SEQ ID NO: 112474 - protein, 358 aa, Setaria italica
  Transcript Sequence Number=SeqID_46500
  Gene Ontology: Mol. function=cysteine-type endopeptidase activity; Cellular component=endoplasmic reticulum lumen; Biological process =proteolysis
  Homolog annotation: Hit_ID=B9SBS8; Match level="QueryCoverage=91%, HitCoverage=90%, E-value=1e-93, Identity=52%"; Hit description =Cysteine protease, putative
  Pfam annotation: Domain name=Inhibitor_I29; Domain location=36-93; Score=88.4; E_value=2.5e-23; Accession=PF08246.4; Description =Cathepsin propeptide inhibitor domain (
  Pfam annotation: Domain name=Peptidase_C1; Domain location=130-357; Score=395.9; E_value=6.8e-116; Accession=PF00112.15; Description =Papain family cysteine protease
  Pfam module annotation: Pfam domain module=Inhibitor_I29::Peptidase _C1; Domain location=36-93::130-357
MARPSLLLPALLVVVVGGVCAAPASACADDPMLERFQQWMGRHGRLYGSTGEKRRRLEVYRRNVELVEQFNSMGNGGYKLADTKFADLTNEEFRAKVLGFGPHGRTGHTTAPSTTTSLVDSGMAEDYSDLPKSVDWREKGAVAPVKNQGDCGSCWAFSAVAAMEGINQIKNGKLVSLSEQELVDCDTEAVGCAGGYMSWAFEFVMKNRGLTTERNYPYQGMNGNCQTPKLNQSAVSISGYQNVTASSEPDLLRAVAAQPVSVAVDAGSFVWQLYGGGVFTGPCTAELNHGVTVVGYGETQGDADGDGGGTPGQKYWIVKNSWGAEWGEAGYIRMQREAAGGVADGLCGIALLPSYPLM

SEQ ID NO: 112475 - protein, 65 aa, Setaria italica
  Transcript Sequence Number=SeqID_46501
DFPSSKTPSKEAWTLHLSQKKLARVVWSSARASSSDHLALGDPEELLQVVRAEVLQLDDEPLLLG

SEQ ID NO: 112476 - protein, 71 aa, Setaria italica
  Transcript Sequence Number=SeqID_46502
QNTKRSKFQANTPRMIHIMAELTDLCARRLTQPDATLSMEAGLAEYQLSLCNLSMRKSSPLLCFCLRDYRE

SEQ ID NO: 112477 - protein, 94 aa, Setaria italica
  Transcript Sequence Number=SeqID_46503
  Gene Ontology: Biological process=response to stress
  Homolog annotation: Hit_ID=B6T000; Match level="QueryCoverage=95%, HitCoverage=98%, E-value=1e-19, Identity=58%"; Hit description =Protein induced upon tuberization
  Pfam annotation: Domain name=LEA_3; Domain location=1-90; Score=52.2; E_value=2e-12; Accession=PF03242.5; Description=Late embryogenesis abundant protein
MERVASGCVSLLAQRRAYSVAAAMAKGAGRRADEKKAAAKRVMGKKEVNTAAAVAEEKTAWVPDPATGYYRPAGGAKEVDAAELRAKLLTQAAN

SEQ ID NO: 112478 - protein, 59 aa, Setaria italica
  Transcript Sequence Number=SeqID_46504
CLSSVRVRVVDNFFHGNFTEVDKKHHQFLLSECVSVFVTTFVDMDVGKACSMHARIYEY

SEQ ID NO: 112479 - protein, 877 aa, Setaria italica
  Transcript Sequence Number=SeqID_46505
  Gene Ontology: Mol. function=microtubule motor activity; Cellular component=microtubule associated complex; Biological process =microtubule-based movement
  Homolog annotation: Hit_ID=B9R839; Match level="QueryCoverage=98%, HitCoverage=81%, E-value=5e-95, Identity=50%"; Hit description=ATP binding protein, putative
  Pfam annotation: Domain name=Kinesin; Domain location=4-187; Score =94.3; E_value=4.4e-25; Accession=PF00225.15; Description=Kinesin motor domain
KTNDSTPLRLLDDPEKGTTVERLTEETLRDYDHLRDLLAVCEAQRQIGETALNETSSRSHQILRLIIESSTRQYLGRGNSSTLVACVNFVDLAGSERASQTASAGMRLKEGSHINRSLLTLGKVVRQLSKGRNGHIPYRDSKLTRILQSSLGGNARTAIICTMSPAHTHIEQSRNTLLFATCAKEVITNAHVNVVMSDKALVKHLQRELARLENELKFPGSASCTTHTEALREKDAQIKKLEKQLKELMEERDTVQSQLNCLLKGDGDDHHNEHTAKPWDEHSRSSESLARNVSEEALSVADAYGAAHQDQDYASFNGSYVCSSDHNDSAFLGETRELPRQTWDQKLVSPWHPPSNHSSDGIEPYHMKEAASRTASEVSEEHCREVQCIDIHEHVRSRSHEFNELLPEDTKIQTPDVEVITKDAVPQSDEQQGLESITKKIEDHVRSYPSKDEQQADNIAKIEEDSVKMYQCESDRIRENAVKLYTCDSNHSFDISKPYPHECLSLKRCIMSSRDRALARSNSCRASFVVIPNSWFDDSDNTSRTPPDEIFRYAPRRLGKVRRSLYAENDDCQNEDPLLDCSVVACEVASDEVVKDMSTSDEVAKKMSTSDELGKEISTNDEVANEMSTSDEEQEIQINDISCVTELKENTKNCHEDQPVAFHAQLVMQAIRDESTAMKTVKDVGVDIALSPIESPSHPTVDFEKKQQQIIELWHECNVSIVHRTYFFLLFRGDPADNIYMEVEHRRLSFIKNSFSAEPTAQGELNPAIASSLKNLRRERDMLYKQMLKKLSNGEKESIYSKWGIDLSTKQRRLQLSRLIWTQTDMEHIRESASLVARLIDLLEPGQALKEMFGMNFSLAPRTDRRSFGLVGSYSMK

SEQ ID NO: 112480 - protein, 43 aa, Setaria italica
  Transcript Sequence Number=SeqID_46506
FKYLKIRYGHENKPLLKIGNITCSDASFLIASYWINLFRCVLG

SEQ ID NO: 112481 - protein, 67 aa, Setaria italica
  Transcript Sequence Number=SeqID_46507
  Gene Ontology: Mol. function=nucleotide binding; Cellular component =plasma membrane; Biological process=small GTPase mediated signal transduction
  Homolog annotation: Hit_ID=Q3S835; Match level="QueryCoverage=94%, HitCoverage=34%, E-value=3e-28, Identity=98%"; Hit description=RAB7 (Fragment)
  Pfam annotation: Domain name=Ras; Domain location=11-67; Score=-51.3; E_value=1.9e-05; Accession=PF00071.14; Description=Ras family
MESWRRRTLLKVIVLGDSGVGKTSLMNQYVNKKFSQQYKATIGADFLTKEVLIEDKLVTLQIWDTAG

SEQ ID NO: 112482 - protein, 135 aa, Setaria italica
  Transcript Sequence Number=SeqID_46508
  Gene Ontology: Mol. function=metal ion binding
  Homolog annotation: Hit_ID=B6SL30; Match level="QueryCoverage=99%, HitCoverage=21%, E-value=5e-56, Identity=83%"; Hit description=Metal ion binding protein
  Subcellular localization annotation: CTP_CleavageSite=26; ConfidenceScore=5.08e-01
SDMPPEALSSLAPLQLEARSAFHPSRAASSANVGGSSPDSSLDSPDLHLYRVSAVSSSGAEDLQLTALAAPGSTPQQGVQLSRSTSDGYEASGGEDSDRIPSRIVHRSSNWASIILNSDQSASSSGILVAKNRLS

SEQ ID NO: 112483 - protein, 380 aa, Setaria italica
  misc_feature (37)..(37): Xaa can be any naturally occurring amino acid
  Transcript Sequence Number=SeqID_46509
  Gene Ontology: Mol. function=metal ion binding; Cellular component =integral to membrane
  Homolog annotation: Hit_ID=B6SL30; Match level="QueryCoverage=97%, HitCoverage=59%, E-value=1e-170, Identity=81%"; Hit description =Metal ion binding protein
ATGSDDQNHLHICIGKRNYRRFFVLMSTALVLLILQXLGSNLVLVLCFVERKEFSVQIVSKLGSSFSLVPFVIVVASCSILAMVASLPIAQLLFFHILLIKKGISTYDYIIALREQDQEDASGQQSPQMSRVSSYTGLSSASSFGPLRRGSWCTPPRLFLEDQYDVIPSEAGSSHNSATKRKEDEVRRKKGSGAVKISPWALARLNAEEVSRVAAEARKKSKVLVPIRKDDYSRGHDTDSSYGGMSSGRIDLGPDSKRRTNRRGRQPSDLSLKPVAKISADVIHSTGSDMPPEALSSLAPLQLEARSAFHPSRAASSANVGGSSPDSSLDSPDLHLYRVSAVSSSGAEDLQLTALAAPGSTPQQGVQLSRSTSDGYEAFR

SEQ ID NO: 112484 - protein, 92 aa, Setaria italica
  Transcript Sequence Number=SeqID_46510
TYIIPRCSQNYAHIKSKTTYNFERIEYYIPASSDTFLRFYFTRVNVVRLLISLPMPQSCTFIHMRDRYSAWTLCGVCRSSKCLDVDARMVTV

SEQ ID NO: 112485 - protein, 88 aa, Setaria italica
  Transcript Sequence Number=SeqID_46511
  Subcellular localization annotation: CTP_CleavageSite=29; ConfidenceScore=5.49e-01
NHALRTGTTTTPRPRASPPAPTAARTQLRGNHLASGERSAPWGYFPCALSTETFTSLPQSLSAALDHAAAPQPAADCVRGDRRLEPLR

SEQ ID NO: 112486 - protein, 57 aa, Setaria italica
  misc_feature (40)..(40): Xaa can be any naturally occurring amino acid
  Transcript Sequence Number=SeqID_46512
MGARDNMEGREEKKGVGSDYVPTRDSFSSQGESRVPRKLXKKETKEYSPRTTKSSAS

SEQ ID NO: 112487 - protein, 110 aa, Setaria italica
  Transcript Sequence Number=SeqID_46513
LVYHKRPISSTVSKVDQKESLSKLFNIPVNGGDGVRSDRASPLLPTPMLTTLILIFWGKRLACHKVRAQMKAQGLPKNQHSSLSVMNEHVDAYCGTRFNIQFTTDKIKKK

SEQ ID NO: 112488 - protein, 85 aa, Setaria italica
  Transcript Sequence Number=SeqID_46514
  Subcellular localization annotation: CTP_CleavageSite=36; ConfidenceScore=5.65e-01
AAAWSPRTSLPANAIAASVPQSPLRQLPRRSMLGMKTQTKKDGSRVDFDCCLQSSTSQPSRIWGQVIESQSPKGIKSSPADILTF

SEQ ID NO: 112489 - protein, 93 aa, Setaria italica
  Transcript Sequence Number=SeqID_46515
FTTKPTRTRNLKSLEQMDVGWVQAEGLQCYYIYVSGVPDRLPTKMGTETRVVSKQLPFSQSFKSLLSCDIFKSKLKHVDMSDNLHTTSKGKYV

SEQ ID NO: 112490 - protein, 345 aa, Setaria italica
  misc_feature (75)..(75): Xaa can be any naturally occurring amino acid
  Transcript Sequence Number=SeqID_46516
  Gene Ontology: Mol. function=pyridoxal phosphate binding; Cellular component=chromoplast; Biological process=cysteine biosynthetic process from serine
  Homolog annotation: Hit_ID=Q5Z8Z0; Match level="QueryCoverage=97%, HitCoverage=96%, E-value=1e-131, Identity=66%"; Hit description =Putative cysteine synthase
  Pfam annotation: Domain name=PALP; Domain location=25-320; Score =351.4; E_value=1.7e-102; Accession=PF00291.17; Description=Pyridoxal- phosphate dependent enzyme
MDMQEGRKGIPSLLSSQGECIASNITQLIGWTPLIELKNIAKKDGINARLIGKIEPYQPLSSVKDRSALRLTEYXIEDAEEKNLISPGITTLVAATSGNLGIGVALVAAQKGYKFIAVMPAKIAIDKQILLRYLGVEVILVDPAINGFKGLLDRVEQLKNEMENVYVIDQFTNPANPDAHFRWTGPEIWKDTEGKVDIFVAASGSGGTLTGTGRYLKMKSPSVKLMCVEPAESAVISGGEPAYHKIQGIGPGFVPEILDTSQIDEIITVTAQEAMDVARRLAREEGLLVGISSGANAAACLKVAAREENKGKMIVTMFSSGGERYLNSELFAQAKEECVNINMAF

SEQ ID NO: 112491 - protein, 63 aa, Setaria italica
  misc_feature (53)..(53): Xaa can be any naturally occurring amino acid
  Transcript Sequence Number=SeqID_46517
YTCLLQILMTPHTSKLSYNFCRCFLLFVGRKLSQMRCLNSKYICPGILMHEKXYMKKHPLKYQ

SEQ ID NO: 112492 - protein, 76 aa, Setaria italica
  Transcript Sequence Number=SeqID_46518
GGGRGVARSDSCDMAWRARSDSDSPSKATTKDYRRFAIARDPHTCAYSVLSIGEYHSGPNARKPRRAATNATIAPP

SEQ ID NO: 112493 - protein, 310 aa, Setaria italica
  Transcript Sequence Number=SeqID_46519
  Gene Ontology: Mol. function=aspartic-type endopeptidase activity; Cellular component=chromatin; Biological process=DNA integration
  Homolog annotation: Hit_ID=Q10F54; Match level="QueryCoverage=70%, HitCoverage=9%, E-value=5e-79, Identity=69%"; Hit description =Retrotransposon protein, putative, Ty1-copia subclass
  Pfam annotation: Domain name=RVT_2; Domain location=163-310; Score =207.1; E_value=4.7e-59; Accession=PF07727.6; Description=Reverse transcriptase (RNA-dependent DNA pol
ISRDVVFDEERGWDWSSPESGTSAPNSSEFQVEYVWSEVVSEPATPPSPPPPNSPRTPVPGSPVGVEEVEDDDVVANSVPAATATPPPSSPQIEHATPLEDDDDRLDAYHDDEPLRYRTVSNIIGQQPTPPPATRLFAELHLTHSGEPTSHTEAKRDPAWCEAMKEELRSVERNKTWELVKPPAGHRPITLKWVFKLKKDEHGNVIKHKARLVARGFVQQEGVDYDDAFAPVARMESVRVLLALAAQEGWSVHQMDVKSAFLNGDLNEEVYVYQPPGFAVAGQEDKVYRLRKALYGLRQAPRAWNAKLDS

SEQ ID NO: 112494 - protein, 116 aa, Setaria italica
  Transcript Sequence Number=SeqID_46520
RPAPRANRRADARGNPRICSRRRSHARATPPLSSPCITGKLLDGAACEPHACSGKKLYSGASLPRHSSLSRCPSGGAKKGGRGGEEMALSIDDWLGHILLLCSSSDWCRRGPVWAR

SEQ ID NO: 112495 - protein, 101 aa, Setaria italica
  Transcript Sequence Number=SeqID_46521
RLRSIANAEACEGDPPEKSDDSNAPTTATNGSSCKAEECCSSAMRELQSSVSCSPRPFPSSIPSNKVQPMPIVGVSPHQQQKKKTAVVRLSFRRRSYEGDE

SEQ ID NO: 112496 - protein, 150 aa, Setaria italica
  Transcript Sequence Number=SeqID_46522
LPVDEQFISDYEQLRMQYPDQDQLQAVTESVLISFVLQCSSHAPQSEFLLFATRCLCARGHLRWDNLLPSLLNAVSSMEAPMGQGVPVTGGGPVTPSSSAMAMPNAPNFHPSNPASPLSVMNTIGSPTQSGVDQPVGANVSPIKAAEFSS

SEQ ID NO: 112497 - protein, 116 aa, Setaria italica
  Transcript Sequence Number=SeqID_46523
HRSKEKEPQSESSWKGTDFLHGVESMKEDSRRLTSSVHHFDEGEFEGSPSAVIAEHEACFLRRKRRVAARKVPMSMARKICAFRCKCRGKNSSLCQGLELCASAKKVCIHFLVISV

SEQ ID NO: 112498 - protein, 102 aa, Setaria italica
  misc_feature (37)..(37): Xaa can be any naturally occurring amino acid
  Transcript Sequence Number=SeqID_46524
  Gene Ontology: Mol. function=aspartic-type endopeptidase activity; Biological process=DNA integration
  Homolog annotation: Hit_ID=Q53P77; Match level="QueryCoverage=89%, HitCoverage=6%, E-value=1e-19, Identity=50%"; Hit description =Retrotransposon protein, putative, unclassified
LILPRRKTCSNIAGTTAACQGVWLAQLLAELKSKLLXSQDGLGYCTLSKNPVFHDRSKHIDVRFHFIRECVGDGKLDIEHFRTEEQLADILTKPLARDRFCE

SEQ ID NO: 112499 - protein, 876 aa, Setaria italica
  misc_feature (203)..(203): Xaa can be any naturally occurring amino acid
  misc_feature (382)..(382): Xaa can be any naturally occurring amino acid
  misc_feature (406)..(406): Xaa can be any naturally occurring amino acid
  Transcript Sequence Number=SeqID_46525
FVNHGVFQQAMWQWYRKAGTLEDWVRSGKGQSKLSSAMMVEQLRFWRSCISYGFCIAHFADLFPVLCLWLSPPNKNLSEHNVLVEFSSVARESYLVLGALAQRLPLLHSVEQLAKQDVGVSASTYIETWSWSHVVPMVDIALSWLRLNDIPYVCSLISSQNRNTKQMLEASYLILVIASVLGMLNSILERISPDATSDGKIYXLPWIPDFVPKIGLGIIGNGFFSISGTVAFGNLDHQSFCSTSLVQGLCYMRCHGNVDMSLSSISCLQRLMQLSWSVDRVIQGATKSCTEHLIESKTGAAGKLLGEGISSLWHDDLLHLLTSLLPMISSQWSILQNIEVFGRGGPAPGVGLGWGTCGGGFWSLKCLLAQLDSQLVLELFKXFSSAPGGSVTLNNRMNSDNVSKTXVTSSDRISSSLGASLIAGPGQIYMMEKAFDILLEPSSLKYLKSSIHIFASHMALPKLFEWDITEEEYQLFSSVLNSHYRSRWLSIKKKHSDKDAGNNNSTNVQKIPETLETIQEETELTEAVNEPHSTLVVEWAHQRLPLPVHWILSAVCCIDDPKGILSTSAKYILDVSRAGLIFLLGLEAISAAPCLHAPLIWKMHALSVSIRSSMDLLQEDRSRDIFHALQELYGQHLDRLCQKYCRSHSVKEDDSAGVANLEEAKEISRFEILRFQEKIHGSYTTFVESLVEQFAAVSYGDVTFGRQVAIYLHRTVEPAVRLAAWNALSNAYALELLPPLDKCIGNTEGYLEPLEDDEKILESCAKSWTSGVIDKAAQRDSMAFTLVKHHLSGFVFQCSASGKTLRYKVVKSLLRCYAQKPHHEAMLKSFIMQGIAQDPEHSSNELDRRFEILKDACEMNSSLLAEVQRLKASLGQ

SEQ ID NO: 112500 - protein, 150 aa, Setaria italica
  misc_feature (107)..(107): Xaa can be any naturally occurring amino acid
  Transcript Sequence Number=SeqID_46526
  Gene Ontology: Mol. function=aspartic-type endopeptidase activity; Cellular component=chromatin; Biological process=chromatin assembly or disassembly
  Homolog annotation: Hit_ID=A5JSC4; Match level="QueryCoverage=95%, HitCoverage=9%, E-value=4e-63, Identity=77%"; Hit description =Polyprotein
  Pfam annotation: Domain name=rve; Domain location=2-95; Score=-2.2; E_ value=0.015; Accession=PF00665.18; Description=Integrase core domain
SLHGVPKTIISDRGVQFVARFWEQLQASMGTKLIRSSTYHPQTDGQTERVNQILEDMLRACVIHYDKNWDKCLPLAEFSYNNSYQTSLKMAPFEALYGRRCRTPLNXSQAGERQIYGPDLVAEAEEQVRVIQANLKAAQSRRNSKVSLKL

SEQ ID NO: 112501 - protein, 122 aa, Setaria italica
  Transcript Sequence Number=SeqID_46527
  Subcellular localization annotation: CTP_CleavageSite=11; ConfidenceScore=5.06e-01
KHGPSQKPSIRNTNVTPISLLAKLKVWRGFATQSFARGLGGLPLKDLSISVHHPLQISSSDVFCTWIYNSQLASAVWMQQKNLLSEGKLLILEGELGFFLVWMNYFVDLICSKCFMLQQRIR

SEQ ID NO: 112502 - protein, 369 aa, Setaria italica
  Transcript Sequence Number=SeqID_46528
  Gene Ontology: Mol. function=nucleoside-triphosphatase activity; Cellular component=membrane; Biological process=protein catabolic process
  Homolog annotation: Hit_ID=A2ZVG7; Match level="QueryCoverage=100%, HitCoverage=48%, E-value=0.0, Identity=89%"; Hit description=Cell division protease ftsH homolog 9, chloroplastic/mitochondrial
  Pfam annotation: Domain name=AAA; Domain location=1-146; Score=144.8; E_value=2.6e-40; Accession=PF00004.21; Description=ATPase family associated with various cellular activities (AAA)
  Pfam annotation: Domain name=Peptidase_M41; Domain location=153-349; Score=336.5; E_value=5.3e-98; Accession=PF01434.10; Description =Peptidase family M41
  Pfam module annotation: Pfam domain module=AAA::Peptidase_M41; Domain location=1-146::153-349
FVGVGARRVRSLFQAAKKKAPCIVFIDEIDAVGSTRKQWEGHTKKTLHQLLVEMDGFEQNEGIIVMAATNLPDILDPALTRPGRFDRHIVVPSPDVRGRQEILELYLQDKPVANDVDINAIARSTPGFNGADLANLVNIAAIKAAVEGADKLTAGQLEFAKDRIIMGTERKSMFISDESRKLTAYHESGHAIVALNTQGAHPIHKATILPRGSALGMVTQLPSQDETSISKKQLLARLDVCMGGRVAEELIFGEDNVTTGARNDLHTATELAQYMVSNCGMSDAIGPVHVKERPSVEMQSRIDAEVVKLLREAYGRVKRLLKKHEKQLHALANALLEHETLTADEINKVVHPYQEEPQFSFQDEEFALT

SEQ ID NO: 112503 - protein, 63 aa, Setaria italica
  Transcript Sequence Number=SeqID_46529
CVAVQVPITPQQDNKKIPYHRAHGGRGGVSSSSALMQKKKAAASYDDRSNYKPLSWRCKCGGP

SEQ ID NO: 112504 - protein, 81 aa, Setaria italica
  Transcript Sequence Number=SeqID_46530
KFSRTSWSFFLTFADSRLLLLHEFWFLVLGTIFILGNIHLILIFEIIFSRKYDTLNPLLTNLRSFCKIYLSLFKLIRRTGG

SEQ ID NO: 112505 - protein, 56 aa, Setaria italica
  Transcript Sequence Number=SeqID_46531
  Gene Ontology: Mol. function=metal ion binding
  Homolog annotation: Hit_ID=A6MZI6; Match level="QueryCoverage=92%, HitCoverage=98%, E-value=7e-18, Identity=80%"; Hit description=Zn ion binding protein (Fragment)
YSLTEFEKRLGEFFKHQIETDPSVAYGDGFRAGMRAVERYGLRSTLDHIKLTGSFP

SEQ ID NO: 112506 - protein, 458 aa, Setaria italica
  Transcript Sequence Number=SeqID_46532
  Gene Ontology: Mol. function=metal ion binding
  Homolog annotation: Hit_ID=B6SPK3; Match level="QueryCoverage=92%, HitCoverage=86%, E-value=1e-172, Identity=68%"; Hit description=Zinc ion binding protein
  Pfam annotation: Domain name=C1_3; Domain location=64-91; Score=6.7; E_value=0.095; Accession=PF07649.4; Description=C1-like domain
  Pfam annotation: Domain name=LIM; Domain location=66-122; Score=40.0; E_value=9.3e-09; Accession=PF00412.14; Description=LIM domain
  Pfam module annotation: Pfam domain module=C1_3::LIM; Domain location= 64-91::66-122
TTCTGSAENTSPTLDEDEQLARALQESMNDEHPPRQHIPIEDVHSESAPASSLPPYVFPTNGSRVCAGCKTPIGQGRFLSCMDSVWHPQCFRCYGCDIPISEYEFAVHEDHAYHRSCYKERFHPKCDVCNSFIPTNKNGLIEYRAHPFWMQKYCPSHENDGTPRCCSCERMEPKHSQYITLDDGRRLCLECLHTAIMDTNECQPLYIDIQEFYEGMNMKVEQQVPLLLVERQALNEAMEAEKIGHHLPETRGLCLSEEQIVRTILRRPIIGPGNRIIDMITGPYKLVRRCEVTAILILYGLPRLLTGSILAHEMMHAYLRLKGYRTLSPEVEEGICQVLAHLWLESEITSGSGSMATTSAASSSSSTSSSSKKGAKTEFEKRLGEFFKHQIETDPSVAYGDGFRAGMRAVERYGLRSTLDHIKLVSGFFLPVEYSCCAYLFSFAASSSYFYVSRTEYI

SEQ ID NO: 112507 - protein, 124 aa, Setaria italica
  Transcript Sequence Number=SeqID_46533
  Gene Ontology: Mol. function=transferase activity
  Homolog annotation: Hit_ID=B9RY36; Match level="QueryCoverage=85%, HitCoverage=18%, E-value=2e-17, Identity=37%"; Hit description =Pentatricopeptide repeat-containing protein, putative
  Pfam annotation: Domain name=PPR; Domain location=1-34; Score=3.2; E _value=3.7; Accession=PF01535.12; Description=PPR repeat
  Pfam annotation: Domain name=PPR; Domain location=35-69; Score=41.8; E_value=2.8e-09; Accession=PF01535.12; Description=PPR repeat
  Pfam annotation: Domain name=PPR; Domain location=70-104; Score=52.3; E_value=1.9e-12; Accession=PF01535.12; Description=PPR repeat
  Pfam module annotation: Pfam domain module=PPR::PPR::PPR; Domain location=1-34::35-69::70-104
QQTTLIDGLFKTGNMLAAFKVGQELMERNLSPDAVVYNVFINCLCMLDKYNEAKSFLKEMRNMGIEPDQASYNTLIAALCREGKTSKALKLLDEMKRSSIKPNLITYTTLVVGLLHAGVVGEGK

SEQ ID NO: 112508 - protein, 128 aa, Setaria italica
  misc_feature (17)..(17): Xaa can be any naturally occurring amino acid
  Transcript Sequence Number=SeqID_46534
  Gene Ontology: Mol. function=protein dimerization activity; Biological process=RNA-dependent DNA replication
  Homolog annotation: Hit_ID=Q53M48; Match level="QueryCoverage=100%, HitCoverage=11%, E-value=5e-42, Identity=60%"; Hit description=HAT family dimerisation domain containing protein
  Subcellular localization annotation: CTP_CleavageSite=54; ConfidenceScore=5.01e-01
NTSLVAILLATITFAAXFTLPGGYSSDAGSQGLPIMVRKVAFQAFLISDTLAMCASLAVAFICIIAKWEDLEFLLYYRSFTKKLMWFAYVATTTAFATGLYTVLAPRLLWLSVTVCVLTGLLPILTKL

SEQ ID NO: 112509 - protein, 164 aa, Setaria italica
  misc_feature (126)..(126): Xaa can be any naturally occurring amino acid
  Transcript Sequence Number=SeqID_46535
  Homolog annotation: Hit_ID=B9RM88; Match level="QueryCoverage=99%, HitCoverage=48%, E-value=9e-42, Identity=34%"; Hit description =Pentatricopeptide repeat-containing protein, putative
  Pfam annotation: Domain name=PPR; Domain location=31-65; Score=7.7; E_ value=1.1; Accession=PF01535.12; Description=PPR repeat
  Pfam annotation: Domain name=PPR; Domain location=97-131; Score=33.9; E_value=6.5e-07; Accession=PF01535.12; Description=PPR repeat
  Pfam module annotation: Pfam domain module=PPR::PPR; Domain location =31-65::97-131
LVAGYVQNGREEEAIEFFRRMLREGVPAEQFILTSVAAACGNAGMVEQGRQVHGFVEKLGHRFDAPLASAMIGMYSKCGSLEDALRIFHSAQAKNVAVWTTMLCSYASYGQGRMAIEIFNRMKAEXITPNEVTLVAVLSACSHSGLVSDGEHYFKLMQEEYGIV

SEQ ID NO: 112510 - protein, 149 aa, Setaria italica
  Transcript Sequence Number=SeqID_46536
  Subcellular localization annotation: CTP_CleavageSite=40; ConfidenceScore=5.76e-01
PSRASGHALPVALSTADNLVSSPPAALLRRSRRSTAPRPPASTLFVTRQSAFGLSARDSVDLCLKRRIGRLLGYPRSTPGGREGRCFRLTPRLAGAPQSSGRLWLPSLSSQPPELAPRTPLASSILVANIADYFTRGTLQREGERDGVR

SEQ ID NO: 112511 - protein, 55 aa, Setaria italica
  Transcript Sequence Number=SeqID_46537
LSFFWLECLRVTGWVSQSMSMDYGNKTISKSGEFNKYSSITNSHFFGNLYVGYFN

SEQ ID NO: 112512 - protein, 82 aa, Setaria italica
  Transcript Sequence Number=SeqID_46538
LDSWPSRRVSIMPEQAAVGEQLLMKPMLSPGCRSGRQCCLQEQRCMGRHCRVVQLKAESMECRSCCRPHDPCTVTDVGIALI

SEQ ID NO: 112513 - protein, 110 aa, Setaria italica
  Transcript Sequence Number=SeqID_46539
QEIWQQQVLLLMIPLINLFLLLYLPSLAAFVFAYADAALQPNGEGSSSRIAGLGVLIDLRTTSLSCCLQVLGSVRVDSVVMAELAALFWRQNFFLCCRFNLEALVYTAFK

SEQ ID NO: 112514 - protein, 387 aa, Setaria italica
  Transcript Sequence Number=SeqID_46540
  Gene Ontology: Mol. function=protein serine/threonine kinase activity; Biological process=protein amino acid phosphorylation
  Homolog annotation: Hit_ID=Q00RI0; Match level="QueryCoverage=88%, HitCoverage=51%, E-value=1e-161, Identity=79%"; Hit description =OSIGBa0125M19.6 protein
  Pfam annotation: Domain name=Lectin_legB; Domain location=47-287; Score=379.3; E_value=6.8e-111; Accession=PF00139.11; Description =Legume lectin domain
QARAKPFGRPLLAPQLFEVSGWLVAIPLLVLLLFLGLGGLLPAATAADEQFVFDGFKGANLTLDGMATVTPDGLLLLTNATKQLKGHAFYPAPLRFHRTPNGTAMRSFSTAFVIGIIGAYEDLSSHGMAFVVAKSRNFTSALPGQFLGLVSSATNGNATNHLFAVEFDTILNSEFSDMSGNHVGIDVNGLNSVDADNAGYYDDATGAFRNMSLVSRKAMQVWVDFDGPTMQVNVSMAPLEVARPRKPLLSTTVNLSSVIDGDTAYVGFSSASGILFCRHYVLGWSFNMDGAAPALNISSLPTLPVTFPKPRSKTLEIVLPIASAALVFAVGAAVFAFLRRRRMYAEVKEEWEATFGPHRFSYKDLYHATDGFSDERLLGIGGFGRVY

SEQ ID NO: 112515 - protein, 85 aa, Setaria italica
  Transcript Sequence Number=SeqID_46541
METGGEEFAIGVVISAKTTLGEEFEGQIVAFDRPSNLLVIQEGVGRAESGERRNVRVLKANYIREFSVVSKGDDPLDPPGCMLDL

SEQ ID NO: 112516 - protein, 146 aa, Setaria italica
  Transcript Sequence Number=SeqID_46542
  Homolog annotation: Hit_ID=Q00WL9; Match level="QueryCoverage=56%, HitCoverage=49%, E-value=6e-11, Identity=46%"; Hit description=[S] KOG4401 Uncharacterized conserved protein
  Pfam annotation: Domain name=AD; Domain location=43-129; Score=151.8; E_value=2e-42; Accession=PF09793.1; Description=Anticodon-binding domain
RLVIQEGVGRAESGERRNVRVLKANYIREFSVVSKGDDPLDPPGCMLDLDAIYAREEAALRQAEIEAERIGVGVTPEAQSIFDALSKTLPVQWDKTDIIVMKEVRVRSPYLPENVSGGTAAANERVKKVIDFERKRLHARVPGQFS

SEQ ID NO: 112517 - protein, 167 aa, Setaria italica
  Transcript Sequence Number=SeqID_46543
  Gene Ontology: Mol. function=enzyme activator activity; Cellular component=centrosome; Biological process=positive regulation of exit from mitosis
  Homolog annotation: Hit_ID=B6T9C7; Match level="QueryCoverage=100%, HitCoverage=34%, E-value=1e-59, Identity=71%"; Hit description=Fizzy- related protein
SKTTYSDRFIPCRSSSRLQNLRLLDSPSSNSKDETTYSRLLRAELFGPDSPGPAPATSPGPASPNTNLFRFKKDHSAATSPFAAAHQDCTAGSGEPTASPQKPPRKVPKTPHKVLDAPSLQDDFYLNLVDWSSQNMLAVGLGTCVYLWSASNSKVTKLCDLGPRDSV

SEQ ID NO: 112518 - protein, 131 aa, Setaria italica
  misc_feature (6)..(6): Xaa can be any naturally occurring amino acid
  misc_feature (100)..(100): Xaa can be any naturally occurring amino acid
  Transcript Sequence Number=SeqID_46544
  Gene Ontology: Cellular component=integral to membrane
  Homolog annotation: Hit_ID=B9SRP7; Match level="QueryCoverage=95%, HitCoverage=22%, E-value=8e-30, Identity=45%"; Hit description =Protein CPR-5, putative
  Subcellular localization annotation: CTP_CleavageSite=47; ConfidenceScore=5.35e-01
FGYGTXIYSYQRITAVTSACAAASREYTSWWMPSSVSAFNSNFLNFRCNLIASARISFGLLMILLIAWLIFQRSAMTGPNMPITFNGMLLGVVCGWFGRXCVDTLGGDGNVWLVFWEAICFIHLLGNTWPS

SEQ ID NO: 112519 - protein, 179 aa, Setaria italica
  Transcript Sequence Number=SeqID_46545
  Gene Ontology: Cellular component=integral to membrane
  Homolog annotation: Hit_ID=B9SRP7; Match level="QueryCoverage=82%, HitCoverage=27%, E-value=4e-33, Identity=46%"; Hit description =Protein CPR-5, putative
RKIKNQKLTSSTRLYNSNFLNFRCNLIASARISFGLLMILLIAWLIFQRSAMTGPNMPITFNGMLLGVVCGWFGRKCVDTLGGDGNVWLVFWEAICFIHLLGNTWPSRLHCMLNGPICVTDRTKAVRLPYWARRYTFYVLLTLILPCSAGLLPFAPLSDWIEPAIQYIKSILSGSNIED

SEQ ID NO: 112520 - protein, 70 aa, Setaria italica
  Transcript Sequence Number=SeqID_46546
  Homolog annotation: Hit_ID=B6TA70; Match level="QueryCoverage=82%, HitCoverage=13%, E-value=3e-09, Identity=58%"; Hit description =Carbamoyl-phosphate synthase small chain
  Subcellular localization annotation: CTP_CleavageSite=51; ConfidenceScore=5.61e-01
MAATPATASAPSRCLSGAKPRCAALRSPSSLAVAAPPEGLRPRGSRALSVRAKVASGVQGASVVDDGVER

SEQ ID NO: 112521 - protein, 60 aa, Setaria italica
  Transcript Sequence Number=SeqID_46547
  Gene Ontology: Mol. function=carbamoyl-phosphate synthase activity; Cellular component=chloroplast; Biological process=nitrogen compound metabolic process
  Homolog annotation: Hit_ID=B6TA70; Match level="QueryCoverage=83%, HitCoverage=11%, E-value=2e-22, Identity=96%"; Hit description =Carbamoyl-phosphate synthase small chain
  Pfam annotation: Domain name=CPSase_sm_chain; Domain location=2-60; Score=-45.7; E_value=3.5e-06; Accession=PF00988.14; Description =Carbamoyl-phosphate synthase small chain, CPSase domain
MSSHQEPAQSIGGLIIRNLSICTSNWRCKETLEEYLIKRNIMGIYDVDTRAITRRLREDG

SEQ ID NO: 112522 - protein, 100 aa, Setaria italica
  Transcript Sequence Number=SeqID_46548
PAGQRPRKKMRLPEIQQLVRSLSVENDALREERKALQRACTTLSKENGKLETRLDHSSKRNGMISAEDKAKPKPGSQEAEAEQDAGNGFVLPDLNLPADD

SEQ ID NO: 112523 - protein, 212 aa, Setaria italica
  Transcript Sequence Number=SeqID_46549
  Gene Ontology: Mol. function=oxidoreductase activity; Biological process=metabolic process
  Homolog annotation: Hit_ID=B6TKV5; Match level="QueryCoverage=100%, HitCoverage=77%, E-value=1e-111, Identity=91%"; Hit description=Cell- cell signaling protein csgA-like
KLKEEHAPGRLTVLPIDVTDEGTIEAAAASIGETHGSLDLLINSTGILSIPNVIQPETTLSKVQKSSLLLAYEVNAVGPILVIKHMWPLLKAGGRSETGRGFSLVANMSARVSSIGDNGLGGWHAYRASKTALNQLTKTVSVEFGRKDNIACILLHPGTVDTDLSRPFQKNVPKDKLFTREFSVQKLLSIIDNVKKSDNGKFFAWDGEEIPW

SEQ ID NO: 112524 - protein, 169 aa, Setaria italica
  Transcript Sequence Number=SeqID_46550
PHQRHASSAFAFAYAGDGSYVAAWPKGPAPVLEVEHCVARPGAAEVRVRVVQTVALGKEARLRGIKVFSEQWYGPFRNGEQLGGCAVRETAFAAGEKLDVSEVLGQWETTDAAAARFSGELDPETGKFAELSPDEPSKLLRDADGIVALPKQLWSAFKELGDGEFLVRG

SEQ ID NO: 112525 - protein, 164 aa, Setaria italica
  Transcript Sequence Number=SeqID_46551
  Gene Ontology: Mol. function=kinase activity; Cellular component =plasma membrane
  Homolog annotation: Hit_ID=B9SFG7; Match level="QueryCoverage=100%, HitCoverage=10%, E-value=2e-25, Identity=37%"; Hit description=ATP binding protein, putative
MYYKRRPELMSLLEELYRAYRALAERYDHAAGELRQAHKKMAEAFPDEFQLDFDDDLPTETASTESETDNRDMTPFFLSFIKAGDSKKRAKDDQDHEKLQKEISSLSKENQDLKKKISSVLEKSNKAESEVSSLKAALADQESEKEAAFSQCQQSSDRLQSLKS

SEQ ID NO: 112526 - protein, 71 aa, Setaria italica
  Transcript Sequence Number=SeqID_46552
TIFISQYTLNVMIITCVKVCCNNAFERKEQFEVPTSISRHTNSANTQPILNYNASLLVKLIRRYLLPMVNW

SEQ ID NO: 112527 - protein, 75 aa, Setaria italica
  Transcript Sequence Number=SeqID_46553
KTPKSTEANRDKDRLLKLNAMQQPALAFAAAAAAAAAATSMPLPTPPPSREVKQEAQGSAAPREDRPTLFGTLQS

SEQ ID NO: 112528 - protein, 69 aa, Setaria italica
  Transcript Sequence Number=SeqID_46554
IDLRGASICFGMPITRCTTPILSLPKRNTYIWSSNADSTSYRHTYIHLYINIRTHTISLQVPPETRPMK

SEQ ID NO: 112529 - protein, 88 aa, Setaria italica
  Transcript Sequence Number=SeqID_46555
  Gene Ontology: Mol. function=acid phosphatase activity
  Homolog annotation: Hit_ID=B4F7Y5; Match level="QueryCoverage=47%, HitCoverage=15%, E-value=3e-14, Identity=85%"; Hit description=Acid phosphatase 1
  Subcellular localization annotation: CTP_CleavageSite=21; ConfidenceScore=5.21e-01
MRLLPLVLALSLAAASSAAATASGAWSVLRTVTDAPTAASSDDADTLFCDSWRLSVETANAGPWGAIPVRCVAFVQAYMEGPRYASDS

SEQ ID NO: 112530 - protein, 135 aa, Setaria italica
  Transcript Sequence Number=SeqID_46556
  Homolog annotation: Hit_ID=Q5DMV7; Match level="QueryCoverage=85%, HitCoverage=25%, E-value=2e-23, Identity=45%"; Hit description =Pentatricopeptide (PPR) repeat protein-like
  Pfam annotation: Domain name=Smr; Domain location=38-116; Score=-5.1; E_value=0.087; Accession=PF01713.13; Description=Smr domain
KLKSVSTLASEAELVHELLASSSVLDKAMEWSETEVKLNLHGFSTIAAYVLMLQWVDVIKGRTLPLEVSVVCGIGKHSDVRGEPKVRELAQEVLSRMGSPLRLSTRNKGRLVAKRDRVTRWLASLPVPDEVSDKS

SEQ ID NO: 112531 - protein, 259 aa, Setaria italica
  Transcript Sequence Number=SeqID_46557
  Gene Ontology: Mol. function=endoribonuclease activity; Cellular component=extracellular region; Biological process=response to stress
  Homolog annotation: Hit_ID=B6SSH9; Match level="QueryCoverage=94%, HitCoverage=93%, E-value=9e-97, Identity=69%"; Hit description =Extracellular ribonuclease LE
  Pfam annotation: Domain name=Ribonuclease_T2; Domain location=26-212; Score=91.3; E_value=3.3e-24; Accession=PF00445.10; Description =Ribonuclease T2 family
MASRIALLCLLGLLVASPAIADSGIYYQLELMWPGAYCEQSSAGCCKPTTSAKPARDFFISGFTVYNATTDAPVNRCSNKAPFDPNEITDIPGLKQYWSNIKCPSNNGQGGWKNAWKKSGACSGLKEKDFFEKALEFRSRLNPLVRLQKNGIQPDFELYSLKKIKKVFQSGINATPLVQCSMGPFNKYMLYKLYFCATEQGTFIDCPVAPKYTCSAEILFHPFKRWMLQQLQGEDAEFAAAADGDDQDAFVLPGVAMDM

SEQ ID NO: 112532 - protein, 67 aa, Setaria italica
  misc_feature (1)..(23): Xaa can be any naturally occurring amino acid
  Transcript Sequence Number=SeqID_46558
XXXXXXXXXXXXXXXXXXXXXXXVTVITRHPHNTCWITASDELGLDIHYQPNQRASPITTILPGILE

SEQ ID NO: 112533 - protein, 45 aa, Setaria italica
  Transcript Sequence Number=SeqID_46559
EMNLLFFKKKNYRISVIQSFYSHGPTLLLFGFSLTVPHFNYVLHV

SEQ ID NO: 112534 - protein, 370 aa, Setaria italica
  Transcript Sequence Number=SeqID_46560
  Gene Ontology: Mol. function=racemase and epimerase activity, acting on carbohydrates and derivatives; Cellular component=integral to membrane; Biological process=carbohydrate metabolic process
  Homolog annotation: Hit_ID=O22141; Match level="QueryCoverage=91%, HitCoverage=76%, E-value=1e-125, Identity=63%"; Hit description=UDP -glucuronate 4-epimerase 4
  Pfam annotation: Domain name=3Beta_HSD; Domain location=8-299; Score=- 81.9; E_value=5.8e-05; Accession=PF01073.11; Description=3-beta hydroxysteroid dehydrogenaseisomerase family
  Pfam annotation: Domain name=Epimerase; Domain location=7-268; Score =180.1; E_value=6.5e-51; Accession=PF01370.13; Description=NAD dependent epimerasedehydratase family
  Pfam annotation: Domain name=KR; Domain location=6-159; Score=-92.9; E_value=0.1; Accession=PF08659.2; Description=KR domain
  Pfam annotation: Domain name=NAD_binding_4; Domain location=9-282; Score=-50.5; E_value=7.6e-06; Accession=PF07993.4; Description=Male sterility protein
  Pfam annotation: Domain name=RmlD_sub_bind; Domain location=5-338; Score=-154.7; E_value=0.0012; Accession=PF04321.9; Description=RmlD substrate binding domain
  Pfam annotation: Domain name=adh_short; Domain location=5-175; Score=- 35.3; E_value=0.0029; Accession=PF00106.17; Description=short chain dehydrogenase
  Pfam module annotation: Pfam domain module=3Beta_HSD::Epimerase::KR::N AD_binding_4::RmlD_sub_bind::adh_short; Domain location=8-299::7 -268::6-159::9-282::5-338::5-175
RPRGYSVLVTGAAGFVGCHAAAALRRRGDGVLGLDNFNDYYDTALKRGRAALLARSGVYVVDGDIADAELLAKLFDVVPFTHVLHLAAQAGVRHALVDPMSYVRANVAGLVALLEAARSANPQPAIVWASSSSVYGLNSHVPFSEHDRTDRPASLYAATKKAGEEIAHVYNHIYGLSLTALRFFTVYGPWGRPDMAYFFFTRDILAGRPITVYESAGGGSHQTTISRDFTYIDDIVKGCVAALDTAGRSTGSGGKKRGPAPFRTYNLGNTSPVPVTQLVDLLEKLLKVKAVRKVVKMPRNGDVPYTHANVSLAQRELGYRPSTDLQTGLKKFVRWYLEYYHPELAEKQKQYAGSKGKGSRGHNGSSSSAR

SEQ ID NO: 112535 - protein, 415 aa, Setaria italica
  Transcript Sequence Number=SeqID_46561
  Gene Ontology: Mol. function=zinc ion binding; Cellular component =nucleus
  Homolog annotation: Hit_ID=Q10NX9; Match level="QueryCoverage=64%, HitCoverage=25%, E-value=1e-71, Identity=46%"; Hit description =Transposon protein, putative, unclassified, expressed
  Pfam annotation: Domain name=SWIM; Domain location=151-187; Score =34.4; E_value=4.5e-07; Accession=PF04434.9; Description=SWIM zinc finger
NTNTSNNLHDNRWLTTLFEERAKWVPAYVKDTFWAGISTVRRSERLEAFFDGYITPETTIKTFIEQFDTAMKLRSDREAYDDFRSFQQRPQVLSGLLFEEQFANVYTINMFQKFQDQLKQLMNVNCTEVSRSGSVVTYTVTVIGKERKFDYRVMYNSAEKEVWCICRSFQFKGILCSHALAVLRQELVMLIPPKYILDRWRKDYKCPEEPKETPISPNAAKATGKGTKPDNVQEDKVDNLYKHGHQYFADIVEMGATDPDAMEYVLSVMKEAKEKMRKFEESRKEKRPGESPVSAGKKGAKSSKPSSTEDVGNGASMSTPTTAAVTTVTVVPSAPMAAAPTMMAMAPASAAMPQGMFLVPMHPHPMVFPPFAPAVQPAVAAPVAPPAAPATNVGDTATNTSKKRKKERAKLIFGY

SEQ ID NO: 112536 - protein, 115 aa, Setaria italica
  Transcript Sequence Number=SeqID_46562
  Gene Ontology: Mol. function=cinnamoyl-CoA reductase activity; Biological process=cellular metabolic process
  Homolog annotation: Hit_ID=B6TR31; Match level="QueryCoverage=86%, HitCoverage=28%, E-value=2e-25, Identity=61%"; Hit description =Dihydroflavonol-4-reductase
MAARAEEGAEAAAASGRTVVCVTGAGGYIASWLVKLLLSRGYAVHATVRDLSDEKTAHLKRLPGASDPQGLRLFRADLLDGGAMAAAIARCQGVFHVATPVPSGNLTDPEASFLL

SEQ ID NO: 112537 - protein, 431 aa, Setaria italica
  Transcript Sequence Number=SeqID_46563
  Gene Ontology: Mol. function=hydrolase activity, acting on acid anhydrides, catalyzing transmembrane movement of substances; Cellular component=integral to membrane; Biological process=calcium ion transport
  Homolog annotation: Hit_ID=Q6ATV4; Match level="QueryCoverage=100%, HitCoverage=41%, E-value=0.0, Identity=81%"; Hit description=Calcium- transporting ATPase 2, plasma membrane-type
  Pfam annotation: Domain name=Cation_ATPase_N; Domain location=16-96; Score=55.2; E_value=2.6e-13; Accession=PF00690.18; Description =Cation transporterATPase, N-terminus
  Pfam annotation: Domain name=E1-E2_ATPase; Domain location=110-351; Score=235.5; E_value=1.3e-67; Accession=PF00122.12; Description=E1 -E2 ATPase
  Pfam module annotation: Pfam domain module=Cation_ATPase_N::E1-E2 _ATPase; Domain location=16-96::110-351
FQISADELASIVESRDTKKLAVHGQLDGIADKLATSLTYGINTAEYSLNQRQDIYGVNKFTESEARSLWEFVWEALQDTTLVILIACALVSFVVGIATEGWPKGAHDGIGIITSILLVVSVTATSNYQQSLQFRDLDKEKRKIFVQVTRNSLRQRMLIDDLLPGDVVHLAVGDQVPADGLFISGYSVLINESSLTGESEPVFVNEDNPFLLSGTKVLDGSCKMLVTAVGMRTQWGKLMAAITESGDDETPLQVKLNGVATIIGNIGLFFALLTFVVLSQGLVAQKYLDCLLLSWSGDDVLEILQHFAVAVTIIVVAVPEGLPLAVTLSLAFAMKKMMNDKALVRQLAACETMGSATIICSDKTGTLTTNRMSVVKACICGNTMEVNNPPAPSNFSSKLPEAALEILLESIFNNTAGEVVINQDGHRQILGT

SEQ ID NO: 112538 - protein, 589 aa, Setaria italica
  misc_feature (34)..(34): Xaa can be any naturally occurring amino acid
  misc_feature (78)..(78): Xaa can be any naturally occurring amino acid
  Transcript Sequence Number=SeqID_46564
  Gene Ontology: Mol. function=binding; Biological process=cell redox homeostasis
  Homolog annotation: Hit_ID=B6U8P1; Match level="QueryCoverage=81%, HitCoverage=70%, E-value=0.0, Identity=68%"; Hit description =Electron transporter
  Pfam annotation: Domain name=TPR_1; Domain location=112-145; Score =24.1; E_value=0.00058; Accession=PF00515.20; Description =Tetratricopeptide repeat
  Pfam annotation: Domain name=TPR_1; Domain location=146-179; Score =17.7; E_value=0.044; Accession=PF00515.20; Description =Tetratricopeptide repeat
  Pfam annotation: Domain name=TPR_1; Domain location=352-385; Score =11.0; E_value=0.28; Accession=PF00515.20; Description=Tetratricopepti de repeat
  Pfam annotation: Domain name=TPR_1; Domain location=386-419; Score =41.0; E_value=4.9e-09; Accession=PF00515.20; Description =Tetratricopeptide repeat
  Pfam annotation: Domain name=TPR_1; Domain location=420-453; Score =3.5; E_value=2.3; Accession=PF00515.20; Description=Tetratricopeptide repeat
  Pfam annotation: Domain name=TPR_2; Domain location=112-145; Score =24.3; E_value=0.00051; Accession=PF07719.9; Description =Tetratricopeptide repeat
  Pfam annotation: Domain name=TPR_2; Domain location=146-179; Score =22.4; E_value=0.0018; Accession=PF07719.9; Description =Tetratricopeptide repeat
  Pfam annotation: Domain name=TPR_2; Domain location=180-213; Score =0.9; E_value=26; Accession=PF07719.9; Description=Tetratricopeptide repeat
  Pfam annotation: Domain name=TPR_2; Domain location=258-291; Score =6.6; E_value=5.1; Accession=PF07719.9; Description=Tetratricopeptide repeat
  Pfam annotation: Domain name=TPR_2; Domain location=306-339; Score =7.5; E_value=3.9; Accession=PF07719.9; Description=Tetratricopeptide repeat
  Pfam annotation: Domain name=TPR_2; Domain location=352-385; Score =20.0; E_value=0.01; Accession=PF07719.9; Description=Tetratricopeptid e repeat
  Pfam annotation: Domain name=TPR_2; Domain location=386-419; Score =29.7; E_value=1.2e-05; Accession=PF07719.9; Description =Tetratricopeptide repeat
  Pfam annotation: Domain name=TPR_2; Domain location=420-453; Score =15.2; E_value=0.27; Accession=PF07719.9; Description=Tetratricopeptid e repeat
  Pfam annotation: Domain name=TPR_4; Domain location=146-171; Score =14.0; E_value=0.61; Accession=PF07721.6; Description=Tetratricopeptid e repeat
  Pfam annotation: Domain name=TPR_4; Domain location=306-331; Score =8.6; E_value=4; Accession=PF07721.6; Description=Tetratricopeptide repeat
  Pfam annotation: Domain name=TPR_4; Domain location=386-411; Score =0.0; E_value=43; Accession=PF07721.6; Description=Tetratricopeptide repeat
  Pfam annotation: Domain name=Thioredoxin; Domain location=483-583; Score=15.8; E_value=1.1e-05; Accession=PF00085.12; Description =Thioredoxin
  Pfam module annotation: Pfam domain module=TPR_1::TPR_1::TPR_1::TPR _1::TPR_1::TPR_2::TPR_2::TPR_2::TPR_2::TPR_2::TPR_2::TPR_2::TPR _2::TPR_4::TPR_4::TPR_4::Thioredoxin; Domain location=112-145::146 -179::352-385::386-419::...
  Pfam module annotation: Domain location=420-453::112-145::146 -179::180-213::258-291::306-339::352-385::386-419::420-453::146 -171::306-331::386-411::483-583
  Subcellular localization annotation: CTP_CleavageSite=43; ConfidenceScore=5.61e-01
GSSSAGSVGGCGGGGSTASSPLTNALPTGNICPXRPRRGGGCRAAAAARSLGRARIRHGALWPRQHHARRRWKCRRSXPPPRSSIDAAPLHRNSSRSPASCPAPPPASSAGLQEITRAGNERYKKGRYGEALQHYDRAVALCPDSAACRGNRAAALIGLGRLAEAFSECEEAVRLDPASGRARGRLAGLSLRLGMVDKARMHFTLAGNVNQSDHAELQKLHEVESHQGRCMDARKIGDWKSTLREADAAIANGADSSQLLLALRSEALLRLHKLEEADSTITSLLKLDNASLPSMPTKLSGMAADSYVLVVQAQVNMAFGRFDSAVALAEKARVIDCGNPEVEVILNNVRLVARARAQGNELFKAGKFAEASIAYGEGLKYEPSNPVLYCNRAACWSKLGRWAKAVEDCNEALRVQPNYTKALLRRAASYAKLERWADCVRDYELLRKDLPGDTEVEESLFRAQVALKTTHGEEVSNMKFGGEVEAVTSLEQLRDAIHSPGVSVLYFMATMNQQCAQITPSVDSLCSECPSVNFLKVNVDESPMVARAENVRVVPTFKIYKDGTRVKEMICPSLQVLRYSVRHYAVSSS

SEQ ID NO: 112539 - protein, 90 aa, Setaria italica
  Transcript Sequence Number=SeqID_46565
FYDRIEVPCLLFEISSATLQSFATGSLHNNEIDMRGLWLLLIGTPMLFPRAKLRASPNLIKQDYNQLLFRHQRTRISHVILAKKHLCIFY

SEQ ID NO: 112540 - protein, 67 aa, Setaria italica
  Transcript Sequence Number=SeqID_46566
  Subcellular localization annotation: CTP_CleavageSite=40; ConfidenceScore=5.02e-01
MMQQSSGFKSQLVNCNKQFHVLYAIMKYHRNLTSLAFILRSLMPKANATYYRVFFSGKMNFKFCSDL

SEQ ID NO: 112541 - protein, 64 aa, Setaria italica
  Transcript Sequence Number=SeqID_46567
  Gene Ontology: Cellular component=vacuole
  Homolog annotation: Hit_ID=B9RG20; Match level="QueryCoverage=93%, HitCoverage=28%, E-value=9e-13, Identity=62%"; Hit description =Transferase, transferring glycosyl groups, putative
DAPYYDNEWNNGTSFFYTPARRSCRSAAVGVGILRPDWLLPGAVYLGRRDAGGFDCHVWAKADF

SEQ ID NO: 112542 - protein, 118 aa, Setaria italica
  Transcript Sequence Number=SeqID_46568
  Gene Ontology: Cellular component=vacuole
  Homolog annotation: Hit_ID=B9RG20; Match level="QueryCoverage=86%, HitCoverage=48%, E-value=1e-29, Identity=59%"; Hit description =Transferase, transferring glycosyl groups, putative
QPRTRRSCRSAAVGVGILRPDWLLPGAVYLGRRDAGGFDCHVWAKADFITYYEDVKTKRPVKWVFYTGRIAYVMNFEVGAVLEDAAWQAPEYCFNKDGGTITKAADGHDDSFIPRNVL

SEQ ID NO: 112543 - protein, 104 aa, Setaria italica
  misc_feature (11)..(11): Xaa can be any naturally occurring amino acid
  misc_feature (24)..(24): Xaa can be any naturally occurring amino acid
  Transcript Sequence Number=SeqID_46569
  Gene Ontology: Mol. function=actin binding; Cellular component =integral to membrane; Biological process=actin cytoskeleton organization and biogenesis
  Homolog annotation: Hit_ID=Q0DLG0; Match level="QueryCoverage=75%, HitCoverage=9%, E-value=3e-32, Identity=82%"; Hit description=Formin- like protein 14
PPRAAVASSDXDGDSDDKDVRKSXRPLHSDKLKPSSLHMKDEVIQLYLNNSAAVAAPRQVCLLGAPRCHGIGMVVGALGVSKEQLRDALLEGNAHDLGVEVLRM

SEQ ID NO: 112544 - protein, 382 aa, Setaria italica
  Transcript Sequence Number=SeqID_46570
  Gene Ontology: Mol. function=actin binding; Cellular component =integral to membrane; Biological process=actin cytoskeleton organization and biogenesis
  Homolog annotation: Hit_ID=Q0DLG0; Match level="QueryCoverage=99%, HitCoverage=44%, E-value=1e-158, Identity=72%"; Hit description =Formin-like protein 14
  Pfam annotation: Domain name=FH2; Domain location=8-351; Score=174.7; E_value=2.7e-49; Accession=PF02181.15; Description=Formin Homology 2 Domain
YYLTNSVGLVCRSTVGLGCCLLGAPRCHGIGMVVGALGVSKEQLRDALLEGNAHDLGVEVLRMLAQMVLSNEEELKLKYFKDDSLTRLCPVESFVKAILDVPFAFKRVDAMLYIASFYLEVNQLRLSYATLEGACQEMRSSRLLHKVREAVMNFGNFMSINAGSPSSHGLEPNTVLKIVDVKGADGKAALVQFVVQEILKPEGYDLMQHGSATYKTNTNSLQCDTECRKHGLEVVSKLASELSNTKKAASIDIVMLSRSVSELGVGLGKVHDVLRLNSMVTSAESARRFHNSMSTFLRQAEEEILKLQSQESICLSSVKELVEYFHGGSANDEAHMLRIFAGVREFLAMLDRICKEAGENSGNSWVGATTASWTAAPMGMTP

SEQ ID NO: 112545 - protein, 96 aa, Setaria italica
  Transcript Sequence Number=SeqID_46571
  Subcellular localization annotation: CTP_CleavageSite=54; ConfidenceScore=5.22e-01
KQIPGIEQGTGGLLTKFVWKIDTGSERPGRGGRSGRAAPRRAQQGGRRGGRVPRAALPTVRVRLRREEEPFACSGGWAGSRWCTVLLSFSLYLYRL

SEQ ID NO: 112546 - protein, 391 aa, Setaria italica
  misc_feature (9)..(9): Xaa can be any naturally occurring amino acid
  Transcript Sequence Number=SeqID_46572
  Gene Ontology: Mol. function=binding
KVIVLALQXGLKSEILWALNALTVLSFKEKDDFRRDTTPLAKVPGLLDALLQVIDEWRDIAMPKDHLKPPRVRTLGANTTLSGFGQENMEKVYSDTGTTSNDQSKTEESSVTKKRSASFWFDEDGLFNNDDEGRAERQQCAIAVSNIIRNFSFMPENETIMVQHRHCLETVFQCLEDQNREDDELVTNMLETLVNLAPVLDLRIFSSSKPSFIKMTEKGAVHAIMGMLSSSVKPWHCAAAELIGRLIINPDNESFLLPVIPQIYKRLVDLLSMPAYDAQAAAVSALYNVAEVNMDCRLKLASERWAVDRLLKIVKTPHPVPEVCRKTSMILESLVSEPQNRMHLLVHENTFAEILTTEGKYSDTFARILYELTARPSNKGTSGQAIWGNIN

SEQ ID NO: 112547 - protein, 44 aa, Setaria italica
  Transcript Sequence Number=SeqID_46573
  Gene Ontology: Mol. function=transporter activity; Cellular component= intracellular; Biological process=transport
  Homolog annotation: Hit_ID=Q6ZG68; Match level="QueryCoverage=100%, HitCoverage=7%, E-value=8e-10, Identity=77%"; Hit description =Putative SEC14 cytosolic factor
MAEALLGPHEHRLSSALDGHYDEKRKSNVEYSEDEKKAMIASLK

SEQ ID NO: 112548 - protein, 66 aa, Setaria italica
  Transcript Sequence Number=SeqID_46574
EISPVIHKDQDVTKLFKPGRNQIITVEPNYTFWDPHDAGHFRSGKKHMAAYTCNNKSWHFLFSYRI

SEQ ID NO: 112549 - protein, 170 aa, Setaria italica
  Transcript Sequence Number=SeqID_46575
RLSPTTRLLRAARRRHPDAVVVVPDARPWVGDLSGATASYREGGGEDEDDAEEDDDEDEDRSLDLLARFLHSVFRKASRRARRAARSVLPPSVPAELVKFSVNGVLVLTFLWILKGLLEVVCTFGSMVFASILLVRGIWSAVTYIRENQYSYIHRIDNDDSRWSRVQVAG

SEQ ID NO: 112550 - protein, 132 aa, Setaria italica
  misc_feature (116)..(116): Xaa can be any naturally occurring amino acid
  Transcript Sequence Number=SeqID_46576
  Gene Ontology: Mol. function=microtubule motor activity; Cellular component=microtubule associated complex; Biological process =microtubule-based movement
  Homolog annotation: Hit_ID=Q75LL2; Match level="QueryCoverage=98%, HitCoverage=10%, E-value=4e-64, Identity=93%"; Hit description =Kinesin-like protein
  Pfam annotation: Domain name=Kinesin; Domain location=1-77; Score= -159.3; E_value=8.1e-05; Accession=PF00225.15; Description=Kinesin motor domain
INKSLSTLGLVITNLIAVSNKKSHHVPYRDSKLTFLLQDSLGGNSKTTIIANISPSHCCAAETLSTLKFAQRAKYIRNNAIINEDASGDVLSMRLQIQNLKKEVSRLQGLVGSDKXEGLGSHGFVCESPSMF

SEQ ID NO: 112551 - protein, 108 aa, Setaria italica
  Transcript Sequence Number=SeqID_46577
IFEFALLGAQQRATMMDGDWHKRLEYYLAHYLCLELDHYFIISKREILKTYSIRGYLVSQVWLTIFGLGSFTPSLGNPEPAQLNGILLPGAKEVRRRKEYCMLLCPWE

SEQ ID NO: 112552 - protein, 46 aa, Setaria italica
  Transcript Sequence Number=SeqID_46578
PKPGQTGPWSMYHSKMDKSANHIRTNKRQNVEIISKISHLSSHDAC

SEQ ID NO: 112553 - protein, 71 aa, Setaria italica
  Transcript Sequence Number=SeqID_46579
YLVPKEEGVVCEACSGAGWLLCDFCKGKKNNVKSEGTRVYRRCPTCKAAGFILCPRCRVYKCITFPESNES

SEQ ID NO: 112554 - protein, 99 aa, Setaria italica
  Transcript Sequence Number=SeqID_46580
SIFDTRFNSHKFIRKLFAELEVSGHITRTSEHVQTLILVSLSNRWASVCKQLKLDAHAPFTVHIPLYMHHFMKQCKTTALMNITPNEWQQQQTKPICGC

SEQ ID NO: 112555 - protein, 77 aa, Setaria italica
  Transcript Sequence Number=SeqID_46581
FLIIICGHVIGYNLVLSSVIVWKGFTHRRKQPIGSTRNTVDLSLILRTVTTTIFYSGSDPEFHLLLGSWGREPLNTQ

SEQ ID NO: 112556 - protein, 141 aa, Setaria italica
  Transcript Sequence Number=SeqID_46582
TICRGGCIPTSTNRFLGVGLPPSLHMTVLEINFKKFKKYKSRKIEINSNLERRKHSSDHHGGFSAAGYDRSRESDRHAAIMLMLPSMAAASKGKEGSPSSAITSKGSGNNTSHGRHRGRRCLRSPAFCCFPSKSQVACFHR

SEQ ID NO: 112557 - protein, 154 aa, Setaria italica
  misc_feature (118)..(118): Xaa can be any naturally occurring amino acid
  misc_feature (144)..(144): Xaa can be any naturally occurring amino acid
  Transcript Sequence Number=SeqID_46583
  Gene Ontology: Mol. function=protein tyrosine kinase activity
  Homolog annotation: Hit_ID=B6U613; Match level="QueryCoverage=100%, HitCoverage=24%, E-value=3e-50, Identity=66%"; Hit description =Receptor-kinase isolog
  Subcellular localization annotation: CTP_CleavageSite=83; ConfidenceScore=5.73e-01
RCVRAYNALGSDSSSNATTSIAAQSPGAAVNVSGSVPSSSSNGGFSKLSLTALMATGIGNAVLITVSLAISVAMFVYMRRKLRSAKDASDAALCFEEQEKRANGDDKCQKSGGLVCFXGGEELRRESLLKASAEVLGKGVSGSXTYKAVLDDGI

SEQ ID NO: 112558 - protein, 64 aa, Setaria italica
  Transcript Sequence Number=SeqID_46584
HNFTRKSVWSQPYRLFECNILRTSLFSSTICSYFILACPLTRITFFPSLLKQSKWKYHDYQHHH

SEQ ID NO: 112559 - protein, 190 aa, Setaria italica
  misc_feature (170)..(170): Xaa can be any naturally occurring amino acid
  misc_feature (177)..(177): Xaa can be any naturally occurring amino acid
  Transcript Sequence Number=SeqID_46585
  Gene Ontology: Mol. function=actin binding; Cellular component =integral to membrane; Biological process=actin cytoskeleton organization and biogenesis
  Homolog annotation: Hit_ID=B6SZ68; Match level="QueryCoverage=100%, HitCoverage=22%, E-value=4e-98, Identity=92%"; Hit description=Actin binding protein
  Pfam annotation: Domain name=FH2; Domain location=1-187; Score=8.4; E_ value=3.4e-10; Accession=PF02181.15; Description=Formin Homology 2 Domain
MKAVNASAEQIYAALLQGNGLAVQQLEALIKMAPTKDEVEKLEGYDGDVGSLVAAERLVKVVLTIPCAFARVEAMLYRETFADEVSHIRKSFAMLEDACRELMSSKLFLKLLEAVLKTGNRMNVGTARGGAMAFKLDTLLKLADVKGTDGKTTLLHFVVQEMIRSQKPPXRTAEAPXIVTGLAAELTNVR

SEQ ID NO: 112560 - protein, 114 aa, Setaria italica
  misc_feature (12)..(12): Xaa can be any naturally occurring amino acid
  misc_feature (20)..(20): Xaa can be any naturally occurring amino acid
  misc_feature (36)..(36): Xaa can be any naturally occurring amino acid
  Transcript Sequence Number=SeqID_46586
  Gene Ontology: Mol. function=small conjugating protein ligase activity; Biological process=ubiquitin-dependent protein catabolic process
  Homolog annotation: Hit_ID=B6UES9; Match level="QueryCoverage=99%, HitCoverage=19%, E-value=1e-25, Identity=58%"; Hit description =Ubiquitin carrier protein
ELGGSSDSSYKXPEGNQRNXIRTLGLKLSLKYSKDXKKSDDQKENMAPNHLPPQPGFNKSQKRPLDAVSRKQFSGGPALAQQNPITEHQQSNTQVVSTEECNQGRKKLCASRRQ

SEQ ID NO: 112561 - protein, 57 aa, Setaria italica
  Transcript Sequence Number=SeqID_46587
TLSIVYELMFKFRYIFYFYMGIFLLLNMSMVHVSMFYEYKFLFTFSVCRTCTHLVMG

SEQ ID NO: 112562 - protein, 425 aa, Setaria italica
  Transcript Sequence Number=SeqID_46588
  Gene Ontology: Mol. function=transporter activity; Cellular component= integral to membrane; Biological process=transport
  Homolog annotation: Hit_ID=Q67VB7; Match level="QueryCoverage=69%, HitCoverage=61%, E-value=6e-87, Identity=56%"; Hit description =Ankyrin repeat protein-like
  Pfam annotation: Domain name=Ank; Domain location=130-163; Score =19.9; E_value=0.01; Accession=PF00023.22; Description=Ankyrin repeat
  Pfam annotation: Domain name=Ank; Domain location=27-59; Score=17.2; E_value=0.067; Accession=PF00023.22; Description=Ankyrin repeat
  Pfam annotation: Domain name=Ank; Domain location=60-90; Score=11.7; E_value=0.75; Accession=PF00023.22; Description=Ankyrin repeat
  Pfam module annotation: Pfam domain module=Ank::Ank::Ank; Domain location=130-163::27-59::60-90
CCVLVFREIFESLQSWKPELARVVDGHGRTALHYATVAKNLGPVKLLLANSSLAYFPDNEGLYPVHIAAIEGNANVVCKFIEICLNYDELLDNKRRNILHCAIEHGRVQVVWHIWRSPKFVRMMNARDDEGNTSLHLAVKHGRTMIFSFLMMDTRVNLDIMNNEGLTPLDVAFSKIQSDYTFSSFMNTSIITCLTLCEASGSPCHQARNLTDKWCSEGKKELGSYANVSQSILYISIFIIVGSLAAASTPPGGYIAEGKDAGKPVFEGRTGFWIFVIANTMSFYLSTATIFLFVFARLTRHRRFYLILSAVLVFGAVLSMVIAFAIVVGLTLDPANGWDESILIWLVSNLAFPICLRVAMQLWMSKHRWQDISKVVAQTILLIYVVRALIISMQSLVKSVLPGRQGPCSWPGCVIQGDAVLLYPT

SEQ ID NO: 112563 - protein, 256 aa, Setaria italica
  Transcript Sequence Number=SeqID_46589
  Gene Ontology: Mol. function=transferase activity
  Homolog annotation: Hit_ID=B9S2E8; Match level="QueryCoverage=92%, HitCoverage=92%, E-value=2e-82, Identity=32%"; Hit description =Pentatricopeptide repeat-containing protein, putative
  Pfam annotation: Domain name=PPR; Domain location=109-143; Score =27.6; E_value=5e-05; Accession=PF01535.12; Description=PPR repeat
  Pfam annotation: Domain name=PPR; Domain location=144-178; Score =39.9; E_value=1e-08; Accession=PF01535.12; Description=PPR repeat
  Pfam annotation: Domain name=PPR; Domain location=179-213; Score =31.7; E_value=2.9e-06; Accession=PF01535.12; Description=PPR repeat
  Pfam annotation: Domain name=PPR; Domain location=39-73; Score=50.3; E_value=7.4e-12; Accession=PF01535.12; Description=PPR repeat
  Pfam annotation: Domain name=PPR; Domain location=74-108; Score=39.5; E_value=1.3e-08; Accession=PF01535.12; Description=PPR repeat
  Pfam module annotation: Pfam domain module=PPR::PPR::PPR::PPR::PPR; Domain location=109-143::144-178::179-213::39-73::74-108
ITNFPCILIGPYCQVLGNLEQAMRTMADMDTAGLKPDVYTYTTLIDALCKSGELDRAHTLLQEMLDKGIKPTIVTYNVLMNGFCMSGRVEGGKKLLEWMLEKNIRPNAATYNSLMKQYCIGNNMKSATEIYKGMNSLEVAPNENTYNILVKGHCKARNMKEALYFHKEMIEKGFRLTATSYSSLIRLLNKKKKFIEARKLFDEMRKEGLTAEPDVYNFYIDFNFNEDNLESTLALCDELVEASIVKSRAEMDQDVR

SEQ ID NO: 112564 - protein, 77 aa, Setaria italica
  Transcript Sequence Number=SeqID_46590
DAVVSVLFTVVPWVVVMDRDPRPPGRNAVKEGCYLVSLMATDATLLKCWETVVCGSMGRLIMVTFGGKVLGGFLHAI

SEQ ID NO: 112565 - protein, 71 aa, Setaria italica
  Transcript Sequence Number=SeqID_46591
  Subcellular localization annotation: CTP_CleavageSite=36; ConfidenceScore=5.66e-01
FVMRIFFKGPNCKNDLSSSFTSPLPRRLLLLLSPSRCSGRSRAAPPALCSNRRLPLFLHWIEGWTMNQRRT

SEQ ID NO: 112566 - protein, 228 aa, Setaria italica
  Transcript Sequence Number=SeqID_46592
  Gene Ontology: Mol. function=hydrolase activity
  Homolog annotation: Hit_ID=B6UI84; Match level="QueryCoverage=100%, HitCoverage=69%, E-value=1e-112, Identity=86%"; Hit description=Zn -dependent hydrolases, including glyoxylases
  Pfam annotation: Domain name=Lactamase_B; Domain location=43-203; Score=68.9; E_value=1.8e-17; Accession=PF00753.19; Description =Metallo-beta-lactamase superfamily
SSIHTHKPPKDILQVQNMFPLPLDESLLPGVYLCGYHSEHSFGATSYLVTHPQGNILVDSPRYTPKLADNIERLGGARYMFLTHIDDVADHRKWAQRLKCERIMHSGDVEEGTANVEWKLDGNGPWNIGTDFELIHTPGHTQGSVCLYYKPLKVLFTGDHVAKSEESDDLNLFRMYSKQSVTLQLDSIRKLLEVEFEWILPGHGYRIKYRDVQAKNAAMESLLANYTS

SEQ ID NO: 112567 - protein, 72 aa, Setaria italica
  Transcript Sequence Number=SeqID_46593
PGDYDAISHRNSQVCSLDHMMVSSLLEQVAISSKSASRMLFRSVTAASCAWKEWLKCTSNCHLICYEESELR

SEQ ID NO: 112568 - protein, 205 aa, Setaria italica
  Transcript Sequence Number=SeqID_46594
  Homolog annotation: Hit_ID=B9RHR0; Match level="QueryCoverage=97%, HitCoverage=31%, E-value=4e-17, Identity=37%"; Hit description =Protein regulator of cytokinesis, putative
  Subcellular localization annotation: CTP_CleavageSite=57; ConfidenceScore=5.18e-01
EDKEQEALYGSKPSPSKPQSTKKVPRNSMGGANRRLSLGGATMQAPKTDILHSKTARAAKKTEELGTLSPSSRGLDIAGLPIKKLTFNASTLRETETPRKPFAQIMPGNNVSSTPARPTFNDNTEEENKTPKTFNAALDLKTPMTVTAPMQLAMTPSVGNKVIATPVSLFQEKPEQPMLPEEIEYSFEERRLAVYLPGKWLSSAI

SEQ ID NO: 112569 - protein, 120 aa, Setaria italica
  Transcript Sequence Number=SeqID_46595
VDKVQILEIWKETSEAAFSQIGDILRLVGSGNCLVALDTEFCIPDGVQCLPYEPSTLDEHYLQLRSYVHGGDLVQAGIGIVDTEFNLLGGAMFQLNLLFGPTRRSGDHCGVKFLRESALL

SEQ ID NO: 112570 - protein, 448 aa, Setaria italica
  Transcript Sequence Number=SeqID_46596
  Gene Ontology: Mol. function=RNA binding; Biological process=RNA processing
  Homolog annotation: Hit_ID=B9SPT4; Match level="QueryCoverage=97%, HitCoverage=68%, E-value=1e-119, Identity=52%"; Hit description=RNA binding protein, putative
  Pfam annotation: Domain name=DUF618; Domain location=107-177; Score =9.5; E_value=0.013; Accession=PF04818.5; Description=Protein of unknown function, DUF618
MPPMGPMMRGPPIHQPGYPTFYDQHQQFAAAHGHGDYEAAAQPFKGLPGPLPTDVAAELQDVLNSLNGTKESIKGAKTWFMQRLPFVPALAEALRERVFALEDSERQLHIIFLVNDILFESLQRRTNIRDLDNEAVAFKSVLGSMLARIYNNPQSKDDSQTRVEKILQFWDSKEVYDQETIANFEREMKGGLAYPSAPRHVSPDPSTFAGSAVVPSKWSSEPPEKEKTIHPISGPPQSAPSAQFSAGVFPPVGQTTFTGSLPVQPSLIPSMIPQSTAAPTSDSNPPPYPLFPPGLIPGMVRKMQIGSGVPYSPLSPLDIPTVIPPSTVPESEILERVSKFFSEIGEVNPSEGPMRQIERDDYDDYERELPARKGGACIPPPPNLLVNPETGMRADGSVESKPGSSSRLGLGASADPNEVSQYDDVYSSYRKQRSTTYHSSITARSTSR

SEQ ID NO: 112571 - protein, 73 aa, Setaria italica
  Transcript Sequence Number=SeqID_46597
QLSDVTYLVRMLDYNTYNMFSNDIGSVNNYLVFQRLKVLYCYIHIFVEILPTYLFRCWVIPGISPGYYQHANV

SEQ ID NO: 112572 - protein, 336 aa, Setaria italica
  misc_feature (311)..(311): Xaa can be any naturally occurring amino acid
  Transcript Sequence Number=SeqID_46598
  Gene Ontology: Mol. function=ATP-dependent helicase activity; Cellular component=nucleus
  Homolog annotation: Hit_ID=B6SV02; Match level="QueryCoverage=95%, HitCoverage=46%, E-value=1e-163, Identity=87%"; Hit description=ATP -dependent RNA helicase DHX8
  Pfam annotation: Domain name=Helicase_C; Domain location=214-308; Score=56.0; E_value=1.4e-13; Accession=PF00271.23; Description =Helicase conserved C-terminal domain
PRRVAAVTVAKRVAEECNDQLGKKVGYSIRFDDSTSNATRIKYMTDGLLLREALLDPLLSKYSVIVVDEAHERTVHTDVLLGLLKKVQHSRANASKNGKTLPDIWGHSQNLTQKACQETRCAPLKLIIMSASLDAKCFSDYFGGAKAVHIQGRQHPVDILYTYQPEPDYLDATLVTIFQIHLEEGPGDILAFLTGQEEIESLERLIYERARLLPPESSKIWTTPIYSSLPSEQQMNAFKSAPAGTRKVVLATNIAETSVTITGIKYVIDPGMVKARAYNPVTGMESLIIIPVSKAQALQRSGRAGREGPGXCFRLSRSEFDKLVDSTIPEIKRCNL

SEQ ID NO: 112573 - protein, 366 aa, Setaria italica
  misc_feature (187)..(187): Xaa can be any naturally occurring amino acid
  Transcript Sequence Number=SeqID_46599
  Gene Ontology: Mol. function=nucleoside-triphosphatase activity; Cellular component=spliceosome; Biological process=mRNA processing
  Homolog annotation: Hit_ID=B6SV02; Match level="QueryCoverage=100%, HitCoverage=52%, E-value=0.0, Identity=90%"; Hit description=ATP -dependent RNA helicase DHX8
  Pfam annotation: Domain name=DUF1605; Domain location=261-361; Score =115.9; E_value=1.3e-31; Accession=PF07717.8; Description=Domain of unknown function (DUF1605)
  Pfam annotation: Domain name=HA2; Domain location=121-212; Score =89.5; E_value=1.2e-23; Accession=PF04408.15; Description=Helicase associated domain (HA2)
  Pfam module annotation: Pfam domain module=DUF1605::HA2; Domain location=261-361::121-212
VVLATNIAETSVTITGIKYVIDPGMVKARAYNPVTGMESLIIIPVSKAQALQRSGRAGREGPGKCFRLFQESEFDKLVDSTIPEIKRCNLSNVVLQLKALGIDDIIGFDFMEKPSRTAILKSLEQLILLGALTDDYKLSDPVGHQMARLPLDPMYSKALIVSSEFKCLEEMLIVVSMLSVESIFSAXREKLEEARAARKGFESSEGDHITLVNVYRAAAECLEKSKNANAKERTMEKALNRWCKENFINNRSLKHALDVHSQIQGHVQQMGLNLSSCGDDMALFRRCLTAAFFLNAAMRQPDGSYRALATGQSVQIHPSSVLFRTKPDCVIFNELVRTTQNYVKNLTRIDPLWLAELAPQYYATED

SEQ ID NO: 112574 - protein, 200 aa, Setaria italica
  Transcript Sequence Number=SeqID_46600
  Gene Ontology: Cellular component=chloroplast
  Homolog annotation: Hit_ID=Q9SR19; Match level="QueryCoverage=79%, HitCoverage=36%, E-value=3e-15, Identity=34%"; Hit description =F7O18.2 protein
LQVVATETARARLELEMERARKKAAGEEVEEGEDDTASRPAVNVVRLQYGEVAEASTVLLLPVVRETDGVAAMESAPRRTKTDVDLGIVEVDKAWARWAVVPGWGPVAAAAEEAVAIELADGRRLPWRTAEEEPVLVIANRGQKEVAEQGSYVLEKEGRLVVERGRKLAEQGITVAAAEVLIVVRPPRDEDEMISDEEWD

SEQ ID NO: 112575 - protein, 161 aa, Setaria italica
  Transcript Sequence Number=SeqID_46601
EKEHGDDNCLKELNNHINLNDLDSCRTDKELKNHSYLNELDGQYNWKGLNDHNSQGELDGIASSKFAAEETRCHMELDGFNSLKLDNHNNLEELENNRIPKDSGDFLAEHFNNIRISGKEALVVTPETGPVKESLVLPSKDDSEKAVPAEHDIDFQVVVTL

SEQ ID NO: 112576 - protein, 629 aa, Setaria italica
  misc_feature (147)..(147): Xaa can be any naturally occurring amino acid
  misc_feature (229)..(229): Xaa can be any naturally occurring amino acid
  Transcript Sequence Number=SeqID_46602
  Gene Ontology: Mol. function=metal ion binding; Cellular component =nucleus
  Homolog annotation: Hit_ID=B9SN69; Match level="QueryCoverage=68%, HitCoverage=24%, E-value=1e-17, Identity=31%"; Hit description=DNA binding protein, putative
  Pfam annotation: Domain name=AT_hook; Domain location=261-273; Score =16.8; E_value=0.033; Accession=PF02178.11; Description=AT hook motif
  Pfam annotation: Domain name=PHD; Domain location=163-210; Score=5.4; E_value=0.0067; Accession=PF00628.21; Description=PHD-finger
  Pfam annotation: Domain name=PHD; Domain location=372-422; Score =18.3; E_value=0.00026; Accession=PF00628.21; Description=PHD-finger
  Pfam module annotation: Pfam domain module=AT_hook::PHD::PHD; Domain location=261-273::163-210::372-422
RAAVEMAENVAQLILQIKELEWNIKWTEILSTLPSSLMTKEMQKIARLFKKVIIRRKRIEGTNVEYLLDFGKRENIPPVISKHGTKFEDPSSERNRYWLSEGHVPLNLLKAYEAKAFARLLKKKETDELPKKTKKVRDSKPKMPKKXGFAYLFERAEKQSTRLCGHCNKEVVAREAVNCQYCAALFHRKHFKVPRGAADTVYVCNKCLAEKVLKVKSPQEKAAPKKSSXQKKQKKQKKRSHKIVTRRNQIVLKYKKKIGKKGKRGRPRKYPLDPSKSELPKMRESESSNVPKNEPVKRISKRLYDKYMKGSSNVSEHAASCRKRKRTALQYSYWLNGLRWTQNPHDERAISFRKERVVFPSEDAEMSEVSPVCCLCDKCYSEEDIYIACEKCEDWFHGDIYSVTVENVNNLIGFKCHRCRLRSLPVCPYAQTESDKDHGIKFVEDEEHSIDKFVEDEDPSCSKDLDAHGSQKDHDHSNLKEVDIERRLNGHIAEKVLSDNSSLEELNDHSNLKEVDTHSIEKELDANKSLKELDAHNEVKELDSPGSEKEPGDDNCLKELNNHINLNDLDSCRTDKELKNHSYLNELDGQYNWKGLNDHNSQGELDGIASSKFAAEETRCHMELDGLIA

SEQ ID NO: 112577 - protein, 118 aa, Setaria italica
  misc_feature (82)..(82): Xaa can be any naturally occurring amino acid
  misc_feature (104)..(104): Xaa can be any naturally occurring amino acid
  Transcript Sequence Number=SeqID_46603
  Gene Ontology: Mol. function=ubiquitin-protein ligase activity; Cellular component=ubiquitin ligase complex; Biological process =ubiquitin-dependent protein catabolic process
TQILEREPEFLNTLTYVLRRPSYRSRTYGILLLKAMVAAMEPARLATVSAGLVQEVVRVVSDRVSSKAVKAALHVLCRLCPXWGPGRVKAVEAGAVAALVELLXDEGGRRVTELAVVA

SEQ ID NO: 112578 - protein, 296 aa, Setaria italica
  Transcript Sequence Number=SeqID_46604
  Gene Ontology: Mol. function=hydrolase activity, acting on glycosyl bonds; Biological process=polysaccharide catabolic process
  Homolog annotation: Hit_ID=Q10RZ1; Match level="QueryCoverage=100%, HitCoverage=53%, E-value=1e-165, Identity=91%"; Hit description=Beta- amylase
  Pfam annotation: Domain name=Glyco_hydro_14; Domain location=1-296; Score=341.4; E_value=1.7e-99; Accession=PF01373.9; Description =Glycosyl hydrolase family 14
VLEEMDKDQDLAYTDRSGRRNYEYVSLGCDALPVLKGRTPIQCYADFMRAFRDHFATYMGNTIVEIQVGMGPAGELRYPSYPESNGTWSFPGIGEFQCYDRYMLSSLKAAAEAVGKPEWGNAGPGDSGSYKDWPEDTPFFRREGGWNTEYGQFFMSWYSQMLLEHGERILSAATGVFTASPGVKISVKVAGIHWHYGTRSHAAELTAGYYNTRHHDGYQPIARMLGRHGAVLNFTCVEMRDHEQPQDAQCRPEALVQQVALAARDAGVGLAGENALPRYDETAHDQVVATAAEKAE

SEQ ID NO: 112579 - protein, 49 aa, Setaria italica
  misc_feature (11)..(11): Xaa can be any naturally occurring amino acid
  Transcript Sequence Number=SeqID_46605
REKVKDRKGDXRGGEWELIKILNENKAYVPNATPKHTVRSIVKMTQVNS

SEQ ID NO: 112580 - protein, 67 aa, Setaria italica
  Transcript Sequence Number=SeqID_46606
RRMTLRQITGSRCCFSPSIPVSSLSSAGNENLEKEHIRCKNQQNLIPKCVLTVADDTEGPKGRLEGR

SEQ ID NO: 112581 - protein, 72 aa, Setaria italica
  Transcript Sequence Number=SeqID_46607
  Homolog annotation: Hit_ID=B6ST91; Match level="QueryCoverage=98%, HitCoverage=98%, E-value=7e-27, Identity=83%"; Hit description=CHCH domain containing protein
  Pfam annotation: Domain name=CHCH; Domain location=5-46; Score=15.3; E_value=0.048; Accession=PF06747.5; Description=CHCH domain
  Pfam annotation: Domain name=DUF1903; Domain location=9-71; Score= -10.7; E_value=0.036; Accession=PF08991.2; Description=Domain of unknown function (DUF1903)
  Pfam module annotation: Pfam domain module=CHCH::DUF1903; Domain location=5-46::9-71
MEKTTTTPQPVCAQESLALLNCVAAVPYDRDRCLALVDALRDCITQKKVKKFSLAEPSSSTSTEAPKSDSKS

SEQ ID NO: 112582 - protein, 42 aa, Setaria italica
  Transcript Sequence Number=SeqID_46608
KLCVKVRMCSLITCRSAGNGRRRNNVIGSYSHIVGALVTFSP

SEQ ID NO: 112583 - protein, 90 aa, Setaria italica
  misc_feature (65)..(65): Xaa can be any naturally occurring amino acid
  Transcript Sequence Number=SeqID_46609
  Subcellular localization annotation: CTP_CleavageSite=24; ConfidenceScore=5.70e-01
MAGALASSPLVHLTTSRLRLPRPRASVPSPAPGCSRGVCSGWRLTVGWRAARRCDRLRCFSNDGXAAGEEGEKRTEEEASAAAAPAEERG

SEQ ID NO: 112584 - protein, 100 aa, Setaria italica
  Transcript Sequence Number=SeqID_46610
  Gene Ontology: Mol. function=sequence-specific DNA binding; Cellular component=nucleus; Biological process=regulation of transcription, DNA-dependent
  Homolog annotation: Hit_ID=Q6Z5F8; Match level="QueryCoverage=75%, HitCoverage=22%, E-value=2e-23, Identity=66%"; Hit description =Putative MADS-box protein
MLQRLKREGDMATQLANPGALSERIKEIQREIYSSQQQLHISEERLRLFEPDPAAFSSTSELDGCEKLLADLLDRVVQRKNYLLGEHMTPFDPTASGIEG

SEQ ID NO: 112585 - protein, 124 aa, Setaria italica
  Transcript Sequence Number=SeqID_46611
FYEPRTIFSHCIRNFCRSANDFCKLFNTVQTVLLPSWANGGRPLGWRQLQVVNRRSCSEAVWISWGHPRTNQPRQSPSAEVLRCPRQSGHNCHLWGTRHNYARQSAVRCSHPHTIQLFETSIGK

SEQ ID NO: 112586 - protein, 117 aa, Setaria italica
  Transcript Sequence Number=SeqID_46612
LNGVRVTASNSRLSCIIGGGSPRVAIMARLTWATENFGARAPSRLIRSGMSPTDPHGFGAAPSYGDGHMHFPRFSRAPNGSSVHHLQLSPSQWPASICPRWQQHGLHWYVPPTIATA

SEQ ID NO: 112587 - protein, 87 aa, Setaria italica
  Transcript Sequence Number=SeqID_46613
LRERGGSSRLAQAVGDSCERFVSSPPHAIGTASPTAEGPHGWRRPLASGEAEQEEEGPEVRRVWLEVVGDFTHGLYKVILTNCTANQ

SEQ ID NO: 112588 - protein, 77 aa, Setaria italica
  Transcript Sequence Number=SeqID_46614
CCIGKVDPFELPSFFSCLHFLDGILFFQSSSALKPFACHLGYMFFVVHCCLVTSQVCVHLLTTYAPSTMFSTFHKHE

SEQ ID NO: 112589 - protein, 310 aa, Setaria italica
  Transcript Sequence Number=SeqID_46615
  Subcellular localization annotation: CTP_CleavageSite=13; ConfidenceScore=5.25e-01
AAGGFSSPSPLFSAAAGPGSRNPMRGAIPAAGDASAGEGHHLFVWRWRRSTTCPVRYLPPTRARRGRSCLRRWAAAASMKAPGAGVPVTGSEPTHLPSQRGIFTWGQQQPESNINDCSFSGGSSRSSTAGRDSIDSPLHWGSKFTSSVSSRLYYQIILQLWDLHQRGKEFTEVKMISQYLFPRIEWCAGDCIEQQIVLHHCGGSPRVAIMARLTWATENFGARAPSRLIRSGMSPTDPHGFGAAPSYGDGHMHFPRFSRAPNGSSVHHLQLSPSQWPASICPRWQQHGLHWVCNMHPALCIGFTHGYGFS

SEQ ID NO: 112590 - protein, 170 aa, Setaria italica
  Transcript Sequence Number=SeqID_46616
  Gene Ontology: Mol. function=DNA binding; Cellular component=nucleus; Biological process=regulation of transcription, DNA-dependent
  Homolog annotation: Hit_ID=B6U6Y0; Match level="QueryCoverage=97%, HitCoverage=44%, E-value=4e-68, Identity=79%"; Hit description =Squamosa promoter-binding-like protein 9
  Pfam annotation: Domain name=SBP; Domain location=1-40; Score=24.6; E_ value=4.8e-05; Accession=PF03110.6; Description=SBP domain
SFLVQPCSRFHELPEFDQGKRSCRRRLIGHNERRRKPPPGPLTSRYGRLAASFQEPGRFRSFLLDFSYPRVPSSVRDAWPAIQPGGDRMPGTIQWQGNQGIHPHRSTVAGYGNHAYIGHGGSVAGPSSVLPAAFELPPGGCVAGVATDSSCALSLLSTTQPWDATTESAS

SEQ ID NO: 112591 - protein, 89 aa, Setaria italica
  Transcript Sequence Number=SeqID_46617
GNFFTVTTKPTWKFYISLSVIAKCTLYIPVEIYIHFIFEYIFVVKKLIWTAEISRLLLFHLFLTYFFCEKNCPRKYYTHAKSGFHACSD

SEQ ID NO: 112592 - protein, 141 aa, Setaria italica
  Transcript Sequence Number=SeqID_46618
  Gene Ontology: Mol. function=protein binding; Cellular component=GINS complex; Biological process=positive regulation of S phase of mitotic cell cycle
  Homolog annotation: Hit_ID=B6THR1; Match level="QueryCoverage=100%, HitCoverage=71%, E-value=2e-79, Identity=99%"; Hit description=DNA replication complex GINS protein PSF1
  Pfam annotation: Domain name=Psf1; Domain location=1-141; Score=34.3; E_value=2.4e-09; Accession=PF03651.6; Description=Partner of SLD five, PSF1
ECNEHNSQFQSLIRKMVEQNLDIETTRNEDHYGAAIHHLSLLRNKRCLMAYMYNRAEVIQSFRWKVGPVLPHDIQEKLHFSEKEYFKNHSAAIKSYISEMDIDLTVDMVPPKDPYIQVRVLEDIGEVSLGDHSVSLTKNSL

SEQ ID NO: 112593 - protein, 709 aa, Setaria italica
  Transcript Sequence Number=SeqID_46619
  Gene Ontology: Cellular component=cytoplasm; Biological process=cell differentiation
  Homolog annotation: Hit_ID=Q4JF22; Match level="QueryCoverage=88%, HitCoverage=54%, E-value=0.0, Identity=78%"; Hit description =OSJNBa0029H02.30 protein
LRSFYPLITPAGQSGLASSLANSADKLPTGTRCADPCLPFIRLHSFPLHPSQRDIVKRNPHKKEWWTGAGPSGPFIYTPFSKAGASSGTSKQEVSWIVGEPVQVMVELANPCSFDLVVESIYLSVHSGNFDAFPVSVSLPPNTSKLVLLSGIPTQVGQISIPGCIVHCFGVITEHLFKEVDCLLLGAAQGLVLSDPFRCCGSSKVKSVNFPSISVVPPLPLLVANVVGGDGSILLYEGEIRDVLITLTNAGTVPVEEANIALSGKNQDSVISIAHSTWKSALPIKPGGEVTFAVTLRAWHLSSADLEADGSRSPASSRRIAREGINPFLNIHYAGPAANPENGDISLPPGRRLVVPLNICVVQGMRLVRARLLSMEIPARFTEAHLRPVSGKHDISTGNDTEHTNVNLLKIDPYNGSWGLRLLELELFNPTDVVFDVDVAVHSDDTNLDQRLISEGNAADAACHKTRIDRDYSARVLIPLENFKLPVLDASFFVKESGSDEPLGSRAAAIAERNAKAELNASINNLISKIKVKWHSGRNSSGELNIKDAIQAALQASIMDILLPDPLTFSFKLAKNGAVTNVDSSKDPISAHEMTHMEVQIRNNTKEIIRMNLSISCKDVAGENCFDENSATVLWAGVLSDIHLEVLPLQEVVHPFSVYFLVPGDYSLQASSVIIDATDVLRARAKAESPDEPILCRGSPFHIRVVGTA

SEQ ID NO: 112594 - protein, 174 aa, Setaria italica
  misc_feature (162)..(162): Xaa can be any naturally occurring amino acid
  Transcript Sequence Number=SeqID_46620
  Subcellular localization annotation: CTP_CleavageSite=77; ConfidenceScore=5.20e-01
DWFTHDWFPFFFLKTTHDWFWLGIFDGAHGGSNKTPWPSTGKNTSWLMRTTRFFSHRVYRILLDSLDNANTCRDAVSVVKKVSTFAGLIFLNLCQILPEQIQPLHIAFDGTLPIAAVGLLQATLRRRGRRCHRRLLTILLLLSLLLVAVLSGYRHLYLLNRXHHLLLGDGGQAR

SEQ ID NO: 112595 - protein, 53 aa, Setaria italica
  Transcript Sequence Number=SeqID_46621
TPATTRDAYHLDLVHSSLNTSGILLFSGMHSSPGGAHRTPQLIVLQLTLVLIL

SEQ ID NO: 112596 - protein, 91 aa, Setaria italica
  Transcript Sequence Number=SeqID_46622
MGKKGASSWLTAVKRAFRSPSKDADSTSPARKASRLRDDAPAPAADADDDKGKRERRRWLFRRSSSPSPSPAPPPAPDHPHPHTRPHSQPG

SEQ ID NO: 112597 - protein, 150 aa, Setaria italica
  Transcript Sequence Number=SeqID_46623
  Gene Ontology: Cellular component=integral to membrane
  Homolog annotation: Hit_ID=Q6A6U5; Match level="QueryCoverage=98%, HitCoverage=18%, E-value=6e-83, Identity=97%"; Hit description =Putative ABC transporter-associated permease
PLPGNLVKQFDDDLHGARKVPMTYGSSDDRAGNSVAWWAFHNVDDVASILPLTDGQRRQLQTAGSLRVTTDEQASNTEITVPRDLGWLGQIKVIGHGNTPPAKSSDSSVSRGFLYVGLSPNQEDTAYHWATTHHIDPSYVMAPRIASKIS

SEQ ID NO: 112598 - protein, 203 aa, Setaria italica
  Transcript Sequence Number=SeqID_46624
  Gene Ontology: Mol. function=RNA methyltransferase activity; Biological process=RNA processing
  Homolog annotation: Hit_ID=B6TZF3; Match level="QueryCoverage=91%, HitCoverage=53%, E-value=2e-92, Identity=88%"; Hit description=SpoU rRNA Methylase family protein
  Pfam annotation: Domain name=SpoU_methylase; Domain location=38-188; Score=146.6; E_value=7.7e-41; Accession=PF00588.11; Description=SpoU rRNA Methylase family
FSLLLVLLNLSTIVLRHFRDLGSHEDGDSLHGLFNHPKRILVLDGIQDPGNLGTLIRSACAFKWDGVFLLPASCDPFNEKALRAARGASLQLPVVTGTWHDLHELMTKYNMKMMAGHPESSGDASKGIQSLSKELADSLLNESLCLVLGSEGNGLSSETLQACELVNIPMEGTFESLNVSVAGGIFLFMLQPKYQIDSRTLTP

SEQ ID NO: 112599 - protein, 72 aa, Setaria italica
  Transcript Sequence Number=SeqID_46625
  Gene Ontology: Mol. function=dioxygenase activity; Cellular component= plasma membrane; Biological process=methionine biosynthetic process
  Homolog annotation: Hit_ID=A1L4T4; Match level="QueryCoverage=97%, HitCoverage=35%, E-value=6e-30, Identity=85%"; Hit description=1,2 -dihydroxy-3-keto-5-methylthiopentene dioxygenase 1
SSCKKGGMIVLPAGMYHRFTLDTDNYIKAMRLFVGEPVWTPYNRPHDHLPARQEYLDKLVKAEGVNQAVEAR

SEQ ID NO: 112600 - protein, 80 aa, Setaria italica
  misc_feature (45)..(45): Xaa can be any naturally occurring amino acid
  Transcript Sequence Number=SeqID_46626
  Gene Ontology: Mol. function=oxidoreductase activity, acting on single donors with incorporation of molecular oxygen, incorporation of two atoms of oxygen; Cellular component=plasma membrane; Biological process=...
  Gene Ontology: Biological process=methionine biosynthetic process
  Homolog annotation: Hit_ID=Q10RE5; Match level="QueryCoverage=100%, HitCoverage=41%, E-value=1e-32, Identity=82%"; Hit description=1,2 -dihydroxy-3-keto-5-methylthiopentene dioxygenase 2
  Pfam annotation: Domain name=ARD; Domain location=14-80; Score=-46.4; E_value=0.062; Accession=PF03079.6; Description=ARDARD' family
METEFQDGKQEVIEAWYMDDSQEDQRLPHHREPKEFIPLEKLSEXGIISWRLNPDNWEKDENLKKIREARGYSYMVCLCP

SEQ ID NO: 112601 - protein, 88 aa, Setaria italica
  Transcript Sequence Number=SeqID_46627
  Gene Ontology: Mol. function=oxidoreductase activity, acting on single donors with incorporation of molecular oxygen, incorporation of two atoms of oxygen; Cellular component=plasma membrane; Biological process=...
  Gene Ontology: Biological process=methionine biosynthetic process
  Homolog annotation: Hit_ID=Q10RE5; Match level="QueryCoverage=98%, HitCoverage=43%, E-value=1e-40, Identity=88%"; Hit description=1,2 -dihydroxy-3-keto-5-methylthiopentene dioxygenase 2
  Pfam annotation: Domain name=ARD; Domain location=1-58; Score=-22.9; E_value=0.0011; Accession=PF03079.6; Description=ARDARD' family
FGSYFCTLRDQNDQWIRIAVKKGGMIVLPAGMYHRFTLDTDNYIKAMRLFVGEPVWTPYNRPHDHLPARKEYVDRIINRGGNQAVEAR

SEQ ID NO: 112602 - protein, 88 aa, Setaria italica
  Transcript Sequence Number=SeqID_46628
  Gene Ontology: Mol. function=dioxygenase activity; Biological process= methionine biosynthetic process
  Homolog annotation: Hit_ID=A1L4T4; Match level="QueryCoverage=59%, HitCoverage=26%, E-value=2e-16, Identity=71%"; Hit description=1,2 -dihydroxy-3-keto-5-methylthiopentene dioxygenase 1
MISFIILLLEPCHYDDFFLEHVGELRIIVLIEDATTMITSMFLQAMRLFVGEPVWTPYNRPHDHLPARQEYLDKLVKAEGVNQAVEAR

SEQ ID NO: 112603 - protein, 199 aa, Setaria italica
  Transcript Sequence Number=SeqID_46629
  Gene Ontology: Mol. function=oxidoreductase activity, acting on single donors with incorporation of molecular oxygen, incorporation of two atoms of oxygen; Cellular component=plasma membrane; Biological process=...
  Gene Ontology: Biological process=methionine biosynthetic process
  Homolog annotation: Hit_ID=Q10RE5; Match level="QueryCoverage=100%, HitCoverage=100%, E-value=1e-104, Identity=89%"; Hit description=1,2- dihydroxy-3-keto-5-methylthiopentene dioxygenase 2
  Pfam annotation: Domain name=ARD; Domain location=14-168; Score =328.7; E_value=1.2e-95; Accession=PF03079.6; Description=ARDARD' family
  Pfam annotation: Domain name=Cupin_2; Domain location=88-162; Score =27.9; E_value=4.3e-05; Accession=PF07883.3; Description=Cupin domain
  Pfam module annotation: Pfam domain module=ARD::Cupin_2; Domain location=14-168::88-162
MEDQFQDGKEEVIQAWYMDESEEDQRLPHHREPKEFIPLDKLSELGILSWRLNADDWENDENLKQIREARGYSYVDICDVCPEKLPNYEAKIKNFFEEHLHTDEEIRYCLEGSGYFDVRDENDKWIRVAVKKGGMIVLPAGMYHRFTLDTDNYIKAMRLFVGEPVWTPYNRPHDHLPARQEYLDKLVKAEGVNQAVEAR

SEQ ID NO: 112604 - protein, 92 aa, Setaria italica
  misc_feature (7)..(7): Xaa can be any naturally occurring amino acid
  misc_feature (66)..(66): Xaa can be any naturally occurring amino acid
  Transcript Sequence Number=SeqID_46630
  Gene Ontology: Mol. function=protein serine/threonine kinase activity; Biological process=protein amino acid phosphorylation
  Homolog annotation: Hit_ID=B9R9E2; Match level="QueryCoverage=69%, HitCoverage=4%, E-value=1e-10, Identity=54%"; Hit description =Leucine-rich repeat receptor protein kinase exs, putative
VPSGPAXPVSAPDSSSWSFYGSAADACLEKLSLADLAAATGGFSPDNIIGDGSFGFVYRAVLPSGXRSSVKRLSGDGAAGAGNREFLAELEV

SEQ ID NO: 112605 - protein, 31 aa, Setaria italica
  Transcript Sequence Number=SeqID_46631
ISGFVQTLLYADFFYYYLNSWKNNVKLTLPA

SEQ ID NO: 112606 - protein, 99 aa, Setaria italica
  Transcript Sequence Number=SeqID_46632
LGYQDLCRHYCMQISFIITSTVGRTTLSSLYQLDRSIAQSLLIEPLYHIDTIVLNFRISSDWNQINSDTLLKHEPRCQEYTASPLDRAKIAHSIIILFH

SEQ ID NO: 112607 - protein, 93 aa, Setaria italica
  misc_feature (17)..(17): Xaa can be any naturally occurring amino acid
  misc_feature (88)..(88): Xaa can be any naturally occurring amino acid
  Transcript Sequence Number=SeqID_46633
  Homolog annotation: Hit_ID=B9RAY4; Match level="QueryCoverage=67%, HitCoverage=16%, E-value=3e-16, Identity=66%"; Hit description=UBX domain-containing protein 8-B, putative
MVASLQPGSFPFCAVVXPVSDESIAVLQQVEGPVSPTELVEILQRTIDEQGAAFRASSRPDEQAAAVRSDRTAEEEERRRSAQRLRQXQDAAY

SEQ ID NO: 112608 - protein, 75 aa, Setaria italica
  Transcript Sequence Number=SeqID_46634
  Subcellular localization annotation: CTP_CleavageSite=61; ConfidenceScore=5.03e-01
LLGVSLGHFCFVLGVSLLVTWRMSSSAVAGLLLCHLRVGPVPHVNNPTQYCRGTTSHLAVRVSPTHYSFFAKRFL

SEQ ID NO: 112609 - protein, 82 aa, Setaria italica
  Transcript Sequence Number=SeqID_46635
  Gene Ontology: Mol. function=protein serine/threonine kinase activity; Biological process=protein amino acid phosphorylation
  Homolog annotation: Hit_ID=B6U4V0; Match level="QueryCoverage=42%, HitCoverage=8%, E-value=3e-12, Identity=94%"; Hit description =Nodulation receptor kinase
RGGQGTEDFFCRIALLSYKELNSKQIICEHLTTGSLAIKCRLICSINADHPVIHRDIKSSNILLMNNFRAKVADFGFAKLAP

SEQ ID NO: 112610 - protein, 423 aa, Setaria italica
  Transcript Sequence Number=SeqID_46636
  Gene Ontology: Mol. function=protein serine/threonine kinase activity; Biological process=protein amino acid phosphorylation
  Homolog annotation: Hit_ID=B6U4V0; Match level="QueryCoverage=100%, HitCoverage=99%, E-value=0.0, Identity=83%"; Hit description =Nodulation receptor kinase
  Pfam annotation: Domain name=Pkinase; Domain location=133-408; Score =132.5; E_value=1.4e-36; Accession=PF00069.17; Description=Protein kinase domain
  Pfam annotation: Domain name=Pkinase_Tyr; Domain location=133-405; Score=105.0; E_value=2.6e-28; Accession=PF07714.9; Description =Protein tyrosine kinase
  Pfam module annotation: Pfam domain module=Pkinase::Pkinase_Tyr; Domain location=133-408::133-405
  Subcellular localization annotation: CTP_CleavageSite=26; ConfidenceScore=5.35e-01
MRSASGGASPWRRSDPGGSGELSRVSVATTASSAPEGSVSGGGRGLSFLDAFRSCFVPPEARSPETSMSDDFHPSHQLSQSVSSQGSNSGSTFGSKRSIKGMYSPMHRNSLEREMPGSTKFSLAQIQKATKNFSPNLKIGQGGSGTVYKGQLADGTLVAVKRAKKNVYDKHMGREFWNEIETLQRIEHLNLVRFHGYLEFGGEQLIIVEYVPNGNLREHLDCVNGKVLEFSMRLEIAIDVAHAITYLHTYSDHPVIHRDIKSSNILLMNNFRAKVADFGFAKLAPTDSSHVSTQVKGTAGYLDPEYLRTYQLNEKSDVYSFGVLLVELVTGRRPIEPKRSIIERVTAKWAMEKFVEGNAIQTLDSNLEANNAINLAVEKMFELALQCLAPTKRNRPSMRRCAEILWSIRKDYRELVVPTSAMH

SEQ ID NO: 112611 - protein, 290 aa, Setaria italica
  Transcript Sequence Number=SeqID_46637
  Gene Ontology: Mol. function=ribose phosphate diphosphokinase activity; Cellular component=cytoplasm; Biological process =nucleotide biosynthetic process
  Homolog annotation: Hit_ID=Q6ZFT5; Match level="QueryCoverage=99%, HitCoverage=88%, E-value=1e-150, Identity=89%"; Hit description =Ribose-phosphate pyrophosphokinase 4
  Pfam annotation: Domain name=Pribosyltran; Domain location=130-230; Score=26.9; E_value=3.1e-05; Accession=PF00156.19; Description =Phosphoribosyl transferase domain
AIELQSINWRSFDDGFPNLFINKAHDIRGQHVAFLASFSSPAVIFEQISVIFALPKLFIASFTLVLPFFPTGSFERVEEEGDVATAFTLARILSMIPKSRGGPTSVVIYDIHALQERFYFGDDVLPCFETGIPLLLQRLRQLPDADNITIAFPDDGAWKRFHKMLQHFPMIVCNKVREGDKRIVRIKEGNPEGRHVVIVDDLVQSGGTLRECQKALASHGAAKVSAYVTHAVFPKQSYERFMTSNSAGPGDQFAYFWITDSCPHTVKAIGQRPPFEVLSLAGSIADALQI

SEQ ID NO: 112612 - protein, 36 aa, Setaria italica
  Transcript Sequence Number=SeqID_46638
  Gene Ontology: Mol. function=transporter activity; Cellular component= integral to membrane; Biological process=transport
  Homolog annotation: Hit_ID=B6TB19; Match level="QueryCoverage=100%, HitCoverage=6%, E-value=1e-10, Identity=88%"; Hit description =Patellin-5
RAGEPGKVVLTVENTSHKKKKVLFRYKAKSPCAKKC

SEQ ID NO: 112613 - protein, 122 aa, Setaria italica
  Transcript Sequence Number=SeqID_46639
  Gene Ontology: Mol. function=nucleic acid binding
  Homolog annotation: Hit_ID=B6SHQ9; Match level="QueryCoverage=67%, HitCoverage=24%, E-value=8e-35, Identity=84%"; Hit description=RNA -binding region-containing protein 1
  Pfam annotation: Domain name=RRM_1; Domain location=7-76; Score=77.8; E_value=4e-20; Accession=PF00076.14; Description=RNA recognition motif. (a.k.a. RRM, RBD, o
DTTLTKVFVGGLAWETPSDGLRQHFEAYGEILEAVVITDRETGRSKGYGFVIFRHPDSAARAVQNPNPVIAGRRANCNIAAFGPPRPAAQARGRGGGGGGARGPHMQDQPQLGPPYRVPSQT

SEQ ID NO: 112614 - protein, 56 aa, Setaria italica
  Transcript Sequence Number=SeqID_46640
FLCFYNTIMCVLVLKIKNLLLVSNISNNNFLIKKHIYKTIVHSQFLFPTPIICICS

SEQ ID NO: 112615 - protein, 101 aa, Setaria italica
  Transcript Sequence Number=SeqID_46641
WHYESTIPVLTYCSFFRVLATDSSCCVLMYLCAPLFELLSVNRLFEMSEDLALQLGGTFPFSIVTMLLGSIWIIISWNNVSYNSMHKTIMMKYVDTCFAVS

SEQ ID NO: 112616 - protein, 72 aa, Setaria italica
  Transcript Sequence Number=SeqID_46642
  Gene Ontology: Mol. function=solute:hydrogen antiporter activity; Cellular component=integral to membrane; Biological process =regulation of pH
  Homolog annotation: Hit_ID=A0ZS64; Match level="QueryCoverage=100%, HitCoverage=5%, E-value=6e-26, Identity=75%"; Hit description=Na+/H+ antiporter
  Subcellular localization annotation: CTP_CleavageSite=60; ConfidenceScore=5.00e-01
RQPLCDWTLKLSNHIMVVWKVLKSNVQFPNYYRFLQMSRLPRKLVTYFTVERLESGCYICAAFLRAHRIARR

SEQ ID NO: 112617 - protein, 661 aa, Setaria italica
  misc_feature (247)..(247): Xaa can be any naturally occurring amino acid
  misc_feature (267)..(267): Xaa can be any naturally occurring amino acid
  Transcript Sequence Number=SeqID_46643
  Gene Ontology: Mol. function=solute:hydrogen antiporter activity; Cellular component=integral to membrane; Biological process =regulation of pH
  Homolog annotation: Hit_ID=A0ZS64; Match level="QueryCoverage=100%, HitCoverage=58%, E-value=0.0, Identity=90%"; Hit description=Na+/H+ antiporter
  Pfam annotation: Domain name=Na_H_Exchanger; Domain location=4-375; Score=164.0; E_value=4.3e-46; Accession=PF00999.13; Description =Sodiumhydrogen exchanger family
HHGLGKLGAGIRIWANINPDLLLAVFLPALLFESSFSMEIHQIKRCMAQMVLLAGPGVLISTFLLGAAVKLTFPYNWSWKISLLLGGLLSATDPVAVVALLKELGASKKLSTIIEGESLMNDGTAIVVYQLFYRMVLGRTFDAGAIIKFLSEVSLGAVALGLAFGIVSVLWLGFIFNDTIIEIALTLAVSYIAFFTAQDSLEVSGVLTVMTLGMFYAAFAKTAFKGESQQSLHHFWEMVAYIANTLXFILSGVVIADGVLQNNVHFXETHGTSWGFLLLLYVFVQISRLIVVSALYPLLRHFGYGLDLKEAMILVWSGLRGAVALSLSLSVKRTSDAVQPYIKPEVGMMFVFFTGGIVFLTLIFNGSTTQFLLRMLGMDKLSATKLRVLKYTRYEMLNKALEAFGELREDEELGPADWATVKKHITCLNDLDDDPEHPHDVGDKDDHMHTMNLRDIRERLLNGVQAAYWGMLEEGRITQATANILMRSVDEAMDLVSRQPLCDWKGLKSNVQFPNYYRFLQMSRLPRKLVTYFTVERLESGCYICAAFLRAHRIARRQLHDFLGDSEVARIVIDESNAEGEEAKKFLEDVRVTFPQVLRVLKTRQVTYSVLTHLSEYIQNLQKIGLLEEKEMVHLDDALQTDLKKLKRNPPLVKMPRVSEL

SEQ ID NO: 112618 - protein, 540 aa, Setaria italica
  Transcript Sequence Number=SeqID_46644
  Gene Ontology: Mol. function=hydrolase activity; Cellular component =extracellular region
  Homolog annotation: Hit_ID=B6SRR5; Match level="QueryCoverage=97%, HitCoverage=97%, E-value=0.0, Identity=92%"; Hit description =Heparanase-like protein 2
  Pfam annotation: Domain name=Glyco_hydro_79n; Domain location=23-341; Score=574.1; E_value=1.6e-169; Accession=PF03662.6; Description =Glycosyl hydrolase family 79, N-terminal domain
MSLWFIFLLPLLCLPAWVRAEDYSDVTVIVRGSETIASTSDEFVCATIDWWPPEKCNYDQCPWGRASVLNLDLTNPLLAKAIQAFSPLRIRVGGSLQDQVLYGTPNLESPCDPFTKVSGGLFGFSQGCITLERWDAINDLFVNTGAVITFGLNALQGRQQIRRGVWGGPWNSSNAREFMEYTVSKDYPIDSWEFGNELSGSGIGASVGAEQYGKDLVELQTIINELYGDSRRPLVVAPGGFFDQKWFAELLEVSGPNVLNAMTHHIYNLGAGNDPQVPNRILNPQYLSRASDTFRSLQLTIQRHGPWSAPWVGEAGGAYNSGSRLVSNTFLNSFWYLDQLGQSAKYDTKVYCRQTLIGGNYGLLDTETFVPNPDYYSALLWHRLMGTGVLSTDISGSSYLRAYVHCGKQKGGVTILLLNLHRSMGFMVSVRNDLNVNLAEGQGIRRDNIFVHGLKRTVSWVGSKASDGYSKREEYHLSAKDGNPFARTMLLNGVPLELTEDGDIPPLYPVEVSVNSPIYVAPLTIAFVVFPDFEAEACGR

SEQ ID NO: 112619 - protein, 78 aa, Setaria italica
  Transcript Sequence Number=SeqID_46645
NSMDATRDMLGSSLGKSRAGYWRHGAGKLLGWLLELLLVTLVANCLRHIDVFKICGAFLSSHPCFLLARVEARVRECK

SEQ ID NO: 112620 - protein, 196 aa, Setaria italica
  Transcript Sequence Number=SeqID_46646
  Gene Ontology: Mol. function=transition metal ion binding; Cellular component=integral to membrane; Biological process=transcription initiation from RNA polymerase II promoter
  Homolog annotation: Hit_ID=B9SCC9; Match level="QueryCoverage=86%, HitCoverage=83%, E-value=8e-36, Identity=46%"; Hit description =Steroid binding protein, putative
  Pfam annotation: Domain name=Cyt-b5; Domain location=78-175; Score =89.3; E_value=1.3e-23; Accession=PF00173.20; Description=Cytochrome b5-like HemeSteroid binding doma
MVAMGFAEALQAYTGLTPGAAATILALMLATYLLVSSLFVAPAAPSPAAPPKQREEKEQEGEKDPMPFVYPDPVEVGEVTLEQLRAYDGKDPAKQILIAIRGQVYDVSRGRLFYGPQGPYSLFAGRDATRALALMSFDPNDLTGDLDGLSPDELEVLQDWEEKFKERYPRVGHLAGQDAAGSDRIAAQPDHGEEDA

SEQ ID NO: 112621 - protein, 59 aa, Setaria italica
  Transcript Sequence Number=SeqID_46647
RLTWFLAYLHRIRLICVLPEEEDKGSAAGTERSEADQLMVGWLRPLATDRSMLVCRCSH

SEQ ID NO: 112622 - protein, 131 aa, Setaria italica
  misc_feature (11)..(11): Xaa can be any naturally occurring amino acid
  Transcript Sequence Number=SeqID_46648
  Homolog annotation: Hit_ID=Q67UF2; Match level="QueryCoverage=77%, HitCoverage=25%, E-value=6e-38, Identity=73%"; Hit description =Putative storekeeper protein
EEEREIGESDXEDEDSGRDDRARKNRRLRPITMANGNVAGFGAVNVNSRGKFDFEKGKDAYPYLWETVEDLSKEHPHGVAFKKAFELIEGPKARGMEEKLRKFRLTEIRHQLRRMELMKETVKMVLDALEG

SEQ ID NO: 112623 - protein, 67 aa, Setaria italica
  Transcript Sequence Number=SeqID_46649
LCTHILCELSLLSLDWEVILFLNVFLYVFQFTILTLLLLNVFFYSFKLVHIPNFVSIYKQKHMTLRI

SEQ ID NO: 112624 - protein, 285 aa, Setaria italica
  Transcript Sequence Number=SeqID_46650
  Gene Ontology: Mol. function=metal ion binding
  Homolog annotation: Hit_ID=B6SPB5; Match level="QueryCoverage=97%, HitCoverage=85%, E-value=1e-135, Identity=84%"; Hit description =Protein binding protein
  Pfam annotation: Domain name=PHD; Domain location=204-248; Score= -3.5; E_value=0.064; Accession=PF00628.21; Description=PHD-finger
  Pfam annotation: Domain name=zf-C3HC4; Domain location=205-245; Score= 42.2; E_value=2.1e-09; Accession=PF00097.17; Description=Zinc finger, C3HC4 type (RING finger)
  Pfam module annotation: Pfam domain module=PHD::zf-C3HC4; Domain location=204-248::205-245
RLTTGRLPPPYRKSMYSTVCRVATVLQTRYTAPGFWRAGLNLFVGAEKLVTNPAEKEQLKSCISRAREHLDEKENEDSMPSNREADTRFLFEGHLTVGQEPPPPAWLVADNLARELSILTESSGDQDGNNNRRESRAEDIAPAIMNFLETISGDRDLETALEESLQGIIEHPPRAPPASKEVVANLPVLTVTEEVIARLGSETECAVCRENLVVGDKMQELPCKHLFHPPCLKPWLDENNSCPICRHELRTDDHVYESRKEREKEEEEDRRGAANAVRGGEFMYI

SEQ ID NO: 112625 - protein, 90 aa, Setaria italica
  Transcript Sequence Number=SeqID_46651
  Gene Ontology: Mol. function=tRNA (guanine-N2-)-methyltransferase activity; Biological process=tRNA processing
  Homolog annotation: Hit_ID=Q9LYL0; Match level="QueryCoverage=100%, HitCoverage=18%, E-value=5e-16, Identity=52%"; Hit description=N2, N2-dimethylguanosine tRNA methyltransferases-like protein
RSDSAAGRDLAVLAATLHRRHGRLDPSAPFLCLDAMCGCGVRALRYLAQVGADFVWANDASEALRPVIVANLSRFERGSPPAEAGRRRWV

SEQ ID NO: 112626 - protein, 196 aa, Setaria italica
  Transcript Sequence Number=SeqID_46652
  Gene Ontology: Mol. function=RNA-directed DNA polymerase activity; Biological process=DNA integration
  Homolog annotation: Hit_ID=Q2QS77; Match level="QueryCoverage=95%, HitCoverage=32%, E-value=4e-31, Identity=40%"; Hit description =Retrotransposon protein, putative, unclassified
EDVITWRWEPSGVYSARSAYRAFFIGSQTSPAGKLIWKAWAPMKVRFFMWLVCRDRLWTAARRHRCGLQDSTARALCDQELEDADHLFARCSYTQQLWYLVSSILHIPSPAPNRDTSLTEWWLQMRHGLNATRRKGLDSSLMLISWKIWKERNNRVFSRAPPMQPAQLLQQIIEEAILWSAAGAKHLATSAGRHQQ

SEQ ID NO: 112627 - protein, 108 aa, Setaria italica
  Transcript Sequence Number=SeqID_46653
QHISTELFFMLQEPIFVAVESRQVCLSHSCKLEQQNKWHALVEGNTSSCGQQHGNNQVHSPTFEANTHEARLGLSRGELGGSRRDTSSDKNREGTVSSSTVHRGAPII

SEQ ID NO: 112628 - protein, 80 aa, Setaria italica
  Transcript Sequence Number=SeqID_46654
IRAPFFHDGSCEQRGHGRHGCIMHRWMPAAALEACSVLPWSVASQKATGLKTTTTPEHRFAHARPCPKAAAYPIKFFCCY

SEQ ID NO: 112629 - protein, 79 aa, Setaria italica
  Transcript Sequence Number=SeqID_46655
  Gene Ontology: Mol. function=protein serine/threonine kinase activity; Biological process=protein amino acid phosphorylation
  Homolog annotation: Hit_ID=B6TDZ3; Match level="QueryCoverage=84%, HitCoverage=17%, E-value=3e-29, Identity=91%"; Hit description =Serine/threonine-protein kinase AFC3
MESSRSRKRTRQAYDDHAAPPPEREVVPRGGASPPWREDDRDGHYVFDLGENLTRRYKILSKMGEGSGFLQTVASSSAG

SEQ ID NO: 112630 - protein, 235 aa, Setaria italica
  misc_feature (73)..(73): Xaa can be any naturally occurring amino acid
  Transcript Sequence Number=SeqID_46656
  Gene Ontology: Mol. function=protein serine/threonine kinase activity; Biological process=protein amino acid phosphorylation
  Homolog annotation: Hit_ID=B6THU2; Match level="QueryCoverage=92%, HitCoverage=34%, E-value=4e-71, Identity=61%"; Hit description =Receptor-like protein kinase RK20-1
  Pfam annotation: Domain name=DUF26; Domain location=186-235; Score =63.0; E_value=1.1e-15; Accession=PF01657.9; Description=Domain of unknown function DUF26
  Pfam annotation: Domain name=DUF26; Domain location=70-120; Score =58.3; E_value=3e-14; Accession=PF01657.9; Description=Domain of unknown function DUF26
  Pfam module annotation: Pfam domain module=DUF26::DUF26; Domain location=186-235::70-120
  Subcellular localization annotation: CTP_CleavageSite=60; ConfidenceScore=5.26e-01
LTVIAAVVAIALLPGAASYPWPLCGTDNFRANSRYQANLNLLAATLPGNASTSPSNLFATAAAGAGRDRVWAXLCRGDVNASNCFACLAQAFHDLPNDCSYNKDATIYYDPCMLRYSNTSVLSAADADLSGQLAWYAIPTNVTANPAQFNRAVAALINATADRAALNSTRRFATGEAGFDQEVPTVYAVAQCTPDQTPAQCRRCLAGIVADYMGAFENADGGRILWINCNFRYDS

SEQ ID NO: 112631 - protein, 80 aa, Setaria italica
  misc_feature (63)..(63): Xaa can be any naturally occurring amino acid
  Transcript Sequence Number=SeqID_46657
  Gene Ontology: Mol. function=ribokinase activity
  Homolog annotation: Hit_ID=Q7XDM4; Match level="QueryCoverage=100%, HitCoverage=21%, E-value=2e-13, Identity=50%"; Hit description =Kinase, pfkB family protein
TSTSSVPCALLETLLQFPRAKFVFLTLGVIGCTMLERSKGGDDSGIGASDIEKVAESLKMEVXRDGILPTCLFFKFLSFS

SEQ ID NO: 112632 - protein, 32 aa, Setaria italica
  misc_feature (12)..(12): Xaa can be any naturally occurring amino acid
  Transcript Sequence Number=SeqID_46658
  Pfam annotation: Domain name=Proteasome_A_N; Domain location=4-27; Score=34.7; E_value=3.7e-07; Accession=PF10584.1; Description =Proteasome subunit A N-terminal signa
MARYDRAITVFXSPDGHLFQVEYALEAVRKGN

SEQ ID NO: 112633 - protein, 192 aa, Setaria italica
  misc_feature (160)..(160): Xaa can be any naturally occurring amino acid
  Transcript Sequence Number=SeqID_46659
  Gene Ontology: Mol. function=threonine-type endopeptidase activity; Cellular component=proteasome core complex; Biological process =ubiquitin-dependent protein catabolic process
  Homolog annotation: Hit_ID=Q6YT00; Match level="QueryCoverage=90%, HitCoverage=68%, E-value=4e-83, Identity=89%"; Hit description =Proteasome subunit alpha type-7-A
  Pfam annotation: Domain name=Proteasome; Domain location=27-192; Score=96.5; E_value=9.5e-26; Accession=PF00227.18; Description =Proteasome A-type and B-type
  Pfam annotation: Domain name=Proteasome_A_N; Domain location=4-26; Score=42.3; E_value=2e-09; Accession=PF10584.1; Description =Proteasome subunit A N-terminal signa
  Pfam module annotation: Pfam domain module=Proteasome::Proteasome_A _N; Domain location=27-192::4-26
MARYDRAITVFSPDGHLFQVEYALEAVRKGNAAVGVRGTDTVVLGVEKKSTPKLQDSRSVRKIASLDTHIALACAGLKADARVLINRARVECQSHRLTVEDPVTVEYITRYIAGLQQKYTQSGGVRPFGLSTLIVGFDPLHPEAPPCTRPDPSGEPFSAXWKANATGLQQKSRRAEGSDPSASPPSSSASTP

SEQ ID NO: 112634 - protein, 87 aa, Setaria italica
  Transcript Sequence Number=SeqID_46660
  Gene Ontology: Mol. function=threonine-type endopeptidase activity; Cellular component=proteasome core complex; Biological process =ubiquitin-dependent protein catabolic process
  Homolog annotation: Hit_ID=Q6YT00; Match level="QueryCoverage=75%, HitCoverage=26%, E-value=2e-28, Identity=93%"; Hit description =Proteasome subunit alpha type-7-A
TGRNSNSMREFLEKNYKETSGKETIKLAIRALLEVVESGGKNIEVAVMTKKDGLRELEEAEVDEYVAEIEAEKAAAEAAKKGAPKDT

SEQ ID NO: 112635 - protein, 249 aa, Setaria italica
  Transcript Sequence Number=SeqID_46661
  Gene Ontology: Mol. function=threonine-type endopeptidase activity; Cellular component=proteasome core complex; Biological process =ubiquitin-dependent protein catabolic process
  Homolog annotation: Hit_ID=Q6YT00; Match level="QueryCoverage=91%, HitCoverage=91%, E-value=1e-130, Identity=98%"; Hit description =Proteasome subunit alpha type-7-A
  Pfam annotation: Domain name=Proteasome; Domain location=27-210; Score=248.7; E_value=1.4e-71; Accession=PF00227.18; Description =Proteasome A-type and B-type
  Pfam annotation: Domain name=Proteasome_A_N; Domain location=4-26; Score=42.3; E_value=2e-09; Accession=PF10584.1; Description =Proteasome subunit A N-terminal signa
  Pfam module annotation: Pfam domain module=Proteasome::Proteasome_A _N; Domain location=27-210::4-26
MARYDRAITVFSPDGHLFQVEYALEAVRKGNAAVGVRGTDTVVLGVEKKSTPKLQDSRSVRKIASLDTHIALACAGLKADARVLINRARVECQSHRLTVEDPVTVEYITRYIAGLQQKYTQSGGVRPFGLSTLIVGFDPYTDKPALYQTDPSGTFSAWKANATGRNSNSMREFLEKNYKETSGKETIKLAIRALLEVVESGGKNIEVAVMTHKDGLRELEEAEIDEYVAEIEAEKAAAEAAKKGAPKET

SEQ ID NO: 112636 - protein, 64 aa, Setaria italica
  Transcript Sequence Number=SeqID_46662
LILALLILLSSPMLCAAGCFVYLRTYKFLNLPSLVISVFMFNIYLHHGRASHTRDLTTHYVCNL

SEQ ID NO: 112637 - protein, 159 aa, Setaria italica
  misc_feature (74)..(74): Xaa can be any naturally occurring amino acid
  misc_feature (96)..(96): Xaa can be any naturally occurring amino acid
  Transcript Sequence Number=SeqID_46663
  Gene Ontology: Mol. function=aspartic-type endopeptidase activity; Biological process=proteolysis
MAAAHRLVLLVLALLAVATIAAAASGARRAAVVGKSAVVSLLELDGRGAARETRSGSCYADAKRAEMLGESRKXGAARTATVLELKHHSLTTIPRXTPAARDQYLRRLLAADEARANSLQIKNNRGAAASTQSGSSAEVPLTSGIRFQTLNLRYLPIRF

SEQ ID NO: 112638 - protein, 107 aa, Setaria italica
  misc_feature (93)..(93): Xaa can be any naturally occurring amino acid
  Transcript Sequence Number=SeqID_46664
  Gene Ontology: Mol. function=phosphoglucan, water dikinase activity; Cellular component=chloroplast
  Homolog annotation: Hit_ID=Q2QTC2; Match level="QueryCoverage=85%, HitCoverage=7%, E-value=2e-35, Identity=77%"; Hit description =Phosphoglucan, water dikinase, chloroplastic
  Pfam annotation: Domain name=CBM_20; Domain location=33-107; Score =5.4; E_value=6.1e-05; Accession=PF00686.11; Description=Starch binding domain
GRRGFSCRAGSAASAAQRTKEKKRTKPSKDRVQLRVCLDHQVKFGEHVGIIGSTKEVGSWKSQVEMEWTPDGWVCQLDLPGETLMEFKFVIFXKEGKEKYGKDGDNR

SEQ ID NO: 112639 - protein, 44 aa, Setaria italica
  Transcript Sequence Number=SeqID_46665
  Homolog annotation: Hit_ID=B6UED9; Match level="QueryCoverage=95%, HitCoverage=8%, E-value=2e-14, Identity=90%"; Hit description =Propionyl-CoA carboxylase
GRSTYLGAASIVNCLENYKPNVVITSRVADAALFLAPMIYELVK

SEQ ID NO: 112640 - protein, 133 aa, Setaria italica
  Transcript Sequence Number=SeqID_46666
  Homolog annotation: Hit_ID=B6U6X1; Match level="QueryCoverage=97%, HitCoverage=22%, E-value=3e-59, Identity=86%"; Hit description =Propionyl-CoA carboxylase
TLTLGAQKEVLNLASILGLEITVAVAYESSFETQGSPLSSFQSIGAGQGRSTYLGAASIVNCLENYKPNVVITSRVADAALFLAPMIYELGWNWNDTEELAQGTLASHLLECGCQLTGGYFMHPGDAYRVFFF

SEQ ID NO: 112641 - protein, 537 aa, Setaria italica
  Transcript Sequence Number=SeqID_46667
  Homolog annotation: Hit_ID=B6U1W7; Match level="QueryCoverage=100%, HitCoverage=100%, E-value=0.0, Identity=85%"; Hit description=SLT1 protein
  Subcellular localization annotation: CTP_CleavageSite=60; ConfidenceScore=5.11e-01
MGEPLLTSLSMENSNSHPCTRLSMDPAGSHPASTGSSGGGGATNGVGSGGDREPFVIPLRESARPGAPDINLPLSADPSQPPPSWSLDAFEILDVTLGTHNYESEVVLTLPKSTGNGSATVGVGARKCAKRGDSIWGAWFFFNHYFRPALVEKPKGKVTRDASGCISGFDKSDLRLDVFLVQHDMENMYMWVFKERPDNALGKMQLRSFMNGHSKHGEPSFPFSADKGFARSHRMQRKHYRGLSNPQCLHGIEIVVSPNLSAVPEAELKRWAELTGRELNFSIPSEASDFESWRNLPSTDFELDRPHPPASKSAAHGSHSHKKGLNGSGLNLSTPPSSDDGMDLSPKCAKRRKDFFGHGVEEDCVMANNSCSDREQEVEAHTGEPSWMHEFTGVAKHASGPVTAAKTIYEDDEGYLIVVSMLFSDPHSVRVTWRNTLTHGIVKITCVSTARMPVIKRHDRTFKLTDPFPEHCPPGEFVREIPLATRIPEDAKIEAYYDETGTGLEIMVPKHRVGPEEHEVQVCMRPPHLGDNDLVLS

SEQ ID NO: 112642 - protein, 93 aa, Setaria italica
  Transcript Sequence Number=SeqID_46668
FRKMVVGTFLNSPLSPHLLPFLHLLLSFSYLYPSQFPETAMEKDSSSMLREKESDRNKDTSRPTFHCGLALFLLDLSDSSFLFLQILEELFGL

SEQ ID NO: 112643 - protein, 358 aa, Setaria italica
  misc_feature (43)..(43): Xaa can be any naturally occurring amino acid
  Transcript Sequence Number=SeqID_46669
  Gene Ontology: Mol. function=nucleic acid binding; Cellular component= nucleus; Biological process=negative regulation of transcription
  Homolog annotation: Hit_ID=Q6H7U1; Match level="QueryCoverage=100%, HitCoverage=17%, E-value=1e-146, Identity=72%"; Hit description =Putative SNF2 domain-containing protein
GKNPAERLARQKKNLRRRLGLDVCEQFMDVNDVIKDEDLLAQXNYWGSHVQNNGFHSSNTGRNIQQLVSTMVPRYHKQPNFRSRRLSARELNMLKRKAKSSAKDHTKTVSEEDEVTLKSSAPSNGATSDQIGAQNDASDITMDEDNLEYSENGRWPFQQFVDQLIHDMFDPIWEVRHGTIMALREILTHQGACAGVYFPDLSLPSSILDGKTNFDSLKRAHGIDLNEDVHVEHLEPASKRHKKEANPSEFMYMDYDKEIVNGGYSKTEADLSNVPIVSTGELSSAHVKVEPEFCVDDSTDPCKGDSSCKPVHEKLNSISNPSSHMHALVHSKFMKLMKLAKYSYMKNWEFLQDCAIRF

SEQ ID NO: 112644 - protein, 87 aa, Setaria italica
  Transcript Sequence Number=SeqID_46670
LYVADLGVAEHADLPRLLEDPLDFDLAAPHPSSAPPPATSQERLGSTPLPELEPGAARLVVVPAPRSSFSDFVSRSVIFICATAALG

SEQ ID NO: 112645 - protein, 140 aa, Setaria italica
  misc_feature (121)..(121): Xaa can be any naturally occurring amino acid
  Transcript Sequence Number=SeqID_46671
  Gene Ontology: Mol. function=glucose-1-phosphate adenylyltransferase activity; Cellular component=chloroplast; Biological process =glycogen biosynthetic process
  Homolog annotation: Hit_ID=A5Y414; Match level="QueryCoverage=91%, HitCoverage=24%, E-value=2e-62, Identity=90%"; Hit description =Glucose-1-phosphate adenylyltransferase
MVNWEDIGTIEAFYNANLGITKKPIPDFSFYDRSAPIYTQPRHLPPSKILDADVTDSVIGEGCVIKNCKIHHSVVGLRSCISEGAIIEDTLLMGADYYETEADKKLLAENGGIPIGIGKNXSHIRRAIIDKVSSMIAPSD

SEQ ID NO: 112646 - protein, 65 aa, Setaria italica
  Transcript Sequence Number=SeqID_46672
HSRDGLLISITVACLPYESSPFPCGYCMYQAVSPFMALSSRCLPHSFESATSITSIKKSESSLVK

SEQ ID NO: 112647 - protein, 101 aa, Setaria italica
  Transcript Sequence Number=SeqID_46673
TSSNLPGNGNDPSVDNGSASGYFPQAAEDSDADDILKTGMMRMLVSETGVRPLTNLVMRSNIEFEWSAQMMDGQCQANLCYSARHSLFHFHVFKLASVIRI

SEQ ID NO: 112648 - protein, 87 aa, Setaria italica
  misc_feature (68)..(68): Xaa can be any naturally occurring amino acid
  misc_feature (73)..(73): Xaa can be any naturally occurring amino acid
  misc_feature (77)..(77): Xaa can be any naturally occurring amino acid
  Transcript Sequence Number=SeqID_46674
LLVERSLQEENKALQKELAERQKAAASRQQQQVQWDQQTQQAQAQTSSSSSSFLMRQDPQALPPPQNXRFPPXTIGXRGEEAACRRR

SEQ ID NO: 112649 - protein, 118 aa, Setaria italica
  Transcript Sequence Number=SeqID_46675
  Gene Ontology: Mol. function=transferase activity, transferring glycosyl groups; Biological process=metabolic process
  Homolog annotation: Hit_ID=Q852C2; Match level="QueryCoverage=100%, HitCoverage=24%, E-value=1e-22, Identity=50%"; Hit description =Putative UDP-glucosyltransferase
SDLDMPVKELPPLRVKDLYYSRRVDNELVTKLLTRATQAVKNSSGLVINTSDALEKTELERIRDELNIPMVLPVGPLYKLSSKSVGSSLLNQDYGCIEWLETRPSKSVLYVSFGSLAS

SEQ ID NO: 112650 - protein, 48 aa, Setaria italica
  misc_feature (1)..(1): Xaa can be any naturally occurring amino acid
  Transcript Sequence Number=SeqID_46676
XALVITICCKLTANRFKRLPSCAPHGRTKQCIQLQYHVLVKAYVHGDG

SEQ ID NO: 112651 - protein, 67 aa, Setaria italica
  Transcript Sequence Number=SeqID_46677
TASFLYFQTPFMIFLTKIEMQANKDGGQIVEVAATTNMGEENENQDSSPPQTQLVANHSGRYKKESI

SEQ ID NO: 112652 - protein, 40 aa, Setaria italica
  Transcript Sequence Number=SeqID_46678
ESQAQGSRGPLDGSNDEPMTYYPKADGWFWLAKWVKVHKQ

SEQ ID NO: 112653 - protein, 56 aa, Setaria italica
  Transcript Sequence Number=SeqID_46679
FASQYHAVTSWLIQCVVVTKIISTNKQLHGHRDVRTSLKHKGYVDNRHNLSVSTIM

SEQ ID NO: 112654 - protein, 105 aa, Setaria italica
  misc_feature (39)..(39): Xaa can be any naturally occurring amino acid
  misc_feature (62)..(62): Xaa can be any naturally occurring amino acid
  Transcript Sequence Number=SeqID_46680
  Gene Ontology: Mol. function=sequence-specific DNA binding; Cellular component=nucleus; Biological process=regulation of transcription, DNA-dependent
  Homolog annotation: Hit_ID=B6T6U6; Match level="QueryCoverage=83%, HitCoverage=34%, E-value=8e-22, Identity=67%"; Hit description=SRF -type transcription factor family protein
LNGNFLVVKEQMFSEANKCLRRKLEESNQVIWQQAWEHXEPQPEVQQQQHQLQGGNGFFHPXLDAARGEPTLQIGFPPEALTSSSCMTTFLPPMVAMRSNYCDSE

SEQ ID NO: 112655 - protein, 55 aa, Setaria italica
  Transcript Sequence Number=SeqID_46681
THSMYTSLCVGICVICKIQVFLCIFKLYSKCTAIFLIHRVSILLCVLGYVSYVRF

SEQ ID NO: 112656 - protein, 109 aa, Setaria italica
  misc_feature (89)..(89): Xaa can be any naturally occurring amino acid
  Transcript Sequence Number=SeqID_46682
FFFLSNLQTTTLHCMSLLILIHQITTPSSHIPQQKLCINKHRPQPTTTEKEWHRHHKGKVLPWLRMFFVSDPNRRSKTDRIIRISRLKXAPASCLMNIKQAQPWQAWYR

SEQ ID NO: 112657 - protein, 49 aa, Setaria italica
  Transcript Sequence Number=SeqID_46683
QRSLNTINVQLELHVLHFVHSRVGMVDTIPCPTTKILIFHLASYYLHNS

SEQ ID NO: 112658 - protein, 53 aa, Setaria italica
  Transcript Sequence Number=SeqID_46684
MCVCVWDSVRAKFLMVNDEIYLCVPLAGMGAAYGTAKSGVGVASMGVMRPELV

SEQ ID NO: 112659 - protein, 75 aa, Setaria italica
  Transcript Sequence Number=SeqID_46685
IGVGDPYLGIGDPYVGVGGWVPGKTNNPSAECASVTICGPIKKHFLDHFHKKKPIPPKPKPEPKPQPKPEPKPQP

SEQ ID NO: 112660 - protein, 74 aa, Setaria italica
  misc_feature (26)..(26): Xaa can be any naturally occurring amino acid
  Transcript Sequence Number=SeqID_46686
  Gene Ontology: Mol. function=nucleic acid binding; Cellular component= nucleus; Biological process=mRNA processing
  Homolog annotation: Hit_ID=Q10RM6; Match level="QueryCoverage=78%, HitCoverage=10%, E-value=4e-22, Identity=91%"; Hit description =Transposon protein, putative, CACTA, En/Spm sub-class, expressed
ERGHYRDRDVRRRKDDGAEPEVDPEXRDQRTVFAFQLSLKADERDVYEFFSRAGKVRDVRLIMDRNSRRSKGVG

SEQ ID NO: 112661 - protein, 120 aa, Setaria italica
  Transcript Sequence Number=SeqID_46687
  Gene Ontology: Mol. function=sequence-specific DNA binding; Cellular component=nucleus; Biological process=regulation of transcription, DNA-dependent
  Homolog annotation: Hit_ID=Q41829; Match level="QueryCoverage=95%, HitCoverage=41%, E-value=1e-47, Identity=82%"; Hit description=MADS box protein
  Pfam annotation: Domain name=K-box; Domain location=45-120; Score =78.9; E_value=1.9e-20; Accession=PF01486.9; Description=K-box region
  Pfam annotation: Domain name=SRF-TF; Domain location=1-29; Score =32.9; E_value=1.3e-06; Accession=PF00319.10; Description=SRF-type transcription factor (DNA-binding and dimerisation domain)
  Pfam module annotation: Pfam domain module=K-box::SRF-TF; Domain location=45-120::1-29
KAHEISVLCDAEVAVIVFSPKGKLYEYATDSRMDKILERYERYSYAEKALISAESESEGNWCHEYRKLKAKIETIQKCHKHLMGEDLESLNLKELQQLEQQLESSLKHIRSRKSLVLLLQ

SEQ ID NO: 112662 - protein, 73 aa, Setaria italica
  misc_feature (16)..(16): Xaa can be any naturally occurring amino acid
  Transcript Sequence Number=SeqID_46688
  Gene Ontology: Mol. function=glucose-1-phosphate adenylyltransferase activity; Cellular component=chloroplast; Biological process =glycogen biosynthetic process
  Homolog annotation: Hit_ID=A5Y419; Match level="QueryCoverage=84%, HitCoverage=11%, E-value=1e-28, Identity=96%"; Hit description =Glucose-1-phosphate adenylyltransferase
KVAGVTDSVIGEGCVXKNCKIHHSVVGLRSCISEGAIIEDTLLMGADYYETEADKKLLAENGGILVNDCSSDV

SEQ ID NO: 112663 - protein, 76 aa, Setaria italica
  Transcript Sequence Number=SeqID_46689
  Gene Ontology: Cellular component=membrane
  Homolog annotation: Hit_ID=B6SS81; Match level="QueryCoverage=100%, HitCoverage=9%, E-value=9e-36, Identity=92%"; Hit description=HYP1
EAEEREKIVKDPKSVVPAAFVSFRSRWGAAVCAQTQQTSNPTVWLTEWAPEPRDVYWDNLSIPFVSLTIRRLIVAV

SEQ ID NO: 112664 - protein, 104 aa, Setaria italica
  Transcript Sequence Number=SeqID_46690
  Gene Ontology: Mol. function=protein binding; Cellular component =nucleus; Biological process=ubiquitin-dependent protein catabolic process
  Homolog annotation: Hit_ID=B3TLY6; Match level="QueryCoverage=75%, HitCoverage=47%, E-value=4e-32, Identity=87%"; Hit description =Kinetochore protein
  Pfam annotation: Domain name=Skp1; Domain location=27-104; Score =193.3; E_value=6.5e-55; Accession=PF01466.11; Description=Skp1 family, dimerisation domain
NKHVHAAKPADDAAPAAADASAGAEDLKNWDAEFVKVDQATLFDLILAANYLNIKGLLDLTCQTVADMIKGKTPEEIRKTFNIKNDFTPEEEEEIRRENQWAFE

SEQ ID NO: 112665 - protein, 145 aa, Setaria italica
  Transcript Sequence Number=SeqID_46691
SLPSSVYHANSKNCSELGLSGSNNKGKEISSDILDVDQIGEANLRRISLSAAGTYSVVNNNSPNMDEEQGWKTTHNHTSKLPISLMGKLSCNSERESGSSAPSSQDHGSGAPIMASSRVRNKPIMIGRGRSKYASTSSHPDESSS

SEQ ID NO: 112666 - protein, 61 aa, Setaria italica
  Transcript Sequence Number=SeqID_46692
LYFYSVETEELCLASNHKKPVPPKPKPEPKPQPEYHPPTPKYSSPTPTYGSPTPIYHPPAK

SEQ ID NO: 112667 - protein, 82 aa, Setaria italica
  Transcript Sequence Number=SeqID_46693
  Gene Ontology: Mol. function=sequence-specific DNA binding; Cellular component=nucleus
  Homolog annotation: Hit_ID=Q84V67; Match level="QueryCoverage=96%, HitCoverage=31%, E-value=4e-17, Identity=58%"; Hit description=MADS -box transcription factor 18
LMEAEKEKNNALMNTHLREQQNGASKSSPSPPPSTVPDSLPTLDIGPCQPRGTGGESEPEPIPAQVNSGKLPPWMLRSVNNR

SEQ ID NO: 112668 - protein, 197 aa, Setaria italica
  Transcript Sequence Number=SeqID_46694
  Pfam annotation: Domain name=DUF1210; Domain location=1-165; Score= -61.1; E_value=0.0038; Accession=PF06735.3; Description=Protein of unknown function (DUF1210)
  Subcellular localization annotation: CTP_CleavageSite=15; ConfidenceScore=5.07e-01
LSFISFLTAFSIFPLSSTPSSSNPTPHVCPTYGSPTPIYHPPARHLFAKLLGHFHKDHDHHQLFDHFHKKPVPPKPEPKPQPEYHPPTPTYGSPTPIYHPPAKDLFDKKHWLDHFHKDHDHHHFFDHFHKKPIPPKPKSEPKPQPKPEPKPQPEYHPPTPTYGSPMPKYGSPTPIYHPPARQLFDKKHLFDHFHKNH

SEQ ID NO: 112669 - protein, 161 aa, Setaria italica
  misc_feature (98)..(98): Xaa can be any naturally occurring amino acid
  Transcript Sequence Number=SeqID_46695
PKPQPEYHPPTPTYGSPTPIYHPPAKDLFDKKHWLDHFHKDHEHHHFFDHFHKKPVPPQPKPEPKPQPEYHPPTPTYGSPTPTYGSPTPIYHPPARHXLFAKLLGHFHKDHDHHHFFDHFHKKPIPPKPKSEPKPQPKPEPKPQPEYHPPTPTYGSPTPTY

SEQ ID NO: 112670 - protein, 103 aa, Setaria italica
  Transcript Sequence Number=SeqID_46696
  Homolog annotation: Hit_ID=Q01AC6; Match level="QueryCoverage=53%, HitCoverage=17%, E-value=4e-10, Identity=56%"; Hit description=[S] KOG4843 Uncharacterized conserved protein
  Pfam annotation: Domain name=Rxt3; Domain location=56-101; Score =11.1; E_value=1.2e-06; Accession=PF08642.2; Description=Histone deacetylation protein Rxt3
VLFCYLSLLLIAGKSEVPAIVYKAGECMQELLKSWKEFEVTQDAKNAESLQNGPTLEIRIPAEFVTSTNRQVKGAQLWGTDIYTNDSDLVAVLMHTGYCSPYY

SEQ ID NO: 112671 - protein, 65 aa, Setaria italica
  Transcript Sequence Number=SeqID_46697
  Gene Ontology: Mol. function=translation initiation factor activity
  Subcellular localization annotation: CTP_CleavageSite=29; ConfidenceScore=5.17e-01
MGFLWKWSKKGHENSQTQKSTKGPKLNNSAASRKGLSTYSHLTSDGIWSSIKEFAKSKYQFEVPD

SEQ ID NO: 112672 - protein, 97 aa, Setaria italica
  Transcript Sequence Number=SeqID_46698
VALQCTLVSSKQHDHHHFFDHFHKKPIPPKPKSEPKPQPKPEPKLQPEYHPPTPTYGSPTPTYGSPTPIYHPPARHLWRFMMYRVVMRRKMVLRRMR

SEQ ID NO: 112673 - protein, 182 aa, Setaria italica
  misc_feature (66)..(67): Xaa can be any naturally occurring amino acid
  misc_feature (76)..(76): Xaa can be any naturally occurring amino acid
  misc_feature (99)..(99): Xaa can be any naturally occurring amino acid
  Transcript Sequence Number=SeqID_46699
  Gene Ontology: Mol. function=structural constituent of cell wall
  Homolog annotation: Hit_ID=Q33B16; Match level="QueryCoverage=65%, HitCoverage=53%, E-value=8e-44, Identity=71%"; Hit description =Proline-rich protein, putative, expressed
  Pfam annotation: Domain name=DUF1210; Domain location=35-178; Score =255.4; E_value=1.4e-73; Accession=PF06735.3; Description=Protein of unknown function (DUF1210)
  Subcellular localization annotation: CTP_CleavageSite=23; ConfidenceScore=5.08e-01
PSTWQGTTGLLLGVCAALMAVAVASAASGGAASVVVGLAKCADCTRRNMKAEAAFKGLQVAIKCKXXKGDYESKAXGQLDGSGAFSVPLTTDLHGADCXAQLHSAAGTPCPGQEPSMIIPQSESDFVVVPGKTNNPSAECASVTICGPIKKHFLDHFHKKPIPPKPKSEPKPQPKQTPQASA

SEQ ID NO: 112674 - protein, 78 aa, Setaria italica
  Transcript Sequence Number=SeqID_46700
  Homolog annotation: Hit_ID=Q0PLM5; Match level="QueryCoverage=97%, HitCoverage=32%, E-value=6e-12, Identity=56%"; Hit description =Fruitful-like MADS-box transcription factor (Fragment)
LMVESISELQKKERSLQEENKALQKELAERQKAAASRQQQQVQWDQQTQQAQAQTSSSSSSFLMRQDPQALPPPQTSG

SEQ ID NO: 112675 - protein, 100 aa, Setaria italica
  Transcript Sequence Number=SeqID_46701
AAAAASKAGSEDAGATAANSTAASGEDLKNWDADFVKVDQATLFDLILVKVSVFPLPPPAVYASLVKFGSVIVRVQMYPYRSGLICLWLKAVFTCVDCGD

SEQ ID NO: 112676 - protein, 129 aa, Setaria italica
  Transcript Sequence Number=SeqID_46702
  Gene Ontology: Mol. function=nucleic acid binding
  Homolog annotation: Hit_ID=Q6YSJ5; Match level="QueryCoverage=89%, HitCoverage=13%, E-value=5e-51, Identity=81%"; Hit description =Protein argonaute 16
  Pfam annotation: Domain name=Piwi; Domain location=1-125; Score= -59.7; E_value=1.8e-05; Accession=PF02171.9; Description=Piwi domain
TFVRDGVSESQFSQILNIELNQIIKAYQSMGQGDLPKFTVIIAQKNHHTKLFQADSPDNVPPGTVVDSGIVHPRQYDFYMCAHAGPIGTSRPTHYHVLLDEIGFSADNLQKHICGYGFPGGDGSEGHEG

SEQ ID NO: 112677 - protein, 93 aa, Setaria italica
  Transcript Sequence Number=SeqID_46703
TASFLYFQTPLMIFLTKIEMQANKDGGQIAEVAATTNMGEENVTTESEEISHQQENQDSSPPQTQLVATTAAAGWRKIEFEWSAQVMGWPMSS

SEQ ID NO: 112678 - protein, 245 aa, Setaria italica
  misc_feature (9)..(9): Xaa can be any naturally occurring amino acid
  misc_feature (27)..(27): Xaa can be any naturally occurring amino acid
  Transcript Sequence Number=SeqID_46704
  Gene Ontology: Mol. function=sequence-specific DNA binding; Cellular component=nucleus; Biological process=regulation of transcription, DNA-dependent
  Homolog annotation: Hit_ID=Q7XUN2; Match level="QueryCoverage=100%, HitCoverage=94%, E-value=4e-86, Identity=72%"; Hit description=MADS -box transcription factor 17
  Pfam annotation: Domain name=K-box; Domain location=65-164; Score =144.1; E_value=4.3e-40; Accession=PF01486.9; Description=K-box region
  Pfam annotation: Domain name=SRF-TF; Domain location=1-50; Score =56.3; E_value=1.2e-13; Accession=PF00319.10; Description=SRF-type transcription factor (DNA-binding and dimerisation domain)
  Pfam module annotation: Pfam domain module=K-box::SRF-TF; Domain location=65-164::1-50
INRQVTFSXRRPAKPGLPSKKAYELSXVLCDAEVALIVFSSRGKLYEFGSAGVNNTLEKYHNCCYNAQGSNSEFGGEPQGWYQEMSRLKAKLDSLQRSQRHMLGEDLGPLSIKELQQLEKQLEYALSQARQRKTQMMMEQVDELRRKERQLGELNKQLKNKLEAEGSSNYRTVQTSWAIEAAVGTDGGSLSAPNSQTPAAAMDCEPTLQIGYHQFVSPEAAATMPRSSTTEGGEQNSHFLLGWAL

SEQ ID NO: 112679 - protein, 172 aa, Setaria italica
  Transcript Sequence Number=SeqID_46705
  Gene Ontology: Mol. function=sequence-specific DNA binding; Cellular component=nucleus; Biological process=regulation of transcription, DNA-dependent
  Homolog annotation: Hit_ID=Q0PLM5; Match level="QueryCoverage=69%, HitCoverage=51%, E-value=3e-23, Identity=53%"; Hit description =Fruitful-like MADS-box transcription factor (Fragment)
  Pfam annotation: Domain name=K-box; Domain location=19-97; Score =96.6; E_value=8.8e-26; Accession=PF01486.9; Description=K-box region
SCYFPQETLSSCVVCIAVYIWCTPNDLCVLHCRHLMGEDLESLNLKELQQLEQQLESSLKHIRSRKSHLMVESISELQKKERSLQEENKALQKELAERQKAAASRQQQQVQWDQQTQQAQAQTSSSSSSFLMRQDPQALPPPQNIRFPPVTDTGREAKRPRAAAQQQQQQPG

SEQ ID NO: 112680 - protein, 57 aa, Setaria italica
  Transcript Sequence Number=SeqID_46706
TLTKEIGNDPSVDNGSASGYFPQAAEDSDADDILENWDDEDAGERNRGPTIDESGDE

SEQ ID NO: 112681 - protein, 121 aa, Setaria italica
  Transcript Sequence Number=SeqID_46707
  Gene Ontology: Mol. function=protein binding; Cellular component =nucleus; Biological process=ubiquitin-dependent protein catabolic process
  Homolog annotation: Hit_ID=Q7XYF8; Match level="QueryCoverage=87%, HitCoverage=63%, E-value=2e-27, Identity=59%"; Hit description =SKP1/ASK1-like protein
  Pfam annotation: Domain name=Skp1_POZ; Domain location=9-69; Score =122.2; E_value=1.7e-33; Accession=PF03931.7; Description=Skp1 family, tetramerisation domain
RTEGPKKERMITLRSSDGEEFEVEEAVAMESQTIRHMIEDDCADNGIPLPNVNAKILSKVIEYCNKHVHAAKPADDAAPAAADASAGAEDLKNWDAEFVKVDQATLFDLILVLLPRPHPPT

SEQ ID NO: 112682 - protein, 40 aa, Setaria italica
  Transcript Sequence Number=SeqID_46708
  Gene Ontology: Mol. function=small conjugating protein ligase activity; Cellular component=integral to membrane; Biological process=regulation of protein metabolic process
  Homolog annotation: Hit_ID=Q5GAR9; Match level="QueryCoverage=100%, HitCoverage=12%, E-value=9e-15, Identity=92%"; Hit description=Uce2
KEYHALCKEPPLQIVAHPLPNDILEWHYVLEGTKGTPFEG

SEQ ID NO: 112683 - protein, 91 aa, Setaria italica
  Transcript Sequence Number=SeqID_46709
  Gene Ontology: Mol. function=methyltransferase activity; Biological process=DNA methylation
  Homolog annotation: Hit_ID=B6UD67; Match level="QueryCoverage=78%, HitCoverage=12%, E-value=3e-17, Identity=66%"; Hit description=DNA cytosine methyltransferase Zmet3
AEDSDADDILENWDDEDAGERNRGPTIDESGDEDFLNEMSQKDEKVDSLVKMGFPEDEATMAITRCASVRMFLQSRQATIYFQRQNLLMLC

SEQ ID NO: 112684 - protein, 116 aa, Setaria italica
  Transcript Sequence Number=SeqID_46710
SQMSYWLANFRSSFTMNLLVFAPTEEIDAIVAMSLQHEEDTHHTSRPVRRSPNNTRGARVSRLNALRAELATTNRMVSHLQNIAPVTFRSGFLKHQCAGGYFHPVQVARHSHLNQC

SEQ ID NO: 112685 - protein, 193 aa, Setaria italica
  misc_feature (70)..(70): Xaa can be any naturally occurring amino acid
  misc_feature (86)..(86): Xaa can be any naturally occurring amino acid
  misc_feature (143)..(143): Xaa can be any naturally occurring amino acid
  misc_feature (152)..(152): Xaa can be any naturally occurring amino acid
  Transcript Sequence Number=SeqID_46711
  Gene Ontology: Mol. function=sequence-specific DNA binding; Cellular component=nucleus; Biological process=regulation of transcription, DNA-dependent
  Homolog annotation: Hit_ID=B6T6U6; Match level="QueryCoverage=97%, HitCoverage=77%, E-value=3e-81, Identity=83%"; Hit description=SRF -type transcription factor family protein
  Pfam annotation: Domain name=K-box; Domain location=53-155; Score =139.7; E_value=9.4e-39; Accession=PF01486.9; Description=K-box region
  Pfam annotation: Domain name=SRF-TF; Domain location=3-37; Score =49.7; E_value=1.1e-11; Accession=PF00319.10; Description=SRF-type transcription factor (DNA-binding and dimerisation domain)
  Pfam module annotation: Pfam domain module=K-box::SRF-TF; Domain location=53-155::3-37
GTHYGLLKKAYELSVLCDAEVALIIFSNRGKLYEFCSTQSMPKTLEKYQKCSYAGPETALQNRESEQLKXSRNEYLKLKARVENLXQRTQRNLLGEDLDSLDIKELEHLEKQLDSSLKHIRSTRTQHMVDQLTELQRKEQMFXEANKCLRRXLEESNQVIWQQAWEHGEPQPEVQQQQHQLQGGNGFFHPLDA

SEQ ID NO: 112686 - protein, 119 aa, Setaria italica
  misc_feature (48)..(48): Xaa can be any naturally occurring amino acid
  misc_feature (62)..(62): Xaa can be any naturally occurring amino acid
  misc_feature (78)..(78): Xaa can be any naturally occurring amino acid
  Transcript Sequence Number=SeqID_46712
  Gene Ontology: Mol. function=small conjugating protein ligase activity; Cellular component=integral to membrane; Biological process=regulation of protein metabolic process
  Homolog annotation: Hit_ID=Q5GAR9; Match level="QueryCoverage=93%, HitCoverage=26%, E-value=1e-34, Identity=69%"; Hit description=Uce2
  Pfam annotation: Domain name=UQ_con; Domain location=1-118; Score= -0.3; E_value=4e-05; Accession=PF00179.18; Description=Ubiquitin -conjugating enzyme
MPDYVLEGSKGTPFEGGYYYGKLKFPPDYPFKPPSISMTTPSGRFAPXHKRICLSMSDYKFXLFLDYSCFCITLGMKXCSLLLCFAVHPESWNPMWSVASILTGLLSFMVSCSLQAFMG

SEQ ID NO: 112687 - protein, 306 aa, Setaria italica
  misc_feature (48)..(48): Xaa can be any naturally occurring amino acid
  misc_feature (118)..(118): Xaa can be any naturally occurring amino acid
  misc_feature (200)..(200): Xaa can be any naturally occurring amino acid
  misc_feature (271)..(271): Xaa can be any naturally occurring amino acid
  Transcript Sequence Number=SeqID_46713
  Gene Ontology: Mol. function=glucose-1-phosphate adenylyltransferase activity; Cellular component=chloroplast; Biological process =glycogen biosynthetic process
  Homolog annotation: Hit_ID=Q941P2; Match level="QueryCoverage=100%, HitCoverage=59%, E-value=1e-156, Identity=90%"; Hit description =Glucose-1-phosphate adenylyltransferase
  Pfam annotation: Domain name=NTP_transferase; Domain location=1-148; Score=-27.2; E_value=1.1e-05; Accession=PF00483.15; Description =Nucleotidyl transferase
MDYQKFIQAHRETDADITVAALPMDEQRATAFGLMKIDFNFSPFGFSXKPKGEKLKSMMVDTTILGLDPERAKELPYIASMGIYVFSKDVMLRLLRENFPAANDFGSEVIPGATEIGXRVQAYLYDGYWEDIGTIEAFYNANLGITKKPVPDFSFYDRSAPIYTQPRYLPPSKVLDADVTDSVIGEGCVIKHCTINQLPXLGTTVNLAISEGAVIEDSLLMGADYYETEDDKKVLSEAGGIPIGIGRNAHIRKAIIDKNARIGENVKIINXFDNVQEAVRETEGYFIKSGIVTVIKDALIPSGTVI

SEQ ID NO: 112688 - protein, 167 aa, Setaria italica
  Transcript Sequence Number=SeqID_46714
  Gene Ontology: Mol. function=translation initiation factor activity; Biological process=translational initiation
  Homolog annotation: Hit_ID=B6U8C3; Match level="QueryCoverage=76%, HitCoverage=100%, E-value=6e-42, Identity=74%"; Hit description=RNA binding protein
  Pfam annotation: Domain name=eIF-1a; Domain location=21-92; Score =59.0; E_value=1.7e-14; Accession=PF01176.11; Description=Eukaryotic initiation factor 1A
MKAGRKNLRRACDEGAAVTLAEGESIMQVLTLRGSNVIEVMDGEGVKSLALFPAKFQKSFWIKSGSFVVVDASGREQALESGSKIACVVSQVLFHEQVRALQKSGNWPVIFKSTPNEGSETGTQAQTAQIDEEPDSDEDDDLPPLEANTNRNRPYELYSDSDSGSDS

SEQ ID NO: 112689 - protein, 215 aa, Setaria italica
  Transcript Sequence Number=SeqID_46715
  Gene Ontology: Mol. function=sequence-specific DNA binding; Cellular component=nucleus; Biological process=regulation of transcription, DNA-dependent
  Homolog annotation: Hit_ID=B6TDB4; Match level="QueryCoverage=100%, HitCoverage=100%, E-value=1e-111, Identity=90%"; Hit description =MADS-box transcription factor 4
  Pfam annotation: Domain name=K-box; Domain location=71-168; Score =89.5; E_value=1.2e-23; Accession=PF01486.9; Description=K-box region
  Pfam annotation: Domain name=SRF-TF; Domain location=9-59; Score =103.4; E_value=7.8e-28; Accession=PF00319.10; Description=SRF-type transcription factor (DNA-binding and dimerisation domain)
  Pfam module annotation: Pfam domain module=K-box::SRF-TF; Domain location=71-168::9-59
MGRGKIEIKRIENSTNRQVTFSKRRAGLVKKAREIGVLCDAEVGVVIFSSGGKLYDYCSPRTSLSRILEKYQTNSGKILWDEKHKSLSAEIDRVKKENDNMQIELRHLKGEDLNSLQPRELIAIEEALQNGQTNLRDKQMEHWKMHKRNGKMLEDEHKLLSFRMAYQHQQDVELSGGMRELEIGYHQVQHDRDFTSQMPFTFRVQPSHPNLQEDE

SEQ ID NO: 112690 - protein, 154 aa, Setaria italica
  Transcript Sequence Number=SeqID_46716
  Homolog annotation: Hit_ID=Q33B16; Match level="QueryCoverage=53%, HitCoverage=49%, E-value=5e-25, Identity=56%"; Hit description =Proline-rich protein, putative, expressed
  Pfam annotation: Domain name=DUF1210; Domain location=37-154; Score =158.1; E_value=2.6e-44; Accession=PF06735.3; Description=Protein of unknown function (DUF1210)
  Subcellular localization annotation: CTP_CleavageSite=25; ConfidenceScore=5.03e-01
PIQTWAGAPRGLLLGVCAALMAVAVASAASGGAASVVVGLAKCADCTRRNMKAEAAFKGLQVAIKCKNSKGDCLAQLHSAAGTPCPGQEPSMIIPQSESDFVVVPGKTNNPSAECASVTICGPIKKHFLDHFHKKKPIPPKPKPEPKPQPKPEP

SEQ ID NO: 112691 - protein, 72 aa, Setaria italica
  Transcript Sequence Number=SeqID_46717
TYQEIGNDPSVDNGSASGYFPQAAEDSDADDILENWDDEDAGERNRGPTIDESGDEVFSCSPLVTICIYFSF

SEQ ID NO: 112692 - protein, 167 aa, Setaria italica
  Transcript Sequence Number=SeqID_46718
  Gene Ontology: Mol. function=translation initiation factor activity; Biological process=translational initiation
  Homolog annotation: Hit_ID=B6U8C3; Match level="QueryCoverage=76%, HitCoverage=100%, E-value=1e-42, Identity=68%"; Hit description=RNA binding protein
  Pfam annotation: Domain name=eIF-1a; Domain location=21-92; Score =50.4; E_value=6.8e-12; Accession=PF01176.11; Description=Eukaryotic initiation factor 1A
MKAGRKNLRRACDEGAAVTLAEGESIMQVLTLRGSNVIEVMDGEGVKSLALFPAKFQRSFWIKSGVYVVVDASGRDQALESGSKIACVVSQVLFHEQVRALQKSGNWPAIFKSTANEGSQAGTQVQTTQVDEEQDSDEDDDLPPLEANTNRNRLYELYSDSDSGSDS

SEQ ID NO: 112693 - protein, 342 aa, Setaria italica
  misc_feature (12)..(12): Xaa can be any naturally occurring amino acid
  misc_feature (147)..(147): Xaa can be any naturally occurring amino acid
  Transcript Sequence Number=SeqID_46719
  Gene Ontology: Mol. function=nucleic acid binding; Cellular component= cytoplasm; Biological process=multicellular organismal development
  Homolog annotation: Hit_ID=Q6YSJ5; Match level="QueryCoverage=95%, HitCoverage=37%, E-value=1e-162, Identity=84%"; Hit description =Protein argonaute 16
  Pfam annotation: Domain name=Piwi; Domain location=2-301; Score =397.6; E_value=2.1e-116; Accession=PF02171.9; Description=Piwi domain
VSSVILWPWKKXNLHEMGIVTQCIAPSNKMNDQYFTNVLLKINAKLGGMNSKLALEHRQMIPVVTQIPTLILGMDVSHGSPGRADIPSIAAVVGSRCWPLISRYRASVRTQSPKVEMIDSLFKPLYDGKDDGIMRELLLDFYQTSQXERPKQIIIFRDGVSESQFSQVLNVELNQIIKAYQSMGQGDLPKFTVIIAQKNHHTKLFQVDSPDNVPPGTVVDSGIVHPRQYDFYMCAQAGPIGTSRPTHYHVLLDEIGFSADNLQKLVLSLSYVYQRSTTAISVVAPICYAHLAAAQVGQFMKFEEFADTSSGSGVNSSSAAAIPELPRLHCLYCSCSVPIVTL

SEQ ID NO: 112694 - protein, 203 aa, Setaria italica
  misc_feature (24)..(24): Xaa can be any naturally occurring amino acid
  misc_feature (186)..(186): Xaa can be any naturally occurring amino acid
  Transcript Sequence Number=SeqID_46720
  Homolog annotation: Hit_ID=B6TZE8; Match level="QueryCoverage=89%, HitCoverage=39%, E-value=2e-67, Identity=71%"; Hit description =Pinin/SDK/memA/ protein conserved region containing protein
EDKKLSNSEAFLRRSETQRKAEQXVREESERLRQQEREQIAEKRKRDMMLRARVAAKAEEKRLELLYMQWTEHHKKLSNFLRTKAEPPIYYMPAKPIIDDPIIVEQNKEKVFEEWKSVRRAELTQFQKQVEEQYLSNVERQLERIQNARNARRANGPANMQEMDKELDTHRAEHGPKTRRVPEEGXNDEDEDVEDMAAEDELM

SEQ ID NO: 112695 - protein, 116 aa, Setaria italica
  misc_feature (37)..(37): Xaa can be any naturally occurring amino acid
  Transcript Sequence Number=SeqID_46721
  Gene Ontology: Mol. function=sequence-specific DNA binding; Cellular component=nucleus
  Homolog annotation: Hit_ID=Q84V67; Match level="QueryCoverage=52%, HitCoverage=23%, E-value=1e-09, Identity=59%"; Hit description=MADS -box transcription factor 18
SGSKTCIKFLNADNISGDSIYNQLSSFVQEKSLTDQXNGVLQKLMEAEKEKNNALMNTHLREQQNGASKSSPSPPPSTVPDSLPTLDIGYHTSIDFTLLHTFIIFSKVLSPEAIVR

SEQ ID NO: 112696 - protein, 67 aa, Setaria italica
  Transcript Sequence Number=SeqID_46722
  Gene Ontology: Mol. function=small conjugating protein ligase activity; Biological process=regulation of protein metabolic process
  Homolog annotation: Hit_ID=Q5GAR9; Match level="QueryCoverage=86%, HitCoverage=21%, E-value=6e-12, Identity=56%"; Hit description=Uce2
MLDYVLEGTKGTPFEGRDHAILYNMTTPSSRFTPNKRICLSMSDLNCFWIISWNPMWSVATYAHTDN

SEQ ID NO: 112697 - protein, 288 aa, Setaria italica
  misc_feature (182)..(182): Xaa can be any naturally occurring amino acid
  Transcript Sequence Number=SeqID_46723
  Gene Ontology: Mol. function=sequence-specific DNA binding; Cellular component=nucleus; Biological process=regulation of transcription, DNA-dependent
  Homolog annotation: Hit_ID=Q41876; Match level="QueryCoverage=100%, HitCoverage=100%, E-value=1e-119, Identity=75%"; Hit description =ZAG1 protein
  Pfam annotation: Domain name=K-box; Domain location=129-229; Score =139.0; E_value=1.4e-38; Accession=PF01486.9; Description=K-box region
  Pfam annotation: Domain name=SRF-TF; Domain location=64-114; Score =121.0; E_value=3.8e-33; Accession=PF00319.10; Description=SRF-type transcription factor (DNA-binding and dimerisation domain)
  Pfam module annotation: Pfam domain module=K-box::SRF-TF; Domain location=129-229::64-114
MHIQEEQATPSTDIMWGFSGQSTLTSTTGLKLKEPAPAVSSPGSGSVGAAAASEKNGRGKIEIKRIENTTNRQVTFCKRRNGLLKKAYELSVLCDAEVALIVFSSRGRLYEYSNNSVKATIERYKKTTSDNSNSAGTVAEVTIQHYKQESARLRQQITNLQNSNRTLIGDSIATMSHKDLKXLEARLDKGLVKIRARKNEVLCSELEYMQRREMELQNDNLYLRSRVDENERAQQTVNMMGAPSTSEYQQGFIPYDPIRSFLQFNIMQQQPQFYSQQEDRKDFNLGGR

SEQ ID NO: 112698 - protein, 102 aa, Setaria italica
  misc_feature (62)..(62): Xaa can be any naturally occurring amino acid
  Transcript Sequence Number=SeqID_46724
  Gene Ontology: Mol. function=sequence-specific DNA binding; Cellular component=nucleus; Biological process=regulation of transcription, DNA-dependent
  Homolog annotation: Hit_ID=B6T736; Match level="QueryCoverage=81%, HitCoverage=34%, E-value=2e-33, Identity=83%"; Hit description=MADS -box transcription factor 8
LIKVLFLQTQHMLDQLTDLQRREQMLCEANKCLRRKLEETSSQVHGQVWEHSANLVGYERHXSPQQALSHVGNRFFHPLEVGPEYTLQIGSKIEFEWSGAHK

SEQ ID NO: 112699 - protein, 104 aa, Setaria italica
  Transcript Sequence Number=SeqID_46725
  Gene Ontology: Mol. function=nucleic acid binding; Cellular component= nucleus; Biological process=mRNA processing
  Homolog annotation: Hit_ID=Q10RM6; Match level="QueryCoverage=97%, HitCoverage=17%, E-value=2e-44, Identity=89%"; Hit description =Transposon protein, putative, CACTA, En/Spm sub-class, expressed
  Pfam annotation: Domain name=RRM_1; Domain location=20-89; Score =38.6; E_value=2.5e-08; Accession=PF00076.14; Description=RNA recognition motif. (a.k.a. RRM, RBD, o
RRKDDDAEPEVDPERDQRTVFASQLSLKAGERDVYEFFSRAGKVRDVRLIMDRNSRRSKGEMYIEFYDVMSVPMAIALSGQPLLGQAVMVKPSEAEKNLVQSNA

SEQ ID NO: 112700 - protein, 232 aa, Setaria italica
  Transcript Sequence Number=SeqID_46726
  Gene Ontology: Mol. function=metal ion binding; Biological process =ubiquitin-dependent protein catabolic process
  Homolog annotation: Hit_ID=Q9MAS8; Match level="QueryCoverage=23%, HitCoverage=7%, E-value=4e-15, Identity=61%"; Hit description =F13M7.22 protein
  Pfam annotation: Domain name=zf-C3HC4; Domain location=187-227; Score= 39.0; E_value=1.9e-08; Accession=PF00097.17; Description=Zinc finger, C3HC4 type (RING finger)
RHDIPVITINDIPPEATSSSSGYSNGASVDPTLQAQLESDELLARQLQEQLYNESPCFAPTEEIDAIVAMSLQHEEDTHHTSRPVRRSPNNTRGARVSRLNALRAELATTNRMVSHLQNIAPVTFRSGPALARYPAASRIQPNIDLNDYDALLALDENNHQHTGASESQINNLPQSVVQSNSIQEPCAVCLENPSVGDIIRHLPCFHKFHKECIDEWLRRKKLCPICKSGIR

SEQ ID NO: 112701 - protein, 255 aa, Setaria italica
  misc_feature (20)..(20): Xaa can be any naturally occurring amino acid
  misc_feature (43)..(43): Xaa can be any naturally occurring amino acid
  Transcript Sequence Number=SeqID_46727
  Homolog annotation: Hit_ID=Q01AC6; Match level="QueryCoverage=99%, HitCoverage=70%, E-value=4e-39, Identity=36%"; Hit description=[S] KOG4843 Uncharacterized conserved protein
ATVRVLPPQESYTSTLRNNXRSRAWGAGIGCSFRIERCCIVKXGGGTIDLEPRLSHTSAVEPTLAPVAVERTMTTRAAASNALRQQRFVREVTIQYNLCNEPWLKYSISIVADKGLKKSLYTSARLKKGEVIYLETHFNSFHRYELCFSGEKPRSIGSNSNASDAEPEKHQNSSHHSQNGDRGSVDHELRDVFRWSRCKKAMPESAMRSIGIPLPADQLEVLQDNLEWEDVQWSQTGVWVAGKEYPLARVHFLSN

SEQ ID NO: 112702 - protein, 178 aa, Setaria italica
  misc_feature (53)..(53): Xaa can be any naturally occurring amino acid
  misc_feature (97)..(97): Xaa can be any naturally occurring amino acid
  Transcript Sequence Number=SeqID_46728
  Gene Ontology: Cellular component=membrane
  Homolog annotation: Hit_ID=B6SS81; Match level="QueryCoverage=94%, HitCoverage=21%, E-value=1e-53, Identity=64%"; Hit description=HYP1
  Pfam annotation: Domain name=DUF221; Domain location=2-154; Score= -52.9; E_value=3.3e-07; Accession=PF02714.7; Description=Domain of unknown function DUF221
YLICLFCRIPRTVGEAIPMKATFFITYVMVDGWAGVAGEILRLKPLVIFHLKXFLVKTEKDREEAMDPGSIGFDSSEPQIQLYFLLGLVYAAVTPFXLLPFILIFFGFAYIVYRHQIINVYNQEYESAAAFWPSVHGRIITALIISQLLLLGLLSTKGAGQSTPVLLVLPVVTFYFPT

SEQ ID NO: 112703 - protein, 243 aa, Setaria italica
  Transcript Sequence Number=SeqID_46729
  Gene Ontology: Mol. function=sequence-specific DNA binding; Cellular component=nucleus; Biological process=regulation of transcription, DNA-dependent
  Homolog annotation: Hit_ID=Q1G185; Match level="QueryCoverage=66%, HitCoverage=62%, E-value=1e-54, Identity=68%"; Hit description=MADS -box transcription factor TaAGL23
  Pfam annotation: Domain name=K-box; Domain location=102-201; Score =88.6; E_value=2.2e-23; Accession=PF01486.9; Description=K-box region
  Pfam annotation: Domain name=SRF-TF; Domain location=36-86; Score =107.2; E_value=5.5e-29; Accession=PF00319.10; Description=SRF-type transcription factor (DNA-binding and dimerisation domain)
  Pfam module annotation: Pfam domain module=K-box::SRF-TF; Domain location=102-201::36-86
MVTTAAAPDGDVDQRQQILPAEASKKKGRRGRREMRRIEDTTSRQVTFSKRRSGLLKKAYELSVLCDAEVALIVFSPRGRLYQFASATDLQNTIDRYLNHTKGTPTNEKVHEPGVEKWKYEVTTLGQKIDAIEAYRRKLLGESLGSCSIQELQELELQLEKSLSSIRQRKQKKLMDQILELREKEQKLSKENAMLRDQQCKALPLLELNDKGRVDAAAGGGEEEEDDVRMEDVETELAIGIGR

SEQ ID NO: 112704 - protein, 185 aa, Setaria italica
  Transcript Sequence Number=SeqID_46730
RGERGDARLGGRRAGQIERPANREEDDDADLGIAEHADLPRLLEDPVAALGEGHLAVGRVLDPLDFDLAAPHPSSAPPPATSQESLGSSPLPKLERSVGTIGVPSLIAEVDGEAGHPDVVRPCACQPDLEQHLGYHHHGAVWPIPRAAALRRRHHAIQLIQLGPPGELGHVVRWLLREPAHAQLG

SEQ ID NO: 112705 - protein, 95 aa, Setaria italica
  Transcript Sequence Number=SeqID_46731
  Gene Ontology: Mol. function=small conjugating protein ligase activity; Cellular component=integral to membrane; Biological process=regulation of protein metabolic process
  Homolog annotation: Hit_ID=Q5GAR9; Match level="QueryCoverage=92%, HitCoverage=32%, E-value=2e-31, Identity=69%"; Hit description=Uce2
LKHLQKEWHTLCKEPLLQIVARPLPNDILEWHYVLEGSKGIPFEGRDHAILYNMTTPSGRFAPHKTIRLLMSDFHPESWNPMWSVARLTKMGDKL

SEQ ID NO: 112706 - protein, 213 aa, Setaria italica
  Transcript Sequence Number=SeqID_46732
  Gene Ontology: Mol. function=nucleic acid binding; Cellular component= nucleus; Biological process=mRNA processing
  Homolog annotation: Hit_ID=Q10RM6; Match level="QueryCoverage=38%, HitCoverage=14%, E-value=7e-35, Identity=90%"; Hit description =Transposon protein, putative, CACTA, En/Spm sub-class, expressed
  Pfam annotation: Domain name=RRM_1; Domain location=147-213; Score =21.3; E_value=0.0021; Accession=PF00076.14; Description=RNA recognition motif. (a.k.a. RRM, RBD, o
EKDRGSRRREGGEDRASKRSRSGEDRDSDRDRHRSGREHRDRDRDRDDGKDKEKSRDSRGKDRDREGRDREKERGDRHRPRDKEVERERRSRSRSERRRAEEEEMVRELERERERSERGHYRDRDVRRRKDDGAEPEVDPERDQRTVFAFQLSLKADERDVYEFFSRAGKVRDVRLIMDRNSRRSKGYIEFYDVMSVPMAIALSGQPLLGQAV

SEQ ID NO: 112707 - protein, 59 aa, Setaria italica
  Transcript Sequence Number=SeqID_46733
  Gene Ontology: Mol. function=small conjugating protein ligase activity; Biological process=regulation of protein metabolic process
  Homolog annotation: Hit_ID=Q5GAR9; Match level="QueryCoverage=88%, HitCoverage=20%, E-value=4e-13, Identity=63%"; Hit description=Uce2
LEGSKGIPFEGRDHAILYNMTTPSGRFAPHKTIRLLMSDFHPESWNPMWSVARYAHIDN

SEQ ID NO: 112708 - protein, 139 aa, Setaria italica
  misc_feature (22)..(22): Xaa can be any naturally occurring amino acid
  Transcript Sequence Number=SeqID_46734
  Gene Ontology: Mol. function=small conjugating protein ligase activity; Cellular component=integral to membrane; Biological process=regulation of protein metabolic process
  Homolog annotation: Hit_ID=Q5GAR9; Match level="QueryCoverage=32%, HitCoverage=14%, E-value=2e-17, Identity=95%"; Hit description=Uce2
SMTTPSGRFAPHKRICLSMSDXIHPESWNPMWSVASILTGLLSFMDTGGVLAVEGNKVARSSRPRPRVSSSTTSQEMTATRRPSGSCNTSCPTLTRAWRFPRSSDKESIRDAGNLFDQMPERYSVEIFFANCWCCVMVL

SEQ ID NO: 112709 - protein, 352 aa, Setaria italica
  misc_feature (285)..(285): Xaa can be any naturally occurring amino acid
  Transcript Sequence Number=SeqID_46735
  Gene Ontology: Mol. function=sequence-specific DNA binding; Cellular component=nucleus; Biological process=regulation of transcription, DNA-dependent
  Homolog annotation: Hit_ID=Q84V75; Match level="QueryCoverage=74%, HitCoverage=88%, E-value=1e-125, Identity=83%"; Hit description=M23 protein (Fragment)
  Pfam annotation: Domain name=K-box; Domain location=139-239; Score =145.6; E_value=1.5e-40; Accession=PF01486.9; Description=K-box region
  Pfam annotation: Domain name=SRF-TF; Domain location=74-124; Score =120.2; E_value=6.9e-33; Accession=PF00319.10; Description=SRF-type transcription factor (DNA-binding and dimerisation domain)
  Pfam module annotation: Pfam domain module=K-box::SRF-TF; Domain location=139-239::74-124
  Subcellular localization annotation: CTP_CleavageSite=57; ConfidenceScore=5.36e-01
YPIPLLPLPLLLLSHPLVSLSGSLPPERAQRGTATPSMLNMMTDLSCGPSTVTEQPPAPTGSGDKPGRGKIEIKRIENTTNRQVTFCKRRNGLLKKAYELSVLCDAEVALIVFSSRGRLYEYANNSVKATIERYKKANSDTSNSGTVAEVNAQHYQQESAKLRGTISSLQNSNSRTIMGDAIHTMSLRDLKQLEGRLEKGICKIRARKNELLYAEVEYMQKREMDLQSDNMYLRSKVAENNERGQPPMNMMGAPSTSEYDHMAPYDSRNFHQVNIMQQPQHYSHXAATNNPSARMKLTTRRRRCRRTRAAVIMCPTEIKVNFIYVCGTNNRDSSMERMQETCCQQYAYVRVN

SEQ ID NO: 112710 - protein, 191 aa, Setaria italica
  misc_feature (8)..(8): Xaa can be any naturally occurring amino acid
  Transcript Sequence Number=SeqID_46736
  Gene Ontology: Mol. function=sequence-specific DNA binding; Cellular component=nucleus; Biological process=regulation of transcription, DNA-dependent
  Homolog annotation: Hit_ID=Q0PLM6; Match level="QueryCoverage=97%, HitCoverage=87%, E-value=6e-62, Identity=68%"; Hit description =Fruitful-like MADS-box transcription factor (Fragment)
  Pfam annotation: Domain name=K-box; Domain location=17-116; Score =161.2; E_value=3e-45; Accession=PF01486.9; Description=K-box region
TDSCMDKXLERYERYSYAEKVLISAESETQGNWCHEYRKLKAKVETIQKCQKHLMGEDLETLNLKELQQLEQQLESSLKHIRSRKSQLMMESISELQRKEKSLQEENKVLQKELVEKQKGQRQQPQWDQTPQQTSSSSSSFMMREAPPATNISSYPVPVAAGGGRVEGAAPQPQPQARIGLPPWMLSHLSS

SEQ ID NO: 112711 - protein, 225 aa, Setaria italica
  Transcript Sequence Number=SeqID_46737
  Gene Ontology: Mol. function=sequence-specific DNA binding; Cellular component=nucleus; Biological process=regulation of transcription, DNA-dependent
  Homolog annotation: Hit_ID=A9J1V8; Match level="QueryCoverage=100%, HitCoverage=98%, E-value=2e-86, Identity=74%"; Hit description=MIKC -type MADS-box transcription factor WM1A
  Pfam annotation: Domain name=K-box; Domain location=73-173; Score =67.1; E_value=6.7e-17; Accession=PF01486.9; Description=K-box region
  Pfam annotation: Domain name=SRF-TF; Domain location=9-59; Score =113.0; E_value=1e-30; Accession=PF00319.10; Description=SRF-type transcription factor (DNA-binding and dimerisation domain)
  Pfam module annotation: Pfam domain module=K-box::SRF-TF; Domain location=73-173::9-59
MVRGKTEMKRIENATSRQVTFSKRRNGLLKKAFELSVLCDAEVGLIVFSPRGKLYEFASASSLQKTIDRYKAYTRENVNNKSVQQDIQQVKADALSLANRLEALEKSKRKFLGENLEGCSVEELHSLEVKLEKSLHVIRGKKTQLLELQIAKLKEKERTLLKDNKELREKQRNVQPQPVAPALNPRCLPPWPRNLPAPCNDNADVETELYIGLPGRERTSNRDSG

SEQ ID NO: 112712 - protein, 253 aa, Setaria italica
  Transcript Sequence Number=SeqID_46738
  Gene Ontology: Mol. function=sequence-specific DNA binding; Cellular component=nucleus; Biological process=regulation of transcription, DNA-dependent
  Homolog annotation: Hit_ID=Q7XUN2; Match level="QueryCoverage=100%, HitCoverage=98%, E-value=5e-97, Identity=75%"; Hit description=MADS -box transcription factor 17
  Pfam annotation: Domain name=K-box; Domain location=70-172; Score =130.7; E_value=4.8e-36; Accession=PF01486.9; Description=K-box region
  Pfam annotation: Domain name=SRF-TF; Domain location=5-55; Score =121.1; E_value=3.7e-33; Accession=PF00319.10; Description=SRF-type transcription factor (DNA-binding and dimerisation domain)
  Pfam module annotation: Pfam domain module=K-box::SRF-TF; Domain location=70-172::5-55
RVELKRIENKINRQVTFSKRRNGLLKKAYELSVLCDAEVALIVFSSRGKLYEFGSAGVNNTLEKYHNCCYNAQGSNSEFGGEPQGWYQEMSRLKAKLDSLQRSQRHMLGEDLGPLSIKELQQLEKQLEYALSQARQRKVHHTQMMMEQVDELRRKERQLGELNKQLKNKLEAEGSSNYRTVQTSWAIEAAVGTDGGSLSAPNSQTPAAAMDCEPTLQIGYHQFVSPEAAATMPRSSTTEGGEQNSHFLLGWAL

SEQ ID NO: 112713 - protein, 210 aa, Setaria italica
  misc_feature (69)..(69): Xaa can be any naturally occurring amino acid
  misc_feature (205)..(205): Xaa can be any naturally occurring amino acid
  Transcript Sequence Number=SeqID_46739
  Gene Ontology: Mol. function=sequence-specific DNA binding; Cellular component=nucleus; Biological process=regulation of transcription, DNA-dependent
  Homolog annotation: Hit_ID=Q40702; Match level="QueryCoverage=100%, HitCoverage=100%, E-value=1e-110, Identity=92%"; Hit description =MADS-box transcription factor 2
  Pfam annotation: Domain name=K-box; Domain location=72-171; Score =101.3; E_value=3.4e-27; Accession=PF01486.9; Description=K-box region
  Pfam annotation: Domain name=SRF-TF; Domain location=9-59; Score =113.0; E_value=1e-30; Accession=PF00319.10; Description=SRF-type transcription factor (DNA-binding and dimerisation domain)
  Pfam module annotation: Pfam domain module=K-box::SRF-TF; Domain location=72-171::9-59
MGRGKIEIKRIENSTNRQVTFSKRRNGILKKAREISVLCDAEVGVVIFSSAGKLYDFCSPKTSLSKILXEKYQTNSGKILWDEKHKSLSAEIDRIKKENDTMQIELRHLKGEDLNSLQPKELIMIEEALDNGLTNLNEKLMEHWELHMRHNKMLEDENKLLSFKLHQQDIALSGSMRDLELGYHPDRDFAAQMPITFRVQPSHPXLQENN

SEQ ID NO: 112714 - protein, 142 aa, Setaria italica
  Transcript Sequence Number=SeqID_46740
  Homolog annotation: Hit_ID=Q33B16; Match level="QueryCoverage=66%, HitCoverage=42%, E-value=9e-32, Identity=70%"; Hit description =Proline-rich protein, putative, expressed
  Pfam annotation: Domain name=DUF1210; Domain location=3-142; Score =193.1; E_value=7.9e-55; Accession=PF06735.3; Description=Protein of unknown function (DUF1210)
LSKGLQVAIKCKNSKGDYESKAVGQLDGSGAFSVPLTTDLHGADCLAQLHSAAGTPCPGQEPSMIIPQSESDFVVVPGKTNNPSAECASVTICGPIKKHFLDHFHKKKPIPPKPKPEPKPQPKPEPKPQPEYHPPTPKYSSP

SEQ ID NO: 112715 - protein, 242 aa, Setaria italica
  misc_feature (112)..(112): Xaa can be any naturally occurring amino acid
  Transcript Sequence Number=SeqID_46741
  Gene Ontology: Mol. function=sequence-specific DNA binding; Cellular component=nucleus; Biological process=regulation of transcription, DNA-dependent
  Homolog annotation: Hit_ID=B6T736; Match level="QueryCoverage=100%, HitCoverage=100%, E-value=1e-122, Identity=88%"; Hit description =MADS-box transcription factor 8
  Pfam annotation: Domain name=K-box; Domain location=75-177; Score =145.5; E_value=1.7e-40; Accession=PF01486.9; Description=K-box region
  Pfam annotation: Domain name=SRF-TF; Domain location=9-59; Score =119.4; E_value=1.2e-32; Accession=PF00319.10; Description=SRF-type transcription factor (DNA-binding and dimerisation domain)
  Pfam module annotation: Pfam domain module=K-box::SRF-TF; Domain location=75-177::9-59
MGRGRVELKRIENKINRQVTFAKRRNGLLKKAYELSVLCDAEVALIIFSNRGKLFEFCSGQSITKTLERYQKSSYGGPDTAVQNKENELVQSSRNEYLKLKARVENLQRTQXRNLLGEDLGSLGIKDLEQLEKQLDSSLRHIRSTRTQHMLDQLTDLQRREQMLCEANKCLRRKLEETSSQVNGQVWEHSANLLGYERQSPQQAPSHVGNGFFHPLEVGPEPTLQIGFAPEHMNNFMPTWLP

SEQ ID NO: 112716 - protein, 273 aa, Setaria italica
  Transcript Sequence Number=SeqID_46742
  Gene Ontology: Mol. function=transferase activity, transferring glycosyl groups; Biological process=metabolic process
  Homolog annotation: Hit_ID=Q852C2; Match level="QueryCoverage=91%, HitCoverage=54%, E-value=2e-72, Identity=53%"; Hit description =Putative UDP-glucosyltransferase
MYVRSHTNNNNNKDVNYTNNVKNSSGLVINTSDALEKTELERIRDELNIPMVLPVGPLHKLSSKSVGSSLLNQDYGCIEWLETRPSKSVLYVSFGSLASVGSKEFLEVAWGLANSGVPFLWVVRPDILQDLDDPNFPNGFEAAVQDRGKLIQWAPQEEVLAHRAVGGFWTHNGWNSTLESICEGVPMMCRPQFADQPMNTRYVEQTWGVGFELEGVLERGKIEKAVRKLMKDREGDEMRERAKELKNKVEDCLKIGGSSQIAIDKLVNYLLAT

SEQ ID NO: 112717 - protein, 233 aa, Setaria italica
  misc_feature (200)..(200): Xaa can be any naturally occurring amino acid
  Transcript Sequence Number=SeqID_46743
  Gene Ontology: Mol. function=sequence-specific DNA binding; Cellular component=nucleus; Biological process=regulation of transcription, DNA-dependent
  Homolog annotation: Hit_ID=O04069; Match level="QueryCoverage=100%, HitCoverage=100%, E-value=1e-106, Identity=86%"; Hit description =MADS box transcription factor SbMADS1
  Pfam annotation: Domain name=K-box; Domain location=76-177; Score =156.3; E_value=9.2e-44; Accession=PF01486.9; Description=K-box region
  Pfam annotation: Domain name=SRF-TF; Domain location=9-59; Score =119.4; E_value=1.2e-32; Accession=PF00319.10; Description=SRF-type transcription factor (DNA-binding and dimerisation domain)
  Pfam module annotation: Pfam domain module=K-box::SRF-TF; Domain location=76-177::9-59
MGRGRVELKRIENKINRQVTFAKRRNGLLKKAYELSVLCDAEVALIIFSNRGKLFEFCSGQSSITKTLERYQKSSYGGPDTAVQNKENELVQSSRNEYLKLKARVENLQRTQRNLLGEDLGSLGIKDLEQLEKQLDSSLRHIRSTRTQHMLDQLTDLQRREQMLCEANKCLRRKLEETSSQVNGQVWEAQCQLAWLRAAXPHSRRHHMLATDSSIPWKLALSQPCRLGSLLSI

SEQ ID NO: 112718 - protein, 241 aa, Setaria italica
  Transcript Sequence Number=SeqID_46744
MRNSRTNGSMCFPCFGLRLALPIGATSPRLGLGIRRRRGREGGGAGARRGGGEAMEQAGLRLGYKAAGEETNRAGEQHPIRSVVVVVVGGWVVARLGAGGSSVLLPMGDEMLAHLPGRKRRGRRDAEKCDRERKDSLRDKEVNDREKDSSKKDSSVVIEKDNTILEKASSDGVVKSAEHENTTTESKVIKDDAWKTHDRDPKDKKREKDVDAGDRHEQRSKYNDKESDDNGTEGDMEKDKD

SEQ ID NO: 112719 - protein, 125 aa, Setaria italica
  misc_feature (53)..(53): Xaa can be any naturally occurring amino acid
  misc_feature (66)..(66): Xaa can be any naturally occurring amino acid
  Transcript Sequence Number=SeqID_46745
  Subcellular localization annotation: CTP_CleavageSite=62; ConfidenceScore=5.12e-01
VHVSPHSCQHHIRTSHCRAPPSTIDRISSAAIALPSPTPPPTAAPSSPPSTDXSADTTPPPSAKSXPNRPRLPPLPPTAPPSPDPSAPSTFPADEEAQQPPLLPPYPAGTPSLPARVAADLLRVA

SEQ ID NO: 112720 - protein, 174 aa, Setaria italica
  Transcript Sequence Number=SeqID_46746
  Gene Ontology: Mol. function=protein binding; Cellular component =nucleus; Biological process=ubiquitin-dependent protein catabolic process
  Homolog annotation: Hit_ID=A0ELU5; Match level="QueryCoverage=94%, HitCoverage=97%, E-value=4e-55, Identity=67%"; Hit description=Skp1 -like protein 1
  Pfam annotation: Domain name=Skp1; Domain location=97-174; Score =190.5; E_value=4.7e-54; Accession=PF01466.11; Description=Skp1 family, dimerisation domain
  Pfam annotation: Domain name=Skp1_POZ; Domain location=11-71; Score =100.1; E_value=7.4e-27; Accession=PF03931.7; Description=Skp1 family, tetramerisation domain
  Pfam module annotation: Pfam domain module=Skp1::Skp1_POZ; Domain location=97-174::11-71
MAAAAAAGKDKMLMLVSCDKENFEVEESVARESRTILHMIEDGCTDNGIPIPNVNGKILAKVIEYCKKHVEARRGADGDGDAAEPTAATNKASEDELKTFDADFVKVDQGTLFDLILAANYLDIKGLLDLTCQTVADMIKGKTPEEIRKTFNIKNDFTPEEEEEVRRENQWAFE

SEQ ID NO: 112721 - protein, 88 aa, Setaria italica
  misc_feature (26)..(26): Xaa can be any naturally occurring amino acid
  Transcript Sequence Number=SeqID_46747
  Gene Ontology: Mol. function=glucose-1-phosphate adenylyltransferase activity; Cellular component=chloroplast; Biological process =glycogen biosynthetic process
  Homolog annotation: Hit_ID=Q941P2; Match level="QueryCoverage=97%, HitCoverage=16%, E-value=5e-37, Identity=88%"; Hit description =Glucose-1-phosphate adenylyltransferase
MHISSADYYETEDDKKVLSEAGGIPXGIGRNAHIRKAIIDKNARIGENVKIINFDNVQEAVRETEGYFIKSGIVTVIKDALIPSGTVI

SEQ ID NO: 112722 - protein, 170 aa, Setaria italica
  misc_feature (153)..(153): Xaa can be any naturally occurring amino acid
  Transcript Sequence Number=SeqID_46748
  Gene Ontology: Mol. function=sequence-specific DNA binding; Cellular component=nucleus; Biological process=regulation of transcription, DNA-dependent
  Homolog annotation: Hit_ID=Q0PLM5; Match level="QueryCoverage=98%, HitCoverage=71%, E-value=3e-35, Identity=53%"; Hit description =Fruitful-like MADS-box transcription factor (Fragment)
  Pfam annotation: Domain name=K-box; Domain location=1-74; Score=88.4; E_value=2.6e-23; Accession=PF01486.9; Description=K-box region
KIETIQKCHKHLMGEDLESLNLKELQQLEQQLESSLKHIRSRKSHLMVESISELQKKERSLQEENKALQKELAERQKAAASRQQQQVQWDQQTQQAQAQTSSSSSSFLMRQDPQALPPPQNIRFPPVTIGERGEEAAAAAQQQQQQPGQAQPXQLRIGGLPPWMISHLNA

SEQ ID NO: 112723 - protein, 120 aa, Setaria italica
  misc_feature (61)..(61): Xaa can be any naturally occurring amino acid
  misc_feature (88)..(88): Xaa can be any naturally occurring amino acid
  Transcript Sequence Number=SeqID_46749
  Gene Ontology: Mol. function=small conjugating protein ligase activity; Cellular component=integral to membrane; Biological process=regulation of protein metabolic process
  Homolog annotation: Hit_ID=A0EVF8; Match level="QueryCoverage=95%, HitCoverage=47%, E-value=3e-30, Identity=62%"; Hit description =Ubiquitin conjugating enzyme 2
LKRLQEYHALCKEPLLQIVARPLPNDILEWRKQKIGERYRLVERYIINANVNYSVFVSNSXSLFSMTTPSGRFAPHKRICLSMSDYNXHPESWNPMWSVASILTGLLSFMVSCSLQAFMG

SEQ ID NO: 112724 - protein, 253 aa, Setaria italica
  misc_feature (242)..(242): Xaa can be any naturally occurring amino acid
  Transcript Sequence Number=SeqID_46750
  Gene Ontology: Mol. function=sequence-specific DNA binding; Cellular component=nucleus; Biological process=regulation of transcription, DNA-dependent
  Homolog annotation: Hit_ID=Q41827; Match level="QueryCoverage=100%, HitCoverage=100%, E-value=1e-136, Identity=92%"; Hit description =MADS box protein
  Pfam annotation: Domain name=K-box; Domain location=74-172; Score =153.6; E_value=6e-43; Accession=PF01486.9; Description=K-box region
  Pfam annotation: Domain name=SRF-TF; Domain location=9-59; Score =121.5; E_value=2.8e-33; Accession=PF00319.10; Description=SRF-type transcription factor (DNA-binding and dimerisation domain)
  Pfam module annotation: Pfam domain module=K-box::SRF-TF; Domain location=74-172::9-59
MGRGRVELKRIENKINRQVTFSKRRNGLLKKAYELSVLCDAEVALIIFSSRGKLYEFGSAGITKTLERYQHCCYNAQDSNGALSETQGWYQEMSKLRAKFEALQRTQRHLLGEDLGPLSVKELQQLEKQLECALSQARQRKTQLMMEQVEELRRKERHLGEMNRQLKHKLEAEGCSNYRNLQHAAWPAPGGTIVEHDGATYHVHPPAHSAAMDCEPTLQIGYPHHQFLPSEAANNIPRSAPXGENNFMLGWVL

SEQ ID NO: 112725 - protein, 388 aa, Setaria italica
  Transcript Sequence Number=SeqID_46751
  Gene Ontology: Mol. function=nucleic acid binding; Cellular component= nucleus; Biological process=mRNA processing
  Homolog annotation: Hit_ID=Q10RM6; Match level="QueryCoverage=96%, HitCoverage=67%, E-value=1e-132, Identity=62%"; Hit description =Transposon protein, putative, CACTA, En/Spm sub-class, expressed
  Pfam annotation: Domain name=RRM_1; Domain location=120-190; Score =90.6; E_value=5.4e-24; Accession=PF00076.14; Description=RNA recognition motif. (a.k.a. RRM, RBD, o
  Pfam annotation: Domain name=RRM_1; Domain location=23-92; Score =39.4; E_value=1.5e-08; Accession=PF00076.14; Description=RNA recognition motif. (a.k.a. RRM, RBD, o
  Pfam annotation: Domain name=RRM_1; Domain location=322-376; Score =10.5; E_value=0.021; Accession=PF00076.14; Description=RNA recognition motif. (a.k.a. RRM, RBD, o
  Pfam module annotation: Pfam domain module=RRM_1::RRM_1::RRM_1; Domain location=120-190::23-92::322-376
MCRRRKDDGAEPEVDPERDQRTVFAFQLSLKADERDVYEFFSRAGKVRDVRLIMDRNSRRSKGEMYIEFYDVMSVPMAIALSGQPLLGQAVMVKPSEAEKNLVQSNATSGGAASGGARKLYVGNLHSNITEDQLRQVFEPFGQVELVQLPVDPMTGLCKGYGFIQFARLEDAKAAQSLNGQLDIAGRVIKVSAVTDHVGVQVGGATTGDLDDDEGGGLALNASSRAALMLKLDRSGTATSLTGGIGTAGVAIPGPASSVLGAPAATSLLPPTIPAVGSVPGAPMLPVTSQSMIMSAPTEFLLLKNMFDPTVETDPDFDLDIRDDVQDECSKFGAVKHIFVDKNTAGFVYLHFDSVTAAAKAQQALHGRWFAGKMITATFYCTCRLGSY

SEQ ID NO: 112726 - protein, 597 aa, Setaria italica
  misc_feature (318)..(318): Xaa can be any naturally occurring amino acid
  Transcript Sequence Number=SeqID_46752
  Subcellular localization annotation: CTP_CleavageSite=36; ConfidenceScore=5.08e-01
MAEMNSDQILEVPDTPDRIQQSTCPASSSVVRRDVTVAAANPLPCRRIRFITRNNPMHGSTSQDNACSVLPAPSDTDHIFKQAELARILALSEKLEAKFSIQKSDRTEISVENEKRAEKRVLDQSSSISDHISCSVTGGRSPSCRVIDGKVSEQEANHRNAGFLGVGSGLPTIPVGKPRNRTCTSTNNRLKGVAGIDICRGSNSGKVKGELVTNKAIAGPSSPPCGVPQRHVGPKKLVRNGCISPSNIAKNSANADEKQEMCSQSGHLHHPHPQLDAIGKGNVIDLTDNSPIMTRQRYAVKDKLISGYSMDTRADKKXRTDRAGKTLIPQSVYHANSKNCSELGLSGSNNKGKEISSDILDVDQIGEANLRRISLSAAGTYSVVNNNSPNMDEEQGWKTTHNHTSKLPISLMGKLSCNSERESGSSAPSSQDHGSGAPIMASSRVRNKPIMIGRGRSKYASTSSHPDESSSARDEPEASFISSSKITAGRNHTSLRHDIPVITINDIPPEATSSSSGYSNGASVDPTLQAQLESDELLARQLQEQLYNESPCFAPTEEIDAIVAMSLQHEEDTHHTSRPVRRSPNNTVRALNSILMF

SEQ ID NO: 112727 - protein, 226 aa, Setaria italica
  misc_feature (54)..(54): Xaa can be any naturally occurring amino acid
  Transcript Sequence Number=SeqID_46753
  Gene Ontology: Mol. function=sequence-specific DNA binding; Cellular component=nucleus; Biological process=regulation of transcription, DNA-dependent
  Homolog annotation: Hit_ID=A9J1V8; Match level="QueryCoverage=100%, HitCoverage=98%, E-value=6e-85, Identity=74%"; Hit description=MIKC -type MADS-box transcription factor WM1A
  Pfam annotation: Domain name=K-box; Domain location=74-174; Score =67.1; E_value=6.7e-17; Accession=PF01486.9; Description=K-box region
  Pfam annotation: Domain name=SRF-TF; Domain location=9-60; Score =104.6; E_value=3.3e-28; Accession=PF00319.10; Description=SRF-type transcription factor (DNA-binding and dimerisation domain)
  Pfam module annotation: Pfam domain module=K-box::SRF-TF; Domain location=74-174::9-60
MVRGKTEMKRIENATSRQVTFSKRRNGLLKKAFELSVLCDAEVGLIVFSPRGKXLYEFASASSLQKTIDRYKAYTRENVNNKSVQQDIQQVKADALSLANRLEALEKSKRKFLGENLEGCSVEELHSLEVKLEKSLHVIRGKKTQLLELQIAKLKEKERTLLKDNKELREKQRNVQPQPVAPALNPRCLPPWPRNLPAPCNDNADVETELYIGLPGRERTSNRDSG

SEQ ID NO: 112728 - protein, 460 aa, Setaria italica
  misc_feature (267)..(267): Xaa can be any naturally occurring amino acid
  Transcript Sequence Number=SeqID_46754
  Gene Ontology: Mol. function=protein serine/threonine kinase activity; Cellular component=myosin complex; Biological process =protein amino acid phosphorylation
  Homolog annotation: Hit_ID=Q7X8K7; Match level="QueryCoverage=64%, HitCoverage=26%, E-value=2e-52, Identity=43%"; Hit description=CTR1 -like kinase kinase kinase
VPTLANLVSDHMGGPFVDPESMLLKYRNMSSALRAGIRSAVIPLGQLKVGLARHRALLFKVLADSLAVPCRLVKGRQYTGSDEGALNIVKFNNGRECIVDLMIDPGTLVPSDGADLGREVEDSLFVDDHHDSNTQLVSSFSEASSSIHGSFENESLEKGLTPTNAGHSGPHGAINAQTDNDVSGSGVSSSFEELSVSTYASENVPIIHESNADHNITSEGKDKSIASNISSSSSPPSSEMGSTPTVRRKKVKDVSEYMISAAKENPXLAEKIHAVLLESGVVPPPDLFSEESKEQPKDLIVYDTSVFQTKDEMIRTMNELESTAHDGSGGHGPSLPHHPGHELKIVPYRMPLDLKPVQGLGVYHPFDSRDNAAPSIPLYEPSAPPQENPLQLIKQMPVTAAAVATAAVVASSMVVAAAKSNSDIKLDVPVAAAATAAAVVATTAAVNKQYEYLDPGCQLL

SEQ ID NO: 112729 - protein, 121 aa, Setaria italica
  misc_feature (109)..(109): Xaa can be any naturally occurring amino acid
  Transcript Sequence Number=SeqID_46755
  Gene Ontology: Mol. function=sequence-specific DNA binding; Cellular component=nucleus; Biological process=regulation of transcription, DNA-dependent
  Homolog annotation: Hit_ID=P0C5B2; Match level="QueryCoverage=96%, HitCoverage=52%, E-value=6e-30, Identity=62%"; Hit description=MADS -box transcription factor 56
  Pfam annotation: Domain name=K-box; Domain location=1-68; Score=6.4; E_value=0.00015; Accession=PF01486.9; Description=K-box region
MSCRKFLGENLEGCSVEELHSLEVKLEKSLHVIRGKKTQLLELQIAKLKEKERTLLKDNKELREKQRNVQPQPVAPALNPRCLPPWPRNLPAPCNDNADVETELYIGLXPGRERTSNRDSG

SEQ ID NO: 112730 - protein, 392 aa, Setaria italica
  misc_feature (45)..(45): Xaa can be any naturally occurring amino acid
  misc_feature (213)..(213): Xaa can be any naturally occurring amino acid
  misc_feature (221)..(221): Xaa can be any naturally occurring amino acid
  misc_feature (281)..(281): Xaa can be any naturally occurring amino acid
  misc_feature (351)..(351): Xaa can be any naturally occurring amino acid
  Transcript Sequence Number=SeqID_46756
  Gene Ontology: Mol. function=glucose-1-phosphate adenylyltransferase activity; Cellular component=chloroplast; Biological process =glycogen biosynthetic process
  Homolog annotation: Hit_ID=A5Y409; Match level="QueryCoverage=98%, HitCoverage=73%, E-value=0.0, Identity=92%"; Hit description=Glucose- 1-phosphate adenylyltransferase
  Pfam annotation: Domain name=NTP_transferase; Domain location=1-236; Score=175.1; E_value=2e-49; Accession=PF00483.15; Description =Nucleotidyl transferase
YKRILIVLTQFNSASLNRHLSRAYGSNIGGYKNEGFVEVLAAQQXPKNNPNWFQGTADAVRQYLWLFEEHNVMEFIILAGDHLYRMDYEKFIQAHRETDADITVAALPMDEKRATAFGLMKIDEEGRIIEFAEKPKGDQLKAMMVDTTILGLDDVRAKEMPYIASMGIYVFSKDVMLQLLREQFPGANDFGSEVIPGATSIGKRVQAYLYDGXTRERIIRXPIEAFYNANLGITKKPIPDFSFYDRSAPIYTQPRHLPPSKILDADVTDSVIGEGCVIKNXKIHHSVVGLRSCISEGAIIEDTLLMGADYYETEADKKLLAENGGIPIGIGKNSHIRRAIIDKNARIGDNXVVSIINADNVQEAARETDGYFIKGGIVTVIKDALLPSGTVI

SEQ ID NO: 112731 - protein, 625 aa, Setaria italica
  misc_feature (35)..(35): Xaa can be any naturally occurring amino acid
  Transcript Sequence Number=SeqID_46757
  Gene Ontology: Mol. function=methyltransferase activity; Biological process=DNA methylation
  Homolog annotation: Hit_ID=B6UD67; Match level="QueryCoverage=95%, HitCoverage=99%, E-value=0.0, Identity=80%"; Hit description=DNA cytosine methyltransferase Zmet3
  Pfam annotation: Domain name=UBA; Domain location=162-196; Score =12.6; E_value=0.43; Accession=PF00627.23; Description=UBATS-N domain
  Pfam annotation: Domain name=UBA; Domain location=60-96; Score=9.2; E_ value=1; Accession=PF00627.23; Description=UBATS-N domain
  Pfam module annotation: Pfam domain module=UBA::UBA; Domain location =162-196::60-96
MVHWVSDNEDSDKFEWESDEEEAASFNAAGASSSXALASRNIDAPGPSTRVANGNGRAGPSASSVQKYVDMGFPEEMVMKAMKDNGDNGAESLVELLLTYQEIGNNPSVDNGSASGCVSQAAEDSDADDILENWDDEDAGERNRGPTIDESGDEDFLNEMSQKDEKVDSLVKMGFPEDEATMAITRCGQDASISVLVDSIYASQTAGDGYCGNSSDHEDFYGGRKKGRPMEGIKRKRKRFGSQAQGSRGPLDGSNDEPMPLPKPMVGFGLPNGSRSTNRSLPGQAIGPPYFYYENVALAPKGVWTTISRFLYDIQPEFVDSKFFCAAARKRGYIHNLPLVNRSTLLPLPPKTISEAFPRTKKWWPSWDPRRQFNCLQTCVASAKLTERIRVALTNSEDPPPQRVQKYVLDECRKWNLVWVGLNKVAPLEPDEMEFLLGFPKDHTRGISRTERYRSLGNSFQVDTVAYHLSVLKDMFPHGMNVLSLFSGIGGAEVALHRLGIRMNNVISVEKSEVNRTILKSWWDQTQTGTLIEISDVQTLTSEKIESYIRRIGGFDLVIGGSPCNNLAGSNRHHRDGLEGEHSALFYHYFRILDSVKVQTNGATVVFSVSLLSCFRILVFFFLSN

SEQ ID NO: 112732 - protein, 273 aa, Setaria italica
  misc_feature (189)..(189): Xaa can be any naturally occurring amino acid
  Transcript Sequence Number=SeqID_46758
  Gene Ontology: Mol. function=sequence-specific DNA binding; Cellular component=nucleus; Biological process=regulation of transcription, DNA-dependent
  Homolog annotation: Hit_ID=B6T6U6; Match level="QueryCoverage=89%, HitCoverage=99%, E-value=1e-114, Identity=85%"; Hit description=SRF -type transcription factor family protein
  Pfam annotation: Domain name=K-box; Domain location=75-176; Score =155.1; E_value=2.2e-43; Accession=PF01486.9; Description=K-box region
  Pfam annotation: Domain name=SRF-TF; Domain location=9-59; Score =121.8; E_value=2.3e-33; Accession=PF00319.10; Description=SRF-type transcription factor (DNA-binding and dimerisation domain)
  Pfam module annotation: Pfam domain module=K-box::SRF-TF; Domain location=75-176::9-59
MGRGRVELKRIENKINRQVTFAKRRNGLLKKAYELSVLCDAEVALIIFSNRGKLYEFCSTQSMPKTLEKYQKCSYAGPETALQNRESEQLKSSRNEYLKLKARVENLQRTQRNLLGEDLDSLDIKELEHLEKQLDSSLKHIRSTRTQHMVDQLTELQRKEQMFSEANKCLRRKLEESNQVIWQQAWEHXEPQPEVQQQQHQLQGGNGFFHPLDAARGEPTLQIGFPPEALTSSSCMTTFLPPMVAMRSNYCDSEIIRMRRLATLPYVVLRVIV

SEQ ID NO: 112733 - protein, 875 aa, Setaria italica
  misc_feature (20)..(20): Xaa can be any naturally occurring amino acid
  misc_feature (287)..(287): Xaa can be any naturally occurring amino acid
  misc_feature (847)..(847): Xaa can be any naturally occurring amino acid
  Transcript Sequence Number=SeqID_46759
  Gene Ontology: Mol. function=phosphoprotein phosphatase activity; Biological process=actin cytoskeleton organization and biogenesis
  Homolog annotation: Hit_ID=Q84ZL0; Match level="QueryCoverage=88%, HitCoverage=48%, E-value=0.0, Identity=73%"; Hit description=Formin -like protein 5
  Pfam annotation: Domain name=PTEN_C2; Domain location=193-331; Score =162.8; E_value=1.1e-45; Accession=PF10409.1; Description=C2 domain of PTEN tumour-suppressor pr
QVLPQEDPGPAARDLRARLXFDCCFSTDSMGEDEYRDYLSGIVAQLQEFFPDASFMVSNFWSGDKRSRISDILSEYDMTVMDYPQQYEGCPLLQLEMIHHFLKSCENWLSVEGQHNMLLMHCERGGWPVLAFMLAGLLLYRKTYTGEQKTLEMVYKQARRDFIQQFFPLNPQPSHLRYLHYITRQGSGSEWPPISRTLILDSVVLHVVPRFDAEGGCRPYLHVHGQDSSPGNKSAKVLFEMPKTKKHLQRYGQAEVPIKISACCRVQGDVVLECIHMGDNLEHKETXFRVMFNTAFIQSNILGLNRDDIDVSWNVNNQFPRDFRAEVLFSDPDSFKPAVTTVEVADDGDETDVASVDTGDEFYEAEEYWHDARRDPETQSVDGRLSLDGVAELDGAVANEERSSLEKHGIDEDVKTVISQNSGSMNEKGSSAPTSSFENPEGLQQAQQDPAKSKLNHTGGQENSDVQDIQVVATSVDSEGHKFGSICQEEDTKDVIAQTLVTTVDPNCSDEIQCQADKPTKILKYPDSDYTTFDAPRSLSCTDGDTHLRTTTEGGLQNGDIKIITENTVIVDNELVIYEEKTIVENGNIIQEVKNVVNEMSAVPKIGRTTIKSRNAQDNSCGNIKAAKPSDRADGKLDRSKLEAGLEETIPTKDTNVHDRIIVLPATEVATEIKTKREGPGGKQDLGIALPQSRTEARASSPRFGSDDRGQIPDKAVSSVLKKMAAGNAAQTEEPKLAKPKTIRRWISPKKESDATSVHRPSHPPSRYYSSPAALAIRSLSTDGKINAVNDAPLVSLMEPYNSRLTEESISTLSARSPTQQSSLLGAHIASRSEAPPPPPPPPPPPXFSSSSMPMGPPMSSGAQKQTFAPPPPPP

SEQ ID NO: 112734 - protein, 177 aa, Setaria italica
  misc_feature (91)..(91): Xaa can be any naturally occurring amino acid
  misc_feature (145)..(145): Xaa can be any naturally occurring amino acid
  Transcript Sequence Number=SeqID_46760
  Pfam annotation: Domain name=DUF1210; Domain location=7-174; Score= -75.0; E_value=0.036; Accession=PF06735.3; Description=Protein of unknown function (DUF1210)
VEEVVVVVVLVEVPKPQPEYHPPTPTYGSPTPTYGSPTPIYHPPARHLFAKLLGHFHKDHDHHQLFDHFHKKPVPPKPEPKPQPEYHPPTXPTYGSPTPIYHPPAKDLFDKKHWLDHFHKDHEHHHFFDHFHKKPVPPKPKPEPXPQPEYHPPTPKYSSPTPTYGSPTPIYHPPAKN

SEQ ID NO: 112735 - protein, 267 aa, Setaria italica
  Transcript Sequence Number=SeqID_46761
  Homolog annotation: Hit_ID=B6TZE8; Match level="QueryCoverage=95%, HitCoverage=55%, E-value=1e-58, Identity=52%"; Hit description =Pinin/SDK/memA/ protein conserved region containing protein
  Pfam annotation: Domain name=Pinin_SDK_memA; Domain location=149-266; Score=-16.1; E_value=0.0016; Accession=PF04696.5; Description =pininSDKmemA protein conserved reg
MAAATEKTAEDIRRELQELQRQHREITERLRDPRGLRRGVPGAGPVPGGPRPLRGFVRPAVVAESGDQPAQKRRLLSAVVKVDGAETNEEGEKAAEAEGREEGSGAAEAGDRRGVSNGGFRRDGGLRMPRRVDYNSLPEPAPRELPKNDDPNMVRRNKRMLGQLLVGTLEKFQQEDKKLSNSEAFLRRSETQRKAEQKVREESERLRQQEREQIAEKRKRDMMLRARVAAKAEEKRLELLYMQWTEHHKKLSNFLRLFLFLVQKCPY

SEQ ID NO: 112736 - protein, 252 aa, Setaria italica
  Transcript Sequence Number=SeqID_46762
  Gene Ontology: Mol. function=sequence-specific DNA binding; Cellular component=nucleus; Biological process=regulation of transcription, DNA-dependent
  Homolog annotation: Hit_ID=Q84V67; Match level="QueryCoverage=98%, HitCoverage=99%, E-value=1e-112, Identity=82%"; Hit description=MADS- box transcription factor 18
  Pfam annotation: Domain name=K-box; Domain location=75-174; Score =125.1; E_value=2.2e-34; Accession=PF01486.9; Description=K-box region
  Pfam annotation: Domain name=SRF-TF; Domain location=9-59; Score =120.7; E_value=4.8e-33; Accession=PF00319.10; Description=SRF-type transcription factor (DNA-binding and dimerisation domain)
  Pfam module annotation: Pfam domain module=K-box::SRF-TF; Domain location=75-174::9-59
MGRGPVQLRRIENKINRQVTFSKRRNGLLKKAHEISVLCDAEVALIVFSTKGKLYEYSSHESMEGILERYQRYSFEERAVLDPNIGDQANWGDEYGRLKSKLDALQKSQRQLLGEQLDSLTIKELHQLEQQLDSSLKHIRSRKNQLMFNSISELQKKEKSLTDQNGVLQKLMEAEKEKNNALMNTHLREQQNGASKDSPSPPPSTVPDSLPTLDIGPCQPRGTGGESEPEPIPAQVNSGKLPPWMLRSVNNR

SEQ ID NO: 112737 - protein, 168 aa, Setaria italica
  Transcript Sequence Number=SeqID_46763
  Gene Ontology: Mol. function=protein binding; Cellular component =nucleus; Biological process=ubiquitin-dependent protein catabolic process
  Homolog annotation: Hit_ID=Q7XYF8; Match level="QueryCoverage=99%, HitCoverage=98%, E-value=6e-57, Identity=68%"; Hit description =SKP1/ASK1-like protein
  Pfam annotation: Domain name=Skp1; Domain location=91-168; Score =193.3; E_value=6.5e-55; Accession=PF01466.11; Description=Skp1 family, dimerisation domain
  Pfam annotation: Domain name=Skp1_POZ; Domain location=9-69; Score =122.8; E_value=1.1e-33; Accession=PF03931.7; Description=Skp1 family, tetramerisation domain
  Pfam module annotation: Pfam domain module=Skp1::Skp1_POZ; Domain location=91-168::9-69
MASAEAEKKMITLRSSDGEEFEVEEAVAMESQTIRHMIEDDCADNGIPLPNVNAKILSKVIEYCNKHVHAAKPADDAAPAAADASAGAEDLKNWDAEFVKVDQATLFDLILAANYLNIKGLLDLTCQTVADMIKGKTPEEIRKTFNIKNDFTPEEEEEIRRENQWAFE

SEQ ID NO: 112738 - protein, 382 aa, Setaria italica
  Transcript Sequence Number=SeqID_46764
  Gene Ontology: Mol. function=protein serine/threonine kinase activity; Cellular component=plasma membrane; Biological process =protein amino acid phosphorylation
  Homolog annotation: Hit_ID=P28523; Match level="QueryCoverage=86%, HitCoverage=99%, E-value=1e-173, Identity=89%"; Hit description =Casein kinase II subunit alpha
  Pfam annotation: Domain name=APH; Domain location=85-266; Score= -19.5; E_value=0.061; Accession=PF01636.15; Description =Phosphotransferase enzyme family
  Pfam annotation: Domain name=Pkinase; Domain location=83-368; Score =298.9; E_value=1.1e-86; Accession=PF00069.17; Description=Protein kinase domain
  Pfam annotation: Domain name=Pkinase_Tyr; Domain location=83-368; Score=-88.2; E_value=7.3e-08; Accession=PF07714.9; Description =Protein tyrosine kinase
  Pfam module annotation: Pfam domain module=APH::Pkinase::Pkinase_Tyr; Domain location=85-266::83-368::83-368
  Subcellular localization annotation: CTP_CleavageSite=39; ConfidenceScore=5.49e-01
MIGALPWNRLPTGIAKPAAAAAVVVAALASSFLAVPRPRAASVAAGSVVMSKARVYTDINVQRPKEYWDYEALTVQWGEQDDYEVVRKVGRGKYSEVFEGINVNNNEKCIIKILKPVKKKKIKREIKILQNLCGGPNIIKLLDIVRDQHSKTPSLIFEYVNNTDFKVLYPTLTDYDIRYYIYELLKALDYCHSQGIMHRDVKPHNVMIDHELRKLRLIDWGLAEFYHPGKEYNVRVASRYFKGPELLVDLQDYDYSLDMWSLGCMFAGMIFRKEPFFYGHDNHDQLVKIAKVLGTDGLNAYLNKYHIELDPQLEALVGRHSRKPWSKFINADNQHLVSPEAIDFLDHLLRYDHQERFTAREAMAHPYFLQVRAAEHSRTRPQ

SEQ ID NO: 112739 - protein, 176 aa, Setaria italica
  Transcript Sequence Number=SeqID_46765
  Gene Ontology: Mol. function=protein binding; Cellular component =nucleus; Biological process=ubiquitin-dependent protein catabolic process
  Homolog annotation: Hit_ID=Q2R4Y1; Match level="QueryCoverage=100%, HitCoverage=100%, E-value=2e-59, Identity=72%"; Hit description=SKP1- like protein 1B, putative, expressed
  Pfam annotation: Domain name=Skp1; Domain location=99-176; Score =192.8; E_value=9.6e-55; Accession=PF01466.11; Description=Skp1 family, dimerisation domain
  Pfam annotation: Domain name=Skp1_POZ; Domain location=8-68; Score =123.9; E_value=5.3e-34; Accession=PF03931.7; Description=Skp1 family, tetramerisation domain
  Pfam module annotation: Pfam domain module=Skp1::Skp1_POZ; Domain location=99-176::8-68
MAAEGEKKMITLKSSDGEEFEVEEAVAMESQTIRHMIEDDCADNGIPLPNVNSKILSKVIEYCNKHVHAAAAAAAASKAGSEDAGATAANSTAASGEDLKNWDADFVKVDQATLFDLILAANYLNIKGLLDLTCQTVADMIKGKTPEEIRKTFNIKNDFTPEEEEEIRRENQWAFE

SEQ ID NO: 112740 - protein, 240 aa, Setaria italica
  Transcript Sequence Number=SeqID_46766
  Gene Ontology: Mol. function=small conjugating protein ligase activity; Cellular component=integral to membrane; Biological process=regulation of protein metabolic process
  Homolog annotation: Hit_ID=A0EVF8; Match level="QueryCoverage=100%, HitCoverage=100%, E-value=1e-114, Identity=84%"; Hit description =Ubiquitin conjugating enzyme 2
  Pfam annotation: Domain name=UQ_con; Domain location=9-160; Score =128.3; E_value=2.6e-35; Accession=PF00179.18; Description=Ubiquitin -conjugating enzyme
MAEKGCLKRLQKEYHALCKEPPPQIVARPLPNDILEWHYVLEGSKGTPFEGGYYYGKLKFPPDYPFKPPSISMTTPSGRFAPHKRICLSMSDFHPESWNPMWSVASILTGLLSFMMDDALTTGSIKTSDAEKRRLAKASLAYNCESKNCPHFRKLFPEYVEKYNQQQQLENTAAESEPRENPAAPAPSPAVQQAPVVANRAQPVAEAHREKNQKKAVPFWMVLVMFSVFGAVMALPLMQL

SEQ ID NO: 112741 - protein, 301 aa, Setaria italica
  Transcript Sequence Number=SeqID_46767
  Gene Ontology: Mol. function=glucose-1-phosphate adenylyltransferase activity; Cellular component=chloroplast; Biological process =glycogen biosynthetic process
  Homolog annotation: Hit_ID=A5Y409; Match level="QueryCoverage=94%, HitCoverage=55%, E-value=1e-142, Identity=91%"; Hit description =Glucose-1-phosphate adenylyltransferase
  Pfam annotation: Domain name=NTP_transferase; Domain location=86-301; Score=215.5; E_value=1.4e-61; Accession=PF00483.15; Description =Nucleotidyl transferase
  Subcellular localization annotation: CTP_CleavageSite=65; ConfidenceScore=5.78e-01
MAMAAMASPSSMTLIPARHHGAAPSTSGDSSLRLLSAQPRHGRRGRGVPVSTAPARRRPFVFTPRAVSDSKSSQTCLDPDASTSVLGIILGGGAGTRLYPLTKKRAKPAVPLGANYRLIDIPVSNCLNSNISKIYVLTQFNSASLNRHLSRAYGSNIGGYKNEGFVEVLAAQQSPDNPNWFQGTADAVRQYLWLFEEHNVMEFIILAGDHLYRMDYEKFIQAHRETDADITVAALPMDEKRATAFGLMKIDEEGRIIEFAEKPKGDQLKAMMVDTTILGLDDVRAKEMHYIFAKNIDTHAS

SEQ ID NO: 112742 - protein, 795 aa, Setaria italica
  Transcript Sequence Number=SeqID_46768
  Homolog annotation: Hit_ID=Q01AC6; Match level="QueryCoverage=40%, HitCoverage=89%, E-value=2e-59, Identity=39%"; Hit description=[S] KOG4843 Uncharacterized conserved protein
  Pfam annotation: Domain name=Rxt3; Domain location=483-567; Score =120.2; E_value=6.6e-33; Accession=PF08642.2; Description=Histone deacetylation protein Rxt3
MSGAPKRLHEEGSHSTPTKRPLDDSSLYSSPGKAIPSSSSDFHGSFEHDGRFAKIQRVEPRDDKRPPLAHRMPGSSTNFAEHPISSDSRLESKQNKDAWDTKMDDRETKADGRDVYSDPRIEFPANKVESDAKVDNRADESEIRTDRRGHADYKGDTKFDKDSHSTVPSNLGWKDNKEHRGKRYFEQPSDNVDWRVSRPGLQGTDEAPKGPTSMEERNSKDAHESAGDNKAEPKSEDKFRDKDRKKKDEKHRDFGARESDKNDRRTGIQLGGSGVERREMQREDRDAEKCDRERKDSLRDKEVNDREKDSSKKDSSVVIEKDNTILEKASSDGVVKSAEHENTTTESKVIKDDAWKTHDRDPKDKKREKDVDAGDRHEQRSKYNDKESDDNGTEGDMEKDKDVFGSVQRRRMVRPRVGSQASQREPRFRSRMRDGEGTQGKSEVPAIVYKAGECMQELLKSWKEFEVTQDAKNAESLQNGPTLEIRIPAEFVTSTNRQVKGAQLWGTDIYTNDSDLVAVLMHTGYCSPTSSPPPSAIQELRATVRVLPPQESYTSTLRNNVRSRAWGAGIGCSFRIERCCIVKKGGGTIDLEPRLKTNNVQAVEPTLAPVAVERTMTTRAAASNALRQQRFVREVTIQYNLCNEPWLKYSISIVADKGLKKSLYTSARLKKGEVIYLETHFNRYELCFSGEKPRSIGSNSNASDAEPEKHQNSSHHSQNGDRGSVDHELRDVFRWSRCKKAMPESAMRSIGIPLPADQLEVLQDNLEWEDVQWSQTGVWVAGKEYPLARVHFLSN

SEQ ID NO: 112743 - protein, 450 aa, Setaria italica
  Transcript Sequence Number=SeqID_46769
  Gene Ontology: Mol. function=glucose-1-phosphate adenylyltransferase activity; Cellular component=chloroplast; Biological process =glycogen biosynthetic process
  Homolog annotation: Hit_ID=Q941P2; Match level="QueryCoverage=99%, HitCoverage=87%, E-value=0.0, Identity=97%"; Hit description=Glucose- 1-phosphate adenylyltransferase
  Pfam annotation: Domain name=NTP_transferase; Domain location=21-296; Score=394.5; E_value=1.8e-115; Accession=PF00483.15; Description =Nucleotidyl transferase
YGTTTRSSQTCLDPDASTSVLGIILGGGAGTRLYPLTKKRAKPAVPLGANYRLIDIPVSNCLNSNVSKIYVLTQFNSASLNRHLSRAYGNNIGGYKNEGFVEVLAAQQSPENPNWFQGTADAVRQYMWLFEEHNVMEFLILAGDHLYRMDYQKFIQAHRETDADITVAALPMDEQRATAFGLMKIDDEGRIVEFAEKPKGEKLKSMMVDTTILGLDPERAKELPYIASMGIYVFSKDVMLRLLRENFPAANDFGSEVIPGATEIGMRVQAYLYDGYWEDIGTIEAFYNANLGITKKPVPDFSFYDRSAPIYTQPRYLPPSKVLDADVTDSVIGEGCVIKHCTINHSVVGLRSCISEGAVIEDSLLMGADYYETEDDKKVLSEAGGIPIGIGRNAHIRKAIIDKNARIGENVKIINFDNVQEAVRETEGYFIKSGIVTVIKDALIPSGTVI

SEQ ID NO: 112744 - protein, 237 aa, Setaria italica
  misc_feature (127)..(127): Xaa can be any naturally occurring amino acid
  Transcript Sequence Number=SeqID_46770
  Gene Ontology: Mol. function=structural constituent of cell wall
  Homolog annotation: Hit_ID=Q33B16; Match level="QueryCoverage=46%, HitCoverage=49%, E-value=4e-39, Identity=72%"; Hit description =Proline-rich protein, putative, expressed
  Pfam annotation: Domain name=DUF1210; Domain location=50-225; Score =306.6; E_value=5.2e-89; Accession=PF06735.3; Description=Protein of unknown function (DUF1210)
  Subcellular localization annotation: CTP_CleavageSite=38; ConfidenceScore=5.12e-01
SLIYPLIYLKLIWFLGVLTLRGFFLPSVVCAALMAVAVASAASGGAASVVVGLAKCADCTRRNMKAEAAFKGLQVAIKCKNSKGDYESKAVGQLDGSGAFSVPLTTDLHGADCLAQLHSAAGTPCPXGQEPSMIIPQSESDFVVVPGKTNNPSAECASVTICGPIKKHFLDHFHKKKPIPPKPKPEPKPQPKPEPKPQPEYHPPTPTYGSPMPKYGSPTPIYHPPARQLFDKKDNLV

SEQ ID NO: 112745 - protein, 399 aa, Setaria italica
  Transcript Sequence Number=SeqID_46771
  Gene Ontology: Mol. function=nucleic acid binding; Cellular component= nucleus; Biological process=mRNA processing
  Homolog annotation: Hit_ID=Q10RM6; Match level="QueryCoverage=95%, HitCoverage=68%, E-value=1e-138, Identity=63%"; Hit description =Transposon protein, putative, CACTA, En/Spm sub-class, expressed
  Pfam annotation: Domain name=RRM_1; Domain location=127-197; Score =90.6; E_value=5.4e-24; Accession=PF00076.14; Description=RNA recognition motif. (a.k.a. RRM, RBD, o
  Pfam annotation: Domain name=RRM_1; Domain location=30-99; Score =50.0; E_value=9.4e-12; Accession=PF00076.14; Description=RNA recognition motif. (a.k.a. RRM, RBD, o
  Pfam annotation: Domain name=RRM_1; Domain location=329-383; Score =10.5; E_value=0.021; Accession=PF00076.14; Description=RNA recognition motif. (a.k.a. RRM, RBD, o
  Pfam module annotation: Pfam domain module=RRM_1::RRM_1::RRM_1; Domain location=127-197::30-99::329-383
RGHYRDRDVRRRKDDGAEPEVDPERDQRTVFAFQLSLKADERDVYEFFSRAGKVRDVRLIMDRNSRRSKGVGYIEFYDVMSVPMAIALSGQPLLGQAVMVKPSEAEKNLVQSNATSGGAASGGARKLYVGNLHSNITEDQLRQVFEPFGQVELVQLPVDPMTGLCKGYGFIQFARLEDAKAAQSLNGQLDIAGRVIKVSAVTDHVGVQVGGATTGDLDDDEGGGLALNASSRAALMLKLDRSGTATSLTGGIGTAGVAIPGPASSVLGAPAATSLLPPTIPAVGSVPGAPMLPVTSQSMIMSAPTEFLLLKNMFDPTVETDPDFDLDIRDDVQDECSKFGAVKHIFVDKNTAGFVYLHFDSVTAAAKAQQALHGRWFAGKMITATFMTAQEYSAKFPNL

SEQ ID NO: 112746 - protein, 333 aa, Setaria italica
  misc_feature (36)..(36): Xaa can be any naturally occurring amino acid
  misc_feature (251)..(251): Xaa can be any naturally occurring amino acid
  misc_feature (270)..(270): Xaa can be any naturally occurring amino acid
  Transcript Sequence Number=SeqID_46772
  Gene Ontology: Mol. function=electron carrier activity; Cellular component=extracellular region; Biological process=response to oxidative stress
  Homolog annotation: Hit_ID=B6THU9; Match level="QueryCoverage=93%, HitCoverage=93%, E-value=1e-145, Identity=81%"; Hit description =Peroxidase 39
  Pfam annotation: Domain name=peroxidase; Domain location=42-294; Score=402.9; E_value=5.5e-118; Accession=PF00141.15; Description =Peroxidase
MARMAVVAVVVVVAAVLAGGARAQLREGFYEHSCPXQAEKIIKDYVMEHIPHVPSIAATLLRTHFHDCFVRGCDASVLLNATGGNEAERDAAPNQTLRGNGFIDRVKALVEKECPGVVSCADILALTARDSVVATGGPSWSVPTGRRDGTVSIKQEALDQIPAPTMNFTELLQSFQNKSLDLADLVWLSGAHTIGIAHCNSFTERLYNFTGRGGPGDADPSLDPLYAANLRRTKCKTPTDNTTIVEMDPGXSFRTFDLSYYRGVLKRRGXLFQSDAALITDAAAKADILTAVNSPPEFFSQVFARSMVKMGAIEVKTGSEGEIRKHCAIVNKH

SEQ ID NO: 112747 - protein, 484 aa, Setaria italica
  misc_feature (168)..(168): Xaa can be any naturally occurring amino acid
  misc_feature (367)..(367): Xaa can be any naturally occurring amino acid
  misc_feature (380)..(380): Xaa can be any naturally occurring amino acid
  misc_feature (417)..(417): Xaa can be any naturally occurring amino acid
  Transcript Sequence Number=SeqID_46773
  Gene Ontology: Mol. function=glucose-1-phosphate adenylyltransferase activity; Cellular component=chloroplast; Biological process =glycogen biosynthetic process
  Homolog annotation: Hit_ID=Q947C0; Match level="QueryCoverage=100%, HitCoverage=100%, E-value=0.0, Identity=89%"; Hit description =Glucose-1-phosphate adenylyltransferase
  Pfam annotation: Domain name=Hexapep; Domain location=358-375; Score =8.7; E_value=15; Accession=PF00132.16; Description=Bacterial transferase hexapeptide (th
  Pfam annotation: Domain name=Hexapep; Domain location=432-449; Score =13.3; E_value=1; Accession=PF00132.16; Description=Bacterial transferase hexapeptide (th
  Pfam annotation: Domain name=NTP_transferase; Domain location=50-325; Score=388.4; E_value=1.2e-113; Accession=PF00483.15; Description =Nucleotidyl transferase
  Pfam module annotation: Pfam domain module=Hexapep::Hexapep::NTP _transferase; Domain location=358-375::432-449::50-325
MDVALASKGFPSPSNATMEQPISKRDKAVANDSSASKHTYLDPNANDSVLGIILGGGAGTRLYPLTKKRAKPAVPLGANYRLIDIPVSNCLNSNISKIYVLTQFNSASLNRHLSRAYGSNIGGYKNEGFVEVLAAQQSPDNPNWFQGTADAVRQYLWLFEEHNVMEFXILAGDHLYRMDYEKFIQAHRETDADITVAALPMDEKRATAFGLMKIDEEGRIIEFAEKPKGDQLKAMMVDTTILGLDDVRAKEMPYIASMGIYVFSKDVMLQLLREQFPGANDFGSEVIPGATSIGKRVQAYLYDGYWEDIGTIEAFYNANLGITKKPIPDFSFYDRSAPIYTQPRHLPPSKILDADVTDSVIGEGCVXLKNCKIHQLLVSXGLRSCISEGAIIEDTLLMGADYYETEADKKLLRLEKXGGIPIGIGKNSHIRRAIIDKNARIGDNVKIINADNVQEAARETDGYFIKGGIVTVIKDALLPSGTVI

SEQ ID NO: 112748 - protein, 165 aa, Setaria italica
  misc_feature (82)..(82): Xaa can be any naturally occurring amino acid
  Transcript Sequence Number=SeqID_46774
  Gene Ontology: Mol. function=hydrogen ion transporting ATP synthase activity, rotational mechanism; Cellular component=proton -transporting two-sector ATPase complex; Biological process=ATP metabolic process
  Homolog annotation: Hit_ID=P59227; Match level="QueryCoverage=100%, HitCoverage=100%, E-value=2e-55, Identity=72%"; Hit description=V -type proton ATPase 16 kDa proteolipid subunit c1/c3/c5
  Pfam annotation: Domain name=ATP-synt_C; Domain location=13-78; Score= 56.4; E_value=1.1e-13; Accession=PF00137.13; Description=ATP synthase subunit C
  Pfam annotation: Domain name=ATP-synt_C; Domain location=93-158; Score=85.2; E_value=2.4e-22; Accession=PF00137.13; Description=ATP synthase subunit C
  Pfam module annotation: Pfam domain module=ATP-synt_C::ATP-synt_C; Domain location=13-78::93-158
  Subcellular localization annotation: CTP_CleavageSite=25; ConfidenceScore=5.21e-01
MVAFSGDETAPFFGFLGAAAALVFSCMGAAYGTAKSGVGVASMGVMRPELVMKSIVPVVMAGVLGIYGLIIAVIISTGINPXKAKPYYLFDGYAHLSSGLACGLAGLAAGMAIGIVGDAGVRANAQQPKLFVGMILILIFAEALALYGLIVGIILSSRAGQSRAD

SEQ ID NO: 112749 - protein, 1394 aa, Setaria italica
  misc_feature (840)..(840): Xaa can be any naturally occurring amino acid
  Transcript Sequence Number=SeqID_46775
  Gene Ontology: Mol. function=translation initiation factor activity; Cellular component=intracellular
  Homolog annotation: Hit_ID=B9RHH9; Match level="QueryCoverage=93%, HitCoverage=93%, E-value=0.0, Identity=61%"; Hit description =Eukaryotic translation initiation factor 3 subunit, putative
  Pfam annotation: Domain name=DUF727; Domain location=228-334; Score= -39.1; E_value=0.099; Accession=PF05303.4; Description=Protein of unknown function (DUF727)
  Pfam annotation: Domain name=TPR_2; Domain location=1033-1066; Score =9.9; E_value=2; Accession=PF07719.9; Description=Tetratricopeptide repeat
  Pfam annotation: Domain name=TPR_2; Domain location=1075-1108; Score =4.2; E_value=10; Accession=PF07719.9; Description=Tetratricopeptide repeat
  Pfam annotation: Domain name=TPR_2; Domain location=1117-1150; Score =13.4; E_value=0.73; Accession=PF07719.9; Description=Tetratricopeptid e repeat
  Pfam annotation: Domain name=TPR_2; Domain location=991-1024; Score =6.3; E_value=5.6; Accession=PF07719.9; Description=Tetratricopeptide repeat
  Pfam module annotation: Pfam domain module=DUF727::TPR_2::TPR_2::TPR _2::TPR_2; Domain location=228-334::1033-1066::1075-1108::1117 -1150::991-1024
MAGKSKGGKNKGKAQGTGQSVPAEPELTVTDGGEVVNPENGEVTESPAAEGGVADAEKTEGDAPVAAQPAKKQAEGELYLYSVPVRTQSGEKLELQLSPGDSVIDVKQFLLDAPETCFYTCYDLILHTKDGSTHQLEDYNEISEIADITSGGCSLEMVAAIYDERSIRSHLRRVRELLSLSSLHVSLSTSLALQQESAQGKSADSEKTVIQELDGLNFMEDTAGALTNLLASAQAEIKCVESIVFSSFNPPPSYRRLHGDLIYIDVVTLEGNKYCITGNSKSFYVNCSNGSILDPKPTKQGLEASTLVGLLQKISAKFKKGFREILDRRASAHPFENVQSLLPVTSWLGAHPVPEHRRDAARAEESVVLSYGTELIGMQRDWNEELQSCREFPHGNPQERILRGRALYKVTCDFVDAAVKGAVGVINRCIPPINPTDPECFHMYVHNNIFFSFAVDSDYEHISKDQKPDCQNGPSKSTKVSSPDVGAKPGMNHGGSMEVSNSVSDISSDASAEAQIADSEQATYASANNDLKGTKAYQEADISGLYNLAMAIIDYRGHRVVAQSIIPGILQGDKSDSLLYGSVDNGKKISWNESFHSKVVEAAKRLHLKEHVVLDGSGNPVKLAATVECKGIVGSDDRHYILDLMRVTPRDSNYIGQEHRFCVLRPELVASFVEAESTKQSTRQKVPDALEESNDQVASTSDAKASSVEDDDKSEESSAPTREENDNSSAEIFFNPNVFTEYKLAGSPEEISADEELVKRAGTYLLEIVIPKFVQDLCSLDISPMDGQTLTDALHLHGINVRYLGKIAGMIKHLPHLWDLFSAEIIVRSAKHVIKEILRXQSPDHDIGPAIAHFLNCFVGKVLGASTKGSLGNAQSKKGHENSQTQKSTKGPKLNNSAASRKGLSTYSHLTSDGIWSSIKEFAKSKYQFEVPDDARLSAKRVSVLRNLCQKVGITIAARKYNLDASTPFEASDILNLQPVVKHSVPTCTDAKNLMEAGKVRMAEGTLNEAYALFSEAFSLLQQITGPMHKDAANCCRYLAMVLYHAGDTAGAIVQQHRELIINERCLGLDHPDTAHSYGNMALFYHGLNQTELALRHMSRTLLLLSLASGPDHPDVAATLINVAMMYQDASNMNTALRYLQEALMKNERLLGPDHVQTAVCYHALAIAFSCMQLYKLSIQHEKKTYDILAKQLGENDSRTKDSENWLGTFKVREEQVNAQKQKGQGTDASDNAIKFLKANPAFLQAMKAAAIQSGDGSANVNRSLNAAVVGEGLPRLRGVDERAARATAEARKKAVARGLNVRSGPVANNASDELAQILKLINSAAAASTASATANTQESASQGQASNGPAQNGTASEVKAADTNGPSVKSTGNTPVGLGTTLESKKQKSKQKS

SEQ ID NO: 112750 - protein, 390 aa, Setaria italica
  misc_feature (29)..(29): Xaa can be any naturally occurring amino acid
  misc_feature (40)..(40): Xaa can be any naturally occurring amino acid
  misc_feature (303)..(303): Xaa can be any naturally occurring amino acid
  Transcript Sequence Number=SeqID_46776
  Gene Ontology: Mol. function=glucose-1-phosphate adenylyltransferase activity; Cellular component=chloroplast; Biological process =glycogen biosynthetic process
  Homolog annotation: Hit_ID=A5Y409; Match level="QueryCoverage=97%, HitCoverage=73%, E-value=0.0, Identity=97%"; Hit description=Glucose- 1-phosphate adenylyltransferase
  Pfam annotation: Domain name=NTP_transferase; Domain location=1-235; Score=209.2; E_value=1.1e-59; Accession=PF00483.15; Description =Nucleotidyl transferase
SFLLRRFSSGRTQFNSASLNRHLSRAYGXNIGGYKNEGFXEVLAAQQSPDNPNWFQGTADAVRQYLWLFEEHNVMEFIILAGDHLYRMDYEKFIQAHRETDADITVAALPMDEKRATAFGLMKIDEEGRIIEFAEKPKGDQLKAMMVDTTILGLDDVRAKEMPYIASMGIYVFSKDVMLQLLREQFPGANDFGSEVIPGATSIGKRVQAYLYDGYWEDIGTIEAFYNANLGITKKPIPDFSFYDRSAPIYTQPRHLPPSKILDADVTDSVIGEGCVIKNCKIHHSVVGLRSCISEGAIIEDTXLLMGADYYETEADKKLLAENGGIPIGIGKNSHIRRAIIDKNARIGDNVKIINADNVQEAARETDGYFIKGGIVTVIKDALLPSGTVI

SEQ ID NO: 112751 - protein, 164 aa, Setaria italica
  Transcript Sequence Number=SeqID_46777
  Homolog annotation: Hit_ID=B8Q894; Match level="QueryCoverage=74%, HitCoverage=26%, E-value=2e-16, Identity=43%"; Hit description=SKIP interacting protein 8 (Fragment)
  Pfam annotation: Domain name=DUF593; Domain location=1-79; Score =119.7; E_value=9.4e-33; Accession=PF04576.7; Description=Protein of unknown function, DUF593
TLIKEDYEAERSASAVAASEAMAMINRLQEEKAGMHMEALQYLRMMEEQADHDQEAIEKLNDLLTEREKELLDLEAELECYRSRLHDKPFDVGNFNAIDGAIAFGVLDGSDFMRHIMFDFEDEKAKILDSLHSLEETLGMSSINRFDLHGTNDTLQNGPLGDSP

SEQ ID NO: 112752 - protein, 324 aa, Setaria italica
  Transcript Sequence Number=SeqID_46778
  Gene Ontology: Mol. function=UDP-N-acetylglucosamine transmembrane transporter activity; Cellular component=integral to membrane; Biological process=imaginal disc-derived wing morphogenesis
  Homolog annotation: Hit_ID=B6U002; Match level="QueryCoverage=99%, HitCoverage=99%, E-value=1e-154, Identity=84%"; Hit description=UDP -glucuronic acid/UDP-N-acetylgalactosamine transporter
  Pfam annotation: Domain name=TPT; Domain location=157-301; Score =18.3; E_value=5.3e-05; Accession=PF03151.8; Description=Triose -phosphate Transporter family
  Pfam annotation: Domain name=UAA; Domain location=22-307; Score= -119.4; E_value=0.00022; Accession=PF08449.3; Description=UAA transporter family
  Pfam module annotation: Pfam domain module=TPT::UAA; Domain location =157-301::22-307
MGLAEAGEPSSILSLAAAVSYGVASMAMVFVNKAVLMQYVHSMTLLTLQQIATALLIHFGQVLGMSRRKDFSLITAKKLLPISIFYNANVGFALASLKGVNIPMYIAIKRITPLAVLVSGCVRGKGKPPTQVTLSVICTAAGVLIAALGDFSFDLYGYCMALTSVFFQTMYLVLVEKSGAEDGLSSVDLMFYNSILSLPFLFFLIIATGEFPNSLTVLSAKTASPSFSVILVISLVMGIVLNFTMFWCTIVNSALTTTIVGVLKGVGSTTLGFILLGGVEVHALNVTGLVINTLGGVWYSYAKYRQKKKTPRKLVPDVESHAHK

SEQ ID NO: 112753 - protein, 86 aa, Setaria italica
  Transcript Sequence Number=SeqID_46779
  Gene Ontology: Mol. function=ATPase activity, coupled to transmembrane movement of substances; Cellular component=integral to membrane; Biological process=transport
  Homolog annotation: Hit_ID=Q6NLC1; Match level="QueryCoverage=73%, HitCoverage=8%, E-value=3e-16, Identity=68%"; Hit description=ABC transporter D family member 2, chloroplastic
YLKPYFWFLLDESTSALDEANEAHLYSQIEAAGITYISVGHRKTLHKFHNKALYISKSELTDSNLLNWELKPTSQISVEESSPFSS

SEQ ID NO: 112754 - protein, 82 aa, Setaria italica
  Transcript Sequence Number=SeqID_46780
MFPFLTVATDYMMFHLVISNVAFGDLKCFNHSFQLFAIYIKLLFLIFRCCNSLLGMLRLLQQSIHNVSSIFRKLYVASCHTY

SEQ ID NO: 112755 - protein, 108 aa, Setaria italica
  Transcript Sequence Number=SeqID_46781
  Gene Ontology: Mol. function=transferase activity, transferring glycosyl groups; Biological process=metabolic process
  Homolog annotation: Hit_ID=Q1PDW8; Match level="QueryCoverage=78%, HitCoverage=17%, E-value=1e-15, Identity=51%"; Hit description=UDP -glucoronosyl/UDP-glucosyl transferase family protein
SCNSDADQPFNAKFLVDELKIAVRVQTSDRTIRGLVTSEEVSKVVRVLMLGEEGVEVAKNVAELSASAKEAMAEGGPSCKALKDMISELCVKKVNGNLEESQDEKVDA

SEQ ID NO: 112756 - protein, 86 aa, Setaria italica
  Transcript Sequence Number=SeqID_46782
  Gene Ontology: Mol. function=RNA binding; Cellular component =chloroplast; Biological process=regulation of transcription, DNA -dependent
  Homolog annotation: Hit_ID=B6TU34; Match level="QueryCoverage=83%, HitCoverage=25%, E-value=5e-33, Identity=91%"; Hit description=RNA binding protein
MLFTHGKFHGQDEPVARILELCILHIAMAEMTSKGTPHKVVINEAVDLAKRFCDGGAPRVINGCLRTFVKDHVDITGTNQAAEPKA

SEQ ID NO: 112757 - protein, 193 aa, Setaria italica
  Transcript Sequence Number=SeqID_46783
  Gene Ontology: Mol. function=RNA binding; Cellular component =chloroplast; Biological process=regulation of transcription, DNA -dependent
  Homolog annotation: Hit_ID=B6TU34; Match level="QueryCoverage=97%, HitCoverage=67%, E-value=1e-103, Identity=94%"; Hit description=RNA binding protein
  Pfam annotation: Domain name=NusB; Domain location=51-179; Score =16.6; E_value=0.00011; Accession=PF01029.10; Description=NusB family
MISYAACLEGADVVRLFDRRISARREPGYVFDKACLLSYNHMSFGGGPLEVGTEEEAEKLTSQNEKDSANEAEVLSAPPKLVYNNFVLRLSRELLVAVASGWDKHVDIIDKIIPQTWKDEPVARILELCILHIAMAEMTSKGTPHKVVINEAVDLAKRFCDGGAPRVINGCLRTFVKDHVDITGTNQAAEPKA

SEQ ID NO: 112758 - protein, 258 aa, Setaria italica
  Transcript Sequence Number=SeqID_46784
  Gene Ontology: Mol. function=ATPase activity, coupled to transmembrane movement of substances; Cellular component=integral to membrane; Biological process=transport
  Homolog annotation: Hit_ID=B9HYE2; Match level="QueryCoverage=93%, HitCoverage=35%, E-value=1e-54, Identity=51%"; Hit description =Peroxisomal membrane ABC transporter family, PMP family (Fragment)
  Pfam annotation: Domain name=ABC_tran; Domain location=49-257; Score =25.1; E_value=5.1e-08; Accession=PF00005.19; Description=ABC transporter
KSSSSVVSSNGSLTQSDPCMVLEILNLTLITPRSGNVLITDLNLELKDKDHLLVMGPSGSGKTSLLRALAGLWTSGTGDIIYHVRGSMQFENSNVSSDEPSNMKLEGEEVLQSSKQRRDNGIFFVPQRPYMVLGTLRQQLLYPTWSEDVHHSPNNDAESTDPLPFLSEVSTSEGVGAKPEMPSTAELVRVLEVVRLGYILPRFNGLDSMHDWASVLSLGEQQRLAFARLLLAKPTLVLLDESTSALDEANEVIILVLL

SEQ ID NO: 112759 - protein, 94 aa, Setaria italica
  Transcript Sequence Number=SeqID_46785
FELHACSSLDVLLLLVPGSVAVMTKAYPSIERNDLILLQEIASYMLLSCGAVYVISGILCIGVLKRSRQQKATSREQAVKDLHELEKRREELEA

SEQ ID NO: 112760 - protein, 118 aa, Setaria italica
  Transcript Sequence Number=SeqID_46786
  Homolog annotation: Hit_ID=Q53NA2; Match level="QueryCoverage=100%, HitCoverage=29%, E-value=2e-18, Identity=38%"; Hit description =D8Ertd354e protein, putative
DIREIRLMGVLQRIAIAYLAVALCEIWLRGGASDIGAGGYALIRRYRHQLFVGLVLTVTYMTVLYGMYVPDWEYEVIYPDTTFKHFKVKCGVRGDIGPGCNAVGMIDRRVIGIQHLYT

SEQ ID NO: 112761 - protein, 164 aa, Setaria italica
  Transcript Sequence Number=SeqID_46787
  Gene Ontology: Mol. function=aspartic-type endopeptidase activity; Cellular component=chromatin; Biological process=chromatin assembly or disassembly
  Homolog annotation: Hit_ID=Q01M69; Match level="QueryCoverage=99%, HitCoverage=11%, E-value=3e-89, Identity=96%"; Hit description =OSIGBa0114M03.4 protein
THDHRILLKPDAQPVAVRPYRYPAAHKDELERQCAAMIDQGIVRRSDSPFSSPVLLVKKPDGSWRFCVDYRALNALTVKDAFPIPVVDELLDELHGAKFFTKLDLRSGYHQVRMRPEDIHKTAFRTHDGLYEFLVMAFGLCNAPATFQALMNDVLRPFLRRFVL

SEQ ID NO: 112762 - protein, 73 aa, Setaria italica
  Transcript Sequence Number=SeqID_46788
RCCIYQLIENIIATYLLLSWTIVLGIAINCWDSYFVRSGPGISMLNRVFHLQIFISTKNQIILITILSFDQNS

SEQ ID NO: 112763 - protein, 149 aa, Setaria italica
  Transcript Sequence Number=SeqID_46789
  Gene Ontology: Mol. function=electron carrier activity; Cellular component=cytoplasm; Biological process=tRNA wobble uridine modification
  Homolog annotation: Hit_ID=Q1EP54; Match level="QueryCoverage=73%, HitCoverage=14%, E-value=5e-31, Identity=64%"; Hit description =Glucose-inhibited division A family protein
  Pfam annotation: Domain name=GIDA; Domain location=70-149; Score= -192.3; E_value=4.9e-05; Accession=PF01134.14; Description=Glucose inhibited division protein A
  Subcellular localization annotation: CTP_CleavageSite=52; ConfidenceScore=5.59e-01
MLLRLRPPPQPATAAAAAAARLSSFLPSPSFRDLLPLTSWRTPPRRRLSTAAAAAVAKDSRGRLDSERYDVIVVGGGHAGCEAALASARLGARTLLLTLNIDRIAWQPCNPAVGGPAKSQLVHEVDALGGEIGKIADRCYLQKRVLNSS

SEQ ID NO: 112764 - protein, 43 aa, Setaria italica
  Transcript Sequence Number=SeqID_46790
MSTRIVLQCLNYTATGCLSILTVCLICAERLMGCLSLSISSYI

SEQ ID NO: 112765 - protein, 88 aa, Setaria italica
  Transcript Sequence Number=SeqID_46791
YIDTNRLELRTDKHNCLLHQSPASQKSATACYAPICQYPPPLVTTHQQHHILYALSKTMSLCATKSAPKQQNGHTTITTDQYIHTISS

SEQ ID NO: 112766 - protein, 54 aa, Setaria italica
  Transcript Sequence Number=SeqID_46792
  Subcellular localization annotation: CTP_CleavageSite=20; ConfidenceScore=5.07e-01
VVLCIPCSRFCFTFPQYKSSAPSKKPSTSTDPCTVLFYRTKSYMAVIKYKIRNQ

SEQ ID NO: 112767 - protein, 240 aa, Setaria italica
  Transcript Sequence Number=SeqID_46793
  Gene Ontology: Mol. function=transporter activity; Cellular component= membrane; Biological process=transport
  Homolog annotation: Hit_ID=B6U234; Match level="QueryCoverage=100%, HitCoverage=45%, E-value=1e-121, Identity=91%"; Hit description =Permease
PTFSADHAFGMMAAVVVSLIETTGAFKAAARLASATPPPAYVLSRGIGWQGIGTLLDGLFGTGTGSTVSVENVGLLGSTRVGSRRVIQISAGFMIFFSMLGKFGALFASIPFTIFAAIYCVMFGIVAAVGLSFMQFTNMNSMRNLFIIGVSLFLGLSIPEYFSRYSTSSRQGPAHTKAGWFNDYINTIFSSPPTVALFVAVLLDNTLDVRDAARDRGMPWWARFRTFRGDSRNEEFYTLP

SEQ ID NO: 112768 - protein, 151 aa, Setaria italica
  Transcript Sequence Number=SeqID_46794
  Gene Ontology: Mol. function=pyridoxal phosphate binding; Biological process=amino acid metabolic process
  Homolog annotation: Hit_ID=B8GYL3; Match level="QueryCoverage=99%, HitCoverage=38%, E-value=4e-57, Identity=70%"; Hit description=O -succinylhomoserine sulfhydrylase
  Pfam annotation: Domain name=Cys_Met_Meta_PP; Domain location=1-151; Score=-108.6; E_value=3.9e-12; Accession=PF01053.12; Description =CysMet metabolism PLP-dependent enzyme
TVVDGPDLAAWKAAMQPNTKALLLESPANPLLEIIDVQGVADLAHANGAYLVVDNVFATPIFQKPMKLGADVVVYSTTKHIDGQGRVLGGAILASSQMIEEKYRDILRHTGPCMSPFNAWLMLKGLETLDLRVRAMSGAAERLANTAAAHP

SEQ ID NO: 112769 - protein, 83 aa, Setaria italica
  Transcript Sequence Number=SeqID_46795
  Gene Ontology: Cellular component=nucleus
  Homolog annotation: Hit_ID=B6TTM2; Match level="QueryCoverage=100%, HitCoverage=58%, E-value=3e-35, Identity=87%"; Hit description=SWIb domain-containing protein
  Pfam annotation: Domain name=SWIB; Domain location=6-82; Score=138.7; E_value=1.9e-38; Accession=PF02201.10; Description=SWIBMDM2 domain
RRATGITQPKPVSPALQAIVGVPEIPRTEALKRLWAYIKQHNLQDPADKKVVVCDEKLKALFAERERVGFLEIAKLLNPHFVK

SEQ ID NO: 112770 - protein, 79 aa, Setaria italica
  Transcript Sequence Number=SeqID_46796
  Gene Ontology: Mol. function=prenyltransferase activity; Cellular component=integral to membrane
  Homolog annotation: Hit_ID=B6T6U8; Match level="QueryCoverage=74%, HitCoverage=15%, E-value=3e-22, Identity=89%"; Hit description =Prenyltransferase/ zinc ion binding protein
GCFPRAPRAPCSAARERRRDSVRTFSQADAAGPAPLSKTLSDLKDSCWRFLRPHTIRGTALGSIALVARALIENSHLIN

SEQ ID NO: 112771 - protein, 68 aa, Setaria italica
  Transcript Sequence Number=SeqID_46797
RQIDKASLASMICNAISYSLYVSEDVILYSQHACIYVLNEKGGNRIRAALRVILSRSLLLACSCGFYI

SEQ ID NO: 112772 - protein, 94 aa, Setaria italica
  misc_feature (70)..(70): Xaa can be any naturally occurring amino acid
  Transcript Sequence Number=SeqID_46798
  Gene Ontology: Mol. function=metal ion binding; Cellular component =chromosome
  Homolog annotation: Hit_ID=Q336R3; Match level="QueryCoverage=78%, HitCoverage=8%, E-value=1e-14, Identity=60%"; Hit description=E3 ubiquitin-protein ligase BRE1-like 2
HTCIFYFIHYIITSFSLHFASRTIADIEESENRAHSQVEYLRSSLEEHSLELRVKAASEAEAACQQRLSXAEAELEELRAKVDASERDVVELKE

SEQ ID NO: 112773 - protein, 58 aa, Setaria italica
  Transcript Sequence Number=SeqID_46799
HTCIFYFIHYIITSFSLHFASRTIADIEESENRAHSQVEYLRSSLEEHSLELRVKQTK

SEQ ID NO: 112774 - protein, 456 aa, Setaria italica
  Transcript Sequence Number=SeqID_46800
  Gene Ontology: Mol. function=metal ion binding; Cellular component =chromosome; Biological process=ubiquitin-dependent protein catabolic process
  Homolog annotation: Hit_ID=Q336R3; Match level="QueryCoverage=99%, HitCoverage=53%, E-value=1e-177, Identity=71%"; Hit description=E3 ubiquitin-protein ligase BRE1-like 2
  Pfam annotation: Domain name=zf-C3HC4; Domain location=404-442; Score= 33.6; E_value=7.9e-07; Accession=PF00097.17; Description=Zinc finger, C3HC4 type (RING finger)
IIKIFMSEKNDLETKVEEALQDSGKKDFKNEIHVMAAALSNELRMMENQLSRSKDAASEALALREKAESLTSLVAKKIEEQKEISDKYNSQLIEIKSLKALVEELEKEKQELQFIADMYTKECSESRTIADIEESENRAHSQVEYLRSSLEEHSLELRVKAASEAEAACQQRLSFAEAELEELRAKVDASERDVVELKEAIRIKEAEGDAYISDIETIGQAYEDMQTQNQHLLEQLADREDFNIKLVSDSVKMKQACSSLFSEKLMLEKQLQQVNTSLESSKLKISRGEEQMKTCVAQAIKTSAENRHLTISLERTALDMSNTEKELKWLRSSVGSSEKEHDQTQQKISELRILLEHERSERRRLEEQYEEVKNEIMELTSETEETTIQKLQDEIKECKAILKCGVCFDRPKEVVITKCFHLFCSPCIQRNLEIRHRKCPGCGTPFGQNDVREVKI

SEQ ID NO: 112775 - protein, 197 aa, Setaria italica
  Transcript Sequence Number=SeqID_46801
  Gene Ontology: Mol. function=oxidoreductase activity, acting on the CH-CH group of donors; Cellular component=integral to membrane; Biological process=lipid metabolic process
  Homolog annotation: Hit_ID=B6SU65; Match level="QueryCoverage=94%, HitCoverage=66%, E-value=2e-62, Identity=67%"; Hit description=3-oxo- 5-alpha-steroid 4-dehydrogenase 2
  Pfam annotation: Domain name=Steroid_dh; Domain location=48-197; Score=84.0; E_value=5.5e-22; Accession=PF02544.8; Description=3-oxo -5-alpha-steroid 4-dehydrogenase
APALAAALASFFVPGAVEGARARILAAAVAVHFLKRVLEVLFVHRYSGSMPLGTALLISSCYLFNGMAMIYVQHLSHGLPEPAVDLLYPGVLAFAVGIAGNFYHHHLLSRLRADGGDKGHYKIPRGGLFELVTCPHYLFEIIGFFGFAMISQTAYALVVAVGTAAYLAGRSYTTRKWYAAKFEEFPARVRALVPYVW

SEQ ID NO: 112776 - protein, 107 aa, Setaria italica
  misc_feature (8)..(8): Xaa can be any naturally occurring amino acid
  Transcript Sequence Number=SeqID_46802
  Gene Ontology: Mol. function=metal ion binding
  Homolog annotation: Hit_ID=B4F8Z4; Match level="QueryCoverage=94%, HitCoverage=21%, E-value=3e-21, Identity=53%"; Hit description =Protein binding protein
PLEMARQXGHVNLGRVSLFQGWMREKYAPCYFMKRMIWAVVLPYELQNPTRPRPLKLLLAIYLVSQNMPACKSRAVIELWQSQIEKKLDEEDPCITIFDKETGVYQC

SEQ ID NO: 112777 - protein, 50 aa, Setaria italica
  Transcript Sequence Number=SeqID_46803
VRNEERMKRKKLAAAAKLQDGYPAVMQSGPMSQVPPPVPNPITYHPPDYG

SEQ ID NO: 112778 - protein, 83 aa, Setaria italica
  Transcript Sequence Number=SeqID_46804
  Homolog annotation: Hit_ID=Q5N7I2; Match level="QueryCoverage=46%, HitCoverage=10%, E-value=4e-09, Identity=79%"; Hit description=Wound- responsive protein-like
MARSRSGSGLHEEAPVCTAKSWWYRIKENRWTALEGWRLFFMRNMKEMVESGLSAKLEKADRFQRIKMEINEMIKAPLLLTLS

SEQ ID NO: 112779 - protein, 94 aa, Setaria italica
  misc_feature (18)..(18): Xaa can be any naturally occurring amino acid
  Transcript Sequence Number=SeqID_46805
  Homolog annotation: Hit_ID=Q5N7I2; Match level="QueryCoverage=94%, HitCoverage=21%, E-value=4e-34, Identity=84%"; Hit description=Wound- responsive protein-like
RLERAIRDLQKIVAEYAXILLADRPPTIDINEVDPNGHAAVKRRLPQEVKQKLAKVARLSANQGKIQEHELMDRLMGIVGHLVQRRTLKVSDGS

SEQ ID NO: 112780 - protein, 735 aa, Setaria italica
  misc_feature (5)..(5): Xaa can be any naturally occurring amino acid
  misc_feature (12)..(12): Xaa can be any naturally occurring amino acid
  misc_feature (150)..(150): Xaa can be any naturally occurring amino acid
  Transcript Sequence Number=SeqID_46806
  Homolog annotation: Hit_ID=Q5N7I2; Match level="QueryCoverage=53%, HitCoverage=99%, E-value=1e-149, Identity=70%"; Hit description =Wound-responsive protein-like
CRRQXFTVELRXPGETTIVSWKKLLREAGNAAAAPVVAAEPAFPAHAGPSGAAHPAESDPKDPTQPNRFNAVIEKIERLYMGKHSSDEEDLDDVPDDDQYDTEDSFIDDAELDEYFEVDNLKTKHDGYFVNKGKLEQIDPGTSTNIAPKXRRRKDSSTYLETNAPVDYLSIGDVPGKSSGRGTVQAGKQLASSSVGSYGQYPEDNRVVKNKTSGPGGALKRKSDFSAVADATARAKISKDASNAPVELSDLEDYKDVLLPLDYGDKELLLPLDYAHKSKSSDMLLPLDYAHKSKTSETYDYGSAYRDKGTSVQLDFQQRKASRENHDSSNRIYRKGKCGTSEYPVVAMGTAVYSTQTVNPIVGREGSGTKPKGTRLERAIRDLQKIVAEYRPPTIDINEVDPNGHAAVKRRLPQEVKQKLAKVARLSANQGKIQEHELMDRLMGIVGHLVQRRTLKRNMKEMVESGLSAKLEKADRFQRIKMEINEMIKARVAAKSKVNEQQDGSADDFQVANDERRAIKGKSVMDSALEDRICDLYDLYVEGMDEDKGPQSRKLYVELAELWPQGYMDNVGIKDAISRSKERKRLLHNQQKVRNEERMKRKKLAAAAKLQDGYPAVMQSGPMSQVPPPVPNPITYHPPDYGLNQGVKSYERVREISSRAIPDDSKRNAGEMKKKKRKPEYDPVDTQANQPKAPLQHGNERQRPSKPSDETNAGSQLTQTVLGLPTVIGHNQQPS

SEQ ID NO: 112781 - protein, 84 aa, Setaria italica
  Transcript Sequence Number=SeqID_46807
KVITVKNTQKMDVHNSSRVLDQLLLFLLLGAPQVIDCNYNWNQSLQPKLNMGHEIWITEASTGSHICFKFIKTTIIFDDHAFLK

SEQ ID NO: 112782 - protein, 151 aa, Setaria italica
  Transcript Sequence Number=SeqID_46808
  Gene Ontology: Mol. function=Rab GTPase activator activity; Cellular component=intracellular; Biological process=regulation of Rab GTPase activity
  Homolog annotation: Hit_ID=Q10N37; Match level="QueryCoverage=88%, HitCoverage=23%, E-value=3e-56, Identity=82%"; Hit description=TBC domain containing protein, expressed
AEPVSCIAENDELGQETPGDSTGTALEGGEDGSYFPWREELESLVRGGVPMALRGEIWQAFVGVGARKITGYYNKLLEGTVESDEKDLVDPVLNEQISAPRKVAQPEKWKGQIEKDLPRTFPGHPALDEDGRNALRRLLTAYARHNPSVGY

SEQ ID NO: 112783 - protein, 44 aa, Setaria italica
  Transcript Sequence Number=SeqID_46809
  Gene Ontology: Mol. function=Rab GTPase activator activity; Cellular component=intracellular; Biological process=regulation of Rab GTPase activity
  Homolog annotation: Hit_ID=Q10N37; Match level="QueryCoverage=88%, HitCoverage=6%, E-value=2e-09, Identity=76%"; Hit description=TBC domain containing protein, expressed
KVSSPRADHVPGKTNQEPNHDAPNRRMGLLSRGLGWLDKSKVHP

SEQ ID NO: 112784 - protein, 93 aa, Setaria italica
  Transcript Sequence Number=SeqID_46810
  Gene Ontology: Mol. function=Rab GTPase activator activity; Cellular component=intracellular; Biological process=regulation of Rab GTPase activity
  Homolog annotation: Hit_ID=B9SGD5; Match level="QueryCoverage=79%, HitCoverage=8%, E-value=1e-30, Identity=83%"; Hit description=Run and tbc1 domain containing 3, plant, putative
YLSADFTSLVVLRVWDVILFEGNRTMLFRTTLALLDLYGPALVTTKDAGDAITLLQSLAGSTFDSSQLVLTACMGFQSIREMGLVKCGLVKKY

SEQ ID NO: 112785 - protein, 313 aa, Setaria italica
  Transcript Sequence Number=SeqID_46811
  Gene Ontology: Mol. function=Rab GTPase activator activity; Cellular component=intracellular; Biological process=regulation of Rab GTPase activity
  Homolog annotation: Hit_ID=B9SGT3; Match level="QueryCoverage=98%, HitCoverage=33%, E-value=1e-125, Identity=68%"; Hit description=Run and tbc1 domain containing 3, plant, putative
  Pfam annotation: Domain name=TBC; Domain location=3-169; Score=79.7; E_value=1.1e-20; Accession=PF00566.10; Description=TBC domain
FLFSLQDLPRTFPGHPALDEDGRNALRRLLTAYARHNPSVGYCQAMNFFAGLFLLFMPEENAFWALVGVIDDYFDGYYTEEMIESQVDQLVLEEVVRERFPKLAKHMNFLGVQVGWVTGPWFLSIFINMLPWESGLRVWDVILFEGNRTMLFRTTLALLDLYGPALVTTKDAGDAITLLQSLAGSTFDSSQLVLTACMGFQSIREMGLQELRKKHRPEILTAMEERSKDRNSWKDKKGLATKLYSFKHDPSFVCSPVKSKEGADGLKLNGDTGSANLETYLSTSSMLENDLDQGVDLQDQVSWLKVELCKLLE

SEQ ID NO: 112786 - protein, 235 aa, Setaria italica
  Transcript Sequence Number=SeqID_46812
  Gene Ontology: Mol. function=Rab GTPase activator activity; Cellular component=intracellular; Biological process=regulation of Rab GTPase activity
  Homolog annotation: Hit_ID=Q10N37; Match level="QueryCoverage=94%, HitCoverage=34%, E-value=1e-57, Identity=57%"; Hit description=TBC domain containing protein, expressed
ILLIWLVLLGSANLETYLSTSSMLENDLDQGVDLQDQVSWLKVELCKLLEEKRSADLRGEELETALMEMVEHDNRRMLSAKVEKLEAEVSELRKAFAGKQEQEQAMLQILLRMEQEQKVTEDARIAAERDAAEKKHAAHLLQEKYEEAMAALSQMEKRAVMAETMLEATKQYQAGQFKANQSFTSSSPRADHVPGKTNQEPNHDAPNRRMGLLSRGLGWLDKSKARQNSTETTGS

SEQ ID NO: 112787 - protein, 321 aa, Setaria italica
  Transcript Sequence Number=SeqID_46813
  Gene Ontology: Mol. function=protein dimerization activity; Cellular component=nucleus; Biological process=regulation of transcription, DNA-dependent
  Homolog annotation: Hit_ID=B6SRX0; Match level="QueryCoverage=71%, HitCoverage=69%, E-value=8e-12, Identity=29%"; Hit description=DNA binding protein
  Pfam annotation: Domain name=bZIP_1; Domain location=179-237; Score =11.7; E_value=0.02; Accession=PF00170.13; Description=bZIP transcription factor
  Pfam annotation: Domain name=bZIP_2; Domain location=180-228; Score =9.0; E_value=0.058; Accession=PF07716.7; Description=Basic region leucine zipper
  Pfam module annotation: Pfam domain module=bZIP_1::bZIP_2; Domain location=179-237::180-228
MSRSPHLPPRCPPLGPQITRRDDSLFTQSCRFPSGDPFYGEPPCWLDDLLADSGKASNLPPLRRACSDSDAILDALSVFQSPIHPIEEGDLSPGGEAKDLLDAVEGGESSSLVEASCVYGPNSPRQKSSLTTSESSMVNAVLENVPSNPLQYLTIDTSSGVNGNVANGTADATDAFGHPDQDKSFKRRPGQRSRVRKLQYIAELERTVDSLQNMGADLAVRVASLFQLHNALSMENEQLRIQISNLQHAKLIKDGQTQALKNEAERLKQMSARHRRSRSVTSCYNMSPYGDAPAVNWQMPDMAKLSLNDSSVSPRGGGYGL

SEQ ID NO: 112788 - protein, 114 aa, Setaria italica
  misc_feature (70)..(70): Xaa can be any naturally occurring amino acid
  misc_feature (102)..(102): Xaa can be any naturally occurring amino acid
  Transcript Sequence Number=SeqID_46814
  Subcellular localization annotation: CTP_CleavageSite=34; ConfidenceScore=5.53e-01
MPPRPPAHAPSHLPLARARPHETHPPGAASRRARAMAMGSPRRRAPRPMPLPLLLLLFFLVAGSGEANAXREGGDDGARPSPIKNVVVLALENRSFDHMLGXTRRLLGPPRDGL

SEQ ID NO: 112789 - protein, 59 aa, Setaria italica
  Transcript Sequence Number=SeqID_46815
MSGAALCAALTELGFDGEDPLDADALEWPFQYEEARPLLAWICSCLRPSNVLSPSHLAQ

SEQ ID NO: 112790 - protein, 94 aa, Setaria italica
  Transcript Sequence Number=SeqID_46816
MDNSAPGKLDEIEGGGGAAGDWAYLSSDGMASGSFPLFPFPRDALSTPTPASLLLSMDPAALFDLHGAFAPPSSSTPGGGGGSALPAFHDFTSN

SEQ ID NO: 112791 - protein, 226 aa, Setaria italica
  misc_feature (163)..(163): Xaa can be any naturally occurring amino acid
  Transcript Sequence Number=SeqID_46817
  Gene Ontology: Mol. function=transferase activity, transferring glycosyl groups; Biological process=nucleoside metabolic process
  Homolog annotation: Hit_ID=P93394; Match level="QueryCoverage=63%, HitCoverage=64%, E-value=3e-66, Identity=81%"; Hit description =Uracil phosphoribosyltransferase
  Pfam annotation: Domain name=Pribosyltran; Domain location=131-225; Score=-5.1; E_value=0.029; Accession=PF00156.19; Description =Phosphoribosyl transferase domain
  Subcellular localization annotation: CTP_CleavageSite=59; ConfidenceScore=5.81e-01
MPSPTTATAASAPLHLRSCARQHLPPASRCFLPSRVLLNSARLTAPAPLPVRVPSLPPTAARAAGPDATSTRSPTSGGQMLVFVPPHPLIKHWVSVLRNEQTPCAIFKSAMSELGRLLIYEASRDWLPTITGEIETPVAVASVEFIDPREPVLVIPILRAGLXLAEQASSVLPATKTYHLGLRRDEETLEPSIYLNNLPDKIPEGTRVLVVDPMLATGGYDCCLSY

SEQ ID NO: 112792 - protein, 159 aa, Setaria italica
  Transcript Sequence Number=SeqID_46818
  Homolog annotation: Hit_ID=B6SSD5; Match level="QueryCoverage=100%, HitCoverage=33%, E-value=2e-43, Identity=60%"; Hit description=IQ calmodulin-binding motif family protein
LVAAQQRARAARLRMLDDEKPFRTPRTTPTRRSSPHHPRFRHHQDPEENVKIVEVDTSGGAGEVHGTPRTSRRSSCYATPLCRTPSKNELYQKVSPTPSALTDASARTYSGRYDDFSFATARASPYRHTPSRHHHHHHDDEGAADKPAADHPLLVPSYM

SEQ ID NO: 112793 - protein, 40 aa, Setaria italica
  Transcript Sequence Number=SeqID_46819
  Gene Ontology: Mol. function=serine-type endopeptidase activity; Cellular component=cell wall; Biological process=negative regulation of catalytic activity
  Homolog annotation: Hit_ID=B6SWW5; Match level="QueryCoverage=80%, HitCoverage=3%, E-value=3e-10, Identity=96%"; Hit description=SLP3
TVNPRTRLRSVTGTYSFGEIRMKGDRGHLVRIPVVAMGFK

SEQ ID NO: 112794 - protein, 120 aa, Setaria italica
  misc_feature (97)..(97): Xaa can be any naturally occurring amino acid
  Transcript Sequence Number=SeqID_46820
  Gene Ontology: Mol. function=metal ion binding; Cellular component =plasma membrane
  Homolog annotation: Hit_ID=B9SJF7; Match level="QueryCoverage=80%, HitCoverage=8%, E-value=1e-25, Identity=60%"; Hit description=Ran GTPase binding protein, putative
  Pfam annotation: Domain name=DZC; Domain location=67-102; Score=81.6; E_value=2.8e-21; Accession=PF08381.3; Description=Disease resistancezinc fingerchromosome co
ARSSSDEMLTAGSRVDDNLSMDARSLQNGEDGYKPRGAISLPSNQVQAEWIEQYEPGVYITLTTLRDGTRDLKRVRFSRRRFGEHQAENWWNENREXVYERYNVKSSERVSSAASTRSAY

SEQ ID NO: 112795 - protein, 136 aa, Setaria italica
  Transcript Sequence Number=SeqID_46821
  Gene Ontology: Mol. function=electron carrier activity; Cellular component=endoplasmic reticulum membrane; Biological process =oxidation reduction
  Homolog annotation: Hit_ID=Q5JKW8; Match level="QueryCoverage=100%, HitCoverage=26%, E-value=1e-37, Identity=61%"; Hit description =Putative cytochrome P450-dependent fatty acid hydroxylase
EYVMAIVESEERLRGADDDEQHLLSRFTAAMEEDNGSELGAMFESPEAKRRFLRDIVVSFVLAGKDSTSSALTWFFWLLAANPRCERRVYEEVAAAARHGDDDHGAGDEELKGMHYLHAAITEAMRLYPPVPISSR

SEQ ID NO: 112796 - protein, 185 aa, Setaria italica
  Transcript Sequence Number=SeqID_46822
  Gene Ontology: Mol. function=cyclic-nucleotide phosphodiesterase activity; Cellular component=intracellular; Biological process=RNA metabolic process
  Pfam annotation: Domain name=2_5_RNA_ligase; Domain location=17-87; Score=10.3; E_value=0.015; Accession=PF02834.8; Description=2',5' RNA ligase family
  Pfam annotation: Domain name=CPDase; Domain location=1-182; Score =251.0; E_value=2.9e-72; Accession=PF07823.3; Description=Cyclic phosphodiesterase-like protein
  Pfam module annotation: Pfam domain module=2_5_RNA_ligase::CPDase; Domain location=17-87::1-182
MDPADQSPEEVYSVWAIPPAPVRDRLRRIMEGLRAAHGGPAFEPHATVVGDFRSRRSAAVEVLRAAAAGVQPYTARVTGVARGTFFYQCVYLLLEPTPEVVAASDHCCGHFGYQRKTPYMPHVSLLYGDLTDEEKEEARKMVEELDKDICGLEFEISDLALYRTDTADKSLESWELVEVCHLEKN

SEQ ID NO: 112797 - protein, 254 aa, Setaria italica
  Transcript Sequence Number=SeqID_46823
  Gene Ontology: Cellular component=plasma membrane
  Homolog annotation: Hit_ID=Q10EW2; Match level="QueryCoverage=92%, HitCoverage=43%, E-value=1e-109, Identity=83%"; Hit description =Auxin-regulated protein, putative, expressed
  Pfam annotation: Domain name=DUF966; Domain location=21-254; Score =251.5; E_value=2e-72; Accession=PF06136.5; Description=Domain of unknown function (DUF966)
MESRGRRPRTPERQRPAARKVPVVYYLTRSRHLEHPHFVEVPVASPEGLYLRDVINHLNTVRGKGMAAMYSWSCKRSYKNGFVWHDLAEDDLVLPATDGEYVLKGSELVDQSSPGQLYPVSNGNHKQQSRLKEGARQPLPREHSYPSSPPSVIVREAKPRRSPSVPSQEEDDTPSPCRDRSFGTMSPELEPRRNERAQLSASGSASPAEFRVYKPTGCMDAATQTDDLGRRSGRRAPEMRKKSLSTDHDAVVRE

SEQ ID NO: 112798 - protein, 71 aa, Setaria italica
  Transcript Sequence Number=SeqID_46824
MARRGRDDDDDEVEEEEDEEEAYDLDDEEEDEEEDYEEEARRGKASRGGGGGKAGGGGRKRSREDNFIDDS

SEQ ID NO: 112799 - protein, 447 aa, Setaria italica
  misc_feature (406)..(406): Xaa can be any naturally occurring amino acid
  Transcript Sequence Number=SeqID_46825
  Gene Ontology: Mol. function=protein tyrosine kinase activity; Cellular component=integral to membrane; Biological process=protein amino acid phosphorylation
  Homolog annotation: Hit_ID=B9SQR1; Match level="QueryCoverage=70%, HitCoverage=69%, E-value=1e-100, Identity=56%"; Hit description =Receptor protein kinase, putative
  Pfam annotation: Domain name=Pkinase; Domain location=168-418; Score=- 55.7; E_value=3.6e-05; Accession=PF00069.17; Description=Protein kinase domain
  Pfam annotation: Domain name=Pkinase_Tyr; Domain location=167-418; Score=-80.6; E_value=2.3e-08; Accession=PF07714.9; Description =Protein tyrosine kinase
  Pfam module annotation: Pfam domain module=Pkinase::Pkinase_Tyr; Domain location=168-418::167-418
FFLLVPQRLGSCAFINRQGRPLLRFGESTEDDPTGSLSNRGVGCSDDGKVVALTPGCSIQRRLLRPQDRQGPESSIHTSGETLLKSTDPEPERKKLPHWAIYTIAISGGALVFVAAAAATTYLLFYRRKKDTTVMPWSTGLSGPLRKAFVAGVPSLGRAELQTACEDFINVIGSSSECTLYKGTLSSGVEIAVVSTSADSAKDWSDRSEEKFKNKISVLSRVNHKNLMNLLGYCTSEEPFTRMMVFEYAPCGSLFEHLHIREAEDLDWPTRLRIMMGVAYCLEHMSQLEPPVMPATLSSSSIYLTEDYAAKIADIDFCTDHDKDAELRDEQSVVYRFGILLLELISGRLPFSEDHGLLVLWASSYLDGKRPLNGMADPMLRSSVPGEDLAALCDVVRVCINPERGXKRAAMGEVARLMRGVTALSPEQATPRDNPLWWAELQIASAA

SEQ ID NO: 112800 - protein, 87 aa, Setaria italica
  Transcript Sequence Number=SeqID_46826
WLAKYKHLRTSLSTKLRQNDIYKACLTKARLVISNNLSRTYQQTTTYLLGRKNKSPEHLRLLLPPEEDLPINNLAHVPIKLHRNPTI

SEQ ID NO: 112801 - protein, 159 aa, Setaria italica
  Transcript Sequence Number=SeqID_46827
  Gene Ontology: Cellular component=membrane; Biological process=amino acid transport
MTDLVSSSTKEHVNIKEMINKGIDAFRKKDGSGHPGVGVVAILEKNRLSYIATGIVVVPTIVIAATVPNSFSIATDIAGGYCMTILYGVLPPLMAWAIGSKLSGKSAGLADGELLEDNRERVDLTSAKPVLVGMGVFSVLMVLEQMSQDFFSFKAALVP

SEQ ID NO: 112802 - protein, 102 aa, Setaria italica
  Transcript Sequence Number=SeqID_46828
  Gene Ontology: Mol. function=phosphoglycolate phosphatase activity; Cellular component=mitochondrion; Biological process=metabolic process
  Homolog annotation: Hit_ID=B9SZX9; Match level="QueryCoverage=100%, HitCoverage=32%, E-value=5e-44, Identity=80%"; Hit description=N -acylneuraminate-9-phosphatase, putative
AWKLCDPDAENVFKALRKAGVKTAVVSNFDTRLRPLLQTLKCDHWFDAVAVSAEVAAEKPNPTIFLKACEFLRVKPEEAVHVGDDRRNDIWGARDAGCDAWL

SEQ ID NO: 112803 - protein, 95 aa, Setaria italica
  Transcript Sequence Number=SeqID_46829
  Subcellular localization annotation: CTP_CleavageSite=41; ConfidenceScore=5.26e-01
LVDLLVGSGTGTWGRTGIVCRKRICRTTGMGGRRARRFCPRISGRGVLPAVCLRPLARPHARGLPGPSGAGQGHALPAASTWFYVVALSSTANIG

SEQ ID NO: 112804 - protein, 80 aa, Setaria italica
  misc_feature (45)..(45): Xaa can be any naturally occurring amino acid
  Transcript Sequence Number=SeqID_46830
TTTDKNKVLCPQWAWCIDIAEAAFDANNSKLALFALEFLARWIVXKSLRQKRAPTPETYLAKIYAHSSIGQLQRVFWDTS

SEQ ID NO: 112805 - protein, 573 aa, Setaria italica
  Transcript Sequence Number=SeqID_46831
  Gene Ontology: Mol. function=nucleic acid binding; Cellular component= mitochondrion
  Homolog annotation: Hit_ID=B9REF1; Match level="QueryCoverage=96%, HitCoverage=90%, E-value=0.0, Identity=61%"; Hit description =Pentatricopeptide repeat-containing protein, putative
  Pfam annotation: Domain name=PPR; Domain location=144-178; Score =19.6; E_value=0.013; Accession=PF01535.12; Description=PPR repeat
  Pfam annotation: Domain name=PPR; Domain location=179-213; Score =26.5; E_value=0.00011; Accession=PF01535.12; Description=PPR repeat
  Pfam annotation: Domain name=PPR; Domain location=453-487; Score =32.6; E_value=1.6e-06; Accession=PF01535.12; Description=PPR repeat
  Pfam annotation: Domain name=PPR; Domain location=488-522; Score =26.2; E_value=0.00014; Accession=PF01535.12; Description=PPR repeat
  Pfam module annotation: Pfam domain module=PPR::PPR::PPR::PPR; Domain location=144-178::179-213::453-487::488-522
  Subcellular localization annotation: CTP_CleavageSite=76; ConfidenceScore=5.41e-01
GALPGPDRRRPRPRPAPPNPSTGSPFYGENWRNPSAANLPSSLLPAVVGGSPFGAPHRTAGFSDAAGLKETFAVWMAEQRWEDMKQLFESWVRSLDAATGKPNRPDVDLFNHYLRANLMAGALPHEMLDLADHMREFEVEPNTASYNLVLKSMVTALEAEGAEKLVERMLQTGTVPDDETYNLVISLLIRQNLFDSALKYLDLMLKSGHTLSLTIFNDYVRACVRSGRLDTLASIIEKCKTTDKNKVLCPQWAWCIDIAEAAFDANNSKLALFALEFLARWIVLGENAKLQLSVNEGLVISALSAAGRTYSTDLLNAAWSLLKKSLRQKRAPTPETYLAKIYAHSSIGQLQRAFGTLREFENAYGNSEDIDLELFSPFTSLHPLVVACCKDGFSTLDSVYVQLENLSRADTPYKSVAALNCVILGCANIWDIDRAYETFVAIKDKFELTPDIHSYNALLCAFGKKKRTDEACNVFEHISTLGVKPNATTYSLLVDAHLANKDPKAALAIIDKMVDAGFTPSKDTLKKVRRRCSRESDFDSDEKVQSLAKQFNYRMGGENRREMLYNIEYNPVY

SEQ ID NO: 112806 - protein, 76 aa, Setaria italica
  Transcript Sequence Number=SeqID_46832
MGGRSFFCIFSFSRKSRRYRGVDDDDEAASDWEGPPARLRKVRSSDDDDGWWVGERDVDQKASDFIATFHRRRLVV

SEQ ID NO: 112807 - protein, 66 aa, Setaria italica
  Transcript Sequence Number=SeqID_46833
ARMCIYFSSDIEGAKCLVCARASQYCSFGACIGTTSAVMLSGLDGKRHKDPTLIRILEQHRVRGPH

SEQ ID NO: 112808 - protein, 319 aa, Setaria italica
  Transcript Sequence Number=SeqID_46834
  Gene Ontology: Mol. function=histone-lysine N-methyltransferase activity; Cellular component=nucleus; Biological process=chromatin modification
  Homolog annotation: Hit_ID=B9IBB4; Match level="QueryCoverage=89%, HitCoverage=43%, E-value=1e-19, Identity=30%"; Hit description=SET domain protein (Fragment)
  Pfam annotation: Domain name=WIYLD; Domain location=1-62; Score=66.7; E_value=8.4e-17; Accession=PF10440.1; Description=WIYLD domain
MGANTDRAKKALDAMKLLGFSRKQATPVLRQLLKIFNNNWEPIEDECYRALADAILDAQDNKQTPASSQGTQAAYEDSEPHGTTRDDRHSYASAGEDDNETPLVKRPRMGVADFGQELQPGPRQSTVSTQGALPTSPQTSHRQTRSLTLAQQAADHGDPSAISDAPILKEPKPEPEINAAGVGSTVQNTHEPQQVVPMCNNGVGSSVQNTQEASFMEVDVASSTNGEVKMSLKCNLDPSKFSISMEEVFKMVEEKCLHSYKVLPPDFSIGKLMSEVCQSVAQLGTMHSDVHSNDGSLHKEAVAPLVKPIACKAAVSKKW

SEQ ID NO: 112809 - protein, 237 aa, Setaria italica
  misc_feature (10)..(10): Xaa can be any naturally occurring amino acid
  Transcript Sequence Number=SeqID_46835
  Gene Ontology: Mol. function=metallopeptidase activity; Cellular component=vacuole; Biological process=proteolysis
  Homolog annotation: Hit_ID=B9SG76; Match level="QueryCoverage=78%, HitCoverage=35%, E-value=2e-85, Identity=77%"; Hit description =Aspartyl aminopeptidase, putative
  Pfam annotation: Domain name=Peptidase_M18; Domain location=58-237; Score=-87.6; E_value=4.4e-12; Accession=PF02127.7; Description =Aminopeptidase I zinc metalloprotease (M18)
  Subcellular localization annotation: CTP_CleavageSite=32; ConfidenceScore=5.61e-01
ARPPSPFSSXSPSTSSWLWRARLPAASSRLLCSSHPASPLDASSSAAPPSIVAGLLDYLNESWTHFHATAEAKRQLLDAGFKLLSESDDWDLQPGGRYFFTRNMSCLVAFDIGEKYRVGNGFNIIAAHTDSPCLKLKPRSATFKSGHQMVNVQTYGSGLWHTWFDRDLTLAGRVILKAADGSFKHKLVKLTRPLIRVPTLAIHLNRTVNSDGFKPNLETHLVPLLATKHEEATMNSD

SEQ ID NO: 112810 - protein, 56 aa, Setaria italica
  Transcript Sequence Number=SeqID_46836
KTKLTIKNLLDEEKELAKQQQEALDGNWQNYERPASVMKNGAIKSLARHYGVDLGD

SEQ ID NO: 112811 - protein, 143 aa, Setaria italica
  misc_feature (108)..(108): Xaa can be any naturally occurring amino acid
  Transcript Sequence Number=SeqID_46837
  Gene Ontology: Mol. function=binding
  Homolog annotation: Hit_ID=Q53P99; Match level="QueryCoverage=97%, HitCoverage=22%, E-value=6e-62, Identity=80%"; Hit description =Pentatricopeptide, putative, expressed
  Pfam annotation: Domain name=PPR; Domain location=20-54; Score=23.7; E_value=0.00075; Accession=PF01535.12; Description=PPR repeat
  Pfam annotation: Domain name=PPR; Domain location=56-90; Score=16.1; E_value=0.11; Accession=PF01535.12; Description=PPR repeat
  Pfam module annotation: Pfam domain module=PPR::PPR; Domain location =20-54::56-90
LEAIRLYDKMQENGYKPNDVTYVVLLSACSHSGLVDDGLKIFESMVKDRSVAVRDEHYTSLIDLCSRAGRLDDAKRLIHCLKIKPASGSVWSALLGGCNAHGNVSIGXLAARSLLEAEPDNAGTYTLLSNIYASAGKWKEQHK

SEQ ID NO: 112812 - protein, 91 aa, Setaria italica
  Transcript Sequence Number=SeqID_46838
  Gene Ontology: Mol. function=hydrolase activity, acting on ester bonds; Biological process=lipid metabolic process
  Homolog annotation: Hit_ID=B6STS8; Match level="QueryCoverage=97%, HitCoverage=23%, E-value=2e-22, Identity=54%"; Hit description=Alpha- L-fucosidase 2
FYTPIRRILENPDQFGVVSDVLKACCGTGGDYNWNASAVCGMPGVAACRDPSAYVSWDGVHFTEAVNQYVAEGWLQGPYADPPILRATIKH

SEQ ID NO: 112813 - protein, 303 aa, Setaria italica
  Transcript Sequence Number=SeqID_46839
  Gene Ontology: Mol. function=transferase activity; Cellular component= chloroplast; Biological process=biosynthetic process
  Homolog annotation: Hit_ID=Q6ED37; Match level="QueryCoverage=100%, HitCoverage=75%, E-value=1e-150, Identity=88%"; Hit description =Phytoene synthase 2 (Fragment)
  Pfam annotation: Domain name=SQS_PSY; Domain location=60-303; Score =344.6; E_value=2e-100; Accession=PF00494.11; Description =Squalenephytoene synthase
VYEVVLRQAALVQEGSGRVVKEGAAARRRQRPRWAEEKEEEGIVGWGLLGDAYDRCGEVCAEYAKTFYLGTQLMTPERRKAVWAIYVWCRRTDELVDGPNASYITPTALDRWDKRLEDLFEGRPYDMYDAALSDTVSKFPVDIQPFKDMIEGMRLDLWKSRYMTFDELYLYCYYVAGTVGLMTVPVMGIAPDSKASTESVYNAALALGIANQLTNILRDVGEDARRGRIYLPLDELAQAGLTEDDIFRGKVTDKWRGFMKGQIKRARLFFDEAEKGVAHLDSASRWPVLASLWLYRQILDAIE

SEQ ID NO: 112814 - protein, 607 aa, Setaria italica
  Transcript Sequence Number=SeqID_46840
  Gene Ontology: Mol. function=protein serine/threonine kinase activity; Cellular component=plasma membrane; Biological process =protein amino acid phosphorylation
  Homolog annotation: Hit_ID=Q75I96; Match level="QueryCoverage=99%, HitCoverage=99%, E-value=0.0, Identity=80%"; Hit description =BRASSINOSTEROID INSENSITIVE 1-associated receptor kinase 1, putative, expressed
  Pfam annotation: Domain name=LRRNT_2; Domain location=21-61; Score =45.1; E_value=2.7e-10; Accession=PF08263.4; Description=Leucine rich repeat N-terminal domain
  Pfam annotation: Domain name=LRR_1; Domain location=113-135; Score =17.2; E_value=0.071; Accession=PF00560.25; Description=Leucine Rich Repeat
  Pfam annotation: Domain name=LRR_1; Domain location=137-159; Score =11.6; E_value=1.8; Accession=PF00560.25; Description=Leucine Rich Repeat
  Pfam annotation: Domain name=LRR_1; Domain location=161-184; Score =12.4; E_value=1.3; Accession=PF00560.25; Description=Leucine Rich Repeat
  Pfam annotation: Domain name=LRR_1; Domain location=89-111; Score =17.8; E_value=0.045; Accession=PF00560.25; Description=Leucine Rich Repeat
  Pfam annotation: Domain name=Pkinase; Domain location=284-558; Score =120.0; E_value=7.6e-33; Accession=PF00069.17; Description=Protein kinase domain
  Pfam annotation: Domain name=Pkinase_Tyr; Domain location=284-558; Score=92.7; E_value=1.3e-24; Accession=PF07714.9; Description =Protein tyrosine kinase
  Pfam module annotation: Pfam domain module=LRRNT_2::LRR_1::LRR_1::LRR_ 1::LRR_1::Pkinase::Pkinase_Tyr; Domain location=21-61::113-135::137 -159::161-184::89-111::284-558::284-558
MRKLGFAVLILVVSLPCFSASDRQGDALYDMKQKLNATGGQLSDWNQNQVNPCTWNSVICDSSNNVVQVTLAARGFTGVLSPRIGELQYLSVLSLAGNRITGSIPEEFGNLSSLTSLDLEDNLLAGEIPASLGNLSKLQLLILSQNGFNGPIPDSIANISSLTDIRLAYNNLTGQIPDSLFQVARYNFSGNHLNCGPNFPQSCASSMSYQSGSHSSKVGLILGTVGGVIGLLIVGVLFLICNARRRSHLREVFVDVAGEDDRRIAFGQLKRFAWRELQIATDNFNERNVLGQGGFGKVYKGVLPDATKIAVKRLTDYESPGGEAAFLREVELISVAVHRNLLRLIGFCTTQTERLLVYPFMQNLSVAYRLREFKPGEPILDWPERKQVAIGTARGLEYLHEHCNPKIIHRDVKAANVLLDEDFEPVVGDFGLAKLVDVQKTSVTTQVRGTMGHIAPEYLSTGKSSERTDVFGYGIMLLELVTGQRAIDFSRLEEEDDVLLLDHVKKLQREGQLDSIVDGNLNQNYDNEELEMIIQIALLCTQASPEDRPSMSEVVRMLEGEGLAERWEEWQQVEVTRRQDYERMQRRFDWGEDSVYNQEAIELSAGR

SEQ ID NO: 112815 - protein, 113 aa, Setaria italica
  misc_feature (86)..(86): Xaa can be any naturally occurring amino acid
  Transcript Sequence Number=SeqID_46841
  Gene Ontology: Mol. function=thiamin-phosphate diphosphorylase activity; Biological process=thiamin biosynthetic process
  Homolog annotation: Hit_ID=Q2UVH9; Match level="QueryCoverage=80%, HitCoverage=16%, E-value=8e-42, Identity=91%"; Hit description =Phosphomethylpyrimidine kinase/thiamin-phosphate pyrophosphorylase
  Pfam annotation: Domain name=Phos_pyr_kin; Domain location=39-113; Score=-102.2; E_value=7.2e-05; Accession=PF08543.4; Description =Phosphomethylpyrimidine kinase
PSPTSSSRVSPSPRIRPRRLAVAARAMPWPHVLTVAGSDSGAGAGIQADIKACAALGAYCSSVITAVTAQNTVGVQGVHAVPEEFXGEQLRSVLSDMSVDVVKTGMLPSAGIV

SEQ ID NO: 112816 - protein, 247 aa, Setaria italica
  Transcript Sequence Number=SeqID_46842
  Homolog annotation: Hit_ID=B9RR11; Match level="QueryCoverage=99%, HitCoverage=41%, E-value=4e-73, Identity=56%"; Hit description =Electron transporter, putative
  Pfam annotation: Domain name=DUF547; Domain location=136-247; Score =133.9; E_value=5.1e-37; Accession=PF04784.6; Description=Protein of unknown function, DUF547
NLWNNPNELSEEMVRCMRNIFLRLSESSKIWPKASSDCSSSSAERLSGSTLASFSDSSIIPSMLRSPSVDSNHNDETMKEVRNFDPYKVNGKETRRDIGNYRSAAEVSWMSVGKDQLEYASEALKMFRFLVEQLSKVNPSSMNRDQRLAFWINLYNALIMHAYLAYGVPRNDIKLFSLMQKACYTVGGQSISAAEIEFVILKMKTPVHRPQLSLMLALNKFKITEDHKKYSIDEFEPLVLFGLSCGM

SEQ ID NO: 112817 - protein, 52 aa, Setaria italica
  Transcript Sequence Number=SeqID_46843
  Gene Ontology: Mol. function=transition metal ion binding
  Homolog annotation: Hit_ID=B6T667; Match level="QueryCoverage=100%, HitCoverage=44%, E-value=2e-23, Identity=98%"; Hit description =Cytochrome b5
  Pfam annotation: Domain name=Cyt-b5; Domain location=1-50; Score=4.2; E_value=0.052; Accession=PF00173.20; Description=Cytochrome b5-like HemeSteroid binding doma
YDVTPYVEEHPGGDAILNNAGGDSTEGFFGPQHGTRVFDIIDDFCIGQLKAS

SEQ ID NO: 112818 - protein, 44 aa, Setaria italica
  Transcript Sequence Number=SeqID_46844
TAIELYSSAYYHLDKSNQQSIGKHEPSWHHAIQHKVRGCLDSRC

SEQ ID NO: 112819 - protein, 51 aa, Setaria italica
  Transcript Sequence Number=SeqID_46845
  Gene Ontology: Mol. function=hydrolase activity; Biological process =metabolic process
  Homolog annotation: Hit_ID=B6UC04; Match level="QueryCoverage=94%, HitCoverage=13%, E-value=2e-09, Identity=62%"; Hit description =Gibberellin receptor GID1L2
AYVDALRASGWGGRARLYVTPGEGHCYFLNNIASPKAAAHMATLAAFINGS

SEQ ID NO: 112820 - protein, 162 aa, Setaria italica
  Transcript Sequence Number=SeqID_46846
  Gene Ontology: Mol. function=potassium channel activity; Cellular component=integral to membrane; Biological process=potassium ion transport
  Homolog annotation: Hit_ID=B5BNY0; Match level="QueryCoverage=99%, HitCoverage=39%, E-value=2e-65, Identity=78%"; Hit description =Putative outwardly rectifying potassium channel
  Pfam annotation: Domain name=Ion_trans_2; Domain location=72-154; Score=39.9; E_value=1e-08; Accession=PF07885.8; Description=Ion channel
  Subcellular localization annotation: CTP_CleavageSite=47; ConfidenceScore=5.12e-01
KSNCKANFNTPNHLPPTNENTNMVSPSNIQRVHSSPSIFTSSKETPYADEIDYQSHATTAQYTPSIARQAIVSVILYISIGVLVYMTNVEGFKGKSTFKLVDALYFTIISLCTIGYGDIVPCTNFTKVFTCLFLLVGVRFVDIMLNGLLTNVLDKQRAVLLS

SEQ ID NO: 112821 - protein, 321 aa, Setaria italica
  Transcript Sequence Number=SeqID_46847
  Gene Ontology: Mol. function=electron carrier activity; Cellular component=extracellular region; Biological process=response to oxidative stress
  Homolog annotation: Hit_ID=Q5I3F2; Match level="QueryCoverage=98%, HitCoverage=97%, E-value=1e-141, Identity=79%"; Hit description =Peroxidase 6
  Pfam annotation: Domain name=peroxidase; Domain location=41-283; Score=461.4; E_value=1.3e-135; Accession=PF00141.15; Description =Peroxidase
  Subcellular localization annotation: CTP_CleavageSite=42; ConfidenceScore=5.26e-01
MAASFRTWHCLVALLMLASVAQGQLSPSFYATTCPTLGLIVRATMIKALLLERRMGASLVRLFFHDCFVQGCDASILLDDVGSFVGEKGAGPNVNSVRGYEVIDQIKANVELLCPGVVSCADIVALAARDSTFLLGGPTWAVPLGRRDSTTASQSLANSDLPSPASDLATLITAFGNKGLSARDMTALSGAHTIGFSQCQNFRDHIYNDTDINPAFAALRRRTCPAAAGSGDGNLAPLDVTTQLLFDNAYYGNLLVRRGLLHSDQELFNGGSQDALVQQYSANPALFAADFVTAMIKMGSIRPLTGSAGQIRANCRVVNSR

SEQ ID NO: 112822 - protein, 100 aa, Setaria italica
  misc_feature (91)..(91): Xaa can be any naturally occurring amino acid
  Transcript Sequence Number=SeqID_46848
  Gene Ontology: Mol. function=hydrolase activity, acting on acid anhydrides, catalyzing transmembrane movement of substances; Cellular component=integral to membrane; Biological process =metabolic process
  Homolog annotation: Hit_ID=Q8H1X2; Match level="QueryCoverage=100%, HitCoverage=10%, E-value=1e-28, Identity=64%"; Hit description =Plasma membrane P-type proton pump ATPase
  Pfam annotation: Domain name=Cation_ATPase_N; Domain location=10-90; Score=111.6; E_value=2.7e-30; Accession=PF00690.18; Description =Cation transporterATPase, N-terminus
MADKEGNLDAVLKEAVDLENIPLEEVFENLRCSHGGLTSEQAQQRLQIFGPNKLEEKEESKFLKFLGFMWNPLSWVMEAAAIMAIALANGXGGKPPDWQD

SEQ ID NO: 112823 - protein, 56 aa, Setaria italica
  Transcript Sequence Number=SeqID_46849
HRRSYSFNPCHILNQILSVHSLTLPCELFIHRTSISIQRPYLSRVTNNHLISTELN

SEQ ID NO: 112824 - protein, 159 aa, Setaria italica
  Transcript Sequence Number=SeqID_46850
  Gene Ontology: Mol. function=alpha-mannosidase activity; Cellular component=plasma membrane; Biological process=carbohydrate metabolic process
  Homolog annotation: Hit_ID=Q8W348; Match level="QueryCoverage=73%, HitCoverage=20%, E-value=3e-57, Identity=82%"; Hit description =Putative alpha-mannosidase
  Pfam annotation: Domain name=Glyco_hydro_38; Domain location=46-159; Score=-39.8; E_value=1.1e-07; Accession=PF01074.14; Description =Glycosyl hydrolases family 38
MAPPLLPLLPLVAAVALALAASTEATAAFAVASNATAPATVAGKLNVHLVAHSHDDVGWLKTVDQYYVGSNNSIQGACVLNTLDSVVDALARDPARKFVVVEQAFFQRWWAEKSPAIQDIVHKLVDSGQLEFINGGWCMHDEAAVHYIDMIDQTTLGHR

SEQ ID NO: 112825 - protein, 162 aa, Setaria italica
  Transcript Sequence Number=SeqID_46851
  Gene Ontology: Mol. function=catalytic activity; Cellular component =integral to membrane; Biological process=metabolic process
  Homolog annotation: Hit_ID=Q6RBX9; Match level="QueryCoverage=100%, HitCoverage=26%, E-value=2e-55, Identity=66%"; Hit description =Glossy1 protein
  Pfam annotation: Domain name=FA_hydroxylase; Domain location=1-96; Score=34.5; E_value=1.5e-08; Accession=PF04116.5; Description=Fatty acid hydroxylase
YHSLHHSSRVPQPFTAGSATPLEGIVLAAAMALPLAGACAAGCGSVALAFAYVLAFDSLRAMGHCNVEVFPSSLFQAIPVLRYLIYTPTYHTIHHTKREANFCLFMPLFDLLGGTLDDQSWEMQKQTSAGVDEVPDFVFLAHVVDVMQSLHVPFVLRTFAST

SEQ ID NO: 112826 - protein, 57 aa, Setaria italica
  Transcript Sequence Number=SeqID_46852
  Subcellular localization annotation: CTP_CleavageSite=23; ConfidenceScore=5.31e-01
YSFMTEFSVHQKRRCSTSPTKISLSTPSSFGVVLDPWRIVFPRSCQLLKCVSFTARR

SEQ ID NO: 112827 - protein, 229 aa, Setaria italica
  misc_feature (72)..(72): Xaa can be any naturally occurring amino acid
  Transcript Sequence Number=SeqID_46853
  Gene Ontology: Mol. function=protein serine/threonine kinase activity; Cellular component=ubiquitin ligase complex; Biological process=ubiquitin-dependent protein catabolic process
  Homolog annotation: Hit_ID=B9RK56; Match level="QueryCoverage=92%, HitCoverage=27%, E-value=9e-71, Identity=57%"; Hit description=ATP binding protein, putative
  Pfam annotation: Domain name=U-box; Domain location=153-226; Score =80.1; E_value=8e-21; Accession=PF04564.7; Description=U-box domain
LQGRDKKYGRTSASPKLISDLVPDWQTEYKETIVAGTLYYMDPEYQQTGTVRPKSDVFALGVIMLQLLTGRXPNGLIVSAENAIKNGRLHDILDKSQSDWPIDEAEMFANLGLKCTALKCRDRPDLESEVLLKLDEILHRITSSVNLRNPKLSVPSHFICPITQELMEDPHVAADGHTYEHYAIRAWLKRHKTSPVTRSKFPNSSIIPNHSLRAAIQQWKSQLPDQTKT

SEQ ID NO: 112828 - protein, 61 aa, Setaria italica
  Transcript Sequence Number=SeqID_46854
AVFKFLIVHYFFCLNFKRSIACNILSSEAEYFLLIAVFKLLIGKNGFCVYRVKFIFLSEQL

SEQ ID NO: 112829 - protein, 177 aa, Setaria italica
  Transcript Sequence Number=SeqID_46855
  Gene Ontology: Cellular component=integral to membrane
  Homolog annotation: Hit_ID=B6TJT4; Match level="QueryCoverage=93%, HitCoverage=61%, E-value=9e-70, Identity=78%"; Hit description =Rhomboid family protein
  Subcellular localization annotation: CTP_CleavageSite=47; ConfidenceScore=5.65e-01
AQQLLLLLPAPSRAFSKPLPSPTPAFSSLYRHHRVSFSAASRRDLLRCGMKRSGLVAELEIAKDKQPQSRRANGIFWILLLNFGVYLADHLFQIRQIKALYLYHACPTWYQFVTSTFCHANWNHLSSNLFFVYIFGKLVEEDEGNFALWMSYILTGAGANLISWLVLPTSSVSLGAS

SEQ ID NO: 112830 - protein, 137 aa, Setaria italica
  Transcript Sequence Number=SeqID_46856
  Gene Ontology: Cellular component=integral to membrane
  Homolog annotation: Hit_ID=B6TJT4; Match level="QueryCoverage=97%, HitCoverage=48%, E-value=1e-63, Identity=90%"; Hit description =Rhomboid family protein
  Pfam annotation: Domain name=Rhomboid; Domain location=1-122; Score= -6.4; E_value=0.0031; Accession=PF01694.14; Description=Rhomboid family
SKYTGKLVEEDEGNFALWMSYIWTGAGANLISWLVLPTSSVSLGASGAVFGLFTISVLVKMSWDWRKILEVLILGQFVVDKVMEAARATTITGQSFQVNNIAHVSGALIGAALVFLVSRIAFSSNGDSPKTTKESNK

SEQ ID NO: 112831 - protein, 183 aa, Setaria italica
  Transcript Sequence Number=SeqID_46857
  Pfam annotation: Domain name=Tryp_alpha_amyl; Domain location=38-121; Score=9.6; E_value=0.035; Accession=PF00234.14; Description=Protease inhibitorseed storageLTP f
  Subcellular localization annotation: CTP_CleavageSite=90; ConfidenceScore=5.63e-01
MASSAASFVAIAVALMAFLQPAATSPPAPPATGVPTTCSYTLITLFDCLPFLSLSTSLSGPSATCCTRLRSVLASPGSICLCHLIGGGVSDFARTNIDPVRLALLPFVCLAIVPPQLPARCLVGPVPPIRNDTSSPALPPPSHLYCRVAKIHARPVQAVAKFHRMHVCNKSRCFFSSFFFIFN

SEQ ID NO: 112832 - protein, 191 aa, Setaria italica
  Transcript Sequence Number=SeqID_46858
  Gene Ontology: Cellular component=integral to membrane
  Homolog annotation: Hit_ID=B6U937; Match level="QueryCoverage=98%, HitCoverage=50%, E-value=4e-95, Identity=90%"; Hit description =Organic anion transporter
  Pfam annotation: Domain name=TPT; Domain location=1-111; Score=87.8; E_value=3.9e-23; Accession=PF03151.8; Description=Triose-phosphate Transporter family
ILLPSLYYIAPCSFIFLFIPWYLLEKPEMDVSQIQFNYSIFFLNALSAFALNISIFLVIGRTGAVTIRVAGVLKDWILIALSTIIFPESVITSLNIIGYAVALSGVVLYNYLKMKDVKANQLPADNNPDRSTKDKKALNTYRPDNSMDSNDGTVIGGLASEGAAADEEAPLIPSARLSYVTRTQTGSFSNR

SEQ ID NO: 112833 - protein, 93 aa, Setaria italica
  Transcript Sequence Number=SeqID_46859
  Gene Ontology: Mol. function=carbonate dehydratase activity; Biological process=one-carbon compound metabolic process
  Homolog annotation: Hit_ID=B6TPU4; Match level="QueryCoverage=44%, HitCoverage=11%, E-value=2e-15, Identity=92%"; Hit description =Carbonic anhydrase
ELIDEVVDPRRPVSRSTVYYRYTGSFTTPPCTEGVTWVVAHQVRRVTRRQIRLLRNAVNDGARRNARPLQEANGRSVAFYYASPAHGRRATGD

SEQ ID NO: 112834 - protein, 38 aa, Setaria italica
  Transcript Sequence Number=SeqID_46860
AELVLLDEVTISLHVTCHVSNLNLLLIKRIYQHQLAIS

SEQ ID NO: 112835 - protein, 996 aa, Setaria italica
  Transcript Sequence Number=SeqID_46861
  Gene Ontology: Mol. function=protein serine/threonine kinase activity; Cellular component=microtubule cytoskeleton; Biological process=protein amino acid phosphorylation
  Homolog annotation: Hit_ID=B9T5A7; Match level="QueryCoverage=98%, HitCoverage=77%, E-value=0.0, Identity=68%"; Hit description=Kinase, putative
  Pfam annotation: Domain name=APH; Domain location=584-759; Score=2.4; E_value=0.001; Accession=PF01636.15; Description=Phosphotransferase enzyme family
  Pfam annotation: Domain name=Pkinase; Domain location=582-873; Score =308.6; E_value=1.3e-89; Accession=PF00069.17; Description=Protein kinase domain
  Pfam annotation: Domain name=Pkinase_Tyr; Domain location=582-880; Score=23.3; E_value=2.8e-15; Accession=PF07714.9; Description =Protein tyrosine kinase
  Pfam module annotation: Pfam domain module=APH::Pkinase::Pkinase_Tyr; Domain location=584-759::582-873::582-880
KVFQHAHELNRKGCVPFPFWKPRGIYNLKEVIKVIQVRFEKAKEEVNSDLAVFAGDLVSVMEKYAESHPEWKETLEDLLILARSCCVMTPGEFWLQCEGIVQDLDDHRQELPMGVLKKLYTRMLFILTRCTRLLQFHKENGFDEGEVVIDHRDKIIQSADRQILSQSGVDDATSRASKSEARKSYSQEQHNMKWKRSQEIKPVKLIPPLDTDIKKEADSPTKERMSSWKPFPSPVIKAPKESTPTKSESPNKKTDAHSTVSNHVELSSPVESVPQQQLPSKHQHKTSWGHWSDQPNISEEGSIMCRICEEYVPTHYVEDHSRVCAVADRCDQKGVSVDERLIRVAETLEKLVESYSQKDLPNAAGSPDVAKVSNSSINEESDGPSPKLSDWSRRGSADMLDYLQEADNTISLDDFKNLPSMTCKTRFGPKSDHGMATSSAGSMTPRSPLTTPRSNHIDMLLAGKNAINESDDLPQIVELADIARCIANTPLDEESALSQMVTCIEDLQEIVNRRKHEALTVQTFGTRIEKLHREKYLQLCDSVDMDKVDSASTIMDEEDDVVRSLRASPVHPVKDRTSIDDFEIMKPISRGAFGRVFLAKKRTTGDLFAIKVLRKADMIRKNAVESILAERDILITVRNPFVVRFFYSFTSRENLYLVMEYLNGGDLYSLLRNLGCLDEDVARVYLAEVVLALEYLHSMQIVHRDLKPDNLLIAHDGHIKLTDFGLSKVGLINSTDDLSGPAVSGASLYGDDEPQMSELEQMDHRARRQNRSAVGTPDYLAPEILLGTGHGCSADWWSVGVILFELIVGIPPFNAEHPQTIFDNILNRKIPWPHVPEEMSVEARDLIAKLLTEDPHQRLGANGASEVKRHPFFKDISWDTLARQKAAFVPSSDSAFDTSYFTSRYSWNPSDENIYEAYESEDSSDNGSLSGSSSCVSNRQDDMGEDSSGLNEFESSANVNYSFSNFSFKNLSQLASINYDMLTKGLKDDPPPRSET

SEQ ID NO: 112836 - protein, 191 aa, Setaria italica
  misc_feature (22)..(22): Xaa can be any naturally occurring amino acid
  misc_feature (173)..(173): Xaa can be any naturally occurring amino acid
  Transcript Sequence Number=SeqID_46862
MVVGVHLTSLRSIHLVNCLFWXTIPHPQQLPVLQEMHLINLSRVRKIEVGPLKILELRRLQNLRQFTFFDKEQSHANLQVLEVEGCPKLNEFLSQIFMSSSEHKFLSLHRLQIKNDFILSTIPLLELIVIDSLADIDLRCDHQPGFGGLRLKPSCISNGIGVQIEGNEYIQKXDERLFALNKLRNLQELEI

SEQ ID NO: 112837 - protein, 74 aa, Setaria italica
  misc_feature (44)..(44): Xaa can be any naturally occurring amino acid
  Transcript Sequence Number=SeqID_46863
  Gene Ontology: Mol. function=protein serine/threonine kinase activity; Cellular component=intrinsic to membrane; Biological process=protein amino acid phosphorylation
  Homolog annotation: Hit_ID=B9RJB4; Match level="QueryCoverage=100%, HitCoverage=13%, E-value=3e-26, Identity=74%"; Hit description =Mitogen-activated protein kinase kinase kinase, putative
EITLLSRLEHENIVQYFGTDKEGGKLYIFLELVTQGSLAALYQXYHLQDSQNSAYTRQILNGLLYIHQRNVLHR

SEQ ID NO: 112838 - protein, 142 aa, Setaria italica
  misc_feature (36)..(36): Xaa can be any naturally occurring amino acid
  misc_feature (53)..(53): Xaa can be any naturally occurring amino acid
  Transcript Sequence Number=SeqID_46864
  Gene Ontology: Mol. function=protein serine/threonine kinase activity; Cellular component=intrinsic to membrane; Biological process=protein amino acid phosphorylation
  Homolog annotation: Hit_ID=B9RJB4; Match level="QueryCoverage=54%, HitCoverage=13%, E-value=5e-24, Identity=67%"; Hit description =Mitogen-activated protein kinase kinase kinase, putative
MFQLLFVTEIEEITLLSRLEHENIVQYFGTDKEVTXKLYSFLELVTQGSLAAXYQKYHLQDSQNSAYTRQILNGLLYIHQRNVLHRTLWSSKKEAKTIQLNLLHNINMEEGKLRPRKKIKPWRRWRMRTVAGRGLTTAERRQ

SEQ ID NO: 112839 - protein, 66 aa, Setaria italica
  Transcript Sequence Number=SeqID_46865
  Homolog annotation: Hit_ID=Q704V3; Match level="QueryCoverage=69%, HitCoverage=28%, E-value=8e-11, Identity=71%"; Hit description=Zinc finger protein
  Pfam annotation: Domain name=zf-LSD1; Domain location=30-54; Score =42.7; E_value=1.5e-09; Accession=PF06943.4; Description=LSD1 zinc finger
SYLCAFLSFKYCCYLFFPSLPAHQVGKLYCGPCDTLLMYPFGAPAVKCSNCLFVTEIEVSELPLIT

SEQ ID NO: 112840 - protein, 93 aa, Setaria italica
  Transcript Sequence Number=SeqID_46866
  Gene Ontology: Mol. function=protein serine/threonine kinase activity; Cellular component=intrinsic to membrane; Biological process=protein amino acid phosphorylation
  Homolog annotation: Hit_ID=B9RJB4; Match level="QueryCoverage=97%, HitCoverage=16%, E-value=4e-36, Identity=78%"; Hit description =Mitogen-activated protein kinase kinase kinase, putative
SIIFPLFQEITLLSRLEHENIVQYFGTDKEGGKLYIFLELVTQGSLAALYQKYHLQDSQVSAYTRQILNGLLYLHQRNVLHRDIKCANILVDA

SEQ ID NO: 112841 - protein, 150 aa, Setaria italica
  Transcript Sequence Number=SeqID_46867
  Gene Ontology: Cellular component=ribosome
  Homolog annotation: Hit_ID=Q704V3; Match level="QueryCoverage=58%, HitCoverage=53%, E-value=2e-29, Identity=71%"; Hit description=Zinc finger protein
  Pfam annotation: Domain name=Ribosomal_S27e; Domain location=69-123; Score=-5.0; E_value=0.098; Accession=PF01667.9; Description =Ribosomal protein S27
  Pfam annotation: Domain name=zf-LSD1; Domain location=59-83; Score =29.5; E_value=1.3e-05; Accession=PF06943.4; Description=LSD1 zinc finger
  Pfam annotation: Domain name=zf-LSD1; Domain location=97-121; Score =44.5; E_value=4.2e-10; Accession=PF06943.4; Description=LSD1 zinc finger
  Pfam module annotation: Pfam domain module=Ribosomal_S27e::zf -LSD1::zf-LSD1; Domain location=69-123::59-83::97-121
RAKRGHCHSQSSIHLLPPVKNTNCSPEVAPPGYENLDSSEQLPLPPPLSMKFEMGQMVCGCCRQLLAYPKGAVHVQCFGCWTINLVLEEHQVGKVYCGECDTLLMYPFGAPAVKCSNCLFVTEIGERNVRPRISTEQSVSPHPQEVAHQS

SEQ ID NO: 112842 - protein, 62 aa, Setaria italica
  Transcript Sequence Number=SeqID_46868
YIRNTGCTERRRRGRRCTYHAWPGRGQEYQRHERQGKSSHFQYSKVEKLNEKNIHVINNGPL

SEQ ID NO: 112843 - protein, 90 aa, Setaria italica
  Transcript Sequence Number=SeqID_46869
KHPGGFDVVLGADICFQQSSISSLFDTVERIIRTQAGNCRFILAYVSRAKVMDGLVFKEAEKHGMCVREVDGTRTTISNLEGVIFDITLK

SEQ ID NO: 112844 - protein, 75 aa, Setaria italica
  Transcript Sequence Number=SeqID_46870
LSTFNTGSNRSCLLRTMLHICVLPLCPKKITKSRHIKASMWLIHLVGIRTHVYLMNATRQLPIKHTSYSKTMIEL

SEQ ID NO: 112845 - protein, 49 aa, Setaria italica
  Transcript Sequence Number=SeqID_46871
GGRGEAEPGRARLFSRAAAAGGDRVQESYTDYKPLNWKCRCADRRALDP

SEQ ID NO: 112846 - protein, 133 aa, Setaria italica
  Transcript Sequence Number=SeqID_46872
  Homolog annotation: Hit_ID=Q68Y46; Match level="QueryCoverage=77%, HitCoverage=23%, E-value=2e-12, Identity=43%"; Hit description =Unknow protein
MSSPVTDAFEAVVPSESRNNNDGPVVKEGNKTSDEEEARSNAVADGDDGKKGSPEVELLRAKLMAKDMEVYELRARLMVIDTEVDDLKRKVMSKGTELEEMKAKLMLNDELDAEIAALEADNADLTKVAEDGR

SEQ ID NO: 112847 - protein, 109 aa, Setaria italica
  Transcript Sequence Number=SeqID_46873
  Gene Ontology: Mol. function=structural constituent of ribosome; Cellular component=small ribosomal subunit; Biological process =translation
  Homolog annotation: Hit_ID=Q9FPT7; Match level="QueryCoverage=99%, HitCoverage=98%, E-value=3e-47, Identity=83%"; Hit description =Ribosomal protein S10
  Pfam annotation: Domain name=Ribosomal_S10; Domain location=5-93; Score=71.7; E_value=2.6e-18; Accession=PF00338.14; Description =Ribosomal protein S10pS20e
  Subcellular localization annotation: CTP_CleavageSite=14; ConfidenceScore=5.18e-01
MAAKIRVVMKSFTSQSNKVSGLLPYTKKVGLPESRALFTVLRSPHIDKKSREQFSMHIKKQFVEQKAEMHELHKKLFWLKRLRIPGAQYEVQISFKTRLDKGSLKSLAS

SEQ ID NO: 112848 - protein, 163 aa, Setaria italica
  misc_feature (120)..(120): Xaa can be any naturally occurring amino acid
  misc_feature (134)..(134): Xaa can be any naturally occurring amino acid
  Transcript Sequence Number=SeqID_46874
  Gene Ontology: Mol. function=pyridoxal phosphate binding; Cellular component=peroxisome; Biological process=metabolic process
  Homolog annotation: Hit_ID=A6N1A8; Match level="QueryCoverage=100%, HitCoverage=78%, E-value=3e-55, Identity=71%"; Hit description =Serine-glyoxylate aminotransferase (Fragment)
MADYVYGPGRTHLFVPGPVNIPDPVIRAMNRQNEDYRSPAVPVLTKILLEDVKKIFKTTTGTPFIIPTTGTGAWESALTNTLSPGDRIVSFLIGQFSLLWIDQQQRLGFNVDVVESDWGXGAPDLDVLEAKLRXDTDPTTNTKRTQIPTQSVHNETATGVTND

SEQ ID NO: 112849 - protein, 345 aa, Setaria italica
  Transcript Sequence Number=SeqID_46875
  Gene Ontology: Mol. function=pyridoxal phosphate binding; Cellular component=peroxisome; Biological process=metabolic process
  Homolog annotation: Hit_ID=Q3S2I1; Match level="QueryCoverage=95%, HitCoverage=82%, E-value=1e-159, Identity=84%"; Hit description =Serine-glyoxylate aminotransferase
  Pfam annotation: Domain name=Aminotran_5; Domain location=4-304; Score=-65.4; E_value=2.1e-08; Accession=PF00266.11; Description =Aminotransferase class-V
TTTGTPFIIPTTGTGAWESALTNTLSPGDRIVSFLIGQFSLLWIDQQQRLGFNVDVVESDWGRGADLDVLEAKLRQDTAHTIKAIAIVHNETATGVTNDLATVRKLLDTYRHPALILVDGVSSICALDFRMDEWGVDVALTGSQKALSMPTGLGIVCASPKALEASKTAKSVRVFFDWNDYLKSYKIGSYWPYTPSIQLLYGLRAALDLLFLEGLDNVFKRHKRLGTATRLAVEAWGLKNCTQKEEWFSDTVTAVVVPPYIDSGEIVKHAWKRYNLSLGLGLNKVAGKVFRIGHLGNLNELQLLGCLSGVEMVLKDVGYPVKLGSGVAAAAAYLSNSTPLIPSRI

SEQ ID NO: 112850 - protein, 60 aa, Setaria italica
  Transcript Sequence Number=SeqID_46876
  Subcellular localization annotation: CTP_CleavageSite=39; ConfidenceScore=5.09e-01
STKTISPTVHRDFELVTWMVFLFAQKFKQAVTNNTQFVSNFQRSNSVSIQHTLETQKGIY

SEQ ID NO: 112851 - protein, 74 aa, Setaria italica
  Transcript Sequence Number=SeqID_46877
RANYSRKLHGLQEQNAQELTFTQNKTLSYSIIKCSTLCNIIFVLSFYSSETTRRASCNPANLRGLGLGAGGDLA

SEQ ID NO: 112852 - protein, 517 aa, Setaria italica
  Transcript Sequence Number=SeqID_46878
  Gene Ontology: Mol. function=protein binding; Cellular component =chloroplast; Biological process=iron-sulfur cluster assembly
  Homolog annotation: Hit_ID=B9RXM8; Match level="QueryCoverage=91%, HitCoverage=85%, E-value=0.0, Identity=76%"; Hit description=Protein sufB, putative
  Pfam annotation: Domain name=UPF0051; Domain location=248-488; Score =431.3; E_value=1.5e-126; Accession=PF01458.9; Description =Uncharacterized protein family (UPF0051)
YGPGRRASVRRRGRLSVVAVQTGPQKPSPSSSRAAAAEDEADALQKLLKREYKYGFVSDFESFSIPKGLSEATVRRISELKAEPAWMLDFRLAAYRRFLTMVEPTWSDNEYAPVDLQSLCYYSAPKTKPKLNSLDEVDPELLKTFDRLGIPLTEQKRLTNVAVDAVIDSTSIATTHREALMAKGVIFCSISEAIREYPDLVKRYLGSIVPPGDNYYAALNSAVFSDGSFCYVPKDTVCPMEISTYFRINDKETGQFERTLIVADERSTVSYLEGCTAPAYDSNQLHAAVVELVCEEGAEIKYSTVQNWYSGDEEGKGGIYNFVTKRGRCKGRGSKISWTQVETGSAITWKYPSVELVGDDTVGEFYSVALTKDCQQADTGTKMIHKGKNSRSRIISKGISAGKSRNCYRGLVQMNAGAENAYNSSQCDSLLIGDNAAANTYPTIQVGCTSGRVEHEASTSKIGEDQLFYFQQRGVDHEKAVAAMIGGFCRAVFEHLPYEFAQEVDALMNLKLEGSVG

SEQ ID NO: 112853 - protein, 168 aa, Setaria italica
  Transcript Sequence Number=SeqID_46879
  Gene Ontology: Mol. function=sequence-specific DNA binding; Cellular component=nucleus; Biological process=regulation of transcription, DNA-dependent
  Homolog annotation: Hit_ID=B6TQB9; Match level="QueryCoverage=80%, HitCoverage=36%, E-value=1e-17, Identity=44%"; Hit description=GATA zinc finger family protein
MASFVAHHHGSLVEREGRMAALRSSLRPCEAAEEVDVAPAACGAADRGAGLFGDGFSVEDLLDLEDLCEVDKDCAELGEATPAPAAVEEDKLSSDSHGSSVVSYELMALPPPVIDLSLPAHDAEELEWVSRIMDDSLAELPPPPKLPAAPLAAAARRPPLERAVPAPD

SEQ ID NO: 112854 - protein, 63 aa, Setaria italica
  Transcript Sequence Number=SeqID_46880
  Subcellular localization annotation: CTP_CleavageSite=42; ConfidenceScore=5.35e-01
AGRPFQGKKASLLLNHLINAFGLSRLVYFYEPRTFPSVSIVLSSSVVPSVLFRSYITSVTTCC

SEQ ID NO: 112855 - protein, 71 aa, Setaria italica
  Transcript Sequence Number=SeqID_46881
  Subcellular localization annotation: CTP_CleavageSite=56; ConfidenceScore=5.08e-01
RRRRTPRGVVRPRAHSGSPRVRCPYHLSLLPRADNQHPRRRRRGVLRRRCRPGEVRARRPRPCRRREAAPR

SEQ ID NO: 112856 - protein, 62 aa, Setaria italica
  Transcript Sequence Number=SeqID_46882
  Subcellular localization annotation: CTP_CleavageSite=41; ConfidenceScore=5.44e-01
MASKILYVAVVAAVAVSSFAGVAFAADAPAPSPTSGAAAVSSSLVAAVLCPAVALLLGNLRH

SEQ ID NO: 112857 - protein, 301 aa, Setaria italica
  misc_feature (70)..(70): Xaa can be any naturally occurring amino acid
  misc_feature (257)..(257): Xaa can be any naturally occurring amino acid
  misc_feature (277)..(277): Xaa can be any naturally occurring amino acid
  Transcript Sequence Number=SeqID_46883
NAIYHLASGEHLKAVKDFLRKHGGGMDQVDSLRISEDEVAKWEKSCESLSKGAKTGTEGLIGPSLGPMKXNGAYHPISAACHGAFSSGSVSYSAPYGTVGLPITAWGSSETHEQQGVLSTNCFHSTGPEMKGHQSTILGNGPSPSISYAAHVQQSHSGGNLSSGPKANVHTGAPPPWLKANEHDPKNFLLRSCGPPLKGKLRKLNPKRVGAAWAERRRAEMEMEKRGEIVPETSDSSWLPNFGGVWQSGTRKESRKXFEKKLKHHDTKSNHELSLEXKPNISKRMRAGVDKSEQLGSHMEQ

SEQ ID NO: 112858 - protein, 45 aa, Setaria italica
  Transcript Sequence Number=SeqID_46884
  Gene Ontology: Mol. function=transferase activity, transferring glycosyl groups; Cellular component=integral to membrane; Biological process=protein amino acid glycosylation
  Homolog annotation: Hit_ID=Q8L7F9; Match level="QueryCoverage=84%, HitCoverage=5%, E-value=4e-09, Identity=63%"; Hit description=Beta-1, 3-galactosyltransferase 15
CVLQEWPEEKYPPWAHGPGYVVSQDIARKINTWYKARHLKVCLFK

SEQ ID NO: 112859 - protein, 144 aa, Setaria italica
  misc_feature (116)..(116): Xaa can be any naturally occurring amino acid
  Transcript Sequence Number=SeqID_46885
  Homolog annotation: Hit_ID=Q2QNA8; Match level="QueryCoverage=95%, HitCoverage=36%, E-value=1e-58, Identity=76%"; Hit description=XH domain containing protein, expressed
  Pfam annotation: Domain name=XH; Domain location=5-137; Score=130.2; E_value=6.5e-36; Accession=PF03469.6; Description=XH domain
KENRGKLNEKAFKAACLAKLPPEEVGTASHELYSSWQQQLGDLSWYPFKTVTVDGNQQEIVNVDDEKLQELKRAWGSGAHNAVVNALVEMKGYGRLSDRSIAYELWNYKEGRRATXTECVSYMSNQVKQLSVTKRRKIRRSSGR

SEQ ID NO: 112860 - protein, 96 aa, Setaria italica
  Transcript Sequence Number=SeqID_46886
SILKQVMPQDKDQISRKKQDGDRQEAVQSTGEGSLEKKHLAAHVMNTLKRAVPFVGGHKQQGIDGSSDEKQMKIETMYGDELVNEVKGHLNEKRYI

SEQ ID NO: 112861 - protein, 181 aa, Setaria italica
  misc_feature (100)..(100): Xaa can be any naturally occurring amino acid
  Transcript Sequence Number=SeqID_46887
  Gene Ontology: Mol. function=nucleotide binding; Biological process =defense response
  Homolog annotation: Hit_ID=B5UBC0; Match level="QueryCoverage=76%, HitCoverage=13%, E-value=4e-40, Identity=65%"; Hit description=NBS -LRR class disease resistance protein
VTIPTQEKNKEGMKALRVLSGIEIVGESTAVDGLHQMIGLKKLAIYKLNIKKDGKIFTQLLSAITYLFSCGLQTLAINDEGSDFINSLDSMSAPPRYLIXPLETSTRTKLEKPPMWISGLYTLCKLTLSLTVLRTDTFKLLQVRRAHLEGSNENQSVFPSRPPFPPLGRRPTALISGAPNS

SEQ ID NO: 112862 - protein, 375 aa, Setaria italica
  Transcript Sequence Number=SeqID_46888
  Gene Ontology: Mol. function=nucleoside-triphosphatase activity; Biological process=apoptosis
  Homolog annotation: Hit_ID=B5UBC0; Match level="QueryCoverage=100%, HitCoverage=36%, E-value=1e-117, Identity=57%"; Hit description=NBS -LRR class disease resistance protein
  Pfam annotation: Domain name=NB-ARC; Domain location=181-374; Score= -93.0; E_value=0.0014; Accession=PF00931.14; Description=NB-ARC domain
MELVVGASEATMKSLLGKLGGLLAQEYALVRGVRGDVQYIYNELATMQAFLRDLSSAPEEQGHRMKDWMKQIRDMAYDCEDCIDDYAHRLPNDSITDVRCAFIVRTIYEVWTWWPRREIASNIADLKIRAQQIAERRGRYGVDNPSNCNGNSSRARAATYDIAEHQVASRQLIGMKEPVGVTADMEKLEEWVDKPDKEHGVLSIIGFGGVGKTTIAIAFYRKVSNKFDCRAWVNVSQNYDKEAVLRSILKQVMPQDKDQISRKKNFQDGDQEAVQSTGEGSSEKKHTLKLPFVRGHKQQGNDGSSDEKQMKIETMSGDVLVNEVKRHLKEKRYLLLIDDIWSAKTWVDIRNCLPVENKKRSRIIVTSRFQAVGAA

SEQ ID NO: 112863 - protein, 133 aa, Setaria italica
  Transcript Sequence Number=SeqID_46889
  Gene Ontology: Mol. function=nucleotide binding; Biological process =defense response
  Homolog annotation: Hit_ID=B5UBC0; Match level="QueryCoverage=100%, HitCoverage=10%, E-value=5e-27, Identity=54%"; Hit description=NBS -LRR class disease resistance protein
EKNKLDSDGEIIVPAGFSSLKLLRFFAPLVPKLGFGDNAMPALEMIQVRFEAFEGLFGIDTLENLREVHLRVNGLAAELKESDEVGTHETETPEIIKEKERKEAAEITRFLVEDLKNYTTDKLKVIVDYIINA

SEQ ID NO: 112864 - protein, 80 aa, Setaria italica
  Transcript Sequence Number=SeqID_46890
IGTAGISIPWHCVFLFHCQFISVSFCHVWLELLQQVHRSSVCWGCNKRGYPKGTIVIFMLCCTLFPIATIAWLGLAIISK

SEQ ID NO: 112865 - protein, 747 aa, Setaria italica
  Transcript Sequence Number=SeqID_46891
  Gene Ontology: Mol. function=nucleoside-triphosphatase activity; Biological process=defense response
  Homolog annotation: Hit_ID=B5UBC0; Match level="QueryCoverage=99%, HitCoverage=71%, E-value=0.0, Identity=64%"; Hit description=NBS-LRR class disease resistance protein
  Pfam annotation: Domain name=LRR_1; Domain location=374-395; Score =8.1; E_value=8.5; Accession=PF00560.25; Description=Leucine Rich Repeat
  Pfam annotation: Domain name=LRR_1; Domain location=397-418; Score =9.8; E_value=4.1; Accession=PF00560.25; Description=Leucine Rich Repeat
  Pfam annotation: Domain name=NB-ARC; Domain location=2-233; Score =4.9; E_value=1.4e-09; Accession=PF00931.14; Description=NB-ARC domain
  Pfam module annotation: Pfam domain module=LRR_1::LRR_1::NB-ARC; Domain location=374-395::397-418::2-233
VVRGHKQQGNDGSSDENQMKIETMSGDVLVNEVKRHLKEKRYLLLIDDIWSAKTWVDIRNCLPVENKKRSRIIVTSRFQAVGAACSPVGATNRLHPVDILDAAESKNLFNQSVHESKSSKESEKVQDKVLEEILKICGRLPLAIVSMAGLVACNPSKTSDHWDKVCKSLFPESVTTLSLDGVTRILDFCYNDLPGDLKTCALYLSMFPKGSKISMKRLTRRLTAEGFVSEKQGLTEEEVAETYFNQLMRRKLIRPVEHNSNGKVKTFLVHDMVLEYIVSKSSEENFITVVGGHWMMPPPSNKVRRLSMQSSGSKHENMTKNINLSQVRSVTVFGSLKQLPFHSFNNGIIQVLDLEGWKGLKEKHLKNHICKMLMLKYLSLRRTEIAKIPKKIAKLEYLETLDIRETHVEELPKSVEKLKRISSILGGNKNPRKGLRLPQEKIKEPKESTSAQEKSEDDIVTSTSTQEKNKEGMKALRVLSGIEIVGESTAVDGLHQMIGLKKLAIYKLNIKKDGKIFTQLLSAITYLFSCGLQTLAINDEGSDFINSLDSMSAPPRYLIALELSGKLERPPMWISGLYTLCKLTLSLTVLRTDTFKLLQVLPTLFSLTFSLSAAKQNQDIIKDILEKNKSDSDGEIVVPAGFPSLKLLRFFAPLVPKLGFRDNAMPELEMIQLRFETFEGLFGIDTLENLREVHLRVNGVAAEIKLLGRYEGTQETEAAEITNFLVENLKNYTTDKLKVIVDYTINA

SEQ ID NO: 112866 - protein, 94 aa, Setaria italica
  Transcript Sequence Number=SeqID_46892
STKECIRTSESMRSEALLGYYTQERHSHPAAQHPLSQNTQKGKAGKRVARPVGRNGMNSSNSSSNPCGQGQSIRHPGSRRAEPPRPAPPPRPTR

SEQ ID NO: 112867 - protein, 122 aa, Setaria italica
  misc_feature (80)..(80): Xaa can be any naturally occurring amino acid
  misc_feature (90)..(90): Xaa can be any naturally occurring amino acid
  Transcript Sequence Number=SeqID_46893
  Subcellular localization annotation: CTP_CleavageSite=75; ConfidenceScore=5.19e-01
ASPCGHRARMNSLSAETVVEGSYLVGPMSVPSKSRNLTSIGSFPPAISSPPDRRRPAAPPPLSKIHEAPDQRPIAATKRXKKSTETRARXDFDDEFLLPRGVKARGRRLGGEERKTRRKPER

SEQ ID NO: 112868 - protein, 82 aa, Setaria italica
  Transcript Sequence Number=SeqID_46894
CSKLCATFYVSNKQAFFSWMGHVCLSFGFIKSGYNYGLCSREELGSKNHFYKVTTPLYEVCLLEPASTILKLKQTSPGFSNS

SEQ ID NO: 112869 - protein, 236 aa, Setaria italica
  Transcript Sequence Number=SeqID_46895
  Gene Ontology: Mol. function=oxidoreductase activity; Biological process=oxidation reduction
  Homolog annotation: Hit_ID=B4FSX7; Match level="QueryCoverage=100%, HitCoverage=76%, E-value=4e-96, Identity=73%"; Hit description =Carbonyl reductase 1
PASAARLADFVRNKFGKLDVLVNNAGTMGVTMEVGEAAVKEIMSSGKDQNEIAEWLKQRTTQSTQQGEECLRINYHGTKKVTEALLPLVLSSADGRIINVTSAFGLLRFFSGEELRRELSGIDTLTKRRLDELSALFVEDLKRGELGRRGWPADRVYAAYQASKALVCAYTRILARENAGLRVNCVHPGYVETEMNCNTGNLTAAEGASVSVAVALAERGGVTGAYFDRTEMASFV

SEQ ID NO: 112870 - protein, 130 aa, Setaria italica
  Transcript Sequence Number=SeqID_46896
EEELLLPKLQIIAAPLPPPQPEENLGECQLNRALVFDDSPEKSSASNGSAVLFQESSTGSCNGKSSSPEDDSSSAWSIQVHASSEKGDEEELGVEDLGEYTEEEEEWEEDSDDEDCFDDLCEEMSRMTVV

SEQ ID NO: 112871 - protein, 53 aa, Setaria italica
  Transcript Sequence Number=SeqID_46897
FFFSLPKSFTSALFINYCGKQVQGYNASIHTRHKSCRQALSYKKGNKKACMHS

SEQ ID NO: 112872 - protein, 47 aa, Setaria italica
  Transcript Sequence Number=SeqID_46898
MVGGGRRGGAADEVKLNTGNVFAALESLKKKKKGDKGKAAGSSSSSK

SEQ ID NO: 112873 - protein, 47 aa, Setaria italica
  Transcript Sequence Number=SeqID_46899
YREQRNLYSGGPRIVRAKNRHGEPLNQVRHQAQDLPSSHAVRTRQTG

SEQ ID NO: 112874 - protein, 63 aa, Setaria italica
  Transcript Sequence Number=SeqID_46900
MASLSDSAGAGGSGGGRAGAELMVPQFLHKTLHAILAVRSPRPHASAPAATAAAFRRRDRWFH

SEQ ID NO: 112875 - protein, 106 aa, Setaria italica
  Transcript Sequence Number=SeqID_46901
  Gene Ontology: Cellular component=membrane
  Homolog annotation: Hit_ID=B6SRZ8; Match level="QueryCoverage=66%, HitCoverage=15%, E-value=4e-23, Identity=72%"; Hit description =Exostosin-like
  Subcellular localization annotation: CTP_CleavageSite=54; ConfidenceScore=5.45e-01
ILSPSSPSASRLSRSLASGSASASSSPATPAAPPPPVKIYMYDLPPKFTYGVVRSYMAARAPSGSADAAAVLPDEQLRYPGHQHSAEWWLFKDLLRRGPRDRPVAR

SEQ ID NO: 112876 - protein, 47 aa, Setaria italica
  Transcript Sequence Number=SeqID_46902
QQLNLESLDDHPSETIFYSSSSSLCPCGGLHLHLVNGGALLDITSGS

SEQ ID NO: 112877 - protein, 134 aa, Setaria italica
  misc_feature (94)..(94): Xaa can be any naturally occurring amino acid
  Transcript Sequence Number=SeqID_46903
ESLSRLAVEVDDAAADEVPVPSAPADARGGDLSATPPSSGRRRRYSRPGPSPGPGSDSSAEPDEISKLREDIQKLQASEAEIKALSFNYAAMLXKEKEEQLGKLREENGSLKRNLESWYFRKITQSSKEFSSGK

SEQ ID NO: 112878 - protein, 196 aa, Setaria italica
  misc_feature (12)..(12): Xaa can be any naturally occurring amino acid
  misc_feature (62)..(62): Xaa can be any naturally occurring amino acid
  Transcript Sequence Number=SeqID_46904
  Gene Ontology: Mol. function=protein serine/threonine kinase activity; Cellular component=plasma membrane; Biological process =protein amino acid phosphorylation
  Homolog annotation: Hit_ID=Q8LN36; Match level="QueryCoverage=97%, HitCoverage=36%, E-value=1e-80, Identity=76%"; Hit description =Protein kinase domain containing protein, expressed
  Pfam annotation: Domain name=Pkinase; Domain location=3-166; Score= -85.8; E_value=0.0022; Accession=PF00069.17; Description=Protein kinase domain
  Pfam annotation: Domain name=Pkinase_Tyr; Domain location=3-166; Score=-110.8; E_value=2.3e-06; Accession=PF07714.9; Description =Protein tyrosine kinase
  Pfam module annotation: Pfam domain module=Pkinase::Pkinase_Tyr; Domain location=3-166::3-166
GPKGVGHLHEGXEPKIVHRDIKSSNILLDQQWNAKVSDFGLAKVLCSERSYVNTRVMGTFGXYVAPEYAKTGMLTERSDVYSFGVLVMEVITGRTPVDYTRPADEVNLVEWLKHMVAERRVEEVLDPRLPEPPPSKALKRAILAALRCVDPEGSQRPTMAHVVHMLEDDQIQRDEFKLARDLSPRESDSYEREHCR

SEQ ID NO: 112879 - protein, 76 aa, Setaria italica
  Transcript Sequence Number=SeqID_46905
  Gene Ontology: Cellular component=plasma membrane
  Homolog annotation: Hit_ID=Q9SGV0; Match level="QueryCoverage=98%, HitCoverage=15%, E-value=3e-24, Identity=70%"; Hit description =F1N19.22
MEVFYYLVFGALAAVVAALELGKSGKDRVATSPAFNSFKNNYILVYSLMMSGDWLQGPYVYYLYSQYGFDKGDIGP

SEQ ID NO: 112880 - protein, 127 aa, Setaria italica
  Transcript Sequence Number=SeqID_46906
MRLLLCFGSKAKWNHQMVRQQNLLVTFGLIKPGALPPLTMKTVYRRGVVLGTTGLKDYTKNALLNSLVNLKEKRLALDDYFSNAFKSNEKVLKLKWTCNLKVDTHIILVWHIATCLCEIHFFDEVKV

SEQ ID NO: 112881 - protein, 66 aa, Setaria italica
  Transcript Sequence Number=SeqID_46907
ENEDFFLAKCKSVAHAGLRSHLPVLLVHCCPQEVKVGSKMVQHIGFTNFQYLYSSSSSSSSESNIL

SEQ ID NO: 112882 - protein, 270 aa, Setaria italica
  misc_feature (50)..(50): Xaa can be any naturally occurring amino acid
  Transcript Sequence Number=SeqID_46908
  Gene Ontology: Cellular component=plasma membrane
  Homolog annotation: Hit_ID=Q5GAP5; Match level="QueryCoverage=97%, HitCoverage=33%, E-value=2e-99, Identity=72%"; Hit description =Putative paramyosin
  Pfam annotation: Domain name=DUF827; Domain location=1-169; Score =50.8; E_value=3e-14; Accession=PF05701.3; Description=Plant protein of unknown function (DUF827)
EILVQGAKEAEAQEKMVELPMVLQQATQEAEDAKVAAHLAQEELRKAKGXFKQTKAAAATAETRLSAVAKEAEASIASERLALAAVQALQESKEARDVKDSPRQVTLPLSEYYELSKRAHEAEEQANEKVAEALSQVVSTKESESRSLERLKEACEEMDEKKEALEIALERAGRANEGKLAAEQELRKWRADHEQRRRALEAAKRAVNPLNGPSRVFVEQKDPYHNEQESKLQMSGSSYESIVPNQKLQRKKSLFPMMGSVLSRKTRAQT

SEQ ID NO: 112883 - protein, 138 aa, Setaria italica
  misc_feature (80)..(80): Xaa can be any naturally occurring amino acid
  misc_feature (127)..(127): Xaa can be any naturally occurring amino acid
  Transcript Sequence Number=SeqID_46909
  Gene Ontology: Mol. function=aspartic-type endopeptidase activity; Cellular component=chromatin; Biological process=RNA-dependent DNA replication
  Homolog annotation: Hit_ID=Q7XCD6; Match level="QueryCoverage=99%, HitCoverage=9%, E-value=5e-51, Identity=64%"; Hit description =Retrotransposon protein, putative, unclassified
MDGSWRPCVDYRYLNALTICGQFPIPVFDELVDELAGASWFSSLDLNSGFHQIRMKAGEEFKTAFQTHFGHFEFMVMSFXLCGAPATFQGAMNSTLKSLLRKYVLVFFDDILVYSKTFEDHLMHLRXVLQLLADDKWQ

SEQ ID NO: 112884 - protein, 50 aa, Setaria italica
  Transcript Sequence Number=SeqID_46910
  Homolog annotation: Hit_ID=C3UVB2; Match level="QueryCoverage=94%, HitCoverage=23%, E-value=8e-13, Identity=74%"; Hit description =Calcineurin B-like protein 5 variant
VMGCIPTKHAGQSPDSLDRREAVALAAETSCEKVNLPDFVNIASGTPCEN

SEQ ID NO: 112885 - protein, 175 aa, Setaria italica
  Transcript Sequence Number=SeqID_46911
  Gene Ontology: Mol. function=calcium ion binding; Cellular component =plasma membrane; Biological process=abscisic acid mediated signaling
  Homolog annotation: Hit_ID=C4P7Y2; Match level="QueryCoverage=98%, HitCoverage=79%, E-value=2e-83, Identity=86%"; Hit description =Calcineurin B-like protein 04
  Pfam annotation: Domain name=efhand; Domain location=111-139; Score =19.8; E_value=0.011; Accession=PF00036.24; Description=EF hand
  Pfam annotation: Domain name=efhand; Domain location=74-102; Score =24.3; E_value=0.0005; Accession=PF00036.24; Description=EF hand
  Pfam module annotation: Pfam domain module=efhand::efhand; Domain location=111-139::74-102
MGCIPTKHAGQSPDSLDRREAVALAAETSFTVSEVEALHDLFRKISNTVVKDNLIHKEEFHVALFRNKKKQNLFVDRLFDLFDQKGNGVIEFGEFVRSLSVFHPGAPEEQKAAFAFKLYDLRQTGFIERNELKEMVCALLDESELDITSDAVEMIVDRTFDQADTKGDGRIDQRK

SEQ ID NO: 112886 - protein, 197 aa, Setaria italica
  Transcript Sequence Number=SeqID_46912
  Gene Ontology: Mol. function=calcium ion binding; Cellular component =plasma membrane; Biological process=abscisic acid mediated signaling
  Homolog annotation: Hit_ID=C4P7Y2; Match level="QueryCoverage=97%, HitCoverage=88%, E-value=7e-99, Identity=90%"; Hit description =Calcineurin B-like protein 04
  Pfam annotation: Domain name=efhand; Domain location=130-158; Score =23.9; E_value=0.00067; Accession=PF00036.24; Description=EF hand
  Pfam annotation: Domain name=efhand; Domain location=49-77; Score =24.3; E_value=0.0005; Accession=PF00036.24; Description=EF hand
  Pfam annotation: Domain name=efhand; Domain location=86-114; Score =19.8; E_value=0.011; Accession=PF00036.24; Description=EF hand
  Pfam module annotation: Pfam domain module=efhand::efhand::efhand; Domain location=130-158::49-77::86-114
AETSFTVSEVEALHDLFRKISNTVVKDNLIHKEEFHVALFRNKKKQNLFVDRLFDLFDQKGNGVIEFGEFVRSLSVFHPGAPEEQKAAFAFKLYDLRQTGFIERNELKEMVCALLDESELDITSDAVEMIVDRTFDQADTKGDGRIDQEEWTAFAKDNPYVLRNMTLPYLKDITMVFPSFVVHSEISEADMAAKPEM

SEQ ID NO: 112887 - protein, 63 aa, Setaria italica
  Transcript Sequence Number=SeqID_46913
  Gene Ontology: Mol. function=catalytic activity; Cellular component =integral to membrane; Biological process=metabolic process
  Homolog annotation: Hit_ID=Q6RBX9; Match level="QueryCoverage=100%, HitCoverage=10%, E-value=7e-19, Identity=74%"; Hit description =Glossy1 protein
LPKDVQGLGTCEYSLERGVVHACHAGGVVHFLEGYTHHEVGAIDVDRIDVVWEAALRHGLRPA

SEQ ID NO: 112888 - protein, 71 aa, Setaria italica
  Transcript Sequence Number=SeqID_46914
  Gene Ontology: Mol. function=catalytic activity; Cellular component =integral to membrane; Biological process=metabolic process
  Homolog annotation: Hit_ID=Q6RBX9; Match level="QueryCoverage=100%, HitCoverage=11%, E-value=6e-19, Identity=67%"; Hit description =Glossy1 protein
YGDLAAMRLPDDVQGLGVCEYTLGRGVVHACHAGGVVHFLEGYEGHEVGAIDVDRIDVVWEAALRHGLRPA

SEQ ID NO: 112889 - protein, 395 aa, Setaria italica
  Transcript Sequence Number=SeqID_46915
  Gene Ontology: Mol. function=catalytic activity; Cellular component =integral to membrane; Biological process=metabolic process
  Homolog annotation: Hit_ID=B6U172; Match level="QueryCoverage=100%, HitCoverage=62%, E-value=1e-142, Identity=66%"; Hit description=Gl1 protein
  Pfam annotation: Domain name=FA_hydroxylase; Domain location=130-252; Score=79.2; E_value=1.5e-20; Accession=PF04116.5; Description=Fatty acid hydroxylase
MAPPLSSWPWASLGQYKYMLFGPLVWKVVQEWREQGGLPLGSWWLHLLVLFAVRGLIYQFWFTYGNMLFFTRRRRVVADGVDFRQIDAEWDWDNFLILQTLIGATVVNSPLLPGLRQLCLWDPRGWAVALLLHVGFSEPVFYLAHRALHRAPLFARYHAAHHSSGVTQALTAGFGTPLESLLLTLAMGAPLAGAFLLGAGSIGLVYAHAFVFDYLRAMGYSNVEVVSPRVFDAFPPLRYILYTPSYLSLHHLEKRGNFCLFMPALDAAFGTLDERSWPLQRAAYDGAGGGGALGTPEFVFLAHVVDIMSSMHVPFALRSLSSTPFANHFILLPFWPVAFGFMLLMWCCSKTFVVSFYYLRGHLHQTWSVPRYGFQYFLPAAKKGINHQIELAILR

SEQ ID NO: 112890 - protein, 209 aa, Setaria italica
  Transcript Sequence Number=SeqID_46916
  Gene Ontology: Mol. function=catalytic activity; Cellular component =integral to membrane; Biological process=metabolic process
  Homolog annotation: Hit_ID=Q6RBX9; Match level="QueryCoverage=100%, HitCoverage=33%, E-value=1e-103, Identity=86%"; Hit description =Glossy1 protein
GGTLFVNKHPDLRVRVVHGNTLTAAVILNEIPKGTSEVFMTGATSKLGRAIALYLCRKRVRVMMMTLSSERFQRIQKEAPPEFQQYLVQVTKYRSAQHCRTWIVGKWLSPREQRWAPAGTHFHQFVVPPIIGFRRDCTYGKLAAMRLPKDVEGLGCCEYTMERGVVHACHAGGVVHCLEGWEHHEVGAIDVDRIDVVWKAALKHGLTPA

SEQ ID NO: 112891 - protein, 436 aa, Setaria italica
  Transcript Sequence Number=SeqID_46917
  Gene Ontology: Mol. function=catalytic activity; Cellular component =integral to membrane; Biological process=metabolic process
  Homolog annotation: Hit_ID=Q6RBX9; Match level="QueryCoverage=77%, HitCoverage=54%, E-value=1e-171, Identity=85%"; Hit description =Glossy1 protein
  Subcellular localization annotation: CTP_CleavageSite=69; ConfidenceScore=5.25e-01
RRKKDGETKAVAKRNYTYPPLFLSLPGLPPVLQTQSTVSPSALISQGQNPWRRPSLPGRGQASANTSTCCSGLWCGRWCRNGGSKGACRWARGGCWQTSAGVDEVPDFVFLAHVVDVMQSLHVPFVLRTFASTPFCVQLFLLPMWPFAFLVMLAMWVWSKTFVISCYNLRGRLHQIWAVPRYGFQYFLPAAKKGINHQIELAILRADRMGVKVLSLAALNKNEALNGGGTLFVSKHPDLRVRVVHGNTLTAAVILNEIPSNVKEVFLTGATSKLGRAIALYLCRKKIRVLMFTMSSERFVKIQREAPPEFQQYLVQVTKYQAAQNCKTWIVGKWLSPREQRWAPAGTHFHQFVVPPIIGFRRDCTYGKLAAMRLPKDVRGLSSCEYTMERGVVHACHAGGVVHFLEGWDHHEVGAIDVDRIDVVWRAALKHGLAPV

SEQ ID NO: 112892 - protein, 255 aa, Setaria italica
  Transcript Sequence Number=SeqID_46918
  Gene Ontology: Mol. function=catalytic activity; Biological process =metabolic process
  Homolog annotation: Hit_ID=B6TST5; Match level="QueryCoverage=96%, HitCoverage=73%, E-value=1e-112, Identity=80%"; Hit description =Glycerolphosphate mutase
  Pfam annotation: Domain name=PGAM; Domain location=11-162; Score =76.9; E_value=7.3e-20; Accession=PF00300.14; Description =Phosphoglycerate mutase family
ESAYTRVPDPRIGLTAKGRRDAEDCGRRLRDLFSSDADDDWKVYFYVSPYRRTLETLRGIGHAFERHRIAGVREEPRLREQDFGNFQDREQMRVEKELRLRYGRFFYRFPNGESAADVYDRITGFRETLRADIDIGRFQPPGRRTPNMNIVLVSHGLTLRVFLMRWYKWTVRQFEGLNNLGNGGTIVMQTGRGGRYSLLVHHSADELREFGLTDEMLQDQMWQETAKPGDLNYRFMTNGQYFFDRFDSSPSHFTP

SEQ ID NO: 112893 - protein, 87 aa, Setaria italica
  Transcript Sequence Number=SeqID_46919
ADSSSQAVAAPAQVTQPREKLVAAGLAPLAWAGAEVSKADRIETEAGRRSNAAFSRTPRLLRFALNLNRLPFSYLLASWKESKKSLF

SEQ ID NO: 112894 - protein, 92 aa, Setaria italica
  Transcript Sequence Number=SeqID_46920
KEPSRSAINVPSICFKYCFIYSMEYNSLADEQQIIWKLVRWKINYILHAHCKYRKRGRRTCAKSTMHSIIRACFNYARDASEELHELNMHTC

SEQ ID NO: 112895 - protein, 59 aa, Setaria italica
  Transcript Sequence Number=SeqID_46921
NFHCFKQKLSNESMHLRSYGQLDVMWHMWHRIEAAFGSNLNKLKDSFNFQNFFFCFNCE

SEQ ID NO: 112896 - protein, 406 aa, Setaria italica
  misc_feature (154)..(154): Xaa can be any naturally occurring amino acid
  misc_feature (165)..(165): Xaa can be any naturally occurring amino acid
  misc_feature (277)..(277): Xaa can be any naturally occurring amino acid
  misc_feature (309)..(309): Xaa can be any naturally occurring amino acid
  misc_feature (386)..(386): Xaa can be any naturally occurring amino acid
  Transcript Sequence Number=SeqID_46922
  Gene Ontology: Mol. function=transporter activity; Cellular component= mitochondrial inner membrane; Biological process=transport
  Homolog annotation: Hit_ID=P31691; Match level="QueryCoverage=78%, HitCoverage=81%, E-value=1e-134, Identity=77%"; Hit description=ADP ,ATP carrier protein, mitochondrial
  Pfam annotation: Domain name=Mito_carr; Domain location=100-200; Score=40.3; E_value=7.8e-09; Accession=PF00153.19; Description =Mitochondrial carrier protein
  Pfam annotation: Domain name=Mito_carr; Domain location=208-305; Score=90.6; E_value=5.4e-24; Accession=PF00153.19; Description =Mitochondrial carrier protein
  Pfam annotation: Domain name=Mito_carr; Domain location=309-400; Score=89.1; E_value=1.5e-23; Accession=PF00153.19; Description =Mitochondrial carrier protein
  Pfam module annotation: Pfam domain module=Mito_carr::Mito_carr::Mito_ carr; Domain location=100-200::208-305::309-400
SLAVDIHKTIELPITSSLGCLCVIGQPCPRIVQGVHKKQGGRTSSTTRGKVASKPLPVTILVLLKVEQPLEVVLECKVQCLSREVADNVSSVTPPQGGETLILDGTFEAVTNTLVWLRQPTSLDHLKLLIQNQDEMIKAGRLSEPYKGIGDCFXRNQYKGIEGFXSLWRGNTANVIRYFPTQALNFAFKDYFKRLFNFKKDKDGYWKWFAGNLASGGAAGASSLFFVYSLDYARTRLANDAKAAKGGGDRQFNGLVDVYRKTLKSDGIAGLYRGFNXISCVGIIVYRGLYFGLYDSIKPVVLTGNLQDXFFASFALGWLITNGAGLASYPIDTVRRRMMMTSGEAVKYKSSMDAFQQILKKEGPKSLFKGAGANILRAIAGAGVLXSGYDQLQILFFGKKYGSGGA

SEQ ID NO: 112897 - protein, 388 aa, Setaria italica
  misc_feature (210)..(210): Xaa can be any naturally occurring amino acid
  Transcript Sequence Number=SeqID_46923
  Gene Ontology: Mol. function=transporter activity; Cellular component= mitochondrial inner membrane; Biological process=transport
  Homolog annotation: Hit_ID=P31691; Match level="QueryCoverage=100%, HitCoverage=100%, E-value=0.0, Identity=87%"; Hit description=ADP ,ATP carrier protein, mitochondrial
  Pfam annotation: Domain name=Mito_carr; Domain location=192-288; Score=101.2; E_value=3.5e-27; Accession=PF00153.19; Description =Mitochondrial carrier protein
  Pfam annotation: Domain name=Mito_carr; Domain location=292-382; Score=90.3; E_value=6.6e-24; Accession=PF00153.19; Description =Mitochondrial carrier protein
  Pfam annotation: Domain name=Mito_carr; Domain location=87-184; Score= 134.5; E_value=3.4e-37; Accession=PF00153.19; Description =Mitochondrial carrier protein
  Pfam module annotation: Pfam domain module=Mito_carr::Mito_carr::Mito_ carr; Domain location=192-288::292-382::87-184
  Subcellular localization annotation: CTP_CleavageSite=68; ConfidenceScore=5.45e-01
MADQVNQPTVLHKLGGQFHLSSSFSEGVRARNICPSVSSYERRFPTRNYMTQSLWGPSMSVSGGINVPAVSSSPLFANAPAEKGGKNFMVDFLMGGVSAAVSKTAAAPIERVKLLIQNQDEMIKAGRLSEPYKGIGDCFKRTIKDEGFSSLWRGNTANVIRYFPTQALNFAFKDYFKRLFNFKKDKDGYWKWFAGNLASGGAAGASSLFXVYSLDYARTRLANDAKAAKGGGDRQFNGLVDVYRKTLKSDGIAGLYRGFNISCVGIIVYRGLYFGLYDSIKPVVLTGNLQDNFFASFALGWLITNGAGLASYPIDTVRRRMMMTSGEAVKYKSSMDAFQQILKKEGPKSLFKGAGANILRAIAGAGVLSGYDQLQILFFGKKYGSGGA

SEQ ID NO: 112898 - protein, 146 aa, Setaria italica
  Transcript Sequence Number=SeqID_46924
  Gene Ontology: Mol. function=transporter activity; Cellular component= mitochondrial inner membrane; Biological process=transport
  Homolog annotation: Hit_ID=P31691; Match level="QueryCoverage=96%, HitCoverage=35%, E-value=7e-65, Identity=85%"; Hit description=ADP ,ATP carrier protein, mitochondrial
  Pfam annotation: Domain name=Mito_carr; Domain location=87-143; Score= -6.7; E_value=0.014; Accession=PF00153.19; Description=Mitochondrial carrier protein
  Subcellular localization annotation: CTP_CleavageSite=68; ConfidenceScore=5.45e-01
MADQVNQPTVLHKLGGQFHLSSSFSEGVRARNICPSVSSYERRFPTRNYMTQSLWGPSMSVSGGINVPAVSSSPLFANAPAEKGGKNFMVDFLMGGVSAAVSKTAAAPIERVKLLIQNQDEMIKAGRLSEPYKGIGDCFKRPSRMR

SEQ ID NO: 112899 - protein, 62 aa, Setaria italica
  Transcript Sequence Number=SeqID_46925
  Gene Ontology: Mol. function=phosphatidylinositol phosphate kinase activity; Biological process=phosphatidylinositol metabolic process
NGMEPVERLPSLASMFSDNIDLAWTGSSDLQYDLPQAFTKIDENGSFNLDSPNYKNVVTPVR

SEQ ID NO: 112900 - protein, 151 aa, Setaria italica
  misc_feature (131)..(131): Xaa can be any naturally occurring amino acid
  Transcript Sequence Number=SeqID_46926
  Gene Ontology: Mol. function=phosphatidylinositol phosphate kinase activity; Biological process=phosphatidylinositol metabolic process
NFLRGDIEIGKSLGSPRKSLLSREVHLNDNECSVADTNLQTCLVGHPVDGAEDLDKVYSKFNGREKRSVTEPTNGMEPVERLPSLASMFSDNIDLAWTGSSDLQYDLPQAFTKIDENGSLFDSPNYKNVVXPVRIHSFSSTSGFASRENEL

SEQ ID NO: 112901 - protein, 384 aa, Setaria italica
  Transcript Sequence Number=SeqID_46927
  Gene Ontology: Mol. function=phosphatidylinositol phosphate kinase activity; Biological process=phosphatidylinositol metabolic process
  Homolog annotation: Hit_ID=B9SJ39; Match level="QueryCoverage=85%, HitCoverage=19%, E-value=1e-111, Identity=59%"; Hit description=Fyve finger-containing phosphoinositide kinase, fyv1, putative
QSILVSLSSTCIPKGLVCERSQLFRIKFYGSFDKPLGRYLREDLFDQAYRCQACKEPSESHIRCYTHQHGSLTISVSRLRSRKLPGERDGRIWMWHRCLKCEPKDGVPPATRRIIMSDAAWGLSFGKFLELSFSNHATANRVASCGHSLQRDCLRFYGYGNMVAFFRYSPVDILSVNLPPSVLDFNCHSPQEWLKRVAIEIFGKMESLHVEVSEFLHRTEKNIETEDEPVKEGVQRQIIEMKDFLKMERNEYEILLLPVIRESSHPMQTSIDILELNRLRRGLLLDAYIWDRRLCHLDSLLKTHGHVSKTSSDNLDILLYTRLKEWKANFLRGDIEIGKSLGSPRKSLLSREVHLNDNECSVADTNLQTCLVGHPVDGAEDLDK

SEQ ID NO: 112902 - protein, 472 aa, Setaria italica
  Transcript Sequence Number=SeqID_46928
  Gene Ontology: Mol. function=phosphatidylinositol phosphate kinase activity; Biological process=phosphatidylinositol metabolic process
  Homolog annotation: Hit_ID=Q9SSJ8; Match level="QueryCoverage=97%, HitCoverage=28%, E-value=1e-153, Identity=57%"; Hit description =F15H11.20 protein
  Pfam annotation: Domain name=PIP5K; Domain location=231-463; Score =191.9; E_value=1.7e-54; Accession=PF01504.10; Description =Phosphatidylinositol-4-phosphate 5-Kinase
  Subcellular localization annotation: CTP_CleavageSite=33; ConfidenceScore=5.25e-01
LGLLHSCSLDCPNYKNVVTPVRIHSFSSTLGLRQRERTGLAPTSLHLSSFKSAEFFGDMTSILKDPMPNMRRACSQRSPGVIEKLNVVLARTPTYISSASNIIDDGARLLLPQIGYEDNVVIAVYDDEPTSIVSYAMTSEEYVRQVTRRLNSNLSFSHLQSTTEFSSHGLEGFSPSQEDHLDSKGTHFKFSFDDESPISPDKTKFSVVCYFERHFAALRKKCCPNDTDYIRSLSRCKRWNAQGGKSNVYFAKTMDERFIIKQVTRTELESFVEFAPQYFKYLMESLTSGSPTCLAKIVGLYQVSVKSLKAGKEVKMDLMVMENIFFERKISRVYDLKGSLRSRYTSGDSKVLLDSNLIEALHTKPIFLGSKAKRRLERAVWNDTSFLALADVMDYSLLVGIDEEKKELVIGIIDYLRQYTWDKQLETWVKASGILGGPKNESPTVISPMQYKKRFRKAMSKYFLTVPDQWSS

SEQ ID NO: 112903 - protein, 42 aa, Setaria italica
  Transcript Sequence Number=SeqID_46929
GHPFVQDHQAVTKYNITQFRDGLSLPAEAWHKKSNKEPSYEE

SEQ ID NO: 112904 - protein, 78 aa, Setaria italica
  Transcript Sequence Number=SeqID_46930
TPCVPRQSLFSFFFFFFFFFTSERGPSSLFIEHTPQQERYTSNNAVWYKRISNNTDHNGDSSGTITQPIIHHCHRYYY

SEQ ID NO: 112905 - protein, 569 aa, Setaria italica
  misc_feature (17)..(17): Xaa can be any naturally occurring amino acid
  Transcript Sequence Number=SeqID_46931
  Gene Ontology: Mol. function=inositol or phosphatidylinositol phosphatase activity
  Homolog annotation: Hit_ID=Q852L1; Match level="QueryCoverage=96%, HitCoverage=96%, E-value=0.0, Identity=75%"; Hit description =Putative inositol polyphosphate 5-phosphatase
  Pfam annotation: Domain name=Exo_endo_phos; Domain location=100-530; Score=139.6; E_value=9.8e-39; Accession=PF03372.15; Description =EndonucleaseExonucleasephosphatase family
MTEESTKKSKLSWSKSXLVRKWFNIRPKAQDFHADSDAGQGRDGGGGSWRPRCSASEASASTAKKSRTDRSSSKRSAERARRGKNNFDVARLTEVQDYRIFAATWNVGGKSPPRGLNLDEWLHTSPPADIYVLGFQEIVPLNAGNVLGTEDNLPAKKWVSLIRRTLNKNPGASGCGGYHTPSPVLDPVVELDADFEGSARRQENFPFFHRRSFHNLSRSLRMDGDYMFPQPRLDRRFSVCDPVNLGGRPSDFDGNLRCPGSPDEEIIDMEVSDAAQFSPFPHSYTASAPSEQNDEQSNSSRYCLVASKQMVGIFLTVWVRNEIRDDVRNLKVSCVGRGLMGYLGNKGSISISMSLHQTSFCFICCHLTSGEKEGDELRRNSDVLEILRKTRFPRVRGSGDVKSPETILEHDRIIWLGDLNYRIALSYCSAKALVEMHNWKQLLEKDQLRMQQRYGRVFQGWKEGRIYFPPTYKYSFNSDRYAGEGMHPKEKRRTPAWCDRILWYGNGLNQLSYVRGESRFSDHRPVYSIFLAEVDIVHQRRRNMGYFSSRIEVEELLPHSQSYREIKFY

SEQ ID NO: 112906 - protein, 835 aa, Setaria italica
  Transcript Sequence Number=SeqID_46932
  Gene Ontology: Mol. function=phosphorylase kinase regulator activity; Cellular component=DNA-directed RNA polymerase II, holoenzyme; Biological process=regulation of transcription from RNA polymerase II promoter
  Homolog annotation: Hit_ID=O95163; Match level="QueryCoverage=99%, HitCoverage=62%, E-value=7e-73, Identity=27%"; Hit description =Elongator complex protein 1
  Pfam annotation: Domain name=IKI3; Domain location=1-835; Score =523.1; E_value=3.6e-154; Accession=PF04762.4; Description=IKI3 family
SSPDGALLSVTTGLGQLLVITQDWEVLFETSLDPQDATLGDIDSTGCQIRSSISWRGDGKYFATLGAPDGAYGPTKLTIWERESGKVHSSSDAKTFMGTSLDWMPSGAKVATIHDRRTEGKCPLIVFYEKNGLERSHFSIDEPAEVAIHALKWNCNSEILAALVSSGQHDVIKIWSCRNNHWYLKHELRYTKEERVKFFWDPTKPMHLICWTLGGQVVIHRFAWTTAVSETSVALVIDGSHILVTPLHLGLMPPPMSLFQLAFPCAVNEVSFVSSNSKTQLAAYLSNGNLCAVELPAPDTWEEFEGSRISVDPCSSDFTLDNCMHLAWIDTHTLLGICCYSEHYCSTPIGSIEASNLVDKHDSLFSINEIGLVCSEDFVPGSVSSSGWQARVSKKVPLQSSVIGISPNPAKKGSAFIQISGGRIVEYCSSLNLSKMCVPAQISEVDSDHGFPASCPWMTAVLCHENGIAQPFLFGLDDNSKLYMGKRLLSDNCSSFTFYSSAYGTTERVMSHLLVTTKQDLLYIVDVNKIFLKDNEVTIDSHASSHPRGKQSKEHITVWEKGAKLVGVLHGDEAAVIMQTIRGNLECTYPRKLVLVSIVQALAQRRFKDAMDMVRRHRIDFNIIVDYCGCDVFIKLAADFVKQVNNLSHITEFVCSMKNDNVSSKLYEAYISFPDQSAVPMVDIECTPGFLGNKVTSVLMAVRKALEEQIEESSSRELCVLTTLARSEPPLLEEALNRIKVIRELELRGLDDAKRKLYPSAEESLKHLLWLTDTEAVFGAALGLYDLNLAAIVALNSQKDPKEFLPFLKSLECLPPAIMRYTIDLRLGRYESALK

SEQ ID NO: 112907 - protein, 208 aa, Setaria italica
  misc_feature (49)..(49): Xaa can be any naturally occurring amino acid
  misc_feature (116)..(116): Xaa can be any naturally occurring amino acid
  misc_feature (140)..(140): Xaa can be any naturally occurring amino acid
  Transcript Sequence Number=SeqID_46933
  Gene Ontology: Mol. function=beta-amylase activity; Biological process=polysaccharide catabolic process
  Homolog annotation: Hit_ID=B6TYJ8; Match level="QueryCoverage=97%, HitCoverage=43%, E-value=2e-74, Identity=65%"; Hit description=Beta -amylase
  Pfam annotation: Domain name=Glyco_hydro_14; Domain location=1-207; Score=-225.3; E_value=0.00019; Accession=PF01373.9; Description =Glycosyl hydrolase family 14
AAAADPDVLFTDRSGHRREGCLSFAVDELPVLLGKSPLEAYEAFFRSFXTSYKRTYLGSTITDVTVSLGPNGELRYPSYPPRNNSATDGYSGAGEFQCYDMYMLARLKRHAESSGXPLWGLLGPHDGPRYDESPESSVFXPGAGGSWNTAYGLSAKVPLLCGSRPAAEATAGLHSGYVPVAEMFARHGCTVIACGVDARLDARAEEHP

SEQ ID NO: 112908 - protein, 135 aa, Setaria italica
  misc_feature (43)..(43): Xaa can be any naturally occurring amino acid
  Transcript Sequence Number=SeqID_46934
  Subcellular localization annotation: CTP_CleavageSite=21; ConfidenceScore=5.32e-01
MFPSLAYSSSLALHRRRRPPSSFPRRGLPAPPPPTPPLPPPPXPRGLPPDKSTTDPSPCVHSLPSDSPPPLFFRRNPIAPPPIQLHARPSRRHRPARPRPTSAAPSRRPPVLEDPNQHQHAPQCWCGAAAPRCDL

SEQ ID NO: 112909 - protein, 109 aa, Setaria italica
  Transcript Sequence Number=SeqID_46935
  Gene Ontology: Mol. function=electron carrier activity
  Homolog annotation: Hit_ID=B9RA53; Match level="QueryCoverage=99%, HitCoverage=63%, E-value=7e-44, Identity=75%"; Hit description =Electron transporter, putative
  Pfam annotation: Domain name=CxxC_CxxC_SSSS; Domain location=17-53; Score=0.2; E_value=0.036; Accession=PF09723.2; Description=Putative regulatory protein (CxxC_Cxx
  Pfam annotation: Domain name=Rubredoxin; Domain location=17-52; Score= 42.8; E_value=1.4e-09; Accession=PF00301.12; Description=Rubredoxin
  Pfam module annotation: Pfam domain module=CxxC_CxxC_SSSS::Rubredoxin; Domain location=17-53::17-52
RAATAARITMRVASKQAYICRDCGYIYNDRTPFDKLSDSYFCPVCGAPKRRFRAYQPAVSKNANATDARKARKEQLKKDEAIGQALPIAIAVGVIALVGLYFYLNSAYN

SEQ ID NO: 112910 - protein, 253 aa, Setaria italica
  Transcript Sequence Number=SeqID_46936
  Gene Ontology: Mol. function=inorganic phosphate transmembrane transporter activity; Cellular component=membrane; Biological process=phosphate transport
  Homolog annotation: Hit_ID=Q6ZH87; Match level="QueryCoverage=96%, HitCoverage=48%, E-value=5e-91, Identity=70%"; Hit description =Putative phosphate transporter 2-1
  Pfam annotation: Domain name=PHO4; Domain location=157-252; Score= -130.7; E_value=8e-05; Accession=PF01384.12; Description=Phosphate transporter family
  Subcellular localization annotation: CTP_CleavageSite=49; ConfidenceScore=5.33e-01
MSQSSPFFSIARAHAGAGGRAAAAALLLRQPVAQLPTNIHSLRCFPSARVTHAKTLRSHLNLPRATLSSFADADDGSKTKPDEAEAGEEQNGECEMSEMAKAFHISPRMAMLISMTTAFAALTVPLAMRSLVCRGPLKMSVLAYLTLLSGFYMAWNIGANDVANAMGTSVGSGALTLRQAVLTAAVLEFSGAFLMGTHVTSTMQKGILVASVFQGKDSLLFAGLLSSLAAAGTWLQVASSYGWPVYKLTTISN

SEQ ID NO: 112911 - protein, 195 aa, Setaria italica
  Transcript Sequence Number=SeqID_46937
  Gene Ontology: Mol. function=inorganic phosphate transmembrane transporter activity; Cellular component=membrane; Biological process=phosphate transport
  Homolog annotation: Hit_ID=Q7YME0; Match level="QueryCoverage=100%, HitCoverage=34%, E-value=2e-80, Identity=80%"; Hit description =Phosphate transporter 2-1
  Pfam annotation: Domain name=PHO4; Domain location=1-194; Score=85.7; E_value=1.6e-22; Accession=PF01384.12; Description=Phosphate transporter family
  Subcellular localization annotation: CTP_CleavageSite=80; ConfidenceScore=5.27e-01
ANDVANAMGTSVGSGALTLRQAVLTAAVLEFSGAFLMGTHVTSTMQKGILVASVFQGKDSLLFAGLLSSLAAAGTWLQVASSYGWPVSTTHCIVGAMVGFGLVYGGVNAVFWSSLARVSSSWVISPLMGAAVSFLVYKCIRRFVYSAPNPGQAAAAAAPIAVFTGVTAISFAAFPLSKVFPIALLQALSCGAIGA

SEQ ID NO: 112912 - protein, 184 aa, Setaria italica
  Transcript Sequence Number=SeqID_46938
  Homolog annotation: Hit_ID=O48878; Match level="QueryCoverage=98%, HitCoverage=20%, E-value=2e-52, Identity=54%"; Hit description=Gene X-like protein
  Pfam annotation: Domain name=XS; Domain location=12-121; Score=144.7; E_value=2.9e-40; Accession=PF03468.6; Description=XS domain
MLMDPQVPQHTRDEQFVWPWMGILVNMPNEFFGKSANRLKEHFSSFHPVKVHPVYNRGRPTRDAIVEFGKDWSGFRNARAFENHFTMKGYSKRCWKEMKCGGTEPIGWMARADDYNSLGAIGELLRKNGDLKTLNDIVKDGTNKTDKLMANLACQVKEKEMHLEKLESEYNKRSASLDILMQKR

SEQ ID NO: 112913 - protein, 78 aa, Setaria italica
  Transcript Sequence Number=SeqID_46939
VITSWYCLNVHLQAELGKPSLVHPNKGKVSISVDCSPTAVPSFQVGEQYLVDATSEEEEDGLCSFSTCQLTSMARCVG

SEQ ID NO: 112914 - protein, 86 aa, Setaria italica
  Transcript Sequence Number=SeqID_46940
LCYFSWPARPLALQRTACCCIAGCRRQPVPHRRPRAPHMAHLPAPDDPGRRRLVHLGAALQPHRRAVEVSNPNRRVSVYYAKGPGG

SEQ ID NO: 112915 - protein, 74 aa, Setaria italica
  Transcript Sequence Number=SeqID_46941
  Gene Ontology: Mol. function=transferase activity, transferring glycosyl groups
  Homolog annotation: Hit_ID=Q5NA53; Match level="QueryCoverage=100%, HitCoverage=11%, E-value=2e-31, Identity=81%"; Hit description =Glycogenin-like protein
AATTARGNGGVHVLFVTDCFPIPNLFSCKNLVKREGNAWLYKPDVKALKEKLRLPVGSCELAVPLNAKGKLTDV

SEQ ID NO: 112916 - protein, 58 aa, Setaria italica
  Transcript Sequence Number=SeqID_46942
DLPPDLFQIFPPLTLTLPACLAFELVPLDDSVLIQPCQMRALLCHVRSCASCWIDSHL

SEQ ID NO: 112917 - protein, 57 aa, Setaria italica
  Transcript Sequence Number=SeqID_46943
LGLLIAVQILPWKSLLSLTLFIYYFFSEDTAKRRTQKSKSFKEVEKFDVFVLEKSSG

SEQ ID NO: 112918 - protein, 81 aa, Setaria italica
  Transcript Sequence Number=SeqID_46944
CKRILVFPWVMSIYSTTGCDIYLDSCSLLQLVSLWLAGNSSSLAGGTVRVFLYELSIKMQAHENTTLLVNMISYGMNIQVI

SEQ ID NO: 112919 - protein, 39 aa, Setaria italica
  Transcript Sequence Number=SeqID_46945
MTKHGVVLGPEDAVVAAAARHFSFPPPRTGGDSCRKLAA

SEQ ID NO: 112920 - protein, 359 aa, Setaria italica
  Transcript Sequence Number=SeqID_46946
  Gene Ontology: Mol. function=translation elongation factor activity
  Homolog annotation: Hit_ID=B9RPP6; Match level="QueryCoverage=99%, HitCoverage=33%, E-value=1e-104, Identity=54%"; Hit description =Translation elongation factor, putative
  Pfam annotation: Domain name=EFG_C; Domain location=217-306; Score =88.4; E_value=2.5e-23; Accession=PF00679.16; Description=Elongation factor G C-terminus
  Pfam annotation: Domain name=EFG_IV; Domain location=105-215; Score= -26.8; E_value=0.068; Accession=PF03764.10; Description=Elongation factor G, domain IV
  Pfam module annotation: Pfam domain module=EFG_C::EFG_IV; Domain location=217-306::105-215
IEGKTAKGDGVLDPRLSQDDGNSAATLRQRMIDAIDSELEAISNQVDKEKLERYRKTWLGYLERIWSLGPWQVGPNLLLSPDAKSSDRAITIQDGRQGILVSGSSHVSERLGFVKESDTKDNSNLDNGESAADAPESLHLESLALRNNIVSGFQIAANAGPLCDEPMWGLAFIVEPYLFADGSDAANHFDQYNISSGQVITAVKEACRAAVLQNKPRIVEAMYFCELTAPYDQSGSTYGVLNKRRARILKDEMQEGTSLFTVHAYLPVAESVGFSNELRSLTAGAASALLVLSHWEAIAEDPLFIPRTQDELEEFGDGSSIGPNLAKKLMNSVRRRKGLHVEEKVVEHGTKQRTLAKKV

SEQ ID NO: 112921 - protein, 207 aa, Setaria italica
  misc_feature (85)..(85): Xaa can be any naturally occurring amino acid
  misc_feature (196)..(196): Xaa can be any naturally occurring amino acid
  misc_feature (205)..(205): Xaa can be any naturally occurring amino acid
  Transcript Sequence Number=SeqID_46947
  Gene Ontology: Mol. function=methyltransferase activity
  Homolog annotation: Hit_ID=B6U140; Match level="QueryCoverage=100%, HitCoverage=41%, E-value=6e-95, Identity=81%"; Hit description=NOL1R
KYLPILKEVLGSSGGLNSKWKKQEELVVVTAYDILFGQGAVSGSAEQLILANKDILSSALDRICAKRKVSSVEDLVGQKTAVKPXPRFLRVNTLKTTAESVIEELSKIHMVYKDDMVPDMLVLPPGTDLHSHPLVTNGKVFLQGKASCMVAVALNPKPGWKVIDACAAPGNKTVHLAALMNGEGSIIACELNKERXKTLQHTVRXSG

SEQ ID NO: 112922 - protein, 256 aa, Setaria italica
  misc_feature (12)..(12): Xaa can be any naturally occurring amino acid
  Transcript Sequence Number=SeqID_46948
  Gene Ontology: Mol. function=methyltransferase activity
  Homolog annotation: Hit_ID=B6U140; Match level="QueryCoverage=97%, HitCoverage=51%, E-value=1e-116, Identity=81%"; Hit description=NOL1R
  Pfam annotation: Domain name=Nol1_Nop2_Fmu; Domain location=1-206; Score=-79.9; E_value=0.0081; Accession=PF01189.9; Description =NOL1NOP2sun family
VAVALNPKPGWXGTKTVHLAALMNGEGSIIACELNKERAKTLQHTVRRSGANNIQTVNGDFLDIDSKDPSYAEVRAILLDPSCSGSGISTERLDYLLPSHSRDDQDDASTSSRVMKLSAFQKKALSHALSFPSVARVVYSTCSIHQAENEDVVNAVLPLATSLGFELATPFPQWHRRGLPVFEGSEHLLRTDPEDDLEGFFIALFVRKAANGGVEEPSEDVAVEVPRKVSRRRHGLRTFSSSRTSEQTLCSNRVLW

SEQ ID NO: 112923 - protein, 137 aa, Setaria italica
  misc_feature (120)..(120): Xaa can be any naturally occurring amino acid
  Transcript Sequence Number=SeqID_46949
  Gene Ontology: Mol. function=protein serine/threonine kinase activity; Cellular component=cytoplasm; Biological process=protein amino acid phosphorylation
  Homolog annotation: Hit_ID=Q5J4W4; Match level="QueryCoverage=100%, HitCoverage=34%, E-value=1e-71, Identity=94%"; Hit description =Mitogen-activated protein kinase 2
RWYRAPELLLNCSEYTQAIDMWSVGCILGEIVTREPLFPGKDYVHQLRLITELVGSPDDTSLGFLRSDNARRYVRSLPQYPKQHFRARFPTMSSGAMDLLERMLVFDPSKRITVDEALCXHPYLASLHEINDEPVCP

SEQ ID NO: 112924 - protein, 155 aa, Setaria italica
  Transcript Sequence Number=SeqID_46950
TTGTGKESRPPSASEVFPPQVEAEAWERKAVKRRDARPNISSSQFSSESMLKRPRVSFTEPPPLDVAWVFGIFRVRGARQRSRRCRESVRPWRGEAGPAQCRGSRPASRRARGSLGSAVASRPDPLARALRRRGGAPPAPARPSGGGQRRRQRSD

SEQ ID NO: 112925 - protein, 259 aa, Setaria italica
  Transcript Sequence Number=SeqID_46951
  Gene Ontology: Mol. function=RNA-directed DNA polymerase activity; Cellular component=mitochondrion
  Homolog annotation: Hit_ID=B9T2J9; Match level="QueryCoverage=100%, HitCoverage=50%, E-value=2e-58, Identity=44%"; Hit description =Pentatricopeptide repeat-containing protein, putative
  Pfam annotation: Domain name=PPR; Domain location=108-141; Score=5.5; E_value=2; Accession=PF01535.12; Description=PPR repeat
  Pfam annotation: Domain name=PPR; Domain location=219-253; Score =18.7; E_value=0.024; Accession=PF01535.12; Description=PPR repeat
  Pfam module annotation: Pfam domain module=PPR::PPR; Domain location =108-141::219-253
HSPYSWNLVVDILGKNRIFEPMWETVRSMHSQRLLSLATFAFVFSSLAASPGGNPLKAFVDMPRYGMARDTTALNSLLSALCRANRLDDARAAIPVARAEAGTRPDADSYAILLEGCEAAADPRVAREVFDEMVRDVGFDPNNVPAYDSFLTTLVSSDSSTALPEAMDYLAVLSRRGCSPGEKFFHAALVAHLEARKLRDAMALWDDFVGHRGLVPDLEMYNTMIMLQGSLGHAEVTVEYLDDMAFNGVFPDAGTYNLV

SEQ ID NO: 112926 - protein, 152 aa, Setaria italica
  misc_feature (7)..(7): Xaa can be any naturally occurring amino acid
  Transcript Sequence Number=SeqID_46952
  Gene Ontology: Mol. function=acid phosphatase activity; Cellular component=chloroplast
  Homolog annotation: Hit_ID=Q5VQK4; Match level="QueryCoverage=98%, HitCoverage=36%, E-value=1e-69, Identity=80%"; Hit description =Putative diphosphonucleotide phosphatase 1
STEHDWXEKSEQYKWMNQDLSSVNRSRTPWVIFIGHRPMYSSYIGIPVNVDLSFVTSVEPLLLKYQVDLVFFGHVHNYERTCAVYKNNCKGMPKKDASGIDTYDNSNYTAPVHAIVGAGGFNLDKFPKIVLNKWSSSRVSEFGYARVHATSK

SEQ ID NO: 112927 - protein, 75 aa, Setaria italica
  misc_feature (49)..(75): Xaa can be any naturally occurring amino acid
  Transcript Sequence Number=SeqID_46953
LNNQSGSHGDWDWEGFDCCDVFVLGCCLSRQKIVVINLVLVSLGMRAIXXXXXXXXXXXXXXXXXXXXXXXXXXX

SEQ ID NO: 112928 - protein, 46 aa, Setaria italica
  Transcript Sequence Number=SeqID_46954
MLLLDRDIFLGIPNGIGFILGSIQLIIYVIIKCVGFHHLFMDNTLL

SEQ ID NO: 112929 - protein, 148 aa, Setaria italica
  Transcript Sequence Number=SeqID_46955
  Gene Ontology: Cellular component=integral to membrane
  Homolog annotation: Hit_ID=B6TJ55; Match level="QueryCoverage=100%, HitCoverage=58%, E-value=6e-45, Identity=66%"; Hit description =Cytochrome c oxidoreductase
  Pfam annotation: Domain name=MtN3_slv; Domain location=1-60; Score =24.0; E_value=6.6e-05; Accession=PF03083.8; Description=MtN3saliva family
GQRRKFEAAPYVFTLLNALLWLYYGLTKPDGLLIATVNGFGAVMEAIYVVLFIVYAADHATRLITSPRHIKAAKLAAALDIGGFGVVFAATTFAISELDLRTMVIGMICACLNVLMYGSPLAAMKTVITTKSVEFMPFFLSFFLFLNG

SEQ ID NO: 112930 - protein, 86 aa, Setaria italica
  Transcript Sequence Number=SeqID_46956
RKFTCLNNKQSLFTRILVDTLVKFEGFSNQASTPAYCIPHMKHVGCFSLIIYIKRWRPEEDPKLAIHLPLFHCCSGRPCCSCRSHR

SEQ ID NO: 112931 - protein, 238 aa, Setaria italica
  Transcript Sequence Number=SeqID_46957
  Homolog annotation: Hit_ID=B6TJ55; Match level="QueryCoverage=99%, HitCoverage=96%, E-value=2e-87, Identity=70%"; Hit description =Cytochrome c oxidoreductase
  Pfam annotation: Domain name=MtN3_slv; Domain location=129-215; Score= 110.4; E_value=5.9e-30; Accession=PF03083.8; Description=MtN3saliva family
  Pfam annotation: Domain name=MtN3_slv; Domain location=6-93; Score =120.1; E_value=7.1e-33; Accession=PF03083.8; Description=MtN3saliva family
  Pfam module annotation: Pfam domain module=MtN3_slv::MtN3_slv; Domain location=129-215::6-93
MDSILFIIGIIGNIISVLLFISPIKTFWRIVRSGSTEEFEAAPYVFTLLNALLWLYYGLTKPDGLLIATVNGFGAVMEAIYVVLFIVYAADHATRIKAAKLAAALDIGGFGVVFAATTFAISELDLRTMVIGMICACLNVLMYGSPLAAMKTVITTKSVEFMPFFLSFFLFLNGGIWATYAVLDRDIFLGIPNGIGFILGSIQLIIYVIYMNSKASQSSNETGEDGWQASDPLLASNA

SEQ ID NO: 112932 - protein, 109 aa, Setaria italica
  Transcript Sequence Number=SeqID_46958
WVFQEAQQQQENEINLVSSWSNPADSHPRTWEAQFQSGIKTIALIAVREGVVQLGSMKKVAEDLSYVVMLRRKFGYLESIPGVLLPHPSSAAFPAAGCAAVIGGPADAA

SEQ ID NO: 112933 - protein, 49 aa, Setaria italica
  Transcript Sequence Number=SeqID_46959
SNLCLCCHYHTYRIHPWIPSQPVLVSCRLGLELCIDSKIKSLLTHRSLS

SEQ ID NO: 112934 - protein, 63 aa, Setaria italica
  Transcript Sequence Number=SeqID_46960
RNAGQKGNKTPSDTAGTELHKNFSGDSNKETKLAEEITASTSSAAAMSLRSNRRKNSSSRIRR

SEQ ID NO: 112935 - protein, 155 aa, Setaria italica
  Transcript Sequence Number=SeqID_46961
IEEETLENQKKSSPESKVSVTERSAEEVQNVAVTRAAKIFETPVFCIEERNSDILVHDSHRDEENVIYMSADTVLSAETSVLSKNEVIVEREEYVKEFCEEVELKQFESTTTERCHYEVNNQYQFGELMSACWEPVMRQEPCSDSESDLSDSSSD

SEQ ID NO: 112936 - protein, 59 aa, Setaria italica
  misc_feature (57)..(57): Xaa can be any naturally occurring amino acid
  Transcript Sequence Number=SeqID_46962
QKEKRNKKQKDQYKKDHKLQVNDQYNKDHKLQVNDQDNKDLDLAHNKKKDNLVVKKXAK

SEQ ID NO: 112937 - protein, 70 aa, Setaria italica
  Transcript Sequence Number=SeqID_46963
MGRLGGGRGGGGGGLGSCGGGCALLAAALVVSALVIHGAGGLKQSHAPAVARKVLLSKSSCGCQLNLDNA

SEQ ID NO: 112938 - protein, 54 aa, Setaria italica
  Transcript Sequence Number=SeqID_46964
MLILLFFPLNGCIGNEGPGSAMAGNRLESRPISASPSFSSSLVAYKGSAKAFSL

SEQ ID NO: 112939 - protein, 872 aa, Setaria italica
  misc_feature (17)..(17): Xaa can be any naturally occurring amino acid
  misc_feature (39)..(39): Xaa can be any naturally occurring amino acid
  misc_feature (856)..(856): Xaa can be any naturally occurring amino acid
  misc_feature (862)..(862): Xaa can be any naturally occurring amino acid
  Transcript Sequence Number=SeqID_46965
  Gene Ontology: Mol. function=protein serine/threonine kinase activity; Cellular component=plasma membrane; Biological process =protein amino acid phosphorylation
  Homolog annotation: Hit_ID=A2Q551; Match level="QueryCoverage=74%, HitCoverage=69%, E-value=0.0, Identity=57%"; Hit description=Protein kinase
  Pfam annotation: Domain name=APH; Domain location=512-688; Score= -3.0; E_value=0.0028; Accession=PF01636.15; Description =Phosphotransferase enzyme family
  Pfam annotation: Domain name=Pkinase; Domain location=510-781; Score =162.8; E_value=1e-45; Accession=PF00069.17; Description=Protein kinase domain
  Pfam annotation: Domain name=Pkinase_Tyr; Domain location=510-781; Score=144.5; E_value=3.4e-40; Accession=PF07714.9; Description =Protein tyrosine kinase
  Pfam module annotation: Pfam domain module=APH::Pkinase::Pkinase_Tyr; Domain location=512-688::510-781::510-781
GLGGGRGGGGGGSGQLXGGCALLAAALVVSALVIHGAGXKVLLSITSWHPQNNLDNALHPSPVQDQRFERVGPAVPPVSTASPPLPIGKQMKRSAVSTETAVHPANHGKNHGIPVAAPSKGGHHHSMPVNNTHGKTHGPPVVAPAKRKHHHAPANGEGPGISPSKSPIAHRNRHGHGNSGLHHSPAPAPVHLPPSKGRGPGNYAYAPHHPHQYHSPSYSPGPALPPVHPPETPVFKKPKALAPTPNQPLLSPPTNLYCTASCQDPLTNSPPGTTCLCVLPIKVELRFGIALYTFFTLVAEFAQDIASGVLMNQSQVRVMGANAAPDDPEKTIVFIDLVPLEPKFDNTTALLVFERFWHKKVIINPMHFGKYDVLYVQYEGLPPSPPASMNNGLSNVNGQTFHPLAADVVNHGERKGRGIIVIIILSSVFAFILCAGAALVVYFKLRNHSHLTEASLVPTKPAGPGSAMAGNRLESRPISASPSFSSSLVAYKGSAKAFSLVEMERATQVFDESRIIGEGGFGRVYEGILEDGERVAIKVLKRDDQQGTREFLAEVEMLSRLHHRNLVKLIGICTEGHSRCLVYELVPNGSVESHLHDKGASRLDWDARLKIALGAARALAYLHEDSSPRVIHRDFKSSNILLEHDFTPKVSDFGLARTALGEGNEHISTRVMGTFGYVAPEYAMTGHLLVKSDVYSYGVVLLELLTGRKPVDMSRPPGQENLVAWASSLLTSRDGLESIIDPSLGSSIAFDSIAKVAAIASMCVQPEVDQRPFMGEVVQALKLVCNEGSEFNGSTSFSQDLHIQDVEIMSRASMDMDVDPALSAELFTSSARYDAIDASGSFRRYSSSGPLRVGEXGHNKEXGLSTGSSSEH

SEQ ID NO: 112940 - protein, 90 aa, Setaria italica
  Transcript Sequence Number=SeqID_46966
  Gene Ontology: Mol. function=protein serine/threonine kinase activity; Cellular component=cell surface; Biological process =protein amino acid phosphorylation
  Homolog annotation: Hit_ID=O82103; Match level="QueryCoverage=93%, HitCoverage=10%, E-value=1e-21, Identity=50%"; Hit description=S -domain receptor-like protein kinase
KETKPLLDGDLRGAVDCRIAGEADVAEVERACKVACWCVQDAESLRPSMGMVVQVLEGLVDVDVPPIPKSLKVLADPAKYVEFFSGLPST

SEQ ID NO: 112941 - protein, 123 aa, Setaria italica
  Transcript Sequence Number=SeqID_46967
  Gene Ontology: Mol. function=protein serine/threonine kinase activity; Biological process=protein amino acid phosphorylation
  Homolog annotation: Hit_ID=B6U8P2; Match level="QueryCoverage=100%, HitCoverage=18%, E-value=1e-47, Identity=73%"; Hit description =Receptor-like protein kinase RK20-1
QKQDRAFFIIATVYSSAVLCTRLFFWLLSVWRKEKRRKINTIEEPENMDEVLRLWRTEDTSSEFSLYDFSQIADATDNFSPKSKLGEGGFGPVYKGVFPDGQELAIKDCLARSQQGLLEFKNE

SEQ ID NO: 112942 - protein, 45 aa, Setaria italica
  misc_feature (44)..(44): Xaa can be any naturally occurring amino acid
  Transcript Sequence Number=SeqID_46968
LGSLIMPLLRRNPVVGIQGNCRESPNSSNNHVKCDDIREEDSDXK

SEQ ID NO: 112943 - protein, 136 aa, Setaria italica
  misc_feature (15)..(15): Xaa can be any naturally occurring amino acid
  Transcript Sequence Number=SeqID_46969
  Gene Ontology: Cellular component=chloroplast; Biological process =respiratory chain complex IV assembly
  Homolog annotation: Hit_ID=Q4FGF9; Match level="QueryCoverage=33%, HitCoverage=15%, E-value=1e-12, Identity=76%"; Hit description =Cytochrome c biogenesis protein (Fragment)
MLFATLEHILTHISXTISIVIMIHLITLLVCELRGLRDLSEKGMITTFFSIIGFLVLRWVSSGHFPLSNLLGTSSVVPAVLAGRAGTIKGHSAGLGPTVRHVVLARPGTKKSSGLIVPDLVRPGQIGLVPGGPSGH

SEQ ID NO: 112944 - protein, 89 aa, Setaria italica
  Transcript Sequence Number=SeqID_46970
  Subcellular localization annotation: CTP_CleavageSite=56; ConfidenceScore=5.35e-01
GGGSRDSGSGYRGGSGGFRRPSNDFGRSSFGRSDRFGDFGEGDFSRRGSPDFGRSRSSDDSGSSRYGRGSSGVGTPGFGNFGGYGDSKR

SEQ ID NO: 112945 - protein, 70 aa, Setaria italica
  Transcript Sequence Number=SeqID_46971
  Gene Ontology: Mol. function=metal ion binding
  Homolog annotation: Hit_ID=Q25AI3; Match level="QueryCoverage=90%, HitCoverage=4%, E-value=8e-23, Identity=85%"; Hit description =H0702G05.10 protein
LAWRQPLQPVAGVTIPMVLPAVEPEEINEVAIDVEREEDEGGTVGETFTDYRPPKLSLGLPHPDPVVETS

SEQ ID NO: 112946 - protein, 63 aa, Setaria italica
  Transcript Sequence Number=SeqID_46972
  Subcellular localization annotation: CTP_CleavageSite=55; ConfidenceScore=5.06e-01
TMVSLNNQVSRAPQINDVCQSYNVYPFSKYSRGIKASSNKLNCLMHQSNNFKHAAASIKVSRI

SEQ ID NO: 112947 - protein, 34 aa, Setaria italica
  Transcript Sequence Number=SeqID_46973
  Homolog annotation: Hit_ID=A1YJE1; Match level="QueryCoverage=97%, HitCoverage=21%, E-value=2e-10, Identity=90%"; Hit description=ZIM motif-containing protein (Fragment)
  Pfam annotation: Domain name=CCT_2; Domain location=15-34; Score =28.4; E_value=3e-05; Accession=PF09425.2; Description=Divergent CCT motif
VADPSSMCKLQADLPIARRHSLQRFLEKRRDRLA

SEQ ID NO: 112948 - protein, 203 aa, Setaria italica
  Transcript Sequence Number=SeqID_46974
  Gene Ontology: Cellular component=nucleus; Biological process =regulation of transcription, DNA-dependent
  Homolog annotation: Hit_ID=B6TWZ7; Match level="QueryCoverage=100%, HitCoverage=100%, E-value=8e-55, Identity=61%"; Hit description=ZIM motif family protein
  Pfam annotation: Domain name=CCT_2; Domain location=156-182; Score =55.2; E_value=2.5e-13; Accession=PF09425.2; Description=Divergent CCT motif
  Pfam annotation: Domain name=tify; Domain location=57-92; Score=80.4; E_value=6.5e-21; Accession=PF06200.6; Description=tify domain
  Pfam module annotation: Pfam domain module=CCT_2::tify; Domain location=156-182::57-92
MDLLERNIKKGEEEEEARKEEGRKEEEKTQEPQQGQGLSLSLANGSARSGMLPMSNPSANPQQLTIFYGGSVCVYDSVPPEKAQAIMLIAAAAAAATKTTAVKPPMMPVAAATVAPAAVSPALTRSLSLQSTSVANGQPQVVADPSSMCKLQADLPIARRHSLQRFLEKRRDRIVNKAPYSPAKSSEGMESPGMEVAAEGKAQ

SEQ ID NO: 112949 - protein, 94 aa, Setaria italica
  misc_feature (53)..(53): Xaa can be any naturally occurring amino acid
  Transcript Sequence Number=SeqID_46975
  Gene Ontology: Mol. function=protein tyrosine kinase activity; Biological process=protein amino acid phosphorylation
  Homolog annotation: Hit_ID=Q337L8; Match level="QueryCoverage=98%, HitCoverage=9%, E-value=2e-27, Identity=68%"; Hit description =Leucine Rich Repeat family protein, expressed
  Pfam annotation: Domain name=LRR_1; Domain location=22-45; Score=6.1; E_value=21; Accession=PF00560.25; Description=Leucine Rich Repeat
  Pfam annotation: Domain name=LRR_1; Domain location=71-93; Score =15.9; E_value=0.17; Accession=PF00560.25; Description=Leucine Rich Repeat
  Pfam module annotation: Pfam domain module=LRR_1::LRR_1; Domain location=22-45::71-93
FVDLSGNHLSGSLPASFVGMRKMREFGVSFNNLTGEIPGALFTGWPELITCPXESCSLTGKIPPALGKATKLRILYLFSNNLTGSIPTELGELA

SEQ ID NO: 112950 - protein, 93 aa, Setaria italica
  Transcript Sequence Number=SeqID_46976
  Gene Ontology: Mol. function=nucleotide binding; Biological process =defense response
  Homolog annotation: Hit_ID=Q53L10; Match level="QueryCoverage=97%, HitCoverage=9%, E-value=2e-21, Identity=54%"; Hit description=NB-ARC domain containing protein
AISPPPRHLQKFDMSIDYYFPRIPNWMESLEYLTYLDIYLSPVDEESFRTFGDLPSLLFLWISSSSVKPKEGVITGSNGFCCLKEFYFSCWEI

SEQ ID NO: 112951 - protein, 163 aa, Setaria italica
  misc_feature (55)..(55): Xaa can be any naturally occurring amino acid
  misc_feature (72)..(72): Xaa can be any naturally occurring amino acid
  Transcript Sequence Number=SeqID_46977
  Gene Ontology: Mol. function=catalytic activity; Biological process =metabolic process
  Homolog annotation: Hit_ID=B6TNE1; Match level="QueryCoverage=100%, HitCoverage=29%, E-value=1e-50, Identity=68%"; Hit description=4 -coumarate--CoA ligase 2
MGDAAIAVVREDEEEHIFRSRFPPVSVPDDVTVPEFVLEGAEAYADKVALVEAAXGGRSHTYGEVARDVARXARALRSVGVRKGHVVVVALPNLAVYPVVSLGIMSAGAVFSGVNPRAIAAEIRKQVEDSEAKLVVANEVAFDKVKDAGVPVIGIGDAERMPG

SEQ ID NO: 112952 - protein, 160 aa, Setaria italica
  Transcript Sequence Number=SeqID_46978
  Gene Ontology: Mol. function=protein serine/threonine kinase activity; Cellular component=plasma membrane; Biological process =protein amino acid phosphorylation
  Homolog annotation: Hit_ID=B6STX9; Match level="QueryCoverage=100%, HitCoverage=37%, E-value=6e-70, Identity=78%"; Hit description =Serine/threonine-protein kinase NAK
  Pfam annotation: Domain name=Pkinase; Domain location=1-160; Score= -46.9; E_value=1.1e-05; Accession=PF00069.17; Description=Protein kinase domain
  Pfam annotation: Domain name=Pkinase_Tyr; Domain location=2-159; Score=-86.4; E_value=5.6e-08; Accession=PF07714.9; Description =Protein tyrosine kinase
  Pfam module annotation: Pfam domain module=Pkinase::Pkinase_Tyr; Domain location=1-160::2-159
GGRVVLAVKRLNQRSLQGHKQWLAEVQFLGVLEHPNLVKLIGYCAVDSEAGKHRLLVYEFMPNKSLDDHLFNRSHPPLSWRLRLQIMIGAAWGLDYLHEGVPEVQVIYRDFKASNILLDAEFKPKLSDFGLAREGPTEGKTHVSTAVVGTHGYAAPDYIE

SEQ ID NO: 112953 - protein, 96 aa, Setaria italica
  Transcript Sequence Number=SeqID_46979
  Gene Ontology: Mol. function=protein serine/threonine kinase activity; Cellular component=plasma membrane; Biological process =protein amino acid phosphorylation
  Homolog annotation: Hit_ID=A7UGD8; Match level="QueryCoverage=93%, HitCoverage=20%, E-value=9e-41, Identity=87%"; Hit description =Ser/thr protein kinase
STAFWCEWQVIYRDFKASNILLDAEFKPKLSDFGLAREGPTEGKTHVSTAVVGTHGYAAPDYIETGHLTAKSDVWSFGVVLYEILTGRRSLERSRP

SEQ ID NO: 112954 - protein, 123 aa, Setaria italica
  Transcript Sequence Number=SeqID_46980
  Gene Ontology: Mol. function=protein serine/threonine kinase activity; Biological process=protein amino acid phosphorylation
  Homolog annotation: Hit_ID=B9S1N3; Match level="QueryCoverage=86%, HitCoverage=23%, E-value=3e-39, Identity=76%"; Hit description =Receptor serine-threonine protein kinase, putative
MARRPVRSSRSTTSDFTAKLSDFGLAKMGPEGEDTHVTTRVMGTHGYAAPEYVQTGHLNVKSDVYSFGVVLLELLTGRRAMEHVRGRSAHAEQQVKLVDWTRPYLSGGSRRLRCIMDQRLGPV

SEQ ID NO: 112955 - protein, 236 aa, Setaria italica
  misc_feature (149)..(149): Xaa can be any naturally occurring amino acid
  Transcript Sequence Number=SeqID_46981
  Gene Ontology: Mol. function=protein serine/threonine kinase activity; Cellular component=plasma membrane; Biological process =protein amino acid phosphorylation
  Homolog annotation: Hit_ID=B6ST24; Match level="QueryCoverage=99%, HitCoverage=49%, E-value=1e-81, Identity=65%"; Hit description =Protein kinase APK1B
  Pfam annotation: Domain name=Pkinase_Tyr; Domain location=1-139; Score=-176.5; E_value=0.054; Accession=PF07714.9; Description =Protein tyrosine kinase
FQDYNTKLSDFGLAKDGPQGDETHVTTRVMGTHGYAAPEYILTGHLTAKSDVYSFGVVLLELLSGRQSVDRARRPREQNLVDWARPYLKHPDRLYRVMDPALECQYSCRGAEVAAIVAYKCLSQNPKSRPTMREVVKALEPVLGMDDFXPAGPFVFTISVEDDKVVGVKVEVEEKKPHRPQQHQSHQDRHRQKYPNSSIHAGIVLHSRDGMVGGDDYTGAIRRQRRASSHRQERGA

SEQ ID NO: 112956 - protein, 50 aa, Setaria italica
  Transcript Sequence Number=SeqID_46982
  Gene Ontology: Mol. function=protein serine/threonine kinase activity; Biological process=protein amino acid phosphorylation
  Homolog annotation: Hit_ID=B6STX9; Match level="QueryCoverage=84%, HitCoverage=9%, E-value=1e-16, Identity=97%"; Hit description =Serine/threonine-protein kinase NAK
VIYRDFKTSNILLDKDFRAKLSDFGLAREGPTGANTHVSTAVCLPPSYQE

SEQ ID NO: 112957 - protein, 125 aa, Setaria italica
  misc_feature (113)..(113): Xaa can be any naturally occurring amino acid
  Transcript Sequence Number=SeqID_46983
  Gene Ontology: Mol. function=protein serine/threonine kinase activity; Biological process=protein amino acid phosphorylation
  Homolog annotation: Hit_ID=Q84QD9; Match level="QueryCoverage=64%, HitCoverage=18%, E-value=1e-32, Identity=80%"; Hit description =Avr9/Cf-9 induced kinase 1
  Pfam annotation: Domain name=Pkinase_Tyr; Domain location=1-112; Score=-174.0; E_value=0.037; Accession=PF07714.9; Description =Protein tyrosine kinase
KTNPHLVKLVGFCNEDDQRMLVYEYMPRGSLENHLFKNLLASLPWSTRLKIAVGAAKGLAFLHEAETPVIYRDFKASNILLDSVTSFCHDDLHSSGLHREAVRFRAGEGGPAXGGRDTRDDARDG

SEQ ID NO: 112958 - protein, 105 aa, Setaria italica
  Transcript Sequence Number=SeqID_46984
  Gene Ontology: Mol. function=protein serine/threonine kinase activity; Biological process=protein amino acid phosphorylation
  Homolog annotation: Hit_ID=B6ST24; Match level="QueryCoverage=66%, HitCoverage=14%, E-value=4e-21, Identity=74%"; Hit description =Protein kinase APK1B
  Subcellular localization annotation: CTP_CleavageSite=3; ConfidenceScore=5.09e-01
PPSSASRVSLSGLDSSGPLTPEDLSVTLSVSGSDLHAFTRAELRAATAGFARANYLGCGGFGPVYRGRLGAGLRPGLDAEREVAVKYLDPDCGTQGHREWLAEVF

SEQ ID NO: 112959 - protein, 52 aa, Setaria italica
  Transcript Sequence Number=SeqID_46985
  Gene Ontology: Mol. function=protein serine/threonine kinase activity; Biological process=protein amino acid phosphorylation
  Homolog annotation: Hit_ID=Q84QD9; Match level="QueryCoverage=78%, HitCoverage=9%, E-value=1e-15, Identity=92%"; Hit description =Avr9/Cf-9 induced kinase 1
LPWSTRLNIAVGAAKGLAFLHDAEKPVIYRDFKASNILLDSVSCLCNLTCHL

SEQ ID NO: 112960 - protein, 116 aa, Setaria italica
  Transcript Sequence Number=SeqID_46986
  Gene Ontology: Mol. function=protein serine/threonine kinase activity; Biological process=protein amino acid phosphorylation
  Homolog annotation: Hit_ID=B9RQY5; Match level="QueryCoverage=58%, HitCoverage=15%, E-value=9e-12, Identity=50%"; Hit description =Protein kinase APK1A, chloroplast, putative
SELSRRLASFRRLSSLANSPASATMASSDGGSGKACGGEAAGEMAGPLQLHSFGLGELRGVTHDFSSSFLLGEGGFGAVYKGFVDAGMRPGLGAQPVAVKQLNAAGFQGHREWLAE

SEQ ID NO: 112961 - protein, 259 aa, Setaria italica
  misc_feature (10)..(10): Xaa can be any naturally occurring amino acid
  Transcript Sequence Number=SeqID_46987
  Gene Ontology: Mol. function=protein serine/threonine kinase activity; Cellular component=plasma membrane; Biological process =protein amino acid phosphorylation
  Homolog annotation: Hit_ID=B6STX9; Match level="QueryCoverage=100%, HitCoverage=62%, E-value=1e-128, Identity=89%"; Hit description =Serine/threonine-protein kinase NAK
  Pfam annotation: Domain name=Pkinase; Domain location=6-227; Score =35.9; E_value=1.2e-10; Accession=PF00069.17; Description=Protein kinase domain
  Pfam annotation: Domain name=Pkinase_Tyr; Domain location=1-227; Score=-32.6; E_value=1.5e-11; Accession=PF07714.9; Description =Protein tyrosine kinase
  Pfam module annotation: Pfam domain module=Pkinase::Pkinase_Tyr; Domain location=6-227::1-227
VLEHPILVKXLLGYCAVDSERGPQRIVGVRVMPNKSLEDHLFRRANPPLSWNGRLQVILGAAEGLAYLHEGVEVQVIYRDFKTSNILLDKDFRAKLSDFGLAREGPTGANTHVSTAVVGTHGYAAPEYIDSGHLTAKSDVWSFGVVLYEILTGRRSLDRNKPVAEQKLLEWVAQFPPDSRNFRMIMDPRLRGEYSVKAAREIAKLADSCLLKNAKERPTMSEVVEVLRRAVQAAEPDGRAPGAGAVKGKRADAAAPSRR

SEQ ID NO: 112962 - protein, 465 aa, Setaria italica
  misc_feature (49)..(49): Xaa can be any naturally occurring amino acid
  Transcript Sequence Number=SeqID_46988
  Gene Ontology: Mol. function=protein serine/threonine kinase activity; Biological process=protein amino acid phosphorylation
  Homolog annotation: Hit_ID=Q84QD9; Match level="QueryCoverage=70%, HitCoverage=74%, E-value=1e-133, Identity=69%"; Hit description =Avr9/Cf-9 induced kinase 1
  Pfam annotation: Domain name=Pkinase; Domain location=105-384; Score =124.0; E_value=4.9e-34; Accession=PF00069.17; Description=Protein kinase domain
  Pfam annotation: Domain name=Pkinase_Tyr; Domain location=105-384; Score=115.0; E_value=2.5e-31; Accession=PF07714.9; Description =Protein tyrosine kinase
  Pfam module annotation: Pfam domain module=Pkinase::Pkinase_Tyr; Domain location=105-384::105-384
PVPRAASASGEGAEQRRRELIDHGAEEAPAAVLRVRRRGGGGSGAEGGXAARPAGGRRAGTKPTLRRLSTANLRSLSLQDLSRKLETTKLHAFTLDELKAATKNFSTANFLGEGGFGPVYKGFVDARLRPGLDPQHVAVKYLDLESGGVQGHREWLAEVVYLGMLSHPHLVKLVGFCNEDDQRMLVYEYMPRGSLENHLFKNLLASLPWMRRMEIAVGAAKGLAFLHDADTPVIYRDFKASNILLDSDYTTKLSDFGLAKDGPEGDDTHVSTRVMGTHGYAAPEYIMTGHLTAKSDVYSFGVVLLEILTGRRSVDKTRPSREQNLVDYARPCLKDPLKLARIMDPAMEGQYSAQAAQSAALVAYRCLSGSPKNRPDMSAVVEALEPLLSLKDDVPLGPVGPVGPVVLFVAATETPAAAEEKKERTPRKDVRRRRPMSPKASPRKRGGAGQKEEFWVWHLPAEQKA

SEQ ID NO: 112963 - protein, 388 aa, Setaria italica
  Transcript Sequence Number=SeqID_46989
  Gene Ontology: Mol. function=protein serine/threonine kinase activity; Biological process=protein amino acid phosphorylation
  Homolog annotation: Hit_ID=B9RRA2; Match level="QueryCoverage=86%, HitCoverage=74%, E-value=1e-128, Identity=66%"; Hit description =Protein kinase APK1B, chloroplast, putative
  Pfam annotation: Domain name=Pkinase; Domain location=81-358; Score =133.5; E_value=6.6e-37; Accession=PF00069.17; Description=Protein kinase domain
  Pfam annotation: Domain name=Pkinase_Tyr; Domain location=81-358; Score=109.4; E_value=1.2e-29; Accession=PF07714.9; Description =Protein tyrosine kinase
  Pfam module annotation: Pfam domain module=Pkinase::Pkinase_Tyr; Domain location=81-358::81-358
MRTTRKEKASAWRSLLGGCLGGGGGAKGDSSRQQRKVRPGGGRLSFTDLSGAADQDLSVSLVGSNLHVFSVAELKDATRGFVSGNFLGEGGFGPVYKGFVADGVKKGLKAQAIAVKLWDPEGAQGHREWLAEVIFLGQLRHPHLVKLVGYCCEDEQRLLVYEYMPRGSLENHLFKKIPATLPWSTRLKIAVGAAKGLAFLHDAETPVIYRDFKASNILLDSDYTAKLSDFGLAKEGPQGDATHVTTRVMGTHGYAAPEYILTGHLTAKSDVYSFGVVLLELLTGRRSVDKRRRGREQNLVDWARPYLRRADRLHRVMDPSLEMQYSARAAEKAAKVAHQCLQSVPKARPSMRDVVGALEPLLALDDDVPMGPFVYTVGGGGAEAGTKD

SEQ ID NO: 112964 - protein, 206 aa, Setaria italica
  misc_feature (24)..(24): Xaa can be any naturally occurring amino acid
  Transcript Sequence Number=SeqID_46990
  Pfam annotation: Domain name=DUF593; Domain location=99-192; Score =89.2; E_value=1.5e-23; Accession=PF04576.7; Description=Protein of unknown function, DUF593
AASVWRLGKRCAAVEGLAGSADSXVRAIAVGGVVCAVCGSKIQALKRGRRVAERTHSDSSNGYPDKPISRSLAAEFEQEADKDEEDNAGESSDSDEGNVQYLRRRLKEERLLKEVALEELEKERLAAASAADEAMAKIACLRSEKALVEREARQLQEMAKQKQLYDRQVIESLQWVIMKSGMQGWEPEAASDPAASETSEDDRDRK

SEQ ID NO: 112965 - protein, 67 aa, Setaria italica
  Transcript Sequence Number=SeqID_46991
LMEELASGLKRICLLDQQPCARCDAMDDTQSPSRNRWRFPVEEEEKEVMRHQLVDGLSSSSVEISIG

SEQ ID NO: 112966 - protein, 62 aa, Setaria italica
  Transcript Sequence Number=SeqID_46992
  Subcellular localization annotation: CTP_CleavageSite=56; ConfidenceScore=5.04e-01
SGTKESPLLSRIVGAFNSIQIKSLDHSLGPRQRSHFSHFLFTHLQRSPFSNPTTILGDLIRK

SEQ ID NO: 112967 - protein, 358 aa, Setaria italica
  Transcript Sequence Number=SeqID_46993
  Gene Ontology: Mol. function=oxidoreductase activity; Cellular component=chloroplast envelope
  Homolog annotation: Hit_ID=B6TYB4; Match level="QueryCoverage=93%, HitCoverage=88%, E-value=1e-180, Identity=92%"; Hit description=Aldo- keto reductase yakc
  Pfam annotation: Domain name=Aldo_ket_red; Domain location=35-345; Score=199.7; E_value=8e-57; Accession=PF00248.13; Description =Aldoketo reductase family
FRFLVFVFPFYVFRFRFGSAAAAAAKEEDGKVALGGSGVTVTKLGIGAWSWGDTTYWNEFQWDDRKLKAAKGAFDASIDCGITFFDTAEVYGAGVSGAINSESLLGRFIKERQQKEPVEVAIATKFAALPWRFGRGSVISALKASLDRLGVSSVELYQLHWPGIWGNEGYLDGLGDAVEQGLVKAVGVSNYSEKRLRDAYERLKKRGIPLASNQVNYSLIYRNPEENGVKAACDELGITLIAYSPIAQGALTGKYTPDNPPKGPRGRIYTPEFLTKLQPLINRIKEIGGNYGRTPTQVVLNWLVCQGNVVPIPGAKNAEQAREFAGALGWSLTGEEVEELRSMARQVKPVIGFPVEKL

SEQ ID NO: 112968 - protein, 177 aa, Setaria italica
  misc_feature (125)..(125): Xaa can be any naturally occurring amino acid
  Transcript Sequence Number=SeqID_46994
  Homolog annotation: Hit_ID=B6U6A3; Match level="QueryCoverage=71%, HitCoverage=30%, E-value=1e-12, Identity=35%"; Hit description=F-box domain containing protein
RPQCVQYSDCSDDNSDSHGDDNSDSDDDTPDSDSDSDGDCSGSNLGSSDANVDDDNHRHKGKDKDWEDFEDFTANLMLRCNIAQLDSFRLHIIGSRAPEFGDRQAAGWLRCTMKYFAPIVPVSMXGLSSGSWCLKRLHLCHVILDNHFVKHVRSVCHSLEDLDLDDCSCKIRSITSH

SEQ ID NO: 112969 - protein, 204 aa, Setaria italica
  misc_feature (129)..(129): Xaa can be any naturally occurring amino acid
  misc_feature (181)..(181): Xaa can be any naturally occurring amino acid
  Transcript Sequence Number=SeqID_46995
  Gene Ontology: Mol. function=oxidoreductase activity; Cellular component=extracellular region; Biological process=oxidation reduction
  Homolog annotation: Hit_ID=Q0IQU1; Match level="QueryCoverage=99%, HitCoverage=35%, E-value=2e-94, Identity=84%"; Hit description =Laccase-22
  Pfam annotation: Domain name=Cu-oxidase; Domain location=35-188; Score=179.6; E_value=8.6e-51; Accession=PF00394.14; Description =Multicopper oxidase
LLWHAHINWLRATVHGAIVILPKLGVPYPFPTLHKEVVVVLGEWWKADTEVVINQAMQQGVGPNVSDSHTINGHPGPLSDCASSQDGFKLNVENGKTYMLRIINAALNDDLFFKIAGHKFTVVEVDIVXFLLRKTATLLITPGQTTNVLLTADRTAGRYLLSVSPFMDAPVQVDNKTGTAXTLHYANTISATAPLTLIKPPPQM

SEQ ID NO: 112970 - protein, 96 aa, Setaria italica
  Transcript Sequence Number=SeqID_46996
KVLCFVTGLFYLSSKKNANMYPLDILDACAYLRHVKGCRFHPTIVAGELIGIMPAFFRASHVFSRPIQCVARCHALVAHGLNRQGLSSGFCILYCD

SEQ ID NO: 112971 - protein, 124 aa, Setaria italica
  Transcript Sequence Number=SeqID_46997
MEATALSLHLCMVATKAVKLASRVMDNATLRHDKQAETYLHTTKQTLTMYVSIFVKLAEDTYHRKFDDDSVFSLLGAFRGVAAIAHILVKDAIESVDSVEYGSWNYNSLVEDTDNSWPEFRAEY

SEQ ID NO: 112972 - protein, 459 aa, Setaria italica
  Transcript Sequence Number=SeqID_46998
  Gene Ontology: Mol. function=protein serine/threonine kinase activity; Biological process=protein amino acid phosphorylation
  Homolog annotation: Hit_ID=B6U0K3; Match level="QueryCoverage=100%, HitCoverage=81%, E-value=0.0, Identity=87%"; Hit description=ATP binding protein
  Pfam annotation: Domain name=Pkinase; Domain location=1-387; Score =119.0; E_value=1.6e-32; Accession=PF00069.17; Description=Protein kinase domain
  Pfam annotation: Domain name=Pkinase_Tyr; Domain location=1-385; Score=-142.2; E_value=0.00029; Accession=PF07714.9; Description =Protein tyrosine kinase
  Pfam module annotation: Pfam domain module=Pkinase::Pkinase_Tyr; Domain location=1-387::1-385
KSAQHYTEAAMDEIKILKQIADGDPDDSKCVVKLLDHFKHSGPNGNHVCMVFEFLGDNLLTLIKYTNYRGIPLPMVKEICRHVLIGLDYLHRTLSIIHTDLKPENILLVSTIDPSKDPRKSGVPLVLPSAKTDEPTPKAPAPSVNGGLSKNQKKKIRRKAKRAAAATSEGGNAVASADTDGSDDRGDLGTTNEGSPSQDGAKKRSKGDRQGSKGAKKKMAMEADLKCKLVDFGNACWTYKQFTSDIQTRQYRCPEVILGSKYSTSADLWSFACICFELATGDVLFDPHSGDNFDRDEDHLALMMELLGMMPRKIALGGRYSREFFNRYGDLRHIRRLRFWPLNKVLMEKYEFTERNANDMADFLVPILDFVPEKRPTAAQLLQHPWLDAGPLQKQPTTLPDSTQNSADGVSEKQRKENEERDAMAVELGNIAIDGASPSRTASDPQASTNKATATPSKK

SEQ ID NO: 112973 - protein, 41 aa, Setaria italica
  Transcript Sequence Number=SeqID_46999
RWSAKKHMAIWPVARSLKSEAETGLYQTEIMGLTTQRFTQS

SEQ ID NO: 112974 - protein, 73 aa, Setaria italica
  Transcript Sequence Number=SeqID_47000
HKRDHRTSYHCISYTPFGCRYWRSEFGIRIRCPQFYRLDGLDIGIGNLASMPSGIQRCKHRVPRFRPLPLRVL

SEQ ID NO: 112975 - protein, 356 aa, Setaria italica
  misc_feature (87)..(87): Xaa can be any naturally occurring amino acid
  misc_feature (344)..(344): Xaa can be any naturally occurring amino acid
  Transcript Sequence Number=SeqID_47001
  Gene Ontology: Cellular component=integral to membrane
  Homolog annotation: Hit_ID=Q5ZA66; Match level="QueryCoverage=100%, HitCoverage=84%, E-value=2e-68, Identity=35%"; Hit description =Embryogenesis transmembrane protein-like
AVTLIGLVGAYSAGSCRQIDTTIYVNSLVGAVIGFILVQAAIVKFCKDAITNSCLWKQLKRIRDKVSGCLCGTEQSCLEQNTQRQRXTGNSNGSAKQQEHQVLEKARSLVLLLSTLAAAITYQAGLNPPGGLWQRDDAGGRYMAGDPILLTVNPRRYKAFYYCNSIAFVASLVAIILARTNALHHHNALEAAMILDLFGLIGAYAAGSCRDVSTSIYAMALAGAVLVYVVIHVVFLTLGNKDGSTKGNDEASLEKEKTAEELMEKRRKRLLLFAILAATITYQAGLTPPGGFLDNDDQVRKRLAGDPVLLNNDPRRYTAFFYCNSVSFMLSIALIILLVNPNLXGRPVRSNALSVC

SEQ ID NO: 112976 - protein, 198 aa, Setaria italica
  Transcript Sequence Number=SeqID_47002
  Gene Ontology: Cellular component=integral to membrane
  Homolog annotation: Hit_ID=Q5ZA66; Match level="QueryCoverage=90%, HitCoverage=77%, E-value=4e-20, Identity=34%"; Hit description =Embryogenesis transmembrane protein-like
LSVCTAAGLIGIMGGYAAGCTQHLKTSIYIFVLAAVVLGSVVLLVAVFFVKNLIKQGEDKPSNSSHIASLPSAEEGGGANNATRAEQAPSQVRGNSSNTAAQVRREKKLHAKRKYLMLLGILAASVTYQAGLWQDDDAGGGYKNGDPILLTVNPRRYKAFYYCNSIAFVASLVAIILARTNALHHHNALEAAMRPNRS

SEQ ID NO: 112977 - protein, 245 aa, Setaria italica
  Transcript Sequence Number=SeqID_47003
  Gene Ontology: Cellular component=integral to membrane
  Homolog annotation: Hit_ID=Q2MJU2; Match level="QueryCoverage=76%, HitCoverage=94%, E-value=5e-37, Identity=41%"; Hit description =Cadmium tolerance factor
VLFVGLLGLYCNVLLIRSGTLSKPSNSSHIASLPSAEEGGGANNATRAEQAPSQVRGNSSNTAAQVRREKKLHAKRKYLMLLGILAASVTYQAGLAPPGGFWQSNGSGHAAGDPVMHDNRRSRYLAFFYSNSTSFVASVVVIVLLLPPSLQNKPLWLWVMNATIVLDLLGLLIAYAAGSSRTLKTSMIVSTLVFGVLVYFAIHVLLSHFSRRRKTAPAASASGAEPNEEANGGLQAQMGPGHERS

SEQ ID NO: 112978 - protein, 49 aa, Setaria italica
  Transcript Sequence Number=SeqID_47004
LSASSEGTNSPICRAQTRTCMPYLIILFCQHECKHERERERRRRRRRRE

SEQ ID NO: 112979 - protein, 59 aa, Setaria italica
  Transcript Sequence Number=SeqID_47005
LLCEQHASSWLYALIDGRYLLLQFDDYFVHTMIKHALHTLLIYLDNEMLLHVHSIALMM

SEQ ID NO: 112980 - protein, 138 aa, Setaria italica
  Transcript Sequence Number=SeqID_47006
  Gene Ontology: Mol. function=transferase activity, transferring groups other than amino-acyl groups; Biological process=biosynthetic process
  Homolog annotation: Hit_ID=B4G105; Match level="QueryCoverage=100%, HitCoverage=33%, E-value=4e-66, Identity=87%"; Hit description =Chalcone synthase
  Pfam annotation: Domain name=Chal_sti_synt_N; Domain location=10-138; Score=51.2; E_value=4.1e-12; Accession=PF00195.11; Description =Chalcone and stilbene synthases, N-te
MVSNDLDTAAAKQASSTGPQTPGKATILALGHAFPQQLVMQDYVVDGFMKNTNCDDPELKEKLTRLCKTTTVKTRYVVMSDEILKSYPELAQEGLPTMKQRLDISNKAVTQMATEASLACVRSWGGALSSITHLVYVS

SEQ ID NO: 112981 - protein, 94 aa, Setaria italica
  Transcript Sequence Number=SeqID_47007
QVETKKRINKQINNAIAMAVHAAARPGLERSIDPPQLASSTHPHPHAHGSPPRRPAPAPDRRRRLFAWQCHRRRRSHPQRRRCHCPRSDAPCRT

SEQ ID NO: 112982 - protein, 324 aa, Setaria italica
  Transcript Sequence Number=SeqID_47008
  Gene Ontology: Mol. function=protein binding; Cellular component =cytosol; Biological process=tRNA wobble uridine modification
  Homolog annotation: Hit_ID=Q6Z6G6; Match level="QueryCoverage=99%, HitCoverage=88%, E-value=1e-180, Identity=95%"; Hit description =Cytoplasmic tRNA 2-thiolation protein 1
  Pfam annotation: Domain name=ATP_bind_3; Domain location=68-258; Score=-23.2; E_value=9.9e-08; Accession=PF01171.12; Description=PP -loop family
MGSSSADGARLPPSRAGSRLCVRCGERKAALKRPKTLEQICRECFYIVFEDEIHQTIVDNTLFKAGERVAIGASGGKDSTVLAYVISELNRRHNYGLDLFLLSVDEGITGYRDDSLETVKRNEIQYGLPLKIVSYKDLYGWTMDDIVKAIGLKNNCTFCGVFRRQALDRGAALLKADKIVTGHNADDIAETVLLNILRGDIARLSRCTFITTGEDGPIPRCKPFKYTYEKEIVMYAYFKKLDYFSTECIYSPNAYRGFAREFIKDLERMRPRSILDIIKSGENFRISTTTRMPEQGTCERCGYISSQKLCKACVLLDGLNRGLP

SEQ ID NO: 112983 - protein, 146 aa, Setaria italica
  Transcript Sequence Number=SeqID_47009
  Gene Ontology: Mol. function=sequence-specific DNA binding; Cellular component=nucleus; Biological process=regulation of transcription, DNA-dependent
  Homolog annotation: Hit_ID=Q75LX7; Match level="QueryCoverage=81%, HitCoverage=35%, E-value=3e-25, Identity=53%"; Hit description =Homeobox protein knotted-1-like 4
  Pfam annotation: Domain name=KNOX1; Domain location=85-129; Score =83.3; E_value=8.8e-22; Accession=PF03790.5; Description=KNOX1 domain
  Subcellular localization annotation: CTP_CleavageSite=33; ConfidenceScore=5.41e-01
TTLPCPNASSSVPQTIKHPQITRSVCMEQLPVLASGSKATTTTPFYLALDHRASTSSSPPAEAPTPPPAAVSDPSGQSNSEMGSEIIKAKIMSHPLYPALLRAFIDCRKVGAPPEVVGRLSALAGEVEMNSGDGQEQPTEADPELD

SEQ ID NO: 112984 - protein, 500 aa, Setaria italica
  Transcript Sequence Number=SeqID_47010
  Gene Ontology: Mol. function=tryptophan synthase activity; Biological process=tryptophan biosynthetic process
  Homolog annotation: Hit_ID=Q9FFW8; Match level="QueryCoverage=92%, HitCoverage=91%, E-value=0.0, Identity=68%"; Hit description =Tryptophan synthase beta chain
  Pfam annotation: Domain name=PALP; Domain location=122-463; Score =148.5; E_value=2e-41; Accession=PF00291.17; Description=Pyridoxal -phosphate dependent enzyme
  Subcellular localization annotation: CTP_CleavageSite=51; ConfidenceScore=5.57e-01
MAAAAAATTATTTTLRPALPQAGPEQRASLLCTPKHRVAAGGRRSLSFTARASLNSGAKVSIPKQWYNLVADLPVKPPPPLHPQTHQPLNPSDLSPLFPDELIRQEVTDERFVDIPEEVIDVYKLWRPTPLIRARRLEKLLGTPAKIYYKYEGTSPAGSHKPNTAVPQAWYNAAAGVKNVVTETGAGQWGSALSFASSLFGLNCEVWQVRASFDQKPYRRLMMETWGAKVHPSPSEATEAGRKILAADPTSPGSLGIAISEAVEVAATDAATKYCLGSVLNHVLLHQTVIGEECLEQLAALGEAPDIVIGCTGGGSNFGGLAFPFMREKLAGRMSPEFRAVEPAACPTLTKGIYAYDFGDTAGLTPLMKMHTLGHGFVPDPIHAGGLRYHGMAPLISHVYELGFMDAVAIQQTECFQAALQFARTEGIIPAPEPTHAIAAAIREAMECKKTGEEKVILMAMCGHGHFDLAAYEKYLRGDMVDLSHSADKLEASLAAVPKV

SEQ ID NO: 112985 - protein, 125 aa, Setaria italica
  misc_feature (50)..(50): Xaa can be any naturally occurring amino acid
  misc_feature (115)..(115): Xaa can be any naturally occurring amino acid
  Transcript Sequence Number=SeqID_47011
  Gene Ontology: Mol. function=signal transducer activity; Cellular component=plasma membrane; Biological process=response to light stimulus
  Homolog annotation: Hit_ID=B6UC07; Match level="QueryCoverage=96%, HitCoverage=20%, E-value=9e-47, Identity=76%"; Hit description =Transposon protein Mutator sub-class
  Pfam annotation: Domain name=NPH3; Domain location=20-125; Score= -83.3; E_value=5e-05; Accession=PF03000.6; Description=NPH3 family
RGAGSTAGGYNSVSVSKAVDAWWADELTSLRIDTFQRVLIAMKAEGVRGXALGTLIMLYAQKSLRRLDMHGRDKKKMDPRQEHEKRVVLETIVSLLPKEKNSMSVSFLSMLLRAXLHLDTTLACR

SEQ ID NO: 112986 - protein, 82 aa, Setaria italica
  Transcript Sequence Number=SeqID_47012
  Gene Ontology: Mol. function=signal transducer activity; Cellular component=plasma membrane; Biological process=response to light stimulus
  Homolog annotation: Hit_ID=B6UC07; Match level="QueryCoverage=79%, HitCoverage=10%, E-value=2e-28, Identity=86%"; Hit description =Transposon protein Mutator sub-class
DDFISAASPPNDVGMVGRLMEAYLAEIASDANLPIDKFTGLAEMIPERARFNEDGMYRAIDIYLKVRISDQLFIVLHCWLWF

SEQ ID NO: 112987 - protein, 80 aa, Setaria italica
  Transcript Sequence Number=SeqID_47013
TSCLHRLQTVHASYQQLKLEHEEHIPKWKAKKARSSTGGGVRRYHTSRWSSSSPAYRTGSPSFNPFAKVTELPYVHLLPD

SEQ ID NO: 112988 - protein, 548 aa, Setaria italica
  Transcript Sequence Number=SeqID_47014
  Gene Ontology: Mol. function=signal transducer activity; Cellular component=plasma membrane; Biological process=response to light stimulus
  Homolog annotation: Hit_ID=B6UC07; Match level="QueryCoverage=99%, HitCoverage=88%, E-value=0.0, Identity=75%"; Hit description =Transposon protein Mutator sub-class
  Pfam annotation: Domain name=BTB; Domain location=18-121; Score=13.1; E_value=0.0012; Accession=PF00651.23; Description=BTBPOZ domain
  Pfam annotation: Domain name=NPH3; Domain location=194-450; Score =360.5; E_value=3.1e-105; Accession=PF03000.6; Description=NPH3 family
  Pfam module annotation: Pfam domain module=BTB::NPH3; Domain location= 18-121::194-450
MESRFDTPAMKRTSDWVLSQEYPSDITIQVGEATFNLHKLPLASRCGYIRKQVSGINGSKFTTHIDLTGMPGGSRAFELVTKFCYGENLEITEDNVAMLRCAAEHLEMTDDSNGGNLVGRAEAYLEAVALMSLAGAVTVLRKSEELLPVAEEVDLVGRCIDAIAHITCNNSQFSAALGSTAGGYNSVSVSKAVDAWWADELTSLRIDTFQRVLIAMKARGFKGIALGTLIMLYAQKSLRRLDMHGRDKKKMDPRQEHEKRVVLETIVSLLPKEKNSMSVSFLSMLLRAALHLDTTLACRLDLEKRMSSQLGQAVLDDLLIPSSSLDAGTTFDVDAVQRILAGYLEHESEAAQLDYNTDDDFISAASPPNDVGMVGRLMEAYLAEIASDANLPIDKFTGLAEMIPERARFNEDGMYRAIDIYLKAHPHLSEPERKKVCKAMDCQKLSREACAHAAQNDRLPVQTVVQVLYHEQRRLREAPTHAPSGASSFYGGESPPPSLPYKPTPSLMGRHARGGAAPAEEVSQLQRENDELKMELLRLKMRLRDPSA

SEQ ID NO: 112989 - protein, 78 aa, Setaria italica
  Transcript Sequence Number=SeqID_47015
ILIHLPIFLLPLFVFSCRVRILKMSSFINFNQQLVKLCACLVYKSYMNRFVFQIYFNMTYFAAIDDILYEKLVVKVHF

SEQ ID NO: 112990 - protein, 359 aa, Setaria italica
  Transcript Sequence Number=SeqID_47016
  Gene Ontology: Mol. function=binding; Cellular component=vacuole
  Homolog annotation: Hit_ID=B9RP02; Match level="QueryCoverage=98%, HitCoverage=53%, E-value=8e-49, Identity=56%"; Hit description=Heat shock protein 70 (HSP70)-interacting protein, putative
  Pfam annotation: Domain name=PB1; Domain location=160-239; Score =68.1; E_value=3.2e-17; Accession=PF00564.16; Description=PB1 domain
  Pfam annotation: Domain name=Prp31_C; Domain location=107-228; Score=- 42.9; E_value=0.04; Accession=PF09785.1; Description=Prp31 C terminal domain
  Pfam annotation: Domain name=TPR_1; Domain location=10-45; Score =11.2; E_value=0.27; Accession=PF00515.20; Description=Tetratricopepti de repeat
  Pfam annotation: Domain name=TPR_1; Domain location=46-79; Score =23.2; E_value=0.0011; Accession=PF00515.20; Description =Tetratricopeptide repeat
  Pfam annotation: Domain name=TPR_2; Domain location=10-45; Score=6.3; E_value=5.5; Accession=PF07719.9; Description=Tetratricopeptide repeat
  Pfam annotation: Domain name=TPR_2; Domain location=46-79; Score =27.8; E_value=4.5e-05; Accession=PF07719.9; Description =Tetratricopeptide repeat
  Pfam module annotation: Pfam domain module=PB1::Prp31_C::TPR_1::TPR _1::TPR_2::TPR_2; Domain location=160-239::107-228::10-45::46-79::10 -45::46-79
LLPRAHPYIAYLHSNIAACYMQMSPPDYYRAINECNIALEASPKYAKALLKRARCFEALGRLDLACRDVNKVLALEPNNLTALDVADRVKKAMEEKGIVLDEKEVMPTPEEVVAAAPKQKPRKKRGGRKFAAKAAAAAVEEAEEQKMAESVKEEEVEELPRQVKLVFGEDIRWAQVPASCSMAQLREAVRSKFPGLKAVLVKYKDKEGDLVTITNQDELKWAQELAEPGSSLRLYVTEANPEHEPYVDDANSGPLEKNVNSASDNGSIRSNRQDEDRSTVTCIDDWIVQFARLFKNHVGVSSDEYLDLHEVSMKLYTEAIEDTITTEEAQEVFQLAERNFQEMAALAFFHSNNVTYLGL

SEQ ID NO: 112991 - protein, 53 aa, Setaria italica
  Transcript Sequence Number=SeqID_47017
SLASVVEGIQSVFGEDEFVRCGLGREQMAARLAATAAAALFPGAISGVVSDKM

SEQ ID NO: 112992 - protein, 245 aa, Setaria italica
  misc_feature (240)..(240): Xaa can be any naturally occurring amino acid
  Transcript Sequence Number=SeqID_47018
  Homolog annotation: Hit_ID=Q01CV6; Match level="QueryCoverage=73%, HitCoverage=37%, E-value=2e-10, Identity=30%"; Hit description =Putative transporter (ISS)
PFDVGAAPFLRFRRVFLVIFSLASVVEGIQSVFGEDEFVRCGLGREQMAARLAATAAAALFPGAISGVVADKIGPRRACIFYWVLQLAVGALKSFSALGCAWINNFILTLASSLFSFCFETWLVVEHEKQDQKQDLLFDTFWVMTFFESVSLIGSQEITNVLVSNDDNGFLLPYAFAATLSVVGILYMRNASSTTQHASAVGSYQKSFFAHVLRDKRVLILVLAQAGIHFAISAFWFLWXPTIVA

SEQ ID NO: 112993 - protein, 85 aa, Setaria italica
  Transcript Sequence Number=SeqID_47019
  Homolog annotation: Hit_ID=B6T5H4; Match level="QueryCoverage=49%, HitCoverage=12%, E-value=2e-11, Identity=80%"; Hit description =Rhomboid-like protein
  Subcellular localization annotation: CTP_CleavageSite=46; ConfidenceScore=5.40e-01
MASWLLLPLPSFPWLPPPPPPGSSSGGRGGGGGGGDGGDWRPNVVAAFAGAQVGSALRRRFAGLLRSPEVRHLEALPNMGDICFG

SEQ ID NO: 112994 - protein, 84 aa, Setaria italica
  Transcript Sequence Number=SeqID_47020
ADSNALRPALSHGANATVTLMAPAGFHTDDLRLLRPANLGERLQRDTNRSSHPCTRLSCAGLLSLYTLDTGKNKVLALLASLFP

SEQ ID NO: 112995 - protein, 78 aa, Setaria italica
  Transcript Sequence Number=SeqID_47021
GRGDGEGSGERDGARGSPGRRGGARRVQEAGAAGLQPAAQLGSRKQAQVLRSASIFFLSFSLAQSHKAIDFEPVTVIS

SEQ ID NO: 112996 - protein, 264 aa, Setaria italica
  Transcript Sequence Number=SeqID_47022
  Gene Ontology: Cellular component=mitochondrion
  Homolog annotation: Hit_ID=B9SYW9; Match level="QueryCoverage=85%, HitCoverage=36%, E-value=3e-49, Identity=42%"; Hit description =Pentatricopeptide repeat-containing protein, putative
  Pfam annotation: Domain name=PPR; Domain location=103-137; Score=4.0; E_value=3; Accession=PF01535.12; Description=PPR repeat
  Pfam annotation: Domain name=PPR; Domain location=138-172; Score=4.2; E_value=2.8; Accession=PF01535.12; Description=PPR repeat
  Pfam annotation: Domain name=PPR; Domain location=173-207; Score =31.3; E_value=3.9e-06; Accession=PF01535.12; Description=PPR repeat
  Pfam annotation: Domain name=PPR; Domain location=208-242; Score =37.0; E_value=7.7e-08; Accession=PF01535.12; Description=PPR repeat
  Pfam annotation: Domain name=PPR; Domain location=33-67; Score=8.4; E_ value=0.91; Accession=PF01535.12; Description=PPR repeat
  Pfam annotation: Domain name=PPR; Domain location=68-102; Score=7.9; E_value=1; Accession=PF01535.12; Description=PPR repeat
  Pfam module annotation: Pfam domain module=PPR::PPR::PPR::PPR::PPR::PP R; Domain location=103-137::138-172::173-207::208-242::33-67::68-102
IAKHSSSSSVPASSFLDAFFAAYEDSGTGATTRGLHLLVHAYARLRLPGEALEACRYLAQRGIIPSLSAFNAALQSAQRAGAFGVAWEVFELMTQKRVYANQSTVELVIGVLSREGKLARTAALVERIHGKKCAPSIVAHVALTLRMIEEEKVEQVILLLKRMLQRNILLDDIAYSLIVDAYCRIGDLKAAFEQRDDMVRRGCHLNAFVYTSLIRAHCCRRSVDKAVQLLQEMLSMGLKPYDATYSHLIAGCFRQGMVEEGFGP

SEQ ID NO: 112997 - protein, 215 aa, Setaria italica
  Transcript Sequence Number=SeqID_47023
  Gene Ontology: Mol. function=oxidoreductase activity; Cellular component=extracellular region; Biological process=oxidation reduction
  Homolog annotation: Hit_ID=Q339K6; Match level="QueryCoverage=91%, HitCoverage=33%, E-value=1e-79, Identity=71%"; Hit description =Laccase-15
  Pfam annotation: Domain name=Cu-oxidase_3; Domain location=40-156; Score=220.8; E_value=3.5e-63; Accession=PF07732.7; Description =Multicopper oxidase
  Subcellular localization annotation: CTP_CleavageSite=41; ConfidenceScore=5.03e-01
MVSMESRSLLAAAPALAVAIIFLSTTAPLARAASVEHTFVVNQTKMTRLCKETLVTVVNGQLPGPTIEVTEGDSVTVHVVNRSPYNITIHWHGVKQFRNCWADGVPMVTQYPIQPNKDFTYRFNVVGQEGTLWWHAHVPGLRATLHGAFIIRPRLGAESYPFPKPHKEIPVIIGDWWEEDLAEMARNMTKSIFLSDASASTINGLVGDLFNCSGV

SEQ ID NO: 112998 - protein, 159 aa, Setaria italica
  Transcript Sequence Number=SeqID_47024
  Gene Ontology: Mol. function=nucleotide binding; Biological process =defense response
  Homolog annotation: Hit_ID=Q9ATQ3; Match level="QueryCoverage=98%, HitCoverage=17%, E-value=2e-50, Identity=62%"; Hit description=LRR14
IFPEDYEMKRRRLIRHRITAGFIDEKENQTMEEMAERCLNELVNRSLLQVVKKNGFGRVKCCRMHDAVRQLALDRAEKECFGKVYEGSQTFSVDGTRRLSIQNSNIGPLSQSGATKFRAIHVFTNYIDIDLLRPILASSNLLSTLDLQGTQLKMLSDEV

SEQ ID NO: 112999 - protein, 128 aa, Setaria italica
  misc_feature (53)..(53): Xaa can be any naturally occurring amino acid
  Transcript Sequence Number=SeqID_47025
MWSWRRRDRGGWRWDKDWMMSFREIWDDVSYTDAGLPRNVLVLAVVCPSDPNXVYFALEHCLFGVNVPAHKMLHIDPYELVNVLGPPRPAFGRYVVAWELPPAAAQGKTSLRFSKFYSSASLSFYPFL

SEQ ID NO: 113000 - protein, 50 aa, Setaria italica
  Transcript Sequence Number=SeqID_47026
GGRGRRRGTTPWEAERRRGLVVGHVFYLLEPAAEKAKELLDRIAAFVRAE

SEQ ID NO: 113001 - protein, 284 aa, Setaria italica
  Transcript Sequence Number=SeqID_47027
  Homolog annotation: Hit_ID=Q5H9X6; Match level="QueryCoverage=100%, HitCoverage=52%, E-value=1e-146, Identity=87%"; Hit description =P0650D04.6 protein
  Pfam annotation: Domain name=DUF668; Domain location=155-244; Score =194.2; E_value=3.5e-55; Accession=PF05003.4; Description=Protein of unknown function (DUF668)
YDRIRLVFGDPMLGIDLLAATREPGQCDQSRQLSGPVTANSGPIQKNLNYSKSGPISRVDPDMPRLVNFRSNCGASPGKMFMECLSLSSSVSWKDGFEDEFLEDSSCISTIRSGMLVPFSGEQGESTTPTKSGKIGRRVRFGPKSTVTSLAPPSTIGGSALALHYANIIIIIEKLLRYPHLVGEEARDDLYQMLPSSLKVALRKNLKTYVKNVAIYDAFLAHDWRETLEKTLAWLAPMAHNMIRWQAERNFEQQQIVLKGNVLLLQTLYFADREKTEAVICELL

SEQ ID NO: 113002 - protein, 179 aa, Setaria italica
  misc_feature (18)..(18): Xaa can be any naturally occurring amino acid
  Transcript Sequence Number=SeqID_47028
  Gene Ontology: Mol. function=oxidoreductase activity; Cellular component=endoplasmic reticulum membrane; Biological process =oxidation reduction
  Homolog annotation: Hit_ID=Q0VH87; Match level="QueryCoverage=86%, HitCoverage=51%, E-value=8e-40, Identity=50%"; Hit description=3 -ketoacyl-CoA reductase 2
  Subcellular localization annotation: CTP_CleavageSite=36; ConfidenceScore=5.06e-01
CAAYFRRGGGSPVWEAVXRVNVEAATRITRAVVPLMAARGRGAVVNVGSGSSVVVPAFPLYAVYAASKAYVDQFSRSLSVEYKQYGVDVQCQIPLYVATKMSPVKGDCPFIPSPEEYAKAALRCIGYEARCVPYWRHSVQWFLASLVPDAALNQWRLQIGIRKRNETNKALAGVKKVLG

SEQ ID NO: 113003 - protein, 156 aa, Setaria italica
  Transcript Sequence Number=SeqID_47029
  Gene Ontology: Mol. function=protein serine/threonine kinase activity; Cellular component=plasma membrane; Biological process =protein amino acid phosphorylation
  Homolog annotation: Hit_ID=Q1ENX0; Match level="QueryCoverage=88%, HitCoverage=59%, E-value=3e-29, Identity=44%"; Hit description =Leucine-rich repeat-containing protein kinase family protein
  Pfam annotation: Domain name=LRR_1; Domain location=23-45; Score =17.4; E_value=0.059; Accession=PF00560.25; Description=Leucine Rich Repeat
  Pfam annotation: Domain name=LRR_1; Domain location=47-69; Score =16.2; E_value=0.13; Accession=PF00560.25; Description=Leucine Rich Repeat
  Pfam annotation: Domain name=LRR_1; Domain location=71-93; Score =20.7; E_value=0.0059; Accession=PF00560.25; Description=Leucine Rich Repeat
  Pfam annotation: Domain name=LRR_1; Domain location=95-116; Score =15.2; E_value=0.27; Accession=PF00560.25; Description=Leucine Rich Repeat
  Pfam module annotation: Pfam domain module=LRR_1::LRR_1::LRR_1::LRR _1; Domain location=23-45::47-69::71-93::95-116
ANFDAGYNNFRGSIPDGVGGLHFLRSLVLSGNNLTGQIPGQFGDLAALEVLDLSRNSLTGSIPLHLTDASRLEVLRLDHNRLSGSIPPSFSELAQLTVLDVSFNNLSGDIPNLRHPSDCGFFIGNSLLHQCLSTNASLPPTEAISSSKGAKKWGSK

SEQ ID NO: 113004 - protein, 91 aa, Setaria italica
  Transcript Sequence Number=SeqID_47030
RPLEHAGHEHVLRPAPWRGVRALLGPRHEVRVLGGWWVIDGDGDGTVLTASDLSHGVVFFQDLLPARAPPGIQGPLDLPVRRRRWLGHGAA

SEQ ID NO: 113005 - protein, 219 aa, Setaria italica
  Transcript Sequence Number=SeqID_47031
  Gene Ontology: Mol. function=protein binding; Cellular component =membrane
  Homolog annotation: Hit_ID=B9S651; Match level="QueryCoverage=99%, HitCoverage=9%, E-value=8e-76, Identity=60%"; Hit description=RNA binding protein, putative
KPEYNDSSRCSTSACLASIAPYNGRRETSVYATDIISGITIHCKVFVDKISRIRIFHHAVKIDLDEIATLRVHAFDDEENVFSSLVGLQFLWQLSPRLLDSSSHHLVHIPLKETHLSDCGGFCGDMNIRFELEDKNLGSDFFVVKGIEIGQEVVKAQLFEPQLEHVIDTITLTVAEAMSLEPPSPVLVTVGVSVKFKLKVFRQKVAEVIKLPSPYHRWH

SEQ ID NO: 113006 - protein, 43 aa, Setaria italica
  Transcript Sequence Number=SeqID_47032
KALVFYAGKAPRGVKTDWIMHEYRLADAGRAAAAKKGSLRVSR

SEQ ID NO: 113007 - protein, 316 aa, Setaria italica
  Transcript Sequence Number=SeqID_47033
  Gene Ontology: Mol. function=DNA binding; Cellular component=nucleus; Biological process=regulation of transcription
  Homolog annotation: Hit_ID=B5A4B4; Match level="QueryCoverage=100%, HitCoverage=100%, E-value=1e-130, Identity=76%"; Hit description=NAC domain-containing protein 67
  Pfam annotation: Domain name=NAM; Domain location=17-143; Score =297.2; E_value=3.5e-86; Accession=PF02365.7; Description=No apical meristem (NAM) protein
MGVPVRRERDAEAELNLPPGFRFHPTDDELVEHYLCRKAAGQRLPVPIIAEVDLYKFDPWDLPERALFGTREWYFFTPRDRKYPNGSRPNRAAGNGYWKATGADKPVAPRGRTLGIKKALVFYAGKAPRGVKTDWIMHEYRLADAGRAAAAKKGSLRLDDWVLCRLYNKKNEWEKMQMGKGSALAAATTTKEEAMDMTTSHSHSQSHSHSWGETRTPESEIVDNDPFPELDDSFPAFQDPAAAMMVPKKEPQVDDGGNLAAKNSDLFVDLSYDDIQSMYSGLDMLPPPGEDFYSSLFASPRVKGNHTTGGAGLAPF

SEQ ID NO: 113008 - protein, 80 aa, Setaria italica
  Transcript Sequence Number=SeqID_47034
NEAEDALSGSELGAQAAAAAARAGGLSWKGRAGSHDCERRQPLQQQKGRQLRQRHGHSHRRGYFYSRAADSSPKYHPGQS

SEQ ID NO: 113009 - protein, 72 aa, Setaria italica
  Transcript Sequence Number=SeqID_47035
AIEGGFQISYVLLVLFFRLKIISCHSGYNCVATLFTCISDFSNGVDVHGYIRMGAHLLNCAIVLYLDLTLIS

SEQ ID NO: 113010 - protein, 114 aa, Setaria italica
  misc_feature (87)..(87): Xaa can be any naturally occurring amino acid
  Transcript Sequence Number=SeqID_47036
KTTNDRPSKGRSLDKAEFTVTEIYEKVRRLRTKYCNLRDAGGPPVPEGGEDGGDEVRKYELSKAIWGDQPANVAKKGGSTSAAAVAXCPKQAAPSHACARGLEELQGLFPCLAA

SEQ ID NO: 113011 - protein, 60 aa, Setaria italica
  Transcript Sequence Number=SeqID_47037
LFIFLVMLITDFEDSRMIVLLVQNVKLLITYKKQNKPTIDKKLINIPFLHLHLGMLAMFH

SEQ ID NO: 113012 - protein, 316 aa, Setaria italica
  Transcript Sequence Number=SeqID_47038
  Homolog annotation: Hit_ID=Q01FV5; Match level="QueryCoverage=44%, HitCoverage=37%, E-value=7e-25, Identity=37%"; Hit description =Ubiquinol cytochrome c reductase assembly protein CBP3 (ISS)
  Pfam annotation: Domain name=Ubiq_cyt_C_chap; Domain location=153 -307; Score=27.2; E_value=2.7e-08; Accession=PF03981.4; Description =Ubiquinol-cytochrome C chaperone
  Subcellular localization annotation: CTP_CleavageSite=12; ConfidenceScore=5.55e-01
MSRWHTAACRISAAAASRNSAAESRVLSRACSKAPSLPPLPPPLQTLARTFAKSAAAATSTSTATSRSSGAAAPASAGPRPEVRLNSMFLSKPCSLALPPDSPLRAADPQYEGIKRFMLTLLLFYSKQSKALRGANVVYDRITSQVDAPAIYDVFQLEKTFKTTFSLLVLHMWLVLRRLKEEGKDGVKFGQYIYEIYNHDVELRVSKAGVNLLLIKWMKELEKIFYGNIVKYDAAISPEARQDDLVNVIWRNIYAEEGSEAMDAAAAPAVQALARYTRREATCLSLTDKDVMFSGNFKFTTLLPPTPSPSPKKPAR

SEQ ID NO: 113013 - protein, 63 aa, Setaria italica
  Transcript Sequence Number=SeqID_47039
VRIAAGVEVPIDESGIGGRIAEIDGELDWIDQVGGGGGTLVPAPTLETHSTGLIDGLKPGLSC

SEQ ID NO: 113014 - protein, 82 aa, Setaria italica
  Transcript Sequence Number=SeqID_47040
CVRIVNVLAHSAVGVDISDACRCRTVDLLSCHCIALQIHINCTIVHFMTRARLENSPVCTVLFQQKADKSDIQFSCLFAWLP

SEQ ID NO: 113015 - protein, 57 aa, Setaria italica
  Transcript Sequence Number=SeqID_47041
  Gene Ontology: Cellular component=spliceosome; Biological process =mitosis
  Homolog annotation: Hit_ID=Q9NX01; Match level="QueryCoverage=96%, HitCoverage=36%, E-value=3e-15, Identity=60%"; Hit description =Thioredoxin-like protein 4B
IQGTPDHTKWIGSFSSKQDFIDVVEAIFRGAMKGKLIVSCPLPPDRIPRFQLLFKDV

SEQ ID NO: 113016 - protein, 152 aa, Setaria italica
  Transcript Sequence Number=SeqID_47042
  Gene Ontology: Mol. function=ligase activity; Cellular component =spliceosome; Biological process=mitosis
  Homolog annotation: Hit_ID=Q9NX01; Match level="QueryCoverage=98%, HitCoverage=99%, E-value=1e-48, Identity=58%"; Hit description =Thioredoxin-like protein 4B
  Pfam annotation: Domain name=DIM1; Domain location=5-139; Score=84.9; E_value=2.8e-22; Accession=PF02966.8; Description=Mitosis protein DIM1
MGSALLPTLRQKREVDAAIRDTLDKVLVLRFGRAADAACLHLDDILAKSSWDISKFASVALVDMDSEEIQVYIDYFDITLVPATIFFFNAHHMKMDSGTPDHTKWIGSFSSKQDFIDVVEAIFRGAMKGKLIVSCPLPPDRIPRFQLLFKDV

SEQ ID NO: 113017 - protein, 33 aa, Setaria italica
  Transcript Sequence Number=SeqID_47043
  Homolog annotation: Hit_ID=Q84VF2; Match level="QueryCoverage=96%, HitCoverage=26%, E-value=3e-09, Identity=100%"; Hit description =Putative transcription factor BTF3
MMNVDKLKKMAGAVRTGGKGSVRRKKKAVHKTT

SEQ ID NO: 113018 - protein, 164 aa, Setaria italica
  Transcript Sequence Number=SeqID_47044
  Gene Ontology: Mol. function=RNA polymerase II transcription factor activity; Cellular component=nucleus; Biological process =transcription from RNA polymerase II promoter
  Homolog annotation: Hit_ID=B6TMU1; Match level="QueryCoverage=90%, HitCoverage=88%, E-value=2e-65, Identity=85%"; Hit description =Transcription factor BTF3
  Pfam annotation: Domain name=NAC; Domain location=34-92; Score=112.5; E_value=1.4e-30; Accession=PF01849.10; Description=NAC domain
MNVDKLKKMAGAVRTGGKGSVRRKKKAVHKTTTTDDKRLQSTLKRIGVNTIPGIEEVNIFKDDVVIQFQNPKVQASIPANTWVVSGVPQTKSLQDLLPTIINQLGPDNLENLRRLAEQFQKVPGAEGGASAAAQDDDDVPELVPGETFEEAAEKEAEPEEKKES

SEQ ID NO: 113019 - protein, 87 aa, Setaria italica
  Transcript Sequence Number=SeqID_47045
  Gene Ontology: Mol. function=sugar binding
  Homolog annotation: Hit_ID=Q6Z4N7; Match level="QueryCoverage=89%, HitCoverage=19%, E-value=8e-37, Identity=82%"; Hit description =Putative r40c1 protein
VRLTRYDPDTLDEAVLWTESRDVGNGFRCIRMVNNIYLNFDALHGDKDHGGVRDGTTLVLWEWCEGDNQRWKIVPWCKFSRIWSACL

SEQ ID NO: 113020 - protein, 186 aa, Setaria italica
  Transcript Sequence Number=SeqID_47046
  Gene Ontology: Mol. function=sugar binding
  Homolog annotation: Hit_ID=B6STP1; Match level="QueryCoverage=86%, HitCoverage=77%, E-value=3e-63, Identity=70%"; Hit description =Stress responsive protein
RTDGRTGNGGGGSEYGHHETRPHHGGGGAPPVRQQTYRIYCKAGEDQFSLATRDGKVCLVRTDRDDDTQHWIKDMKYSTRVKDEEGYPAMALVNKATGEALKHSLGKSHPVRLTRYDPDTLDEAVLWTESRDVGNGFRCIRMVNNIYLNFDALHGDKDHGGVRDGTTLVLWEWCEGDNQRWKIVPW

SEQ ID NO: 113021 - protein, 122 aa, Setaria italica
  Transcript Sequence Number=SeqID_47047
  Gene Ontology: Mol. function=transferase activity; Cellular component= mitochondrion
  Homolog annotation: Hit_ID=Q8S5M5; Match level="QueryCoverage=93%, HitCoverage=17%, E-value=2e-41, Identity=58%"; Hit description =Pentatricopeptide, putative, expressed
  Pfam annotation: Domain name=PPR; Domain location=33-67; Score=42.6; E_value=1.5e-09; Accession=PF01535.12; Description=PPR repeat
  Pfam annotation: Domain name=PPR; Domain location=68-102; Score=34.0; E_value=6.2e-07; Accession=PF01535.12; Description=PPR repeat
  Pfam module annotation: Pfam domain module=PPR::PPR; Domain location =33-67::68-102
NTSRRLLTKARKVRDALELSKEMLNQGLTPDIVTYNTLINGLCKMGWTHAALNLLEKLPNENVHPDIITYNILISWHCKVRLLDDASMLLNKAVNGGIVPNERTWGVIVQNFVRQPVNLEAY

SEQ ID NO: 113022 - protein, 145 aa, Setaria italica
  Transcript Sequence Number=SeqID_47048
  Gene Ontology: Mol. function=zinc ion binding
  Homolog annotation: Hit_ID=B6U7G3; Match level="QueryCoverage=100%, HitCoverage=46%, E-value=5e-48, Identity=63%"; Hit description=Zinc finger, C3HC4 type family protein
FSDDWDRFLSKHPVPFYYCVGVVVFFVLVGFFGLIVHLSSFNNNDPCLAGCHNCFYGWGIVDLPASMEACFAFAVIFVILFAILGVAYGFLAATLAIQRIWQRHYHILTKKELAKEYVVEDLRDGYTPPKMDAEHEQRLKMLQLM

SEQ ID NO: 113023 - protein, 54 aa, Setaria italica
  Transcript Sequence Number=SeqID_47049
SGILISKGHHQLSCGYHRFIGLTAAYFFMHSVKLCKNWFLSCCSVAACRNMQVK

SEQ ID NO: 113024 - protein, 64 aa, Setaria italica
  Transcript Sequence Number=SeqID_47050
SLMPVCGVPGAVHLHPDLQAYYLVIRVFICQEISVIFCRFASFRGNNNALIFFHKKLKKFFSLD

SEQ ID NO: 113025 - protein, 207 aa, Setaria italica
  Transcript Sequence Number=SeqID_47051
  Gene Ontology: Mol. function=protein binding
  Homolog annotation: Hit_ID=B6U8S2; Match level="QueryCoverage=94%, HitCoverage=100%, E-value=4e-54, Identity=61%"; Hit description=WW domain containing protein
  Pfam annotation: Domain name=WW; Domain location=74-104; Score=30.2; E_value=8.5e-06; Accession=PF00397.18; Description=WW domain
GVVAYGGGFEEMEVQPELSLGMSAPAAGFAVVKSPRSSSSDSDGSGGKKRKHFAWREEAMSHASGLELQLGDPLPPDWEQCLDLHSGRMYYLNRKTMKKSWVRPRSSNKEEQGALNLELNISTTPSIFDGKASSIGAAVADETRSPNGGGHMVAVPCANCHLLVMLCKSSPSCPNCKFVQPSVPAMPRTPPRRLDAIKPLETLSLLH

SEQ ID NO: 113026 - protein, 382 aa, Setaria italica
  Transcript Sequence Number=SeqID_47052
  Gene Ontology: Mol. function=phosphoribosylformylglycinamidine cyclo -ligase activity; Cellular component=cytoplasm; Biological process ='de novo' IMP biosynthetic process
  Homolog annotation: Hit_ID=B9F7E5; Match level="QueryCoverage=93%, HitCoverage=91%, E-value=1e-165, Identity=77%"; Hit description =Phosphoribosylformylglycinamidine cyclo-ligase
  Pfam annotation: Domain name=AIRS; Domain location=84-179; Score =125.1; E_value=2.2e-34; Accession=PF00586.16; Description=AIR synthase related protein, N-terminal domain
  Pfam annotation: Domain name=AIRS_C; Domain location=213-382; Score =177.0; E_value=5.5e-50; Accession=PF02769.14; Description=AIR synthase related protein, C-terminal domain
  Pfam module annotation: Pfam domain module=AIRS::AIRS_C; Domain location=84-179::213-382
  Subcellular localization annotation: CTP_CleavageSite=46; ConfidenceScore=5.59e-01
MTTSRLVSFLRGPANSPAPSARWGPRQPQRLSFPQAGEGMRRVSVACSSASGEDEGMTYKGAGVDIDAGTELVRRIRKMAPGIGGFGGLFPFGDHYLVAGTDGVGTKLKLAFETGIHDTIGIDLVAMSVNDIVTSGAEPMFFLDYYATSKLDVDLAEKVIKGIVDGCQQSDCVLLGGETAEMPGFYAEGEYDLSGFAVGRVKKDKVIDGKNIVKGDVLIGLPSSGVHSNGFSLARRVLEKSGLSLSDQLPRNDGITTTVGEALMAPTVIYVKQVLEIISKGGVKGLAHITGGGFTDNIPRVFPSGLGAKIFTGSWEVPPVFKWLQQVGNIDDAEMRRTFNMGIGMVLVVSRESADRIIEDTRGSSHAYRIGEVIEGEGVHYV

SEQ ID NO: 113027 - protein, 71 aa, Setaria italica
  Transcript Sequence Number=SeqID_47053
ISTANNLDRCRFGGYEEIYGPVPFIQVGTRTTTATSVHCMRIIGCISLCYLEWPPCVTPKLLMYCITNSAD

SEQ ID NO: 113028 - protein, 181 aa, Setaria italica
  misc_feature (37)..(37): Xaa can be any naturally occurring amino acid
  misc_feature (86)..(86): Xaa can be any naturally occurring amino acid
  Transcript Sequence Number=SeqID_47054
  Gene Ontology: Mol. function=nucleoside-triphosphatase activity
  Homolog annotation: Hit_ID=Q2R029; Match level="QueryCoverage=98%, HitCoverage=32%, E-value=6e-44, Identity=48%"; Hit description=AAA -type ATPase family protein, putative, expressed
TNTCREGDRLEYIGDGSVKSIPSAYYYRGKVVLAFEXNGSSKVGVRFDNAIEYGNDLGGFCSAVELQPESSGGEEVDSLALGKLIXVISEESKNSNLIVLLKDVEKSFTKCTEYHASLRSELPAGVLIIGSHTQGGSCKDQPAIGSATEKTNHLHDLFPNKIPIELPQNEAQLSDLKKQLE

SEQ ID NO: 113029 - protein, 55 aa, Setaria italica
  Transcript Sequence Number=SeqID_47055
DYVEEPPIFFLLLATAVIRKSALDHLHEINHLHYIYLHYLYSITMLSVASTDPQF

SEQ ID NO: 113030 - protein, 65 aa, Setaria italica
  misc_feature (22)..(22): Xaa can be any naturally occurring amino acid
  misc_feature (42)..(42): Xaa can be any naturally occurring amino acid
  Transcript Sequence Number=SeqID_47056
  Subcellular localization annotation: CTP_CleavageSite=28; ConfidenceScore=5.14e-01
QNVIVLLLPPFLAAASPDLSYXSRIYTSAAAVAAAAASVASXSRVADAGAGGRHRHAGRRRRPRR

SEQ ID NO: 113031 - protein, 246 aa, Setaria italica
  misc_feature (35)..(35): Xaa can be any naturally occurring amino acid
  misc_feature (222)..(222): Xaa can be any naturally occurring amino acid
  Transcript Sequence Number=SeqID_47057
  Gene Ontology: Mol. function=electron carrier activity; Biological process=oxidation reduction
  Homolog annotation: Hit_ID=B6ST66; Match level="QueryCoverage=94%, HitCoverage=44%, E-value=8e-67, Identity=56%"; Hit description =Cytochrome P450 CYP92C5
  Pfam annotation: Domain name=p450; Domain location=1-246; Score= -160.2; E_value=0.00063; Accession=PF00067.14; Description=Cytochrome P450
FTMRNILRMVLGEKWSGSHGGSTEGEELWRLLEEXFALSGAVTNVGEWVPWLGWLDVQGLVRRMKRVHVQLDRFNEQVLREHEEHRRRAGDGEFAARDLVDVLLQQLAEDGQEEPAETRLTRDGVKAIVQDIFAGGTETSALTMEWAMVELLRRPDAIAAAAEEIDRVVGRGRWVAESDLPNLPYVDAILKETMRLHPVGPLMIPHGGREDAVVGGYDIPAXRVVINAWAVGLDVLLSTVRYRTVR

SEQ ID NO: 113032 - protein, 75 aa, Setaria italica
  misc_feature (48)..(48): Xaa can be any naturally occurring amino acid
  Transcript Sequence Number=SeqID_47058
  Homolog annotation: Hit_ID=Q5SND4; Match level="QueryCoverage=92%, HitCoverage=15%, E-value=5e-28, Identity=81%"; Hit description=GAMYB- binding protein
  Pfam annotation: Domain name=WD40; Domain location=5-43; Score=36.7; E_value=9.5e-08; Accession=PF00400.24; Description=WD domain, G-beta repeat
VNGVLQVTSTLVGHLDYSFATAWHPDGLTFATGNQDKTCRVWDLRNVXLCPAVLRGNIGAIRCIRYSSDGRFLVV

SEQ ID NO: 113033 - protein, 456 aa, Setaria italica
  Transcript Sequence Number=SeqID_47059
  Homolog annotation: Hit_ID=Q5SND4; Match level="QueryCoverage=88%, HitCoverage=87%, E-value=0.0, Identity=87%"; Hit description=GAMYB -binding protein
  Pfam annotation: Domain name=WD40; Domain location=277-314; Score =7.6; E_value=5; Accession=PF00400.24; Description=WD domain, G-beta repeat
  Pfam annotation: Domain name=WD40; Domain location=318-356; Score =39.4; E_value=1.4e-08; Accession=PF00400.24; Description=WD domain, G-beta repeat
  Pfam annotation: Domain name=WD40; Domain location=361-399; Score =8.5; E_value=3.9; Accession=PF00400.24; Description=WD domain, G -beta repeat
  Pfam module annotation: Pfam domain module=WD40::WD40::WD40; Domain location=277-314::318-356::361-399
MASSAASEAAGRMMDDDHDGWASDGEVDVEMEVGGEGHGLDADRRDGGADDDDAYSLVTRVSDTSAAEARAGKDIQGIPWDRLNITRQDYRKARLEQYKNYENFPQSGELMDKLCKQVEPSSKYYEFQNNTRSVKPSFLHFQLRNLLWATSKHDVYFMSESTVGHWSPLSHKLSTVLDFSGHVAPAEKHPGSLLEGFSGVQVSTLAVNEGLLVAGGFQGELICMGLADRNVKFCTRTTLSDNAITNAIDIHRSTSGSLRITVSNNDCGVREYDMERFQLLNHFRYNWPVNHTSVSPDRKLLAVVGDDRDALLVDSRNGKVTSTLVGHLDYSFATAWHPDGLTFATGNQDKTCRVWDLRNLSTSLAVLRGNIGAIRCIRYSSDGRFLVFSEPADFVHVYSAAADYKKRQEIDFFGEVSGITLSPDDESLFIGVCDRVYASLMQYKMKHAFDYLDSYV

SEQ ID NO: 113034 - protein, 62 aa, Setaria italica
  Transcript Sequence Number=SeqID_47060
  Gene Ontology: Mol. function=transferase activity, transferring nitrogenous groups; Biological process=biosynthetic process
  Homolog annotation: Hit_ID=Q10P00; Match level="QueryCoverage=100%, HitCoverage=19%, E-value=3e-16, Identity=67%"; Hit description =Aminotransferase, classes I and II family protein, expressed
MDMALPVVNATAAVLARVSAAFNAPLARAVVFGVHIDGHLVVEGLLIAVIVFQLTRKSYQTP

SEQ ID NO: 113035 - protein, 89 aa, Setaria italica
  Transcript Sequence Number=SeqID_47061
  Subcellular localization annotation: CTP_CleavageSite=54; ConfidenceScore=5.27e-01
PTSPSPVARPAPPDPPLMAAFSLVGQPTRRGRIYATAHCPPRLPRARQDWLILLAGEEGDSPWPRENSLNPRAASPAHMFFDSRGCGGR

SEQ ID NO: 113036 - protein, 86 aa, Setaria italica
  Transcript Sequence Number=SeqID_47062
  Subcellular localization annotation: CTP_CleavageSite=41; ConfidenceScore=5.22e-01
PPVFPSRRVLLLPRCRQLQQLPAGFRIYNPPPLPPRHRLIAAAQSVNTTRPRSRSKQPASYSIASPLDQELKAFSSDRSEDERAVF

SEQ ID NO: 113037 - protein, 200 aa, Setaria italica
  misc_feature (61)..(61): Xaa can be any naturally occurring amino acid
  misc_feature (155)..(155): Xaa can be any naturally occurring amino acid
  Transcript Sequence Number=SeqID_47063
  Gene Ontology: Mol. function=aspartic-type endopeptidase activity; Cellular component=chromatin; Biological process=RNA-dependent DNA replication
  Homolog annotation: Hit_ID=Q6UUM9; Match level="QueryCoverage=98%, HitCoverage=10%, E-value=6e-26, Identity=35%"; Hit description =Putative gag-pol polyprotein
HVQWLKNSSSIKIAQRVKVPFKVGEYVDTIECDVAPMTVYHLLLGRPWQYDPSSLHCGRTXTNQYTIKWKGKNMVLKPMTPQQLLAEHLQKSSKVRVESEKKSMSALHKSVSESHRPNERDKNKREENYLVMLATKSEMRDARCNPGQVLILLVXKTCCFQDMLLSTNDITSLPSVVSCVLQDYKDVLPEETPTFLSTYP

SEQ ID NO: 113038 - protein, 105 aa, Setaria italica
  Transcript Sequence Number=SeqID_47064
MASELHANARDTSSDKINFFFEASHRSNMVSMQLYAKEIECPPGASSAASILTRNLQTHGLDSKRSSEVKVLVFCVHCLIVERLLVSLPTSDFNIFVPDFLIICI

SEQ ID NO: 113039 - protein, 93 aa, Setaria italica
  Transcript Sequence Number=SeqID_47065
  Gene Ontology: Mol. function=protein binding; Biological process=cell division
  Homolog annotation: Hit_ID=Q7XC35; Match level="QueryCoverage=100%, HitCoverage=40%, E-value=6e-20, Identity=62%"; Hit description =Cyclin-P4-1
  Pfam annotation: Domain name=Cyclin; Domain location=10-92; Score= -47.2; E_value=0.039; Accession=PF08613.3; Description=Cyclin
GEMVEAAAVPRVVSILSALLQRVAERNDAAAAVEEAGALATAEGRRRPVSAFQGLTKPAISIGGYLERIFRFASCSPSCYVVAYIYLDRFLER

SEQ ID NO: 113040 - protein, 135 aa, Setaria italica
  Transcript Sequence Number=SeqID_47066
  Gene Ontology: Mol. function=transferase activity
  Homolog annotation: Hit_ID=Q6YVS8; Match level="QueryCoverage=94%, HitCoverage=34%, E-value=4e-56, Identity=78%"; Hit description=N -acetyltransferase and Transcription factor-like protein
RHYSVSSPEYCCAGGGELQSPNAWFSPHGTVTPLHHDPHHNLFAQVLGRKYFRLYPASVSVDLYPHTEAKLSNTSQVDLDSIDEKEFPKTADLEFVDGILEEGDLLYIPPKWWHYVRSLSISFSVRFWWRTSGSS

SEQ ID NO: 113041 - protein, 209 aa, Setaria italica
  misc_feature (40)..(40): Xaa can be any naturally occurring amino acid
  Transcript Sequence Number=SeqID_47067
  Gene Ontology: Mol. function=transferase activity
  Homolog annotation: Hit_ID=B9RI82; Match level="QueryCoverage=78%, HitCoverage=41%, E-value=5e-58, Identity=60%"; Hit description =Transcription factor, putative
MVLQVGKNHACTEWKQELITFSQFLERMWSSDSANLAYVXQASIVDQIKELREDITVPEYCCAGGGELQSPNAWFSPHGTVTPLHHDPHHNLFAQVLGRKYFRLYPASVSVDLYPHTEAKLSNTSQVDLDSIDEKEFPKTADLEFVDGILEEGDLLYIPPKWWHYMSYGADHLFYLAVDLAFVIIDDKALTANHTVHIKYSKLFLEESV

SEQ ID NO: 113042 - protein, 92 aa, Setaria italica
  Transcript Sequence Number=SeqID_47068
  Gene Ontology: Mol. function=transferase activity
  Homolog annotation: Hit_ID=Q6YVS8; Match level="QueryCoverage=91%, HitCoverage=22%, E-value=3e-34, Identity=83%"; Hit description=N -acetyltransferase and Transcription factor-like protein
MWRGGRGIAGDRDPADVLKLLPVKALSCKQIERRSCISLEAFIRDYFICESPVILSGCIDHWPARTKWKDINYLERIAGDRTIPVEVTYLHS

SEQ ID NO: 113043 - protein, 111 aa, Setaria italica
  misc_feature (73)..(73): Xaa can be any naturally occurring amino acid
  Transcript Sequence Number=SeqID_47069
KTSCKVTATWRVSNWRCATPVNCCLYVIDSLNMVCAYNMIFCPSKTLFISYNYLPMGHGEWTSTTTMAKPTFXDYCTMFPLEDNCSVSLLLDCKITIATPTFTFPSCLVIM

SEQ ID NO: 113044 - protein, 318 aa, Setaria italica
  Transcript Sequence Number=SeqID_47070
  Gene Ontology: Mol. function=nucleotide binding
  Homolog annotation: Hit_ID=B6U9L6; Match level="QueryCoverage=95%, HitCoverage=60%, E-value=1e-162, Identity=89%"; Hit description =Growth regulator like protein
  Pfam annotation: Domain name=DUF246; Domain location=1-273; Score =430.9; E_value=2e-126; Accession=PF03138.6; Description=Plant protein family
VQIGIKLTVGTNRRRRLRKSVPEFYIDEVLPILMRRRVLQLTKFDYRLTSELDEDLQKLRCRVNFHALRFTNSIRTLGQKLVRKLRLMSPRYVAVHLRFEPDMLAFSGCYYGGGEKERKELSEIRKRWDTLPELSAEDERSRGKCPLTPHEVGLMLRALGFGNDTNLYVASGEIYGGEETLRPLRELFPNFYTKEMLAGDDLKLFLPFSSRLAAIDFIVCDESDVFVTNNNGNMAKVLAGRRRYMGHKRTIRPNAKKLNVLFQRRKQMGWDTFSQKVQKVQRGLMGEPDDIRPKQDDFHEFPSACICLRKPGNVSVTT

SEQ ID NO: 113045 - protein, 80 aa, Setaria italica
  Transcript Sequence Number=SeqID_47071
SIRSFQMLQVFLWCTTLKERLCASFTRCQFENFAFFFLGLLLLFLFALVHHVSYSANGCHLFADDFYDFTFRVQSLQSKF

SEQ ID NO: 113046 - protein, 230 aa, Setaria italica
  misc_feature (7)..(7): Xaa can be any naturally occurring amino acid
  misc_feature (20)..(20): Xaa can be any naturally occurring amino acid
  Transcript Sequence Number=SeqID_47072
  Gene Ontology: Mol. function=phosphotransferase activity, alcohol group as acceptor; Cellular component=cytoplasm; Biological process =nuclear-transcribed mRNA catabolic process, nonsense-mediated decay
  Homolog annotation: Hit_ID=Q10D72; Match level="QueryCoverage=100%, HitCoverage=6%, E-value=3e-93, Identity=74%"; Hit description =Phosphatidylinositol 3-and 4-kinase family protein, expressed
GVEGVFXVTCEEVIGCPLEXNKNIILMLLEVFVWDPLIEWTRGNIQDEAGIAGEEKKGMELAVSLSLFSSRIQEIRVPLQEHKDLFLTNLPATVSALKKFLDTLDHYEVASAMFYHAEKERSNVLQNEMSANSILADATTVAEKSRTSFEIHAHELAEAKAAAVDEANKLKIWVEKYARVLEAIRDRSIVCAESCMQLNCKDEALSLISAVLESGVPLTVVPEPTRAQCS

SEQ ID NO: 113047 - protein, 152 aa, Setaria italica
  Transcript Sequence Number=SeqID_47073
  Gene Ontology: Mol. function=protein serine/threonine kinase activity; Biological process=protein amino acid phosphorylation
MSDSELSQSTVVFGLRMWVLVGIGVGAAFVLLLVLISVLCLLAFRRRRRQRPANAAQQLPTTAPPKDSANVKAPKDIQEVPSHVTATAAAPAKTQLAQVLQLPTPQVSEQIVTGKERRITYPEQQQHPSHRSEGPSPHGSDERRGGRGGVLS

SEQ ID NO: 113048 - protein, 469 aa, Setaria italica
  Transcript Sequence Number=SeqID_47074
  Gene Ontology: Mol. function=protein serine/threonine kinase activity; Cellular component=plasma membrane; Biological process =protein amino acid phosphorylation
  Homolog annotation: Hit_ID=Q4LB28; Match level="QueryCoverage=74%, HitCoverage=67%, E-value=1e-178, Identity=84%"; Hit description =B0222C05.2 protein
  Pfam annotation: Domain name=Pkinase; Domain location=143-414; Score =141.8; E_value=2.1e-39; Accession=PF00069.17; Description=Protein kinase domain
  Pfam annotation: Domain name=Pkinase_Tyr; Domain location=143-414; Score=100.2; E_value=7.3e-27; Accession=PF07714.9; Description =Protein tyrosine kinase
  Pfam module annotation: Pfam domain module=Pkinase::Pkinase_Tyr; Domain location=143-414::143-414
TFLAFRRRRRQRPANAAQQLPTTAPPKDSANVKAPKDIQEVPSHVTATAAAPAKTQLAQVLQLPTPQVSEQIVTGKERRITYPEQQQHPSHRSEGPSPHGSDERRGGRGGAADHAPPAVPEVSHLGWGHWYTLKELETATGMFSDENVIGEGGYGIVYHGVLENGTQVAVKNLLNNRGQAEKEFKVEVEAIGRVRHKNLVRLLGYCAEGNQRMLVYEYVDNGNLEQWLHGDVGPVSPLTWENRMKIILGTAKGLMYLHEELEPKVVHRDVKSSNILLDKHWNAKLSDFGLAKLLGSERSYVTTRVMGTFGYVAPEYAGTGMLNETSDIYSFGILIMEIISGRVPVDYNRPPGEVNLVDWLKTMVSSRNSDGVVDPKIPKKPTSRSVKKALLVALRCVDPDASKRPRIGHVIHMLEVDDFPYREDRRGNRAPGQARAPEKPAVGSGDHETDSSANGATQAEPFRWRNPDA

SEQ ID NO: 113049 - protein, 147 aa, Setaria italica
  Transcript Sequence Number=SeqID_47075
  Homolog annotation: Hit_ID=Q8WV16; Match level="QueryCoverage=64%, HitCoverage=19%, E-value=1e-12, Identity=42%"; Hit description=WD repeat-containing protein 21A
  Pfam annotation: Domain name=WD40; Domain location=50-90; Score=19.4; E_value=0.015; Accession=PF00400.24; Description=WD domain, G-beta repeat
  Pfam annotation: Domain name=WD40; Domain location=6-44; Score=15.6; E_value=0.2; Accession=PF00400.24; Description=WD domain, G-beta repeat
  Pfam module annotation: Pfam domain module=WD40::WD40; Domain location=50-90::6-44
MQADKDKCSRDISMSSAVCSLVTLSSDENYFLGSSMDGSIKLFDLRLIQKGGIQSYEGHVNSHTQLPLVVDPSETLLMSGGEDCTVRIWSIKTGELIFAQSVADTPFTAFCWPENSHDLCGSSLLDANHSWGAWLGSHDGLFYMHGT

SEQ ID NO: 113050 - protein, 94 aa, Setaria italica
  Transcript Sequence Number=SeqID_47076
  Homolog annotation: Hit_ID=B6SPJ2; Match level="QueryCoverage=100%, HitCoverage=15%, E-value=2e-46, Identity=91%"; Hit description =Selenium-binding protein-like
IGAEGYVPDTRDVLHDIAKEEKETPLLYHSEKLAIAFGLLRTRPGDTMRITKNLRVCRDCHEATKFVSRVFDREIVVRDRNRFHHFRDGKCSCK

SEQ ID NO: 113051 - protein, 65 aa, Setaria italica
  Transcript Sequence Number=SeqID_47077
SPSSWIASAAGSVVCAAEAIQEDGDQERKKKKKKDKETEATPVAAADGEKKKKKKSKESEEPAVA

SEQ ID NO: 113052 - protein, 225 aa, Setaria italica
  Transcript Sequence Number=SeqID_47078
  Gene Ontology: Mol. function=DNA binding; Cellular component =nucleolus; Biological process=snRNP protein import into nucleus
  Homolog annotation: Hit_ID=O80401; Match level="QueryCoverage=100%, HitCoverage=46%, E-value=1e-124, Identity=95%"; Hit description=SAR DNA binding protein (Fragment)
  Pfam annotation: Domain name=NOP5NT; Domain location=1-66; Score =120.9; E_value=4.1e-33; Accession=PF08156.5; Description=NOP5NT (NUC127) domain
  Pfam annotation: Domain name=NOSIC; Domain location=159-211; Score =132.8; E_value=1.1e-36; Accession=PF08060.5; Description=NOSIC (NUC001) domain
  Pfam module annotation: Pfam domain module=NOP5NT::NOSIC; Domain location=1-66::159-211
MLVLFETPAGFALFKVLDEGKLDKVEDLWKEFTTSDSARRVVELKAFNKFENTSDALSAATLIIDGKPSKGLRKFLQKHCEGETLAVADSKLGNAIKEKLKIDCLHNSAVMELMRGLRNQLTELITGLGAQELGPMSLGLSHSLSRYKLKFSPDKVDTMIIQAIGLLDDLDKELNTYAMRVREWYGWHFPELTKIVTDNIQYAKVVKMMGDRANAVNLDFSEILS

SEQ ID NO: 113053 - protein, 468 aa, Setaria italica
  misc_feature (191)..(191): Xaa can be any naturally occurring amino acid
  Transcript Sequence Number=SeqID_47079
  Gene Ontology: Mol. function=protein serine/threonine kinase activity; Cellular component=cytoplasm; Biological process=protein amino acid phosphorylation
  Homolog annotation: Hit_ID=B9S7L3; Match level="QueryCoverage=100%, HitCoverage=99%, E-value=1e-177, Identity=69%"; Hit description =Casein kinase, putative
  Pfam annotation: Domain name=Pkinase; Domain location=9-279; Score =141.0; E_value=3.7e-39; Accession=PF00069.17; Description=Protein kinase domain
  Pfam annotation: Domain name=Pkinase_Tyr; Domain location=9-274; Score=-144.7; E_value=0.00042; Accession=PF07714.9; Description =Protein tyrosine kinase
  Pfam module annotation: Pfam domain module=Pkinase::Pkinase_Tyr; Domain location=9-279::9-274
MDHVVGGKFKLGKKIGSGSFGELFLAVNVQTGEEVAVKLENVKTKHPQLHYESKLYMLLQGGTGIPHLKWFGVEGEYNVMVIDLLGPSLEDLFNYCSRKFSLKTVLMLADQMINRVEYMHQKGFLHRDIKPDNFLMGLGRKANQVYIIDYGLAKKYRDLQTHKHIPYRENKNLTGTARYASVNTHLGVEQXSRRDDLESLGYVLMYFLRGSLPWQGLKAGTKKQKYDKISEKKMLTPVEVLCKSYPSEFISYFHYCRSLRFEDKPDYSYLKRLFRDLFIREGYQFDYVFDWTILKYPQIGSNPRMRASERTGGAAGPSVEKIEKTPGEASGRRNPSGSVNQSDNYAQRPRETVSMSLKEIMHSTDRSGERTVERPRTSSRTGSASRRAIASSSRPGTSVEPSEQPYNRTSRLFSSNSGSRPSSTQRVNPSPGESRATSLSRAAVARGSRDEPLHRSLELLSLGGGKRK

SEQ ID NO: 113054 - protein, 102 aa, Setaria italica
  Transcript Sequence Number=SeqID_47080
  Gene Ontology: Mol. function=serine-type endopeptidase activity; Cellular component=cell wall; Biological process=negative regulation of catalytic activity
  Homolog annotation: Hit_ID=O49607; Match level="QueryCoverage=100%, HitCoverage=13%, E-value=1e-28, Identity=62%"; Hit description =Putative subtilisin serine protease
TTAAGSVAYEASMQGYAPGVAKGVAPKARVAAYKVCWKGAGCMDSDILAGFDRAVADGVDVISVSIGGGGGVTAPFYLDPIAIGAYGAVSRGVFVATSAGNE

SEQ ID NO: 113055 - protein, 128 aa, Setaria italica
  Transcript Sequence Number=SeqID_47081
MDTPDRAAAQPAASRAEDSPVFSFINNLSPIEPLKSAYNANSLQGYQSINITSISSIFTSPHDNAHKEPRLPKSSLGEISESEVCADGKNTNKPTKSSNAVRLFACTSTVTQETHTVTCSDVVDPSHR

SEQ ID NO: 113056 - protein, 87 aa, Setaria italica
  Transcript Sequence Number=SeqID_47082
LQTAKKMLTHSVTESSRTASIPEGSFFSLFTKPESSLGDGELNGTTLTRHVAMQCKCDATPLRYGLQVDLKQVHSMHETAHLATTTS

SEQ ID NO: 113057 - protein, 77 aa, Setaria italica
  Transcript Sequence Number=SeqID_47083
  Gene Ontology: Biological process=response to auxin stimulus
MGSWVRTITTPFRKACTIFVPHKDGKKPQQPSSAMVQHVEAERAKLHGEVMACAYEDVQVMWSMLDQARIRDLSGSS

SEQ ID NO: 113058 - protein, 120 aa, Setaria italica
  misc_feature (49)..(49): Xaa can be any naturally occurring amino acid
  misc_feature (73)..(73): Xaa can be any naturally occurring amino acid
  Transcript Sequence Number=SeqID_47084
  Gene Ontology: Mol. function=protein serine/threonine kinase activity
  Homolog annotation: Hit_ID=Q2QZV1; Match level="QueryCoverage=91%, HitCoverage=4%, E-value=2e-13, Identity=35%"; Hit description =Retrotransposon protein, putative, unclassified
RRTSHGTPHVSSAARLRNHIVFRCPFAASIWSSLGSDTATSSVELLWTXERPASIPVLHYNSFLLLLPWMLWXHRNDLVFQRCAQRFISACRDEARLWRERFRIEDRAITDSWCTVFASM

SEQ ID NO: 113059 - protein, 50 aa, Setaria italica
  Transcript Sequence Number=SeqID_47085
KTRFQKIPRDSRMLQPSFLHFLKACSAVGQYSKHFLRLVQKSLKVELNKN

SEQ ID NO: 113060 - protein, 63 aa, Setaria italica
  Transcript Sequence Number=SeqID_47086
SIFLLAYVYYSCVTNSCNPNSLNCTSLYFGNPVVSDFHSIIFLHFFFSFLYFEFLYSKQTLRH

SEQ ID NO: 113061 - protein, 638 aa, Setaria italica
  misc_feature (12)..(12): Xaa can be any naturally occurring amino acid
  misc_feature (14)..(14): Xaa can be any naturally occurring amino acid
  Transcript Sequence Number=SeqID_47087
  Gene Ontology: Mol. function=transcription elongation regulator activity; Cellular component=intracellular; Biological process =positive regulation of RNA elongation from RNA polymerase II promoter
  Homolog annotation: Hit_ID=B9T6Z6; Match level="QueryCoverage=84%, HitCoverage=34%, E-value=1e-138, Identity=46%"; Hit description =Suppressor of ty, putative
  Pfam annotation: Domain name=KOW; Domain location=181-212; Score =19.8; E_value=0.012; Accession=PF00467.21; Description=KOW motif
  Pfam annotation: Domain name=KOW; Domain location=429-460; Score =16.6; E_value=0.11; Accession=PF00467.21; Description=KOW motif
  Pfam annotation: Domain name=KOW; Domain location=524-555; Score =21.6; E_value=0.0034; Accession=PF00467.21; Description=KOW motif
  Pfam module annotation: Pfam domain module=KOW::KOW::KOW; Domain location=181-212::429-460::524-555
CSSLRGGFRPDXGXLPGEHAQNLSSKRAERSHPLPFLVKEEELSGDELEEFIRKRYSNGVRYAADRNFSREDDDIFPMDGALKEPTIWRVKCMVGRERQMAFCFMQKFVDLQKIGTKVPIITAFALDHVRGFVFVEAEKACDVTEACKGFCSVYASRIISVPAAEVPSLLSSRTKPFEISRGTWVRMKNGNYKGDLAQVVSEDDGRKRVLIKIIPRVDLHAISRKYGGAISLKEAVVPAPRLISSQELEFFRPHIEMKRDRQTGEVFEVLDGLMFKDGFLYKRVALSSLIYWGIQPTETELLKFSSSPINRASADDLDWVSSIYGPKKRNLPAERGIKSPSSKTKSSKASKASTSTENYDDNDEFNLHDLVLFGRKDFGVIIAIEKDGLRILKGGPEGSAVTVKKQDIKKGCVDKMFTAVDRQKKIISINDTVNVLEGPFQGKQGVVKHLYMGTLFIYNESESENCGFFCAQCGSCENVKKRKESSTTENLDNPIPMFSEPYEQNEHRDTERPYRSTREQLFSIGQMLRIRKGPLKGYLCRVVKIFRNDVTVKLDSLLKIVTVQAEFLSVPANRGDNSSGAPAGNFGSQDTSFFGSEADKASWDNGLPSFGSDSWQPFSSSTLPAQNAGGESESDPWC

SEQ ID NO: 113062 - protein, 994 aa, Setaria italica
  Transcript Sequence Number=SeqID_47088
QRITSFFGSEADKASWDNGLPSFGSDSWQPFSSSTLPAQNAGGESESDPWCKKSSAGGESDPWGKKTDSDSDPWGNKVVPSGDGDSDPWGKKVVAPADGDSDPWGKKVVAPADGDSDPWGKKVVAPADGDSDPWAKNTTSSAFRVLNTGTTQKESSSGKVWDKQAGVGGSDAAGSSWDRTSVNKECEKSDNWGEACRVADMGTGGDADPWGNKVKAVDMEGTDSWDKATMPPDNKLEGVSQGWGQPLGNSNEGQGKDNFSKAEGNNGGWDTALPATEDGTWGKSKDSNGDGAGGLNEARSSDKNGGAGGWDTSAANWNKSSVVAEAQEGGWGKGKGASDQAGLGDWDKPKSFGGGGSSSWNKGEETRADDQNNSWSRHGSFGGGRGFVRGRGRGRGESGDSDGTTDQGSWKSPWGGDNAGRPSWRSDSNVDNEVGDSGGYWGRGRGGRGQYGGRGRGRDNGWRNGDRSNSGIGRENDGADGQKWGNGGSSDWNKDTSNKGSWGGDNWNATNPPSNQPWSSSGGTKSYGENKPSTWNSSEDNKTSVGEQDDPWASKVASTEGKEQRNDTWASKMTSAGAEDSSGGWNTKTKDSCSDGGEESQNDSWANKIGSNKGKEQETDPWASKVPSTVGSDDNNGSRSTTAKGTPSEEKADDPWSSKGGNDNIKIDSWGAGSSDGNQESSWSKPNFSLGDQENTWSKPRFGDDNGGNSRGGFGRGYRGRGRGRNFGDGGSSWNGGNRNDESGGERSEQPWNRRDFDAGRGRGRGCYGRGDRNQGNSNFGSADGGSWGSGRGNGGRGGYRNWNGNNGSGEGGQGGGWSSNWNGNKGSGEGGQGGGWSSNWNANKGSGEGGQGFAKSKPSWEAQNTSGGDQAGKSDANNSWSQNRSSPSILGQPSSDVNKSSTWGATSGGAGGGGSWGKSNEDRWNSSGGAAAEKSSWGGGSEGAPKKDDDGPWGKGGEESGSQGGGGGGRSWDKAADNAWNSNKGGDAGSGGW

SEQ ID NO: 113063 - protein, 199 aa, Setaria italica
  misc_feature (167)..(167): Xaa can be any naturally occurring amino acid
  Transcript Sequence Number=SeqID_47089
  Homolog annotation: Hit_ID=B6U206; Match level="QueryCoverage=100%, HitCoverage=23%, E-value=1e-100, Identity=86%"; Hit description=NIN -like protein 1
IQTTQSDGDVLVQLWVPVSRGDGRLVLTTSGQPFTLDQSSDSLIRFREVSTKYQFSADVKSGDSPGLPGRVFIGRLPEWSPDVRYFTTYEYPRVRDAQYLDVHGTMGLPVFEKGSYNCLGVIELIMTRQKLNFTSELNTICSALQAVNLRSAEVSSVPRVQFSTASXKNALPEILEVLRAACLTHKLPLAQTWVTCAQQ

SEQ ID NO: 113064 - protein, 67 aa, Setaria italica
  Transcript Sequence Number=SeqID_47090
  Subcellular localization annotation: CTP_CleavageSite=27; ConfidenceScore=5.31e-01
YKGYGKDFETKVTRSSTAGRTRSSNGSAAATSYSPYSNTTNPNRGSVPNGVTDGGGGTGGDHSNHAP

SEQ ID NO: 113065 - protein, 59 aa, Setaria italica
  Transcript Sequence Number=SeqID_47091
FCLNIQYSIFNLVSSFRCPKQLGVCWFHGCKLTAGSQVLLLLLLLCGYVSCEASLLDYL

SEQ ID NO: 113066 - protein, 261 aa, Setaria italica
  Transcript Sequence Number=SeqID_47092
  Gene Ontology: Mol. function=protein serine/threonine kinase activity; Cellular component=plasma membrane; Biological process =protein amino acid phosphorylation
  Homolog annotation: Hit_ID=Q9FHG4; Match level="QueryCoverage=100%, HitCoverage=38%, E-value=3e-40, Identity=37%"; Hit description =Serine/threonine-specific kinase like protein
  Pfam annotation: Domain name=Lectin_legB; Domain location=1-158; Score=79.8; E_value=1e-20; Accession=PF00139.11; Description=Legume lectin domain
  Subcellular localization annotation: CTP_CleavageSite=31; ConfidenceScore=5.20e-01
AAGGDGIAFFVSPGRATLGATGGYLGLFNSSGSAKNGSAAAIVAVEFDTMANPEFADTSDNHVGLDLGSPVSVAVADLAASGIDLRSGNLTTAWIDYRSADRRLEVFLSYAPAPKPKRPVLSVAVDLSPYLNGAMYVGFSASTEGSTQQHTIKEWTFQTFDLPSTANSSSFESNATSNSSDQAVPTSTAHHKRVGLALGILGPVALAVAFVFFAWVSIRKLIQLTARNDGAFSPELLKGPRKFSYKELSAATKGFHASRVV

SEQ ID NO: 113067 - protein, 153 aa, Setaria italica
  Transcript Sequence Number=SeqID_47093
  Gene Ontology: Mol. function=serine-type endopeptidase activity; Cellular component=intracellular; Biological process=protein modification process
  Homolog annotation: Hit_ID=P93501; Match level="QueryCoverage=100%, HitCoverage=89%, E-value=8e-52, Identity=65%"; Hit description =Ubiquitin-like protein
  Pfam annotation: Domain name=ubiquitin; Domain location=6-74; Score =136.1; E_value=1.1e-37; Accession=PF00240.15; Description=Ubiquitin family
  Pfam annotation: Domain name=ubiquitin; Domain location=82-150; Score= 117.6; E_value=4.1e-32; Accession=PF00240.15; Description=Ubiquitin family
  Pfam module annotation: Pfam domain module=ubiquitin::ubiquitin; Domain location=6-74::82-150
MQIFVKTLTGKTITLEVESSDTIDNVKAKIQDKEGIPPDQQRLIFAGKQLEDGRTLADYNIQKESTLHLVLRLSLLIVIKVKTLTGKEIEIDIEPTDTIDRIKERVEEKEGIPPVQQRLIYAGKQLADDKTAKDYNIEGGSVLHLVLALRGGY

SEQ ID NO: 113068 - protein, 153 aa, Setaria italica
  Transcript Sequence Number=SeqID_47094
  Gene Ontology: Mol. function=serine-type endopeptidase activity; Cellular component=intracellular; Biological process=protein modification process
  Homolog annotation: Hit_ID=P93501; Match level="QueryCoverage=100%, HitCoverage=82%, E-value=3e-59, Identity=74%"; Hit description =Ubiquitin-like protein
  Pfam annotation: Domain name=ubiquitin; Domain location=6-74; Score =138.0; E_value=2.9e-38; Accession=PF00240.15; Description=Ubiquitin family
  Pfam annotation: Domain name=ubiquitin; Domain location=82-150; Score= 117.6; E_value=4.1e-32; Accession=PF00240.15; Description=Ubiquitin family
  Pfam module annotation: Pfam domain module=ubiquitin::ubiquitin; Domain location=6-74::82-150
MQIFVKTLTGKTITLEVESSDTIDNVKAKIQDKEGIPPDQQRLIFAGKQLEDGRTLADYNIQKESTLHLVLRLRGGTMIKVKTLTGKEIEIDIEPTDTIDRIKERVEEKEGIPPVQQRLIYAGKQLADDKTAKDYNIEGGSVLHLVLALRGGY

SEQ ID NO: 113069 - protein, 51 aa, Setaria italica
  Transcript Sequence Number=SeqID_47095
  Gene Ontology: Mol. function=protein disulfide oxidoreductase activity; Cellular component=cytoplasm; Biological process=electron transport chain
  Homolog annotation: Hit_ID=B6TML9; Match level="QueryCoverage=98%, HitCoverage=41%, E-value=2e-17, Identity=94%"; Hit description=Grx _A2-glutaredoxin subgroup III
MQAVGIRRGLTIDPAGEEEAPAARVGRLVRESPVVIFARRGCYMAHVMKRP

SEQ ID NO: 113070 - protein, 90 aa, Setaria italica
  Transcript Sequence Number=SeqID_47096
EGLLLLSRADCSSSTLTPWRLKELLHDPCMQSTELESAATRLSPRRPASSLVMASGSTSSPRKPASYPRPRIAHRQAAQGGGECRRPPRP

SEQ ID NO: 113071 - protein, 85 aa, Setaria italica
  Transcript Sequence Number=SeqID_47097
  Gene Ontology: Mol. function=RNA-directed DNA polymerase activity; Biological process=RNA-dependent DNA replication
  Homolog annotation: Hit_ID=Q6K8J8; Match level="QueryCoverage=70%, HitCoverage=19%, E-value=1e-15, Identity=61%"; Hit description =Cytokinin inducibl protein-like protein
TRWNETRMIHQQKISLEKEKFMWEQEQRIMFCDVSTLDPDQKTYVLAMRAHIAAQKMAAFNSGFGSGFDGGFDSSKGGDVNGASQ

SEQ ID NO: 113072 - protein, 131 aa, Setaria italica
  misc_feature (102)..(102): Xaa can be any naturally occurring amino acid
  misc_feature (112)..(112): Xaa can be any naturally occurring amino acid
  Transcript Sequence Number=SeqID_47098
MESGGEIVPVHNSVDTLDAAAAAIETVNAAAAAILTAGNRRQHDVLPRRKWADRLGMYFCFGSQKNGRRINHAALVPEPTPPRTDAPAGEIPNHPPPPVFPXVAPPSSPASXLQSEPSSIAQSPSNDAQPF

SEQ ID NO: 113073 - protein, 114 aa, Setaria italica
  Transcript Sequence Number=SeqID_47099
QQQQNGETGDLQSYPNYPEVPYAKLLTSINNSKNGETGDLQSYPNYPDSPIARLISPSSGCSGTSSPFPDPEMLASSRYTFPSFPVREPPKILDGEGVATQKLIPRHMRNGGSI

SEQ ID NO: 113074 - protein, 90 aa, Setaria italica
  Transcript Sequence Number=SeqID_47100
  Subcellular localization annotation: CTP_CleavageSite=39; ConfidenceScore=5.68e-01
GSGGACVRLSAVTMAAAAAFTVSTLLCTGLMSPPLCMIVAARSKNTRSSPLQGTPRRSKLLHCKKHDPVCSTRSPPLPDHFHEIKTTKSA

SEQ ID NO: 113075 - protein, 259 aa, Setaria italica
  Transcript Sequence Number=SeqID_47101
  Gene Ontology: Cellular component=plasma membrane
PYYSYLLLIRPKVFGRLPTYPCCDYHADGGDMRPVHNSVDTVNAAAAAIVTAESRTQAPPEPRRKWADRLSVYFCFGSQKNGRRINHAALVPEPTSQRTDAPAVEIPDHPPPPVFPFVAPPSSPASFLQSEPTSIVQSPRIGAPPFSPLSPNSPSPTGPPSIFSIGPYAHETQLVSPPVFSAFTTEPSTAPFTPPPESVHLTTPSSPEVPYAKLLTSINNSKNGETGDLQSYPNYPDSPIARLISPSSGCSGTSSPTYP

SEQ ID NO: 113076 - protein, 95 aa, Setaria italica
  Transcript Sequence Number=SeqID_47102
IKESASISLAIPLPNYIYSVLDTRNINIMFSLRTNIELFILHLGGKLVQPFTLHICIMTLHLFFWQTRNFLNYLVTKVALLDTIELCHSRIAYVI

SEQ ID NO: 113077 - protein, 145 aa, Setaria italica
  Transcript Sequence Number=SeqID_47103
  Gene Ontology: Mol. function=DNA (cytosine-5-)-methyltransferase activity; Cellular component=chromatin; Biological process =regulation of transcription, DNA-dependent
  Homolog annotation: Hit_ID=Q9ARI6; Match level="QueryCoverage=100%, HitCoverage=15%, E-value=2e-76, Identity=93%"; Hit description=DNA (cytosine-5)-methyltransferase 2
  Pfam annotation: Domain name=BAH; Domain location=16-141; Score=65.9; E_value=1.5e-16; Accession=PF01426.10; Description=BAH domain
EVKARCHYRSAKVDNIVYTLGDDVYVKAEENEADYIGRITEFFEGTDRCQYFTCRWFFRPEDTVINSLVCIDVDGKKHDPRRVFLSEEKNDNVLDCIISKVKIVHVDPNMDPKAKAQLIEHCDLYYDMSYSVAYSTFANIPSENG

SEQ ID NO: 113078 - protein, 60 aa, Setaria italica
  Transcript Sequence Number=SeqID_47104
  Subcellular localization annotation: CTP_CleavageSite=35; ConfidenceScore=5.27e-01
APVAVARPNPRPSVAPSMSPRGASCARARFAFQPAAVRVEGFDCLDRSRGGRGHGITAMA

SEQ ID NO: 113079 - protein, 90 aa, Setaria italica
  Transcript Sequence Number=SeqID_47105
  Subcellular localization annotation: CTP_CleavageSite=35; ConfidenceScore=5.28e-01
MAAATGFLVPSARLTPAARGARRRRCWHRRRLAPRCAAAVDGRQATVESKAGDALEVCRVVNGMWQVSGASWGRAQPAAAVDAMLRYADG

SEQ ID NO: 113080 - protein, 49 aa, Setaria italica
  Transcript Sequence Number=SeqID_47106
VVLLSRDRTSYPSISGLLGCLVPSCICKLSTNSHVILLMSASIWPKLIT

SEQ ID NO: 113081 - protein, 71 aa, Setaria italica
  Transcript Sequence Number=SeqID_47107
  Gene Ontology: Mol. function=electron carrier activity; Cellular component=membrane; Biological process=oxidation reduction
  Homolog annotation: Hit_ID=Q0JF01; Match level="QueryCoverage=100%, HitCoverage=14%, E-value=1e-16, Identity=54%"; Hit description =Cytochrome P450 99A3
GLRKKECPGDIFGLAALELIIARLLYYVDWSLPSGMQPDEIDMDMFVGATTRRKNQLHLVASPYREVSVQS

SEQ ID NO: 113082 - protein, 52 aa, Setaria italica
  Transcript Sequence Number=SeqID_47108
LLSLNHFASDRNWFLSRFLFSRNALAEALLFVIKHDLSNLNLTNFSEVTPFF

SEQ ID NO: 113083 - protein, 118 aa, Setaria italica
  Transcript Sequence Number=SeqID_47109
GVDKANRSSSSSAQTGSHTHQIILGWDSNACAIQCPQRHVTCTATTDSRHGHHQSSISAKSVTCLNPTCSATCYSCLCIQATGATVRVTIAVYLSGCAGAWYQLSPKKTGEKLMQIYS

SEQ ID NO: 113084 - protein, 88 aa, Setaria italica
  Transcript Sequence Number=SeqID_47110
ILKNSEVARAEDLILTIGYHLYAFEAKFKKSDQLGLNHKWNHLKKSDSMTRHTCAKKKGMIHRQRFLPRYLYQTIMCHYLIPRVSNQS

SEQ ID NO: 113085 - protein, 474 aa, Setaria italica
  Transcript Sequence Number=SeqID_47111
  Gene Ontology: Mol. function=serine-type carboxypeptidase activity; Cellular component=extracellular region; Biological process =proteolysis
  Homolog annotation: Hit_ID=P55748; Match level="QueryCoverage=91%, HitCoverage=100%, E-value=0.0, Identity=89%"; Hit description=Serine carboxypeptidase II-2 chain B (Fragment)
  Pfam annotation: Domain name=Peptidase_S10; Domain location=43-461; Score=727.1; E_value=1.4e-215; Accession=PF00450.14; Description =Serine carboxypeptidase
MPARSAGAIGLLLVLLSAVAVAAAAGEGNWREEQARDRVPRVPGQAFDTSYAHYAGYVTVSEPRGAALFYWFFEAEKDPGSKPLVLWLNGGPGCSSIAYGLGEEVGPFHVNADGKGVHVNPYSWNKVANLLFVDSPVGVGYSYSNTSDDILRNGDARTAKDSLAFLLKWLERFPQYKGREFYLTGESYAGHYVPQLAQAIKRYHEATGNKSINLKGYMVGNALTDDFHDHYGIFQFMWTTGLISDQTYKLLNIFCDFESFVHTSKQCDKILDIASKEAGNIDSYSIFTPTCHATFASSKNKVMKRLRSVGKMGEQYDPCTEKHSTVYFNLAEVQKALHVNPVIGKSKWETCSGVVNNHWGDCERSVLHIYHELIQYGLRIWVFSGDTDAVIPVTSTRYSIDALKLPTVTPWHAWYDDNGEVGGWSQGYEGLTFVTVRGAGHEVPLHRPKQALTLIKSFLAGTPMPVQSSAHSDM

SEQ ID NO: 113086 - protein, 70 aa, Setaria italica
  misc_feature (49)..(49): Xaa can be any naturally occurring amino acid
  Transcript Sequence Number=SeqID_47112
  Subcellular localization annotation: CTP_CleavageSite=64; ConfidenceScore=5.11e-01
SRRRRKCDRASFRAASTVHTVRVIAPRMSESDWRRAPRRHCCKTRRTRXVNGTVLEVRIRRCVRGELTSP

SEQ ID NO: 113087 - protein, 51 aa, Setaria italica
  Transcript Sequence Number=SeqID_47113
YYHKNYSTLLIIKFSNQGQSTNLFSFTLMSEISGYAKESSSKCLRLAKLQV

SEQ ID NO: 113088 - protein, 136 aa, Setaria italica
  Transcript Sequence Number=SeqID_47114
  Gene Ontology: Mol. function=protein binding; Cellular component =apoplast
  Pfam annotation: Domain name=DUF538; Domain location=19-135; Score =204.1; E_value=3.8e-58; Accession=PF04398.4; Description=Protein of unknown function, DUF538
MAEKEGAVVKKGHDEGLKMAVALLEEFGLPLGLLPLEDVTEVGFVRDTGYMWINQRKKVEHKFSKIGKQVSYDVEITGYIKPKGIKKLKGVKAKELMLWPPVNEMAVDDPPTGKIHFKSLAGVTKTFPVDAFAAGQ

SEQ ID NO: 113089 - protein, 180 aa, Setaria italica
  misc_feature (14)..(14): Xaa can be any naturally occurring amino acid
  misc_feature (21)..(21): Xaa can be any naturally occurring amino acid
  misc_feature (119)..(119): Xaa can be any naturally occurring amino acid
  Transcript Sequence Number=SeqID_47115
  Gene Ontology: Mol. function=heat shock protein binding; Biological process=response to stress
  Homolog annotation: Hit_ID=Q2R254; Match level="QueryCoverage=92%, HitCoverage=15%, E-value=4e-52, Identity=65%"; Hit description=DnaJ domain containing protein, expressed
  Pfam annotation: Domain name=DnaJ; Domain location=4-50; Score=33.5; E_value=8.4e-07; Accession=PF00226.23; Description=DnaJ domain
SLDRKQYRKLAFSXLHPDKNXSFVGAEAAFKLVAEAHSVLCDPTKRSQYDLKRKSGFRNVPKPAKQQPSKKVDSNKRSRPGLGETFWTICSHCQIRYQYYIKVLNTMVQCMSCKRNFFXAYNLYEHPMPTSSSVPNGSQVPANMFPNKQRDTQSQQGHPVKPSCTGRGTNCEAKMVLKTL

SEQ ID NO: 113090 - protein, 46 aa, Setaria italica
  misc_feature (36)..(36): Xaa can be any naturally occurring amino acid
  Transcript Sequence Number=SeqID_47116
  Gene Ontology: Mol. function=phosphatidate phosphatase activity; Cellular component=apoplast
  Homolog annotation: Hit_ID=Q2R178; Match level="QueryCoverage=100%, HitCoverage=3%, E-value=5e-16, Identity=84%"; Hit description=Lipin, N-terminal conserved region family protein, expressed
VDAHIYLWKWNAKIVISDVDGTITRSDVLGQVMPLXVGRDWSHSGV

SEQ ID NO: 113091 - protein, 95 aa, Setaria italica
  Transcript Sequence Number=SeqID_47117
MNMKFMLCLQNEDAAHVVSTYKDEVQNVSKSGNNDGVYQPMTTEGESRGVSGDIDVGYQPLTNEDESPDASGDNVVGYQPSTNEPKAHDIPETNE

SEQ ID NO: 113092 - protein, 624 aa, Setaria italica
  misc_feature (575)..(575): Xaa can be any naturally occurring amino acid
  Transcript Sequence Number=SeqID_47118
  Gene Ontology: Mol. function=phosphatidate phosphatase activity; Cellular component=apoplast
  Homolog annotation: Hit_ID=Q2R178; Match level="QueryCoverage=14%, HitCoverage=6%, E-value=5e-23, Identity=66%"; Hit description=Lipin, N-terminal conserved region family protein, expressed
  Pfam annotation: Domain name=Lipin_N; Domain location=1-106; Score =173.6; E_value=5.5e-49; Accession=PF04571.6; Description=lipin, N -terminal conserved region
MNVVGRVGSVISQGVYSVATPFHPFGGAVDIIAVEQPDGSYRTTPWYVRFGKFQGVLKGAEKVVTITVNGVEASFHMQLDNSGQAYFMRELVPGSEDSGTGSESEAINEPEPPARSKSDGDLYIGPSDRLGSQELNVEHQEKQTGDEFESYDGYGRLEEAEDLPTQADGGNSEVVLVSVDGHVLTAPISSTEEGMDDVQLSDPQFHLGPGQSSSGDFSRSGEVWDAGILDDLYISQEKVQFDSGHQSKVFIENEEVPSEKDESHHILVDKGEALHVSINEDEVLSVSTNEYEVHALSTNEDAAHVVSTYKDEVQNVSKSGNNDGVYQPMTTEGESRGVSGDIDVGYQPLTNEDESPDASGDNVVGYQPSTNEPKAHDIPETNDEEHKPLTNEDESCDVPVLERAKGCKSPANKDEVCDLSNEDTELEDAGASFGKKETFQSCLDLTLQIDDGDSGNELFSPGSDYQRDSELSLGNTSVAETDLQEGETKTAYCDQDGPLQEGVDVSKFTTEADRTRNKRASSPYGKESDLSPETEAAVSEGLPLSMATSDKDKLGSIPEHSEEEEQDKEEHSESXEGLGVEISLCGNMLRPGMGRESAEEAFLQHLVSEEDFKSSGSTIIANLI

SEQ ID NO: 113093 - protein, 54 aa, Setaria italica
  Transcript Sequence Number=SeqID_47119
VGYATIYTNVRTKEALERSYREYFSTAMLQFIKRLLRAKWKINRRGNKFPDPKN

SEQ ID NO: 113094 - protein, 63 aa, Setaria italica
  Transcript Sequence Number=SeqID_47120
RFTYFLSADLCLDHSYLSGYLFMPSHPFFFTCLPSLGKKGDAYLQSEKHKLLYVPFLFTHSSS

SEQ ID NO: 113095 - protein, 316 aa, Setaria italica
  Transcript Sequence Number=SeqID_47121
  Homolog annotation: Hit_ID=B6UAF0; Match level="QueryCoverage=91%, HitCoverage=72%, E-value=1e-120, Identity=75%"; Hit description=ROOT HAIRLESS 1
AGRVGELADLGTKNPVLYLEFPQGRMKLFGTHVYPKNKYLTLQMTRSAKGVVCEDVFESLIVFSEAWWVGTKEDNPEELKLEFPKEFQNDGVAADCDFRGGAGAAIDEATASKAAKEVAEPRSPNFESDGDASDDSDQKDGDATQTTSGTPSVRQSARNAGKALKKYTDLSSGGDSSSSDNEVEVPEDLDEKEMKSPAVIVKDESQSEDIKPADSSARPLSSKKEPLVQATLSSMFKKAEEKKRSTRSPKGSPATKGPAAKKQRASPMVKQPTGIKKASGTRRKQTQKVEEDEIEELSSSSQDNAVDDDSDQDWAE

SEQ ID NO: 113096 - protein, 73 aa, Setaria italica
  Transcript Sequence Number=SeqID_47122
RSVPPNKIPPSTRASILHSSPITNPCMRVNMWCTYKGVTRPSPDHYHHPQHCPVPTTTGKDAKPLCSKDQKYM

SEQ ID NO: 113097 - protein, 52 aa, Setaria italica
  Transcript Sequence Number=SeqID_47123
KKEDIDPCASLNAASGTRRKQTQKVEEDEIEELSSSSQDNAVDDDSDQDWAE

SEQ ID NO: 113098 - protein, 101 aa, Setaria italica
  Transcript Sequence Number=SeqID_47124
LVRTGSALFDPNLFVIGIARSHICLNLIETVHVPTGIQDHCFGECSNEGNILDETKRRKNIKPADSSARPLSSKKEPLVQATLSSMFKRQKRKGESAKPPR

SEQ ID NO: 113099 - protein, 58 aa, Setaria italica
  Transcript Sequence Number=SeqID_47125
CLLTTKMNLVGSNLQALQLKRHMRWTNDNNINMWHDDCITLTNTVHYHHHFPTRSLQA

SEQ ID NO: 113100 - protein, 165 aa, Setaria italica
  Transcript Sequence Number=SeqID_47126
  Gene Ontology: Mol. function=nucleic acid binding
  Homolog annotation: Hit_ID=B9SVZ5; Match level="QueryCoverage=50%, HitCoverage=12%, E-value=2e-25, Identity=60%"; Hit description =Splicing factor, arginine/serine-rich, putative
MDDNKQEGKESVLNSKVLNGEVVVPDKDANTADYTGVNFDKNLVDDNAANRVQSQNVNFENSSSVKSKQDVLARNGRSKSLKLTTNEVIAALKHYGMEPQENSSDQPVEKYFGAARLWPWEIIYYRRRKKGPISTENYAKRVEQNKEFGIVDQYVRSSTGWWECP

SEQ ID NO: 113101 - protein, 130 aa, Setaria italica
  misc_feature (69)..(69): Xaa can be any naturally occurring amino acid
  misc_feature (78)..(78): Xaa can be any naturally occurring amino acid
  misc_feature (94)..(94): Xaa can be any naturally occurring amino acid
  misc_feature (98)..(98): Xaa can be any naturally occurring amino acid
  misc_feature (110)..(110): Xaa can be any naturally occurring amino acid
  Transcript Sequence Number=SeqID_47127
  Gene Ontology: Mol. function=binding
  Homolog annotation: Hit_ID=B9RJ83; Match level="QueryCoverage=95%, HitCoverage=9%, E-value=3e-26, Identity=48%"; Hit description =Androgen induced inhibitor of proliferation (As3) / pds5, putative
LVQKFSYSSVRQGLQQSVRQAMLSIMTQILNEKVTQPLLDVILRNLVKDDKGASHKLAFDIIRDCAKKXEPIICSFLXSCIFNKDMPVNDLRKXHHKXILEIFQCAPQIXFAVIPNLTHELLSEQVDIRL

SEQ ID NO: 113102 - protein, 76 aa, Setaria italica
  Transcript Sequence Number=SeqID_47128
  Homolog annotation: Hit_ID=B6TSR3; Match level="QueryCoverage=82%, HitCoverage=21%, E-value=1e-19, Identity=76%"; Hit description =Phloem-specific lectin
FGSHVVISVAIVYRFGDVAELVECSSLDIYGRLPAAELTPATSYAAYLVYGVAEGHRGLSYPDQETTVALGGGLVA

SEQ ID NO: 113103 - protein, 133 aa, Setaria italica
  Transcript Sequence Number=SeqID_47129
PCRSPVNRRHASPGDGGRQGRFNGTPGSTDPLWVPLTIAFAWVTAWWVPLAIVCATRWIEAVVVVSGPFNPWVAHVAASYWLKLCFLLLRVCFLLSFVLLHLHPNILLGHMELHYSKLNMRAKMPILLYSREY

SEQ ID NO: 113104 - protein, 72 aa, Setaria italica
  Transcript Sequence Number=SeqID_47130
MGGKSFFCPIFSFLRKSRRYDDDMSDWDGRTGYVRKVRSSDEDYGGWWIGERDVDRKASDFINNFHQKKVAV

SEQ ID NO: 113105 - protein, 89 aa, Setaria italica
  Transcript Sequence Number=SeqID_47131
  Gene Ontology: Mol. function=NAD-dependent histone deacetylase activity; Cellular component=chromatin silencing complex
  Subcellular localization annotation: CTP_CleavageSite=71; ConfidenceScore=5.50e-01
MAAAPATHAYRSSASIIAGLTGALRAASRGSCAHFCNFQALVNNGLLYRRENPLSLRCSFRSLQARNNHSSAVAPKDYCETYIQFLRDK

SEQ ID NO: 113106 - protein, 64 aa, Setaria italica
  Transcript Sequence Number=SeqID_47132
  Gene Ontology: Mol. function=zinc ion binding; Cellular component =membrane
  Homolog annotation: Hit_ID=Q2QPK0; Match level="QueryCoverage=78%, HitCoverage=2%, E-value=1e-12, Identity=56%"; Hit description =Transposable element protein, putative, MuDR
TISTFYSWGSTVLAWLYRQLYKACRRTAKESNVGGSTYMLQIWIWERMPVGRPCYLRVDVSHNW

SEQ ID NO: 113107 - protein, 462 aa, Setaria italica
  Transcript Sequence Number=SeqID_47133
  Gene Ontology: Mol. function=protein dimerization activity; Cellular component=nucleus; Biological process=regulation of transcription, DNA-dependent
  Homolog annotation: Hit_ID=B6U9M3; Match level="QueryCoverage=93%, HitCoverage=75%, E-value=1e-165, Identity=70%"; Hit description=DNA binding protein
  Pfam annotation: Domain name=bZIP_1; Domain location=2-70; Score =31.4; E_value=3.7e-06; Accession=PF00170.13; Description=bZIP transcription factor
  Pfam annotation: Domain name=bZIP_2; Domain location=1-61; Score =16.8; E_value=0.0087; Accession=PF07716.7; Description=Basic region leucine zipper
  Pfam module annotation: Pfam domain module=bZIP_1::bZIP_2; Domain location=2-70::1-61
VSRKVGRRRRSWLSSNRRSSRRLPCSRQRKKQYVEELEGKVKAMQATIADLSTRISCITAENAALKQQLGGAAGAAPPPPMPMYPAVYPLPMPWMHPAYAIRGSQVPLVPIPRLKPQQPAPAAAEPPSKKARKTKKVASVSLLGLLCLVMLCGCLIPAVNRMNGSVDAGEGAGFGPSHHGRVLAVEGPRDSVSDSIDPKPPQASSETLPALLYLPKNGKHVKINGNLVIKSIVASEKASSRMSGYDGKSPRNQGKEETSLAIPGYVAPLEAGEVMESTTGMKNKLMALAPTDGNMYREDDGLLPQWFSEAMSGPLLSSGMCTEVFQFDVSPSSAHANGIVPVYSNAMSNSSQNFTENLPSRPHTVKNRRISYSEAIPLRGSKSNDTDHLKTTPKNESFGSTKPVSSVVVSVLADPREAGDGNGEGRISSKSLSRIFVVVLIDSVKYVTYSCVLPFKSHSPHL

SEQ ID NO: 113108 - protein, 72 aa, Setaria italica
  Transcript Sequence Number=SeqID_47134
VLLVLLTDELLMRDWNQANAESDLKYELLMELVVMYGLIFHVSFGPAREDNITHHRVIVRDMAVAGQRAVVC

SEQ ID NO: 113109 - protein, 69 aa, Setaria italica
  Transcript Sequence Number=SeqID_47135
  Gene Ontology: Mol. function=hydrolase activity, acting on ester bonds
  Homolog annotation: Hit_ID=Q7F2F1; Match level="QueryCoverage=98%, HitCoverage=11%, E-value=4e-19, Identity=62%"; Hit description =P0402A09.15 protein
MADWGPVIVATALFVVLTPGLLCTLPGRGRVAEFGSMHTSPIAIIVHAILYFALITIFLIAIGIHIYAG

SEQ ID NO: 113110 - protein, 96 aa, Setaria italica
  Transcript Sequence Number=SeqID_47136
  Gene Ontology: Mol. function=transcription regulator activity; Cellular component=nucleus; Biological process=regulation of transcription
  Homolog annotation: Hit_ID=Q7FAG1; Match level="QueryCoverage=100%, HitCoverage=17%, E-value=5e-42, Identity=85%"; Hit description =OSJNba0093F12.24 protein
VQRRSKECHVDVRIVDDEVNIKLTEKKKDNSLFHAAKVLDEFQLDLIHAVGGVIGDHHIFMFNTKVPEGSSVYACAVAKRLLEAVDAQRQTFNIFN

SEQ ID NO: 113111 - protein, 64 aa, Setaria italica
  Transcript Sequence Number=SeqID_47137
  Subcellular localization annotation: CTP_CleavageSite=22; ConfidenceScore=5.32e-01
NLVSITKSHASYPPRRSSKALRLSRAKGRKLLSSPGSDPVLFLSLPKQTLIFDGSYQNQPCLLT

SEQ ID NO: 113112 - protein, 57 aa, Setaria italica
  Transcript Sequence Number=SeqID_47138
  Subcellular localization annotation: CTP_CleavageSite=33; ConfidenceScore=5.40e-01
RPPTDAATASRPAASASATPRSPRQGEATPESSAAGAGGQVAAPTPPTSPPRPRPRP

SEQ ID NO: 113113 - protein, 52 aa, Setaria italica
  Transcript Sequence Number=SeqID_47139
SRDDRSIPSPRLLANNLNLLLLLLLLLLSRRAPHGVSATRARSYRSPVAAVP

SEQ ID NO: 113114 - protein, 76 aa, Setaria italica
  Transcript Sequence Number=SeqID_47140
TILQLTNNGTNSTLHITINNMILCIRIILPAKKMFINDVCKFASLPVHFMTCNALKNSMSVITMEQIQCNYFVNSI

SEQ ID NO: 113115 - protein, 145 aa, Setaria italica
  Transcript Sequence Number=SeqID_47141
  Gene Ontology: Mol. function=nucleotide binding; Biological process =defense response
  Homolog annotation: Hit_ID=C3RVU4; Match level="QueryCoverage=99%, HitCoverage=9%, E-value=1e-32, Identity=45%"; Hit description=NBS -type resistance protein RGC5
IELMKRLKTCSKFLLVLDDIWPNANADWEAFYAPLKYGPEGSMILVTTRSPVVATRVTTGNCKPIQLEGLPTDIFWDFFKKCAFGRNDPESYSQLQDIARSISTRLCGSPLAAKTLGRLLNMSLTEQHWRAIQKSELWELPHEKN

SEQ ID NO: 113116 - protein, 115 aa, Setaria italica
  Transcript Sequence Number=SeqID_47142
  Gene Ontology: Mol. function=protein dimerization activity; Cellular component=nucleus; Biological process=regulation of transcription, DNA-dependent
  Homolog annotation: Hit_ID=B6SUA9; Match level="QueryCoverage=66%, HitCoverage=45%, E-value=1e-28, Identity=90%"; Hit description=BZIP transcription factor
  Pfam annotation: Domain name=bZIP_1; Domain location=36-92; Score =48.1; E_value=3.4e-11; Accession=PF00170.13; Description=bZIP transcription factor
  Pfam annotation: Domain name=bZIP_2; Domain location=36-90; Score =43.7; E_value=7.2e-10; Accession=PF07716.7; Description=Basic region leucine zipper
  Pfam module annotation: Pfam domain module=bZIP_1::bZIP_2; Domain location=36-92::36-90
GGGDEVVEEEEEYLLGGLDLQLTGAGGSNSSGCCDGDDERKNIRMMKNRESALRSRARKRAYVQELEKEVRRLVNENLKLKRQCKQLKVEMAALIQTSSSKGNSHIRRTSSSTQL

SEQ ID NO: 113117 - protein, 80 aa, Setaria italica
  Transcript Sequence Number=SeqID_47143
  Gene Ontology: Mol. function=hydrogen ion transmembrane transporter activity; Cellular component=integral to membrane; Biological process=proton transport
  Homolog annotation: Hit_ID=B0CG09; Match level="QueryCoverage=87%, HitCoverage=14%, E-value=7e-13, Identity=40%"; Hit description =Proton extrusion protein pcxA
YKLLNNISDSGKAFLIILISDILLGYHSESGWHTLVEVILEHYGLEADEAAVTFFVCLVPVAFDVLIKFWVGLVHAFSSN

SEQ ID NO: 113118 - protein, 72 aa, Setaria italica
  Transcript Sequence Number=SeqID_47144
  Gene Ontology: Mol. function=hydrogen ion transmembrane transporter activity; Cellular component=integral to membrane; Biological process=proton transport
  Homolog annotation: Hit_ID=Q01BY5; Match level="QueryCoverage=93%, HitCoverage=14%, E-value=5e-15, Identity=53%"; Hit description =Cytoplasmic membrane protein (ISS)
LHFCRYHSESGWHTLVEVILEHYGLEADEAAVTFFVCLVPVAFDVLIKFWVYKYLPRLSPSVVNILDEITRH

SEQ ID NO: 113119 - protein, 62 aa, Setaria italica
  Transcript Sequence Number=SeqID_47145
  Subcellular localization annotation: CTP_CleavageSite=29; ConfidenceScore=5.47e-01
MAASFASTASAVPSCGAAGARRGGRFVARASAVAMAPALGTTARTHYEVLGVGAAASRGEIK

SEQ ID NO: 113120 - protein, 104 aa, Setaria italica
  Transcript Sequence Number=SeqID_47146
  Gene Ontology: Mol. function=receptor activity
  Homolog annotation: Hit_ID=Q9SR02; Match level="QueryCoverage=75%, HitCoverage=4%, E-value=3e-17, Identity=53%"; Hit description =F7O18.23 protein
CTDEVLQIRAYGQLYIHLGMNIRSGRLLLQSSKNILLPSALLESEEALNKGSSTAIEVFVSLRTKSILHLFAATGRFLGLKVVIVIYCLYFFFPYMYLNMFSCV

SEQ ID NO: 113121 - protein, 214 aa, Setaria italica
  misc_feature (101)..(101): Xaa can be any naturally occurring amino acid
  Transcript Sequence Number=SeqID_47147
  Gene Ontology: Mol. function=receptor activity
  Homolog annotation: Hit_ID=Q9SR02; Match level="QueryCoverage=93%, HitCoverage=12%, E-value=2e-25, Identity=34%"; Hit description =F7O18.23 protein
SQSPTDVVLKRGVHVEGLGKKVDGKNFENSCTDEVLQIRAYGQLYIHLGMNIRSGRLLLQSSKNILLPSALLESEEALNKGSSTAIEVFFAATGRFWVLRXFSQSQVTLKIPKSVLHGSDFVVMGFPQSANAYYLLIQLDNYLRPVFHLLETQTDESNNSNADANQVIRFNRIDISHMQIGEDEYSVNLFDTGKVLQDIEGRSFRPSGNGKLLP

SEQ ID NO: 113122 - protein, 89 aa, Setaria italica
  Transcript Sequence Number=SeqID_47148
TSCEHEARHPANQITRQHGMAHCCASIQSMKYQTSIKDPHLVLPKLPSFHSFKSRHPHQAGGSAKLSLSLQPATMVIERTGRIKHSRTF

SEQ ID NO: 113123 - protein, 84 aa, Setaria italica
  Transcript Sequence Number=SeqID_47149
LQACALNKLVEDDCRLQLILALVCCKVLKDARVLWQIDFYRFLLLSRLDHTQLNPIHCRYMARACGVKHHSSLTGPDLGCIYET

SEQ ID NO: 113124 - protein, 145 aa, Setaria italica
  Transcript Sequence Number=SeqID_47150
  Gene Ontology: Mol. function=nucleotide binding; Cellular component =intracellular; Biological process=small GTPase mediated signal transduction
  Homolog annotation: Hit_ID=B6TGE5; Match level="QueryCoverage=99%, HitCoverage=74%, E-value=3e-60, Identity=74%"; Hit description=ADP -ribosylation factor
  Pfam annotation: Domain name=Arf; Domain location=1-128; Score=186.8; E_value=6e-53; Accession=PF00025.13; Description=ADP-ribosylation factor family
GFNVEKVQYKNVVFTVWDVGGQEKLRSLWKMYLSNSDALIYVVDSLDRERIGDARQEFQTIIKDPLMANSIILVFANKQDLRGAMSTDEVSEGLGLHDLRNRIWHIQGTCALRGEGLYDGLDWLASTLKQLQESGHATSVAGPSI

SEQ ID NO: 113125 - protein, 74 aa, Setaria italica
  Transcript Sequence Number=SeqID_47151
FTGRFGVCDLPERRGNDVIRSCAVAFAVLSVPRCFVAVYPHNQLNSGGESQNTRSIACLSFFICKMPYFLIAWP

SEQ ID NO: 113126 - protein, 116 aa, Setaria italica
  Transcript Sequence Number=SeqID_47152
  Gene Ontology: Mol. function=nucleotide binding; Cellular component =intracellular; Biological process=biological_process
  Homolog annotation: Hit_ID=Q7X864; Match level="QueryCoverage=81%, HitCoverage=10%, E-value=3e-35, Identity=76%"; Hit description =OSJNBa0006A01.22 protein
  Pfam annotation: Domain name=DUF59; Domain location=18-105; Score =45.7; E_value=1.8e-10; Accession=PF01883.11; Description=Domain of unknown function DUF59
RVRQAPETTDENAVEPIDQLEIFDHIRDIKDPEHPYSLEQLNVVTEDSIELNDESNHVRVTFTPTVEHCSMATVEHCSMATVIGLCIRVKLIRSLPPRYKVDIRVAPGSHSTEAAV

SEQ ID NO: 113127 - protein, 158 aa, Setaria italica
  Transcript Sequence Number=SeqID_47153
  Gene Ontology: Mol. function=nucleotide binding; Cellular component =intracellular; Biological process=biological_process
  Homolog annotation: Hit_ID=B9SBL1; Match level="QueryCoverage=99%, HitCoverage=76%, E-value=3e-58, Identity=69%"; Hit description =Protein FAM96B, putative
  Pfam annotation: Domain name=DUF59; Domain location=36-115; Score =65.0; E_value=2.8e-16; Accession=PF01883.11; Description=Domain of unknown function DUF59
MVMGLINANPVIHEKKERRVRQAPETTDENAVEPIDQLEIFDHIRDIKDPEHPYSLEQLNVVTEDSIELNDESNHVRVTFTPTVEHCSMATVIGLCIRVKLIRSLPPRYKVDIRVAPGSHSTEAAVNKQLNDKERVAAALENPNLLDMVEECLSPTFD

SEQ ID NO: 113128 - protein, 64 aa, Setaria italica
  Transcript Sequence Number=SeqID_47154
IILNNQYLTLFRLIFRALFPFIYRKGKRTGVWLVIVQIIGSTDLLLSLVVRYFDSFDAFGMAFE

SEQ ID NO: 113129 - protein, 83 aa, Setaria italica
  Transcript Sequence Number=SeqID_47155
SNFLIVKEMNSLFCPTQGMNLNSYPSLPTLPNPKFGDKYEYQSRHLKFAFFLSRIVIKIQNQLNTPCQKSNDSCNVLVSNYPT

SEQ ID NO: 113130 - protein, 54 aa, Setaria italica
  Transcript Sequence Number=SeqID_47156
MESGHKSGGGGAAGGDGVLCHACGYQYPNGHPSAKQRRAHRKHCGKPASAAATD

SEQ ID NO: 113131 - protein, 76 aa, Setaria italica
  Transcript Sequence Number=SeqID_47157
  Gene Ontology: Mol. function=glyceraldehyde-3-phosphate dehydrogenase (phosphorylating) activity; Cellular component=chloroplast; Biological process=glucose metabolic process
  Homolog annotation: Hit_ID=A6N160; Match level="QueryCoverage=96%, HitCoverage=34%, E-value=2e-31, Identity=86%"; Hit description =Glyceraldehyde-3-phosphate dehydrogenase, cytosolic (Fragment)
  Pfam annotation: Domain name=Gp_dh_C; Domain location=4-55; Score= -35.1; E_value=0.00013; Accession=PF02800.12; Description =Glyceraldehyde 3-phosphate dehydrogenas
MFYRAASEGPLKGIMGYTDEDLVSTDFTGDSRSSIFDAKAGIALNDNFVKLVSWYDNEWGYSNRVVDLIRHMFKTQ

SEQ ID NO: 113132 - protein, 469 aa, Setaria italica
  Transcript Sequence Number=SeqID_47158
  Gene Ontology: Cellular component=extracellular region; Biological process=asexual spore wall assembly
  Homolog annotation: Hit_ID=Q93M48; Match level="QueryCoverage=94%, HitCoverage=99%, E-value=1e-118, Identity=66%"; Hit description =Insecticidal crystal protein CryET29
  Pfam annotation: Domain name=Bac_thur_toxin; Domain location=1-219; Score=31.4; E_value=2.2e-10; Accession=PF01338.10; Description =Bacillus thuringiensis toxin
  Pfam annotation: Domain name=Bac_thur_toxin; Domain location=232-459; Score=339.7; E_value=5.7e-99; Accession=PF01338.10; Description =Bacillus thuringiensis toxin
  Pfam module annotation: Pfam domain module=Bac_thur_toxin::Bac_thur _toxin; Domain location=1-219::232-459
MSKEIRLNLSRESGADLYLKILAFVKPEHFFQAYLLCREFESIVDPTTRESDFDKTLTIVKSDSTLVTVGTMNTKLVNSQEILVSDLITQVGSQIADTLGITDIDANTQQQLTELIGNLFVNLNSQVQEYIYFYEEKEKQTSYRYNILFVFEKESFITILPMGFDVTVNTNKEAVLKLTPKDKVTYGHVSVKALNIIQLITEDKFNFLATLKKALKTLKPALLKEAPRAEEELPPRKMAFFNRVITLTVPSSDVVNYSEIYQVAPQYVNQALTLAKYFQGAIDGSTLRFDFEKALQIANDIPQAAVVNTLNQTVQQGTVQVSVMIDKIVDIMKNVLSIVIDNKKFWDQVTAAITNTFTNLNSQESEAWIFYYKEDAHKTSYYYNILFAIQDEETGGVMATLPIAFDISVDIEKEKVLFVTIKDTENYAVTVKAINVVQALQSSRDSKVVDAFKSPRHLPRKRHKICSNS

SEQ ID NO: 113133 - protein, 159 aa, Setaria italica
  Transcript Sequence Number=SeqID_47159
  Gene Ontology: Mol. function=zinc ion binding; Biological process =regulation of transcription
  Homolog annotation: Hit_ID=B6TNI4; Match level="QueryCoverage=100%, HitCoverage=48%, E-value=6e-26, Identity=50%"; Hit description=Dof domain, zinc finger family protein
DLALLYAKFLNHQPPPAVEPCAILPESLDALRGSSSDMSPDVPPPPDHHPFTRQDAFGELSTPASADPGAAAPQCPDARTEVLAELGFSVDQSCYDSLGLSTDDGDLILPSTWQPEAKYEPFDPLPEDAMSLHGGISGGDDVWSSALACQGLEAALCRP

SEQ ID NO: 113134 - protein, 536 aa, Setaria italica
  Transcript Sequence Number=SeqID_47160
  Gene Ontology: Mol. function=nucleic acid binding; Cellular component= chromatin; Biological process=regulation of transcription, DNA -dependent
  Homolog annotation: Hit_ID=Q53QK3; Match level="QueryCoverage=94%, HitCoverage=48%, E-value=1e-135, Identity=54%"; Hit description=PWWP domain containing protein, expressed
KKKIGISKDSGGLDTADVVEGKTPANKTVDGISSMSKSGRTLRSMRKKEDALEGLKRLGNEDSDETLTGKSKDAPLLKESKLMHRTSSARKRSKITDHGHEVEDLSVNNSASIGKRRSGRAEMSNRVPISEHGRKKKKLSELMAETGSPNSASDGKSKTRGKRSSHESTEKAEDPDRDSKDTMKARKRKKLNTLGDLSSQSEPSCHKKSTKVGKLMTKASGSSISHTPPAVKANGAASQTKSRRAKHKLVNAADKSPRPVKVDRGKKEAFSEESLSCDEMLWQLSVAACDLKQREKIVPTSVNFFTDFRNNLMVSSSDVNEEVPEKAANIESTPSEQPLADHMKDDYWADILINVEEPLSSLKKKKDESKKRTSKKAHQVKKLTDTPSVTLENADEPRSEGKEDTENGEQLKAESKPVVANGSRLNTGTKSAEEMEHSNGVLAGLVLHFSGPRAVPSRSDLIKIFSQYGPVSEAKAEIANNANSAQVIFKRRMDAEAAFAGAGKISALGPALVSFRLTDFPAVASGNEPSHGASKK

SEQ ID NO: 113135 - protein, 333 aa, Setaria italica
  Transcript Sequence Number=SeqID_47161
  Gene Ontology: Mol. function=protein binding; Cellular component =nucleus; Biological process=regulation of transcription, DNA -dependent
  Homolog annotation: Hit_ID=B6TMA7; Match level="QueryCoverage=93%, HitCoverage=70%, E-value=1e-139, Identity=78%"; Hit description =Transcription regulator
  Pfam annotation: Domain name=HCNGP; Domain location=132-228; Score =148.2; E_value=2.5e-41; Accession=PF07818.5; Description=HCNGP-like protein
SPLRGPSSAPPPDLPRPPRRGALAIVDYGHDEMAMSPEQEDGEIMSGVHRFGSDAQSAEGNLEERTLSGMVHIMPSNTEAEMPQHPDAPEQNQVGTDMDVDVTRPEIEDAQVEETTDVSTNGENDDPLSRFLPPPATAKCSAALQQKINRFLVYKRAGKSFNAEVRNRKDYRNPDFLQHAVRYQEIDQIGTCFSKDVFDPYGYDKADYYDEIEADMKRELERKEQERKKSPKVEFIAAGVQPPITASIPKIPAGVATLPVPAEGVKKESRPNKKSKWDKVDGDVKNLAIPSGHDHLSATVSAALLPSANVGAGYAAFAQQKRKEAEEKRSDYK

SEQ ID NO: 113136 - protein, 69 aa, Setaria italica
  Transcript Sequence Number=SeqID_47162
ILISMQCCNPNADCADVLDFSEIICKPIKLNNLDFLFYCIQINTLIWAVSETPKTDCSNFPKIIYRLLK

SEQ ID NO: 113137 - protein, 160 aa, Setaria italica
  Transcript Sequence Number=SeqID_47163
  Gene Ontology: Mol. function=aspartic-type endopeptidase activity; Biological process=DNA integration
  Homolog annotation: Hit_ID=Q2QQZ3; Match level="QueryCoverage=100%, HitCoverage=10%, E-value=2e-73, Identity=75%"; Hit description =Retrotransposon protein, putative, unclassified
SAALDADEDGEPVDQKEYRSMIGSLLYLTATRPDIHFAVCMCARFQASPRTSHRQAVKRIMRYLRFTPAFGLWYSAASTLSLCGYSDADFAGCRLDRKSTSGTCQFLGSSLVSWSSRKQSNVAQSTTEAEYVAAASCCSQLLWMIATLRDFGLSFSRVPL

SEQ ID NO: 113138 - protein, 146 aa, Setaria italica
  Transcript Sequence Number=SeqID_47164
  Gene Ontology: Mol. function=metalloendopeptidase activity; Cellular component=proteinaceous extracellular matrix; Biological process =metabolic process
  Homolog annotation: Hit_ID=B6U4D1; Match level="QueryCoverage=65%, HitCoverage=26%, E-value=2e-40, Identity=91%"; Hit description =Metalloendoproteinase 1
  Pfam annotation: Domain name=PG_binding_1; Domain location=61-122; Score=55.2; E_value=2.5e-13; Accession=PF01471.10; Description =Putative peptidoglycan binding domain
  Subcellular localization annotation: CTP_CleavageSite=58; ConfidenceScore=5.19e-01
MTSATGSPLASRVFAVAVAMVVFAVALPAAAFPAGLPPGAPAFPNPWAAFQNLSGCHMGEERQGLAGLKDYLSHFGYLPPPPSSSPFTDAFDEDLEAAIATYQRNFGLNATGALDASTVAQMVSPRCGVADVINGTSTMARNSSAA

SEQ ID NO: 113139 - protein, 93 aa, Setaria italica
  Transcript Sequence Number=SeqID_47165
  Gene Ontology: Mol. function=protein tyrosine kinase activity; Cellular component=chloroplast; Biological process=protein amino acid phosphorylation
  Homolog annotation: Hit_ID=Q7XQK6; Match level="QueryCoverage=60%, HitCoverage=11%, E-value=9e-24, Identity=89%"; Hit description =OSJNBa0017B10.2 protein
  Subcellular localization annotation: CTP_CleavageSite=48; ConfidenceScore=5.71e-01
LLVSSSGHPSSRSPGSSMSSIATTRSGSSSSSLAAYPEGRILEAPNLRVFTFAELRSATRNFKPDTVLGEGGFGRVYKGWVDERTMNPTRSGI

SEQ ID NO: 113140 - protein, 198 aa, Setaria italica
  Transcript Sequence Number=SeqID_47166
RKVDRNNHRAGASRLWFPGHSSQDPVPLGYRHQLGNSRGAATTIRLEHQRYLPQRQPFSLLGYKNGGTAPATSAICPFSEGARGAEAASFAGQMHAAISRARGSAAVTTTELASEMMAGNPPIPSTEMGTLASSPGEFLVGVQGDHYLFHFLGSGSWACGYGSTAGNNGSGGGSSCTAAPGSAWPDPSGFTSSSSGRK

SEQ ID NO: 113141 - protein, 67 aa, Setaria italica
  Transcript Sequence Number=SeqID_47167
KLHSTQLQAVGAIRNECDITCGWVTSLGSKECLLVRGPGVADAAQPTLIQSDLFGCLQGVLNHPGRP

SEQ ID NO: 113142 - protein, 47 aa, Setaria italica
  misc_feature (1)..(1): Xaa can be any naturally occurring amino acid
  Transcript Sequence Number=SeqID_47168
XHQSAESMGCKAQPVYAHTTTCNKVQATSRFRPWQLSPITRKLANCW

SEQ ID NO: 113143 - protein, 293 aa, Setaria italica
  Transcript Sequence Number=SeqID_47169
  Gene Ontology: Mol. function=nucleic acid binding; Cellular component= ribonucleoprotein complex; Biological process=ribosome biogenesis
  Homolog annotation: Hit_ID=Q9S826; Match level="QueryCoverage=99%, HitCoverage=99%, E-value=1e-120, Identity=69%"; Hit description =Putative U3 small nucleolar ribonucleoprotein
  Pfam annotation: Domain name=Brix; Domain location=87-262; Score =263.5; E_value=5e-76; Accession=PF04427.10; Description=Brix domain
MIRRTQRTRREYLYTKSLEGADRVQFEKKRRIRQALEEGKPIPTELRNEEHELRRQIDLEDQERQVPKSIVDNEYATANIREPKIMLTTSRNPSSPLIQFVKELKVVFPNSQRINRGGQVISEIVESCRSHDITDLILVHEHRGKPDGLIVSHLPHGPTAYFGLLNVVTRHDIKDRKAMGKMSEAYPHLVLDNFSTKIGERTATILKHLFPVPKPDSKRIITFANRDDYISFRHHVYEKPGGPKSIDLKEVGPRFELRLYQIKLGTVEQDEAQSEFVLRPYINTAKKQKTLGS

SEQ ID NO: 113144 - protein, 326 aa, Setaria italica
  misc_feature (195)..(195): Xaa can be any naturally occurring amino acid
  misc_feature (320)..(320): Xaa can be any naturally occurring amino acid
  misc_feature (326)..(326): Xaa can be any naturally occurring amino acid
  Transcript Sequence Number=SeqID_47170
  Gene Ontology: Mol. function=nucleic acid binding
  Homolog annotation: Hit_ID=B9SHJ5; Match level="QueryCoverage=91%, HitCoverage=67%, E-value=1e-54, Identity=64%"; Hit description=RNA binding protein, putative
ESKYGQIANNAHAKPQDQLEHGVSPAPSICSENQKNPTSTAEPIAPKLGVDYPFPPHLEYAYPPPDGNILNNIVNALIAVPRFYTQVLHLMNKMNLPAPFRMALPTPPLPSQVSAPPHPPPPLQPTTTEEPRSADLSSDESELESSDDDVDKRKSKRAKHEAIVGPAVDKSVAHEAVGVKPAALVSTELQVIKKXNPVLQIKIAPKATQKEPPIPSTTDKELDSTNEQLEEKHFVTPQEIEKDKLPPEEILSLPMFKNYTPGNPAIVLYIKNLAKDVTHDDFFYVFGSLFESMDSVRSGLSIKLMQEGRMRGQAFVTFSXVELAQX

SEQ ID NO: 113145 - protein, 106 aa, Setaria italica
  misc_feature (15)..(15): Xaa can be any naturally occurring amino acid
  Transcript Sequence Number=SeqID_47171
ADVAMAMHGGAGGVXTAVSGCYAGPAFNTVVGLGLSLTMAAAARYPRPYAIPADASAYQAAGFLAAALVWAIVVLPARGMRLDRVLGVGLLVVYLAFIAVRLVSLG

SEQ ID NO: 113146 - protein, 81 aa, Setaria italica
  misc_feature (80)..(81): Xaa can be any naturally occurring amino acid
  Transcript Sequence Number=SeqID_47172
SSLTVTRTLLPGLQMLMPLLVGAMCPPATSINIVKNVRFLILFQVDGRIAIHAHLPLLTFGSAIELLIFDREQKKKKKKXX

SEQ ID NO: 113147 - protein, 51 aa, Setaria italica
  Transcript Sequence Number=SeqID_47173
SFFVSSCTYVCVFQVFFACLSVWFIFRVICSQKIPYKCKVLIDFNQIVLGP

SEQ ID NO: 113148 - protein, 90 aa, Setaria italica
  misc_feature (43)..(43): Xaa can be any naturally occurring amino acid
  misc_feature (65)..(65): Xaa can be any naturally occurring amino acid
  Transcript Sequence Number=SeqID_47174
  Gene Ontology: Mol. function=nucleotide binding; Biological process =defense response
  Homolog annotation: Hit_ID=Q9XEQ9; Match level="QueryCoverage=71%, HitCoverage=4%, E-value=8e-24, Identity=79%"; Hit description =Disease resistance protein RPM1 homolog
PGNSTNSCCHYYSTVISVLKQSKSDHVPIDEVIKLLGDGEQGXKVVSIVGCGGLGKTTIANQVYXRLTEQFDCQAFVSLSQNPDMVMIFR

SEQ ID NO: 113149 - protein, 190 aa, Setaria italica
  misc_feature (160)..(160): Xaa can be any naturally occurring amino acid
  Transcript Sequence Number=SeqID_47175
  Gene Ontology: Mol. function=nucleotide binding; Biological process =defense response
  Homolog annotation: Hit_ID=Q9XEQ9; Match level="QueryCoverage=100%, HitCoverage=14%, E-value=4e-76, Identity=73%"; Hit description =Disease resistance protein RPM1 homolog
NQVREMSYDIEDCVDDYMRQLRSGPQRPSGVMGFFLGYVQRVKELVTGHETAKQIQELRDRIVEAGHRRKRYKIDDAVNSASVNVVPVDLRLPAFYVELGGLVGTNVPIDEVIKLLGDGEQGMKVVSIVGCGGLGKTTIANQVYRKIAEQFDCQAFVSLXKNPDMVMIFRSILSQVKKDDCDGTSLSDKE

SEQ ID NO: 113150 - protein, 140 aa, Setaria italica
  Transcript Sequence Number=SeqID_47176
  Homolog annotation: Hit_ID=Q8H8G7; Match level="QueryCoverage=90%, HitCoverage=22%, E-value=2e-25, Identity=51%"; Hit description =Putative cell cycle switch protein
  Subcellular localization annotation: CTP_CleavageSite=52; ConfidenceScore=5.59e-01
SHASTAASAPTPASRTVYSDRFIPSRTGSNLALFDLAPSPSSSHDAAASGPTASSGSAPPTSPYCALLRAALFGPDTPDRVASSATACSSSSSAGASAVGTPATGNIFRFKAEVPRNAKRALFSGEDEEDALFPGIFTRR

SEQ ID NO: 113151 - protein, 195 aa, Setaria italica
  misc_feature (10)..(10): Xaa can be any naturally occurring amino acid
  misc_feature (63)..(63): Xaa can be any naturally occurring amino acid
  Transcript Sequence Number=SeqID_47177
  Gene Ontology: Mol. function=ribokinase activity; Biological process =D-ribose metabolic process
  Homolog annotation: Hit_ID=Q7XDM4; Match level="QueryCoverage=98%, HitCoverage=52%, E-value=8e-59, Identity=61%"; Hit description =Kinase, pfkB family protein
FVYIIIDKQXKTRTCILTPGDPPMVPSDLPMSCLSAALQDVSLLYLDGYSPEMALAVAKQKYXADQMNIPILVDAEQERTKEELEGLLILASYIVCSGKFPKNWTSIPSLPCALLEILLQYPRAKFVIATLGEKGCMMLERSEAGDDSVVDAADIEAVADSLRLELHKDGIFPTCVASKPLRLSAIGLGTVSGRL

SEQ ID NO: 113152 - protein, 54 aa, Setaria italica
  Transcript Sequence Number=SeqID_47178
IYSTYTSPLYQSRHNSLLMGLWYRFSVKAINPIINLLLMVLNSSYNPANDVCWF

SEQ ID NO: 113153 - protein, 92 aa, Setaria italica
  Transcript Sequence Number=SeqID_47179
  Homolog annotation: Hit_ID=B6ZKJ6; Match level="QueryCoverage=97%, HitCoverage=23%, E-value=7e-19, Identity=61%"; Hit description=Sh4 homologue protein
KNSGQRRRLNRLGSSVVRSATVLARTLVACEEKRERRHREVLELEERRLRLEEQRTEVRRQGFAGLISAVNSLSSAIHALVADHRSGDSASR

SEQ ID NO: 113154 - protein, 155 aa, Setaria italica
  Transcript Sequence Number=SeqID_47180
HQSTCVSSLPTAHRERDDSLASRAASAKAPPPPPPPGRPPLPRGTDGVPDGSGQVRLLLLLSLHLLLRFIPFPFPGPSPHSLFLVSKCQAAALTAATPAPALIRTAAAPPGQRVHQRSSSPCCPEALPADYSVRALFIASCACASCSFSCHGFYF

SEQ ID NO: 113155 - protein, 63 aa, Setaria italica
  Transcript Sequence Number=SeqID_47181
FGRRQLLQGSGCTRGPHHHAVQKHYLQIIVFKSVKGIRWSLKPVEDDCESYHTLEKKVGCKMY

SEQ ID NO: 113156 - protein, 78 aa, Setaria italica
  Transcript Sequence Number=SeqID_47182
TFKTRSSLDLGTNHFLLPASNTNFVVKEQKYHRNHVPINHTWCIKDTHADSKGTNEIKLMRLSCRILKNNHTRDFSMK

SEQ ID NO: 113157 - protein, 96 aa, Setaria italica
  Transcript Sequence Number=SeqID_47183
  Subcellular localization annotation: CTP_CleavageSite=59; ConfidenceScore=5.15e-01
TNPRVYPASPPHTGNETTRSRRALGHLSLAALTACPTAADKVRQAAALTAATPAPALIRTAAAPPGQRVHQGSSSPCCLEALPADYIKKWIQQWRI

SEQ ID NO: 113158 - protein, 146 aa, Setaria italica
  Transcript Sequence Number=SeqID_47184
LKRYMAGNKIMSIISSSSFLLFLTRSSTVESIFHYNLQVMLLDSMVMRTPGAPAAQEERDGWGRYALRSCRSPNQGRCGSSSSQRRCLTNLARCRRARRQCGEGEVTAPAAAVPLLKQSARERVVSFPVCGGEAGCTRGLVRIGLG

SEQ ID NO: 113159 - protein, 154 aa, Setaria italica
  Transcript Sequence Number=SeqID_47185
  Homolog annotation: Hit_ID=B6U9Q3; Match level="QueryCoverage=97%, HitCoverage=32%, E-value=7e-39, Identity=53%"; Hit description=F-box domain containing protein
SGCSIPDLPMDIWRHIHSLMPMDAAARAACLSHAFLSSWRCYPKLTLDMHTLCYELRVGGNLTCRIDSILRNHSGIGLKILRLDLYGQYSCFPYIDNWLQVAVTPGIEELTLRLYEKYKLPCSILSDGVRNSIRSLQLDCCVFRPTPEPGPVCS

SEQ ID NO: 113160 - protein, 43 aa, Setaria italica
  Transcript Sequence Number=SeqID_47186
MGEDPVTVWATKFNAMLCLYICYSLYIFVPVNILFQCHINISS

SEQ ID NO: 113161 - protein, 56 aa, Setaria italica
  misc_feature (40)..(40): Xaa can be any naturally occurring amino acid
  Transcript Sequence Number=SeqID_47187
  Homolog annotation: Hit_ID=B6U082; Match level="QueryCoverage=98%, HitCoverage=11%, E-value=4e-15, Identity=69%"; Hit description =Lysosomal protective protein
MHTLPIKMKRGLLILWSLFYSSAANIATRNQANQPLEFDXLDIIQQHVTRKQDSTL

SEQ ID NO: 113162 - protein, 106 aa, Setaria italica
  Transcript Sequence Number=SeqID_47188
  Gene Ontology: Mol. function=hydrolase activity, acting on carbon -nitrogen (but not peptide) bonds; Cellular component=integral to membrane
  Homolog annotation: Hit_ID=Q6A8E5; Match level="QueryCoverage=100%, HitCoverage=20%, E-value=2e-54, Identity=100%"; Hit description =Apolipoprotein N-acyltransferase
QWQITRARAVETGRHIVVSTTNSFSGLVNPDGSVALRTEEGVHTHFTVTIPLESGLTIGVQIAPWLRIIVLVMTAGAIAMSLLQRRRAMLAQANHNRSERNVRHRH

SEQ ID NO: 113163 - protein, 284 aa, Setaria italica
  Transcript Sequence Number=SeqID_47189
  Gene Ontology: Mol. function=transferase activity
  Homolog annotation: Hit_ID=Q9SB97; Match level="QueryCoverage=76%, HitCoverage=97%, E-value=4e-75, Identity=64%"; Hit description =Glutathione transferase
  Pfam annotation: Domain name=GST_C; Domain location=172-271; Score =95.4; E_value=2e-25; Accession=PF00043.17; Description=Glutathione S- transferase, C-terminal domain
  Pfam annotation: Domain name=GST_N; Domain location=64-139; Score =73.5; E_value=7.6e-19; Accession=PF02798.12; Description=Glutathione S-transferase, N-terminal domain
  Pfam module annotation: Pfam domain module=GST_C::GST_N; Domain location=172-271::64-139
MDLPVVRAICCHGLLPGPLTYDKTPGTIICAQALSNRDKLCRSSTRAAGLHRCGLSSQANQSMAPVKVFGSAVFANAARVMACLEEVGVEYEVVEVDYMAREHKGLKHLARNPFGQIPAFQDGDIMLFESRAISKYVLRKYAKSAQDDLLREGNPEEAAMVDAWTEVEAHHYFPAMAPIFYECVVYPARLGTVPDQKIVGESLEKLRKVLDVYEAHLSRTKSKYLAGNFFSFADLNHFPFTFHIMTATPHASLFDSYPHIKAWWARVMARPSLKKISTHMEIKP

SEQ ID NO: 113164 - protein, 45 aa, Setaria italica
  misc_feature (25)..(25): Xaa can be any naturally occurring amino acid
  Transcript Sequence Number=SeqID_47190
QPGFEKRRDLYLLYHYLNHYNLFGXSGYRSSAMSIIEDYLYLLAV

SEQ ID NO: 113165 - protein, 260 aa, Setaria italica
  Transcript Sequence Number=SeqID_47191
  Gene Ontology: Mol. function=binding; Cellular component=chloroplast
  Homolog annotation: Hit_ID=B6SRQ6; Match level="QueryCoverage=82%, HitCoverage=82%, E-value=1e-103, Identity=83%"; Hit description=TPR repeat
  Pfam annotation: Domain name=TPR_1; Domain location=108-141; Score =3.7; E_value=2.1; Accession=PF00515.20; Description=Tetratricopeptide repeat
  Pfam annotation: Domain name=TPR_1; Domain location=74-107; Score =17.9; E_value=0.042; Accession=PF00515.20; Description =Tetratricopeptide repeat
  Pfam annotation: Domain name=TPR_2; Domain location=108-141; Score =17.9; E_value=0.041; Accession=PF07719.9; Description=Tetratricopepti de repeat
  Pfam annotation: Domain name=TPR_2; Domain location=74-107; Score =23.9; E_value=0.00065; Accession=PF07719.9; Description =Tetratricopeptide repeat
  Pfam module annotation: Pfam domain module=TPR_1::TPR_1::TPR_2::TPR _2; Domain location=108-141::74-107::108-141::74-107
  Subcellular localization annotation: CTP_CleavageSite=43; ConfidenceScore=5.65e-01
MAPTSVVHHPPTTSFPFPPGAGGHSRRLPQWGPPASPAPFPPVATHVVPRRLLLPVAAGIWDFVSGGAGGAAAASLAVRRGMQLFRQGDVEGSLAEFDKAIEMDPRQKKYLWQRGLSLYYLDRFEEGAEQFRLGVAANPNDTEESIWCFLCEAQLYGIEEARKRYLEVGLDSRPVMREAYTMFKDGGDPEKLVANFSSGSGGDVFYSSLYAGLYNESQKNADKAKFHIVAACKSPYGSRSGDYMASLAFVHCQCRNWDLE

SEQ ID NO: 113166 - protein, 69 aa, Setaria italica
  Transcript Sequence Number=SeqID_47192
ELVVLRNENCLMVATSDFFCHSSEFFCYSRLTLGSHFNSQVGRLTPWDSFLEYRNCLLFTIYAFVFARV

SEQ ID NO: 113167 - protein, 69 aa, Setaria italica
  Transcript Sequence Number=SeqID_47193
LLYLCHSLCIVCASLQVDQLKIPTVKDMRYVDRKLKHCWDRSSHDEHKKKEKKSKHKSKRTSTDAQLNG

SEQ ID NO: 113168 - protein, 237 aa, Setaria italica
  Transcript Sequence Number=SeqID_47194
  Gene Ontology: Mol. function=translation initiation factor activity; Cellular component=cytoplasm; Biological process=translational initiation
  Homolog annotation: Hit_ID=B6TIT4; Match level="QueryCoverage=85%, HitCoverage=61%, E-value=1e-107, Identity=90%"; Hit description =Cyclin-H
ISLLLKFQATAIIYFKRFYLQWSVMEHHPKHIMLTCVYASCKVEENHVSAEELGKGIQQDHQIILNNEMVLLKTLDFDLIVYAPYRSIEGFIDDLEGFCRVGNGAVQRLKELHQTAMSHADKMMLTDAPLLYTPGQLALAALHKSNDILRVFDFERYLETIFSRQHSDCTVEQFVQSINAIHYLVDQLKIPTVKDMRYVDRKLKHCWDRSSHDEHKKKEKKSKHKSKRTSTDAQLNG

SEQ ID NO: 113169 - protein, 223 aa, Setaria italica
  Transcript Sequence Number=SeqID_47195
  Gene Ontology: Mol. function=deoxyhypusine synthase activity; Cellular component=cytosol; Biological process=peptidyl-lysine modification to hypusine
  Homolog annotation: Hit_ID=Q10D52; Match level="QueryCoverage=93%, HitCoverage=64%, E-value=1e-108, Identity=90%"; Hit description =Deoxyhypusine synthase, putative, expressed
  Pfam annotation: Domain name=DS; Domain location=53-223; Score=64.1; E_value=5.2e-16; Accession=PF01916.9; Description=Deoxyhypusine synthase
MAGVGGSGSGGVVHDVEALEGVRSIVLKPSESLDDSRFTRIAGADFNDPGLGLEGLLGSFASTGFQASNLGDAIDVVNQMLDWRLSHEKPGEDCDEAELDPKYRESVKCKIFLGFTSNLVSSGIRDIVRFLAQHRMVDVIVTTAGGIEEDLIKCLAPTYRGDFSLPGALLRSKGLNRIGNLLVPNDNYCKFENWIMPLFDQMLLEQSTENIWTPSKVIARLGK

SEQ ID NO: 113170 - protein, 124 aa, Setaria italica
  Transcript Sequence Number=SeqID_47196
  Gene Ontology: Mol. function=aspartic-type endopeptidase activity; Cellular component=chromatin
  Homolog annotation: Hit_ID=Q7XP97; Match level="QueryCoverage=91%, HitCoverage=2%, E-value=4e-34, Identity=63%"; Hit description =OSJNBa0060B20.14 protein
MEAAAAAAGTPERETSAEWGDGVVALGFRVKASSRESPSQKAGNVLEADLRSHWSTATNTKEWILLELQEPCLLSHVRIYNKSVLEWELTAGLRYKPDAFVKVRPRCESPKRDVVYAANHTPCR

SEQ ID NO: 113171 - protein, 105 aa, Setaria italica
  misc_feature (57)..(57): Xaa can be any naturally occurring amino acid
  misc_feature (61)..(61): Xaa can be any naturally occurring amino acid
  misc_feature (91)..(91): Xaa can be any naturally occurring amino acid
  Transcript Sequence Number=SeqID_47197
  Gene Ontology: Mol. function=RNA-directed DNA polymerase activity; Biological process=RNA-dependent DNA replication
  Homolog annotation: Hit_ID=Q7XQ51; Match level="QueryCoverage=71%, HitCoverage=6%, E-value=3e-27, Identity=81%"; Hit description =OSJNBa0017P10.4 protein
  Pfam annotation: Domain name=zf-CCHC; Domain location=35-52; Score =26.7; E_value=2e-05; Accession=PF00098.15; Description=Zinc knuckle
  Subcellular localization annotation: CTP_CleavageSite=56; ConfidenceScore=5.49e-01
MTTSLTGRAPPPSPSSSWSAPLPPSSDKQCRTRDVQCHRCKGFGHVQRDCPSKRVLXVKKXGGYSSASNFDEDTLALLAADHAGSEEQPVXRIGAEDADHYESLI

SEQ ID NO: 113172 - protein, 146 aa, Setaria italica
  misc_feature (119)..(119): Xaa can be any naturally occurring amino acid
  misc_feature (137)..(137): Xaa can be any naturally occurring amino acid
  Transcript Sequence Number=SeqID_47198
  Gene Ontology: Mol. function=protein serine/threonine kinase activity; Cellular component=plasma membrane; Biological process =protein amino acid phosphorylation
  Homolog annotation: Hit_ID=B6UCJ4; Match level="QueryCoverage=100%, HitCoverage=23%, E-value=2e-62, Identity=81%"; Hit description =BRASSINOSTEROID INSENSITIVE 1-associated receptor kinase 1
  Pfam annotation: Domain name=LRRNT_2; Domain location=6-46; Score =38.0; E_value=3.8e-08; Accession=PF08263.4; Description=Leucine rich repeat N-terminal domain
  Pfam annotation: Domain name=LRR_1; Domain location=122-144; Score =9.7; E_value=4.3; Accession=PF00560.25; Description=Leucine Rich Repeat
  Pfam annotation: Domain name=LRR_1; Domain location=50-72; Score=8.5; E_value=7.2; Accession=PF00560.25; Description=Leucine Rich Repeat
  Pfam annotation: Domain name=LRR_1; Domain location=74-96; Score =15.8; E_value=0.18; Accession=PF00560.25; Description=Leucine Rich Repeat
  Pfam annotation: Domain name=LRR_1; Domain location=98-120; Score =15.0; E_value=0.31; Accession=PF00560.25; Description=Leucine Rich Repeat
  Pfam module annotation: Pfam domain module=LRRNT_2::LRR_1::LRR_1::LRR_ 1::LRR_1; Domain location=6-46::122-144::50-72::74-96::98-120
LSPKGLSYEVAALMAVKSRLRDEKGVMALWDINSVDPCTWSMVACSPDKFVVSLQMANNGLSGTLSPSIGNLSHLQTMSLQNNKISGDIPPEIGKLTNLNALDLSSNEFVGDIPSSLGXLTRLNYLRLDRNNLSGQXPVDVAKLAG

SEQ ID NO: 113173 - protein, 315 aa, Setaria italica
  misc_feature (72)..(72): Xaa can be any naturally occurring amino acid
  misc_feature (159)..(159): Xaa can be any naturally occurring amino acid
  misc_feature (233)..(233): Xaa can be any naturally occurring amino acid
  misc_feature (250)..(250): Xaa can be any naturally occurring amino acid
  Transcript Sequence Number=SeqID_47199
  Gene Ontology: Mol. function=protein tyrosine kinase activity; Biological process=protein amino acid phosphorylation
  Homolog annotation: Hit_ID=B9SAG6; Match level="QueryCoverage=92%, HitCoverage=31%, E-value=2e-74, Identity=46%"; Hit description =Receptor protein kinase, putative
  Pfam annotation: Domain name=Pkinase; Domain location=61-313; Score =58.4; E_value=2.8e-14; Accession=PF00069.17; Description=Protein kinase domain
  Pfam annotation: Domain name=Pkinase_Tyr; Domain location=61-315; Score=-21.4; E_value=2.7e-12; Accession=PF07714.9; Description =Protein tyrosine kinase
  Pfam module annotation: Pfam domain module=Pkinase::Pkinase_Tyr; Domain location=61-313::61-315
LLLAFGFLLLVSVLSVITVFFIQHKRKPRDTTARSARDILSVWTFDGRLTFKDIIIATDSFDEKYCVGSGGXAQLEGGSVFAIKKIHSNGEMTDDATFHHEIEVLMKIKHRNIVKLYGFCSHRQFKFLVYDYIERGSLTTILCHDELANEFHWKKESIXLLNDVARALYYLHHECNPPIIHRDITSGNILLDTEYKAFVSDFGTARIIKPDSSNWSELAGSFGYIAPELLQTXATEKCDVYSFGVVTMEXMMGKHPGDLIGRLTSLEELDGLLEDIIDKHPATPTSNKEQDIIQLIIIAKRCVQASPEDAPTMQQ

SEQ ID NO: 113174 - protein, 95 aa, Setaria italica
  Transcript Sequence Number=SeqID_47200
  Gene Ontology: Mol. function=sucrose-phosphate synthase activity; Cellular component=plasma membrane; Biological process=sucrose metabolic process
  Homolog annotation: Hit_ID=Q6EZE8; Match level="QueryCoverage=100%, HitCoverage=9%, E-value=2e-36, Identity=76%"; Hit description =Sucrose-phosphate synthase
PYVIHGHYADAAEAAAHLASALNVPMVMTGHSLGRNKLEQLLKLGRMTPAEIQGTYRIARRVEAEETGLDAAEVVVTSTKQEVEEQWGLYDGFDV

SEQ ID NO: 113175 - protein, 72 aa, Setaria italica
  Transcript Sequence Number=SeqID_47201
YNRMIAREHICTHPRIDMYASLFSQTLISEYLHLLHTILQLNSVLLHVIIKIDALRLVSVHSFIALSVRFGT

SEQ ID NO: 113176 - protein, 46 aa, Setaria italica
  Transcript Sequence Number=SeqID_47202
EFRSIYTRLYVCNPGSCRLMLIRILISITGECEKHINDHNYNVNHM

SEQ ID NO: 113177 - protein, 128 aa, Setaria italica
  Transcript Sequence Number=SeqID_47203
  Gene Ontology: Cellular component=integral to membrane
  Homolog annotation: Hit_ID=A9YWR1; Match level="QueryCoverage=57%, HitCoverage=55%, E-value=3e-09, Identity=48%"; Hit description =Hydroxyproline-rich glycoprotein
MPMNRLQDLTPAPSMTVPIEHSSRPTLGFPLGTALLLLVIFSLSGMFSCCYHWDKLRSLLRSRHPAMFQEGEHTVISITSSPSKETPDHKLEKVGKECGLPVIMPGDKVPKFFARPCPHEMCCLSRED

SEQ ID NO: 113178 - protein, 237 aa, Setaria italica
  Transcript Sequence Number=SeqID_47204
  Gene Ontology: Mol. function=protein binding
  Homolog annotation: Hit_ID=Q7XXK8; Match level="QueryCoverage=97%, HitCoverage=19%, E-value=1e-49, Identity=48%"; Hit description =OSJNBa0073L13.12 protein
CFCSLWYLLVWCRVERCPKLGCVFTTPQLEGSGDELIFFHLRTFWASQLPKARYIWNWSRTLAFDIGSGSFEDLEILHLDLCPRIIHVLPLAMPMVESSLRSLVTLEIVWCGNLEVVFPLYTDAGGSHQHEEQSINTVKLRNLKHIHLHELPKLQGICGRWMISAPMLETVKIRGCWSLKRLPAVSSGGSKKVECDCEKEWWEKLEWDLGANHHPSLYKPIHSRYYKKTMLRGSVLT

SEQ ID NO: 113179 - protein, 90 aa, Setaria italica
  Transcript Sequence Number=SeqID_47205
QGHLSFLQATWHAVSLRHVACVPPATHTYFHIVLKDIGHACMMFYCISSQLSIVVLRKKLIKTLSVLNLDYFDFSKFIDIIIMYLDCIST

SEQ ID NO: 113180 - protein, 51 aa, Setaria italica
  Transcript Sequence Number=SeqID_47206
GTRFYRFQLPLTSAMWIVQFKLNHRGQNERALSNTGGAQQTTISSISFLSP

SEQ ID NO: 113181 - protein, 194 aa, Setaria italica
  misc_feature (113)..(113): Xaa can be any naturally occurring amino acid
  misc_feature (175)..(175): Xaa can be any naturally occurring amino acid
  Transcript Sequence Number=SeqID_47207
  Gene Ontology: Mol. function=structural constituent of ribosome; Cellular component=ribonucleoprotein complex; Biological process =translation
  Homolog annotation: Hit_ID=P49397; Match level="QueryCoverage=94%, HitCoverage=69%, E-value=4e-95, Identity=92%"; Hit description=40S ribosomal protein S3a
  Pfam annotation: Domain name=Ribosomal_S3Ae; Domain location=1-191; Score=354.1; E_value=2.6e-103; Accession=PF01015.10; Description =Ribosomal S3Ae family
ESLRSPWLISRGKTLVSRTQGTKIASEGLKHRVFEVSLADLQSDEDQAYRKIRLRAEDVQGKNVLTNFWGMDFTTDKLRSLVKKWQTLIEAHVDVKTTDNYMLRLFCIGFTKXRPNQVKRTCYAQASQIRQIRRKMVEIMTNQASTCDLKELVSKFIPEVIGKEVEKATSSILPXLRTFFIRKVKILKAPKFDL

SEQ ID NO: 113182 - protein, 153 aa, Setaria italica
  Transcript Sequence Number=SeqID_47208
  Homolog annotation: Hit_ID=Q2QYR0; Match level="QueryCoverage=100%, HitCoverage=22%, E-value=1e-34, Identity=45%"; Hit description =Pentatricopeptide, putative, expressed
RWHSSETTRLEMREKGMRKIPARSWTFNDNTVHSFFARDRSHPQSKDIYAGLDVLILECIKAGYEPDTTFVLHDVEEYQKRHFLMYHSAKLAAMYGILTAGTGRAVRVVKNIRMCGDCHSFLEHASAATGKVISVRDSSGFHIFRGGKCTCRE

SEQ ID NO: 113183 - protein, 92 aa, Setaria italica
  Transcript Sequence Number=SeqID_47209
  Subcellular localization annotation: CTP_CleavageSite=50; ConfidenceScore=5.18e-01
KALVNHHSWGPGGKEVAPYVRIPGRRASSFCLSLAASRLASNSNQKLLLLQSNKKHVAGSECVRKLVKNWASHNCKDNRTGTSVMICLIDCR

SEQ ID NO: 113184 - protein, 256 aa, Setaria italica
  Transcript Sequence Number=SeqID_47210
  Gene Ontology: Mol. function=transferase activity, transferring glycosyl groups; Cellular component=integral to membrane; Biological process=cell wall organization and biogenesis
  Homolog annotation: Hit_ID=Q7PC67; Match level="QueryCoverage=100%, HitCoverage=44%, E-value=1e-131, Identity=87%"; Hit description =Probable mannan synthase 2
GGWKDRTTVEDMDLAVRASLKGFEFLYVGDIRVKSELPSTFQAYRHQQHRWTCGAANLFRKMAWEVVTNKEVSIWKKHHLLYSFFFVRRVIAPLVTFLFYCVVIPLSAIVPGVSIPVWGLVYIPTAITCMNAIRNPGSLHLMPFWILFENVMSMHRMRAALTGLLETAHANDWVVTEKVGDLAKDDLDVPLLEPVKPTECVERIYIPELLLAFYLLICASYDLVVGSHKYYLYIYLQAFAYVIMGFGFVGTRTPCS

SEQ ID NO: 113185 - protein, 147 aa, Setaria italica
  misc_feature (12)..(12): Xaa can be any naturally occurring amino acid
  Transcript Sequence Number=SeqID_47211
  Gene Ontology: Mol. function=transferase activity, transferring glycosyl groups; Cellular component=cytosol; Biological process =pyridine nucleotide biosynthetic process
  Homolog annotation: Hit_ID=Q10AX9; Match level="QueryCoverage=63%, HitCoverage=17%, E-value=2e-46, Identity=87%"; Hit description =Nicotinate phosphoribosyltransferase, putative, expressed
ALGCVFKLVEIXKQPRIKLSEDVTKVSIPCKKKCYRLYGKEGYPLVDIMTGEDEPGPKIGERLLCRHPFIESKRAYVVPQHVEELLRCYWPGNSCMKSHHSNFCIVFIALPYLSVCQLLQSVMYRAYIASIRHVLCQLPFMKHIHIH

SEQ ID NO: 113186 - protein, 557 aa, Setaria italica
  Transcript Sequence Number=SeqID_47212
  Gene Ontology: Mol. function=transferase activity, transferring glycosyl groups; Cellular component=cytosol; Biological process =pyridine nucleotide biosynthetic process
  Homolog annotation: Hit_ID=B9SC93; Match level="QueryCoverage=99%, HitCoverage=99%, E-value=0.0, Identity=82%"; Hit description =Nicotinate phosphoribosyltransferase, putative
  Pfam annotation: Domain name=NAPRTase; Domain location=172-439; Score= 154.3; E_value=3.7e-43; Accession=PF04095.8; Description=Nicotinate phosphoribosyltransferase (NAPRTase) family
MAEAAANGDARRGGVPRPTNPMVTPLLTDLYQFTMAYAYWKAGKHLDRAVFDLYFRKNPFGGEFTIFGGLEECIRFIANFKFTEEEIKFLRSVMPTCEDGFFEYLSSIDCSDVEVYAIPEGYVVFPKVPLMRIEGPVAVIQLLETPFLSLVNYASLVTTNAARHRLVAGKSKNLLEFGLRRAQGPDGGISASRYSYMGGFDATSNVAAGRLFGIPIRGTHSHAFVSSFMGLDEITDKALTSSDGSSKCEDFVSLVQNWLIKIQDSSSLRGTFGETSQSELAAFTSYALAFPNSFLALVDTYDVMRSGVPNFCAVALALNDMGYKAVGIRLDSGDLAYLSVETRKFFHVIEKDFGVVGFGKMNITASNDLNEETIDALNKQGHEVDAFGIGTYLVTCYAQAALGCVFKLVEINKQPRIKLSEDVTKVSIPCKKKCYRLYGKEGYPLVDIMTGEDEPGPKIGERLLCRHPFIESKRAYVVPQHVEELLRCYWPGNSSTSRQELPSLHETRSRCIQHLERMRPDHMRRLNPTPYKVSVSAKLYDFIHFLWLNEAPVGELQ

SEQ ID NO: 113187 - protein, 178 aa, Setaria italica
  Transcript Sequence Number=SeqID_47213
  Gene Ontology: Mol. function=voltage-gated anion channel activity; Cellular component=mitochondrial outer membrane; Biological process =anion transport
  Homolog annotation: Hit_ID=Q5NBN7; Match level="QueryCoverage=100%, HitCoverage=55%, E-value=1e-81, Identity=73%"; Hit description =Mitochondrial import receptor subunit tom40-like
  Pfam annotation: Domain name=Porin_3; Domain location=1-178; Score= -54.4; E_value=0.00096; Accession=PF01459.14; Description=Eukaryotic porin
IQREAFMALKPDLFEGMRFDFTKMISPYFALSHSVAMGSIDVPAQGNEVIKIPTSNYEFGANFINPRMMLMGRVSHEGRENIRVKYDITDNLAVKINAQLTSEPHYSQGMFNFDYKGKDFRTQIQIGNNAFYGANYIQSVTKNLSLGTEAFWLGQQRKSGVGVVARYDTKKWVATGQI

SEQ ID NO: 113188 - protein, 152 aa, Setaria italica
  Transcript Sequence Number=SeqID_47214
  Gene Ontology: Mol. function=voltage-gated anion channel activity; Cellular component=mitochondrial outer membrane; Biological process =anion transport
  Homolog annotation: Hit_ID=Q5NBN7; Match level="QueryCoverage=100%, HitCoverage=44%, E-value=3e-75, Identity=86%"; Hit description =Mitochondrial import receptor subunit tom40-like
  Pfam annotation: Domain name=Porin_3; Domain location=1-145; Score =1.0; E_value=5e-07; Accession=PF01459.14; Description=Eukaryotic porin
TQIQIGNNAFYGANYIQSVTKNLSLGTEAFWLGQQRKSGVGVVARYDTKKWVATGQIATTGMVALSYVQKVSEKVSLASDFMYNQMSKDVTATFGYDYILRQCRLRGKLDTNGVISALLEERLTPGVTFQLSAEIGHWKKDYKFGFGMAVGE

SEQ ID NO: 113189 - protein, 295 aa, Setaria italica
  misc_feature (239)..(239): Xaa can be any naturally occurring amino acid
  misc_feature (278)..(278): Xaa can be any naturally occurring amino acid
  Transcript Sequence Number=SeqID_47215
  Gene Ontology: Mol. function=potassium ion transmembrane transporter activity; Cellular component=membrane; Biological process=potassium ion transport
  Homolog annotation: Hit_ID=Q69L87; Match level="QueryCoverage=69%, HitCoverage=25%, E-value=1e-59, Identity=56%"; Hit description =Potassium transporter 22
  Pfam annotation: Domain name=K_trans; Domain location=1-281; Score= -470.5; E_value=0.00045; Accession=PF02705.8; Description=K+ potassium transporter
VLYRFAHGGYIPVAMSAALMAVMVLWHYVHVRRYEHELERTVSHESVRELLARRDVVRVAGVGLFYTELVQGIPPVFPHLVHKIPSIHAVLLFVSVKHLPVPHVDAAERFLFRQVADHHADSGSDTNSTSRSRVFRCVARYGYRDPLEEARDFAASLVERLQYYVRDVNLYGVDHLQPGAKVSYPTSRCDSMATSMRRQRSVNMMMMRPSASYTESLALARARSTSSGTMMMLAHSASXQQQQHQAHHHHDGRFAEEMLTPAESFSELSRMGSAAGGXMKVSLEEMARIEEEQRF

SEQ ID NO: 113190 - protein, 156 aa, Setaria italica
  misc_feature (141)..(141): Xaa can be any naturally occurring amino acid
  Transcript Sequence Number=SeqID_47216
LIDLRYGDCGGCKVLARVGMPGLFETDPFAGPDQYLAFCRAGFDHFHFSVVTERYLILLDARQPLTPVLAWQHELESPNNVAMFRLSELRPSKEHEWASNSGFAILVGSLWTGEFSVFCYGPKEQGCPENSHMYAWDLPSXRFSLTSQHCSCSNGI

SEQ ID NO: 113191 - protein, 190 aa, Setaria italica
  Transcript Sequence Number=SeqID_47217
  Gene Ontology: Mol. function=nucleoside-triphosphatase activity; Cellular component=membrane; Biological process=transport
  Homolog annotation: Hit_ID=B6U195; Match level="QueryCoverage=93%, HitCoverage=26%, E-value=8e-93, Identity=93%"; Hit description=ABC transporter-like protein
  Pfam annotation: Domain name=ABC_tran; Domain location=1-121; Score =7.0; E_value=1.2e-06; Accession=PF00005.19; Description=ABC transporter
FAAFLRLPARMSKQQKRDRVDAIIAELNLERCRHTKIGGAFVRGVSGGERKRTSIGYEILVDPSLLLLDEPTSGLDSTSASKLILVLQRLARSRRAIITTIHQPSSRMFHMFDKLLLISDGHAIYHGKARDCMPHFASLGFAPEIPMNPAEFLLDLATGNLDDITVPEALQGSPDPQLEVADDLGAEELL

SEQ ID NO: 113192 - protein, 149 aa, Setaria italica
  Transcript Sequence Number=SeqID_47218
ASTKPTRFLSFFLFHRQVADSILRAISSSFQEPDLQLPISTCLPSHAKQQARWFLFPSTAEATSSSPPLPTDQQPNSSPPPIGNHHHQLSLRARLKPVPPVHMLRQAREPVPPPHWKATAFGVVVPSRGGRRGAPPPRQQRPASQTLRT

SEQ ID NO: 113193 - protein, 135 aa, Setaria italica
  Transcript Sequence Number=SeqID_47219
MKGIALLVALAAVLASYCGASSPHHAFPSAEAPALAPYAETPVTAHLGSKHGKPHHHGLAPVEPPSYHGSPHHKHHGHHGHRHHHDHGAPPNPSPAHHPPPPHHRTPPPHFSPPAHHHAPPPPAHHAPPPHFPTP

SEQ ID NO: 113194 - protein, 223 aa, Setaria italica
  Transcript Sequence Number=SeqID_47220
  Homolog annotation: Hit_ID=Q67UH6; Match level="QueryCoverage=98%, HitCoverage=48%, E-value=7e-54, Identity=47%"; Hit description =Mitochondrial transcription termination factor-like
  Pfam annotation: Domain name=mTERF; Domain location=2-204; Score= -84.0; E_value=0.014; Accession=PF02536.6; Description=mTERF
ASDFWLPVMGSFEKVLTFLRLKCNILGSDIEKVIKPNMALLQQYGIHVGNFPNSFLPVVMTRPPEHVQAAMTRISKFGFRQDSGMFAIALEVFAIHSQEKIDEKIRTLEMFGWSQDDVLMTVRKMPHLLNMSKERLQRNLEFLARDVGLEIPYIAQRPVLVMYSLDRRLVPRHHLIKILNAKGLLSDKFDLYSAFALSEKKFLDRFIHPYEHMVPGLAGAYAS

SEQ ID NO: 113195 - protein, 160 aa, Setaria italica
  misc_feature (66)..(66): Xaa can be any naturally occurring amino acid
  Transcript Sequence Number=SeqID_47221
  Gene Ontology: Mol. function=protein serine/threonine kinase activity; Biological process=protein amino acid phosphorylation
  Homolog annotation: Hit_ID=Q7XKV8; Match level="QueryCoverage=98%, HitCoverage=22%, E-value=6e-48, Identity=62%"; Hit description =OSJNBa0073E02.11 protein
IQYPFGIGDNCSSPGFNVSCLAQGSVYKPFIGNLELLNISLIHSTIRVLNHISTYCYNHSSGHMEXSSWTLNGSSSSYRFSDVHNKFTVIGCNTLAYISDINGTGYQSGCVSTCSDPSDLVDGFCSGMGCCQTAIPKGMGYYKVGFDSGFDTSRLWNYEG

SEQ ID NO: 113196 - protein, 38 aa, Setaria italica
  Transcript Sequence Number=SeqID_47222
KRLQYSNLTYDYTPNTKQSDGQSPSAASIVRLSTDAVN

SEQ ID NO: 113197 - protein, 168 aa, Setaria italica
  Transcript Sequence Number=SeqID_47223
  Gene Ontology: Mol. function=transcription factor activity; Cellular component=nucleus; Biological process=regulation of transcription, DNA-dependent
  Homolog annotation: Hit_ID=Q10QU5; Match level="QueryCoverage=79%, HitCoverage=40%, E-value=4e-17, Identity=46%"; Hit description=AP2 domain containing protein
GARPRRRGNPRAAPKPQHHHAAAAEQPALLAGEKKQEEIAVKPEITVSFDVDGFFNMTFPAFPAAPLAMESSFTGSTEPESGSPAKKPRYDNESSGGMSSGGGSTLELADELAFDPFTLLQLPYSGGYESLDGLFAVDAAQDVNGVNNGMDGVSLWSFDDFPADSAVF

SEQ ID NO: 113198 - protein, 70 aa, Setaria italica
  misc_feature (3)..(3): Xaa can be any naturally occurring amino acid
  Transcript Sequence Number=SeqID_47224
  Gene Ontology: Mol. function=nucleoside-triphosphatase activity; Cellular component=cytoplasm; Biological process=transport
  Homolog annotation: Hit_ID=B9GRP1; Match level="QueryCoverage=98%, HitCoverage=25%, E-value=5e-20, Identity=68%"; Hit description=ABC transporter family protein
AVXGVDPVRREKLVDLLDIDLQWRMHKVSDGQRRRVQICMGLLHPYKVMFLFPTYCGFCCLGSMTLLSLC

SEQ ID NO: 113199 - protein, 125 aa, Setaria italica
  misc_feature (32)..(32): Xaa can be any naturally occurring amino acid
  misc_feature (49)..(49): Xaa can be any naturally occurring amino acid
  misc_feature (77)..(77): Xaa can be any naturally occurring amino acid
  Transcript Sequence Number=SeqID_47225
MSEQPNLEDCVTIVQFNEMRESMEERQDSIFXDLQAIMEHLRHIPHVPXNASNHEDEVEETEEEVDERVAREQQEHXAQAAVYAMRPAGPQRGNGGGRGRGRGRGHRRNDHAELKMSTKKKKLNS

SEQ ID NO: 113200 - protein, 130 aa, Setaria italica
  misc_feature (13)..(13): Xaa can be any naturally occurring amino acid
  misc_feature (63)..(63): Xaa can be any naturally occurring amino acid
  Transcript Sequence Number=SeqID_47226
  Gene Ontology: Cellular component=mitochondrion
  Homolog annotation: Hit_ID=Q2HU53; Match level="QueryCoverage=89%, HitCoverage=18%, E-value=8e-30, Identity=50%"; Hit description =Tetratricopeptide-like helical
  Pfam annotation: Domain name=PPR; Domain location=4-38; Score=34.5; E_ value=4.4e-07; Accession=PF01535.12; Description=PPR repeat
  Pfam annotation: Domain name=PPR; Domain location=74-108; Score=5.8; E_value=1.8; Accession=PF01535.12; Description=PPR repeat
  Pfam module annotation: Pfam domain module=PPR::PPR; Domain location =4-38::74-108
GSAVVWNSMIAAXGQNGRPVEALALCRDMAAEGIGPTIATLVSAISAAADAAALPRGRELHGXGWRRGFGLQDKLKTSLLDMYAKSGLVRVARVVFEQLVHRDLVSWNSMICGYGMHGQFDLLSCIVSRL

SEQ ID NO: 113201 - protein, 128 aa, Setaria italica
  misc_feature (47)..(47): Xaa can be any naturally occurring amino acid
  Transcript Sequence Number=SeqID_47227
  Homolog annotation: Hit_ID=B9RI98; Match level="QueryCoverage=89%, HitCoverage=24%, E-value=2e-12, Identity=36%"; Hit description =Ubiquitin-protein ligase, putative
  Pfam annotation: Domain name=F-box; Domain location=10-57; Score =23.1; E_value=0.0011; Accession=PF00646.25; Description=F-box domain
MILFLLQTPDRISSLPDDILVSILSLMTVREAAMTDCLSTRWRHLWXYVDHLILDPHALGMQVQADSNNHGNPNFYNPEATKFVHKVNELLSHHNGNKIKMFKVHFPLNSAHASELDRWVAFAVASHC

SEQ ID NO: 113202 - protein, 77 aa, Setaria italica
  Transcript Sequence Number=SeqID_47228
  Pfam annotation: Domain name=DSS1_SEM1; Domain location=10-72; Score =113.6; E_value=6.4e-31; Accession=PF05160.5; Description=DSS1SEM1 family
MATAPAPADAKAEAAKMDLLEDDDEFEEFEIDQEWDDKEEGNEAVQQWEDDWDDDDVNDDFSLQLRKELEGASAQKS

SEQ ID NO: 113203 - protein, 70 aa, Setaria italica
  Transcript Sequence Number=SeqID_47229
SQGILPAYYGVSWGYARAGSDEIPGFVFLAHVVDVMSSMHSRMSSRYRASLPYRTRPFLVLMWPVAFVFM

SEQ ID NO: 113204 - protein, 154 aa, Setaria italica
  misc_feature (33)..(33): Xaa can be any naturally occurring amino acid
  Transcript Sequence Number=SeqID_47230
  Gene Ontology: Mol. function=RNA methyltransferase activity; Biological process=RNA processing
  Homolog annotation: Hit_ID=Q10T58; Match level="QueryCoverage=100%, HitCoverage=8%, E-value=7e-59, Identity=69%"; Hit description=RNA methyltransferase, TrmH family protein, expressed
RSKQHFNPKYRLKVCEQVIKVATSLINAAEVPXLNQLLHFISTIPREFTDYFGPLRVIVQEWFVQKKECSPGNTLLSKLLDFPTTFVKHSKQDQGSNLFDDEDVNAWEAEARRWAKTLLLVTSDVQHLKRILGFIEAHGYKLSQQSPVGDCVPI

SEQ ID NO: 113205 - protein, 106 aa, Setaria italica
  Transcript Sequence Number=SeqID_47231
DRVLLAGKGDKQGPRKTRVYHLAVSSNGAAVPALGNAGAAEFRKQNATGFFEVEVKVTGKFSYTGRLTKCDLDATCPLKLQLAPPGTKAVVFQKVKCKLAKPKKYC

SEQ ID NO: 113206 - protein, 77 aa, Setaria italica
  Transcript Sequence Number=SeqID_47232
  Subcellular localization annotation: CTP_CleavageSite=35; ConfidenceScore=5.03e-01
MPLLHLSLPPHRLLVAGRGRLCFPPAPRHTRLSFRAAAGDAAVSVAAETYGLPFPPERASHHHELAAAIAAVERACP

SEQ ID NO: 113207 - protein, 54 aa, Setaria italica
  Transcript Sequence Number=SeqID_47233
IPKISHKTTQNSCFCQKFLATTPDYPNAEQQIKNRETWLLGRTESKLTSTRIPV

SEQ ID NO: 113208 - protein, 74 aa, Setaria italica
  misc_feature (12)..(12): Xaa can be any naturally occurring amino acid
  Transcript Sequence Number=SeqID_47234
  Gene Ontology: Mol. function=protein disulfide oxidoreductase activity; Cellular component=cytoplasm; Biological process=electron transport chain
  Homolog annotation: Hit_ID=Q5QLR2; Match level="QueryCoverage=97%, HitCoverage=49%, E-value=4e-16, Identity=71%"; Hit description =Monothiol glutaredoxin-S5
TFVKRLLQGLGXVNPAVHEVAGEAELAGIVAAGDVALPAVFVGGRLLGGLDRLMAVHISGELVPILKEAGALWL

SEQ ID NO: 113209 - protein, 62 aa, Setaria italica
  Transcript Sequence Number=SeqID_47235
INKSTENRYALVLSRAEVSSVTRLKIIWVINWVFTVKYIYKPCIRHFLFYDLFSAFDILNRN

SEQ ID NO: 113210 - protein, 186 aa, Setaria italica
  misc_feature (158)..(158): Xaa can be any naturally occurring amino acid
  Transcript Sequence Number=SeqID_47236
  Gene Ontology: Mol. function=nucleotidyltransferase activity
TQSYVHPSKSEISEAVRCSDPSILSNGTNVIASRKGKKLEDPSYSPRVSSSVTTEHFQSADEYDASYMDEQASSYISQSESVVQSSSCLPSGINNVASNNLNGSSVGSLVRSAQEKTGCDEKQLDHKSVATTDKILPSVIPANMLQSAITDNGAVMKXSGGEYYVYNRNLLGGTSYEWPSVTPPHL

SEQ ID NO: 113211 - protein, 202 aa, Setaria italica
  Transcript Sequence Number=SeqID_47237
  Gene Ontology: Mol. function=transferase activity, transferring nitrogenous groups; Cellular component=chloroplast; Biological process=biosynthetic process
  Homolog annotation: Hit_ID=B9S7T6; Match level="QueryCoverage=77%, HitCoverage=33%, E-value=1e-65, Identity=78%"; Hit description =Transaminase mtnE, putative
  Subcellular localization annotation: CTP_CleavageSite=46; ConfidenceScore=5.84e-01
MAAPTGAPATTAPSSSFLSSSSLPLNSRSLETIHRRPAGRMSVTVRCVSSPPAVDTSYKTSVPRNANMAKLQAGYLFPEIARRRAAHLLKYPDAKIISLGIGDTTEPIPDVITNAMAERAHALSTIDGYSGYGAEQGEKKLRAAIAATYYADLGIEDSDIFVSDGAKCDISRLQAVTFGSNVTIAVQDPSYPAYVDSRVLIP

SEQ ID NO: 113212 - protein, 99 aa, Setaria italica
  Transcript Sequence Number=SeqID_47238
  Gene Ontology: Mol. function=transferase activity, transferring nitrogenous groups; Cellular component=chloroplast; Biological process=biosynthetic process
  Homolog annotation: Hit_ID=B9S7T6; Match level="QueryCoverage=93%, HitCoverage=20%, E-value=1e-34, Identity=70%"; Hit description =Transaminase mtnE, putative
GLIDNDVVGFYKENTEIIVDTFTSLGFNVYGAKNAPYVWVHFPGRNSWDVFAEILEKANIVTTPGSGFGPGGEGFVRVSAFGHRDNIIEAARRLKQLYK

SEQ ID NO: 113213 - protein, 180 aa, Setaria italica
  Transcript Sequence Number=SeqID_47239
  Gene Ontology: Mol. function=transferase activity, transferring nitrogenous groups; Cellular component=chloroplast; Biological process=biosynthetic process
  Homolog annotation: Hit_ID=Q93ZN9; Match level="QueryCoverage=90%, HitCoverage=35%, E-value=1e-71, Identity=75%"; Hit description=LL -diaminopimelate aminotransferase, chloroplastic
LRRKDETLVQLTPRQVGFTASFSKYAGFTGVRLGWTVVPKELLFSDGHPVAKDFNRIVCTCFNGASNIAQAGGLACLSPEGLKAMHDVVSFYKENTEIIVDTFTSLGFNVYGAKNAPYVWVHFPGRNSWDVFAEILEKANIVTTPGSGFGPGGEGFVRVSAFGHRDNIIEAARRLKQLYK

SEQ ID NO: 113214 - protein, 429 aa, Setaria italica
  Transcript Sequence Number=SeqID_47240
  Gene Ontology: Mol. function=transferase activity, transferring nitrogenous groups; Cellular component=chloroplast; Biological process=biosynthetic process
  Homolog annotation: Hit_ID=B9S7T6; Match level="QueryCoverage=98%, HitCoverage=91%, E-value=0.0, Identity=80%"; Hit description =Transaminase mtnE, putative
  Pfam annotation: Domain name=Aminotran_1_2; Domain location=56-424; Score=76.5; E_value=9.7e-20; Accession=PF00155.13; Description =Aminotransferase class I and II
LLSSNLFRCVSSPPAVDTSYKTSVPRNANMAKLQAGYLFPEIARRRAAHLLKYPDAKIISLGIGDTTEPIPDVITNAMAELQLLRAHALSTIDGYSGYGAEQGEKKLRAAIAATYYADLGIEDSDIFVSDGAKCDISRLQVLFGSNLTIAVQDPSYPAYVDSSVIMGQTGLYQQDVQKYGNIEYMRCNPENGFFPDLSTVPRTDIIFFCSPNNPTGAAASRDQLTQLVKFAKDNGSIIVYDSAYAMYISDDSPKSIFEIPGAKEVAIETASFSKYAGFTGVRLGWTVVPKELLFSDGHPVAKDFNRIVCTCFNGASNIAQAGGLACLSPEGLKAMHDVVGFYKENTEIIVDTFTSLGFNVYGAKNAPYVWVHFPGRNSWMFAEILEKANVVTTPGSGFGPGGEGFVRVSAFGHRDNIIEAARRLKQLYK

SEQ ID NO: 113215 - protein, 80 aa, Setaria italica
  Transcript Sequence Number=SeqID_47241
WMLQLLRIRTRAKKQGSKLCTELIHIVTESHSSNFVRLGSWSVIVLLWRKCATSCEFRQYESDVAIVSLVLLCSNSVHTT

SEQ ID NO: 113216 - protein, 152 aa, Setaria italica
  misc_feature (10)..(10): Xaa can be any naturally occurring amino acid
  misc_feature (88)..(88): Xaa can be any naturally occurring amino acid
  misc_feature (107)..(107): Xaa can be any naturally occurring amino acid
  Transcript Sequence Number=SeqID_47242
  Gene Ontology: Mol. function=actin binding; Cellular component =integral to membrane; Biological process=actin cytoskeleton organization and biogenesis
  Homolog annotation: Hit_ID=B6SZ68; Match level="QueryCoverage=99%, HitCoverage=17%, E-value=3e-54, Identity=78%"; Hit description=Actin binding protein
TFKLDTLLKXLADVKGTDGKTTLLHFVVQEMIRSQKPPARTAEAPDIVTGLAAELTNVRKTATVDLDVLTTSVSSLSHGLSRIRALVXGTDDLAGDERGRCFVAFMXNPYVAQAEEVIQELEDGERRVLAHVRDITEYYHGDVGKEEASPLR

SEQ ID NO: 113217 - protein, 74 aa, Setaria italica
  Transcript Sequence Number=SeqID_47243
  Gene Ontology: Mol. function=amino acid transmembrane transporter activity; Cellular component=integral to membrane; Biological process=amino acid transport
  Homolog annotation: Hit_ID=Q6AST6; Match level="QueryCoverage=70%, HitCoverage=29%, E-value=3e-17, Identity=82%"; Hit description=Amino acid permease family protein, putative
MAVGDDANGGGGVRRRQRGCLCTKADFFPEESFSSWSAYGRALRSTGSRLADRLTSRSAESAELHEVRARSGAD

SEQ ID NO: 113218 - protein, 485 aa, Setaria italica
  Transcript Sequence Number=SeqID_47244
  Gene Ontology: Mol. function=nucleoside-triphosphatase activity; Cellular component=chloroplast; Biological process=proteolysis
  Homolog annotation: Hit_ID=B9RKQ5; Match level="QueryCoverage=97%, HitCoverage=98%, E-value=0.0, Identity=69%"; Hit description=Protein cbxX, chromosomal, putative
  Pfam annotation: Domain name=AAA; Domain location=246-434; Score =37.5; E_value=1.2e-08; Accession=PF00004.21; Description=ATPase family associated with various cellular activities (AAA)
  Pfam annotation: Domain name=Ank; Domain location=119-155; Score =33.7; E_value=7.6e-07; Accession=PF00023.22; Description=Ankyrin repeat
  Pfam annotation: Domain name=Ank; Domain location=49-85; Score=24.4; E_value=0.00045; Accession=PF00023.22; Description=Ankyrin repeat
  Pfam annotation: Domain name=Ank; Domain location=86-118; Score=31.1; E_value=4.6e-06; Accession=PF00023.22; Description=Ankyrin repeat
  Pfam module annotation: Pfam domain module=AAA::Ank::Ank::Ank; Domain location=246-434::119-155::49-85::86-118
MPGSQNGGPRPRLAKVETIHGLARAGDLAGVQRKLRENPALLNDKNPVMCQTPLHVAAGYNNTEIVKFLLNWQGTETVDLEAKNMYGETPLHMAVKNSSCESTNLLLERGAHIEAKANNGMTPLHLAVWHALQAGDYSTVSVLLSYNADCFAKDDEGKMPLNHIPGGAGSEKLLKLLSRHMEEQRKRKALMSCCEGKAMAEFEEAISQIVGLQELKMQLRRWARGMLFDEKRRAMGLGIASRRAPHMAFLGNPGTGKTMVARILGKLLHMVGILPTDKVIEVQRTDLVGEFVGHTGPKTRRKIQDAEGGILFVDEAYRLIPMQKSDDKDYGLEALEEIMSVMDSGKIVVIFAGYCEPMKRVITSNDGFCRRVTKFFYFDDFSTTELAEILHMKMKNPSESSLLYGFKLHPSCSIEVTGELIGRETTEERRKQMNGGLVDTLLINARENLDLRLDFNCNDADTMITITLEDLEEGLRQISRQRQLQ

SEQ ID NO: 113219 - protein, 351 aa, Setaria italica
  misc_feature (156)..(156): Xaa can be any naturally occurring amino acid
  Transcript Sequence Number=SeqID_47245
  Gene Ontology: Mol. function=inositol or phosphatidylinositol phosphatase activity
  Homolog annotation: Hit_ID=B9S378; Match level="QueryCoverage=79%, HitCoverage=56%, E-value=4e-65, Identity=48%"; Hit description=Type I inositol polyphosphate 5-phosphatase, putative
  Subcellular localization annotation: CTP_CleavageSite=69; ConfidenceScore=5.57e-01
MAFPDDGKMKGCQPKLFGTKDKKAAKRTDRASCSTAKCGSSNSKSPSSSPFRKLSEVRSIRISHFLSHSANATKYEHIRIFVSTWNVGGKAPTAELKLDDFLPADDHSDIYVLGFQEIVPLNAGNVLVIEDNEPAARWLALINRVLNRQVDTDADXFQHKPSPSLDSTSSQSTPGLDASFSNRSRTASGSVIFQKSLKSIRKSYMPSRRKQLKFCNCPVEMAKKSYKDACFRCPQAYANEMDSSEEDELDDKLNNIFGLNDDGVTSSATASRDQLKYNLISCKQMVGIFVTVWAKKELVQHIGHLRTSCVGRGIMGYLGNKGCISVSMTLYQTSFCFICSHLASGEKEGMS

SEQ ID NO: 113220 - protein, 204 aa, Setaria italica
  misc_feature (38)..(38): Xaa can be any naturally occurring amino acid
  misc_feature (71)..(71): Xaa can be any naturally occurring amino acid
  Transcript Sequence Number=SeqID_47246
  Gene Ontology: Mol. function=transferase activity, transferring groups other than amino-acyl groups
  Homolog annotation: Hit_ID=B6TZ41; Match level="QueryCoverage=94%, HitCoverage=42%, E-value=8e-72, Identity=70%"; Hit description =Transferase
EAAAGRPYVRCNDCGVRIVEAACDATVDEWLEAEAERXGLSKALAYDKVIGPELFFSPLLYVQVTSFKCGXGMALGFTWAHLIGDIPSAAACFSTWAQLFSGKNPPAPTLRDPLARPPSAAAPAGVTAPPSVKATAAPVGDHWAVPITRDMVPFSFHVTEQQLEGLQLGRQVGTFELVVALMWRALAAIRGPDEEEAYVVYGCT

SEQ ID NO: 113221 - protein, 65 aa, Setaria italica
  Transcript Sequence Number=SeqID_47247
  Subcellular localization annotation: CTP_CleavageSite=30; ConfidenceScore=5.39e-01
TLFLFGVPSLWTNQSNISRAKQQPMASTILMSNFGGGSTRWLIGGRLYPQRTWTTRVDDRWLGTR

SEQ ID NO: 113222 - protein, 62 aa, Setaria italica
  misc_feature (16)..(16): Xaa can be any naturally occurring amino acid
  Transcript Sequence Number=SeqID_47248
  Gene Ontology: Mol. function=transferase activity; Biological process= spermidine biosynthetic process
  Homolog annotation: Hit_ID=B3GPG7; Match level="QueryCoverage=90%, HitCoverage=14%, E-value=8e-23, Identity=83%"; Hit description =Spermidine synthase 3
LKVAFRPGGVLCNQAXSMWLHTHLIQDMLSICHETFKGSVHYAWTSVPTYPRFKLYYLLFVP

SEQ ID NO: 113223 - protein, 161 aa, Setaria italica
  Transcript Sequence Number=SeqID_47249
  Gene Ontology: Mol. function=transferase activity; Cellular component= cytosol; Biological process=spermidine biosynthetic process
  Homolog annotation: Hit_ID=B6TA19; Match level="QueryCoverage=97%, HitCoverage=40%, E-value=6e-83, Identity=93%"; Hit description =Spermidine synthase 1
  Pfam annotation: Domain name=Spermine_synth; Domain location=10-161; Score=142.9; E_value=9.8e-40; Accession=PF01564.9; Description =Sperminespermidine synthase
LRIRRCGKASKVQYYNNPMWPGEAHSLKVEKILYQGKSPYQEVLVFESTTYGKVLVLDGIVQLTDKDECAYQEMITHLPLCSIPSPKKVLVIGGGDGGVLREISRHSSVESIDICEIDQLVIDVCKDFFPHLSVGFEDPRVQLHVGDAVEFLRNAPEGTYD

SEQ ID NO: 113224 - protein, 375 aa, Setaria italica
  Transcript Sequence Number=SeqID_47250
  Gene Ontology: Mol. function=transferase activity; Biological process= spermidine biosynthetic process
  Homolog annotation: Hit_ID=B6TA19; Match level="QueryCoverage=96%, HitCoverage=96%, E-value=0.0, Identity=87%"; Hit description =Spermidine synthase 1
  Pfam annotation: Domain name=Methyltransf_11; Domain location=135 -243; Score=5.8; E_value=0.026; Accession=PF08241.4; Description =Methyltransferase domain
  Pfam annotation: Domain name=Methyltransf_12; Domain location=135 -241; Score=9.1; E_value=0.065; Accession=PF08242.4; Description =Methyltransferase domain
  Pfam annotation: Domain name=Spermine_synth; Domain location=53-301; Score=383.9; E_value=2.7e-112; Accession=PF01564.9; Description =Sperminespermidine synthase
  Pfam module annotation: Pfam domain module=Methyltransf _11::Methyltransf_12::Spermine_synth; Domain location=135-243::135 -241::53-301
  Subcellular localization annotation: CTP_CleavageSite=36; ConfidenceScore=5.01e-01
MEGGGAGNGLTGTAQTKGSGGDGSAKPLPPCCVKARAAAPESEAKCHATVVSGWFTEPRSRCGKASKVQYYNNPMWPGEAHSLKVEKILYQGKSPYQEVLVFESTTYGKVLVLDGIVQLTDKDECAYQEMITHLLVIGGGDGGVLREISRHSSVESIDICEIDQLVIDVCKDFFPHLSVGFEDPRVQLHVGDAVEFLRNAPEGTYDAIIVDSSDPIGPAQELVEKPFFDTIARALRPGGVLCNQAESMWLHTHLIQDMLSICHETFKGSVHYAWTSVPTYPSGVIGFLLCAKEGPPVNFLTPINPIEKLEGATEAGREIRFYNSEMHRAAFVLPTFVKKELEAYCASTEREQPEETAATAPKISVASKSEILTAS

SEQ ID NO: 113225 - protein, 149 aa, Setaria italica
  Transcript Sequence Number=SeqID_47251
  Subcellular localization annotation: CTP_CleavageSite=58; ConfidenceScore=5.01e-01
QNPPRTQSQESKRAEVLKAGSRRAAGEKTFFPGRKSGQGRVKTISPGKQPRLRLVLLPAAAVGDERVGETTSSDGRLEKREGGELVKKPERGSQGSNQIKPWTRSTGSRASPPPSGTTRRSSATSTICRGWGWRRWRWRWKTTGDMEME

SEQ ID NO: 113226 - protein, 222 aa, Setaria italica
  Transcript Sequence Number=SeqID_47252
  Gene Ontology: Mol. function=DNA binding
  Homolog annotation: Hit_ID=Q9SGV8; Match level="QueryCoverage=25%, HitCoverage=4%, E-value=6e-16, Identity=66%"; Hit description =F1N19.14
MEVDDDVEEDDVDFNPFLREGSPSETSSSLTSEAECEEHSSDKRPSSGMYLQNSIVNENTSDCALPQTRLSSKDVVKEIFPEKTSTQVNIENDEGRLNELEKEVLPGEATCSPTVQNSHHPLEASEEDAICRRTRARYSLANYSLEELETFLQESDDDGDLQNVDEEEEYRKFLASVLSGVGDDTQTCQGDENQDEDDNDADFELEIEEALESDGDENTENY

SEQ ID NO: 113227 - protein, 132 aa, Setaria italica
  Transcript Sequence Number=SeqID_47253
  Gene Ontology: Mol. function=protein binding; Cellular component =nucleus; Biological process=defense response
  Homolog annotation: Hit_ID=Q339X0; Match level="QueryCoverage=96%, HitCoverage=20%, E-value=1e-41, Identity=62%"; Hit description=NB -ARC domain containing protein, expressed
PDGIGNMKSLVTLQSFDLGENSIDSIRGLGQLTNLRDLKLCYSRTTISNTALCMDVLQSSLEMLCNLKYLYMYWPGICGSGLSLLNPSPRHLQTLELTYWCFPKVPEWIAELHELQVLKIAIRELSMDGFLG

SEQ ID NO: 113228 - protein, 279 aa, Setaria italica
  Transcript Sequence Number=SeqID_47254
  Gene Ontology: Mol. function=serine-type endopeptidase activity; Cellular component=cytoplasm; Biological process=proteolysis
  Homolog annotation: Hit_ID=B6U134; Match level="QueryCoverage=92%, HitCoverage=35%, E-value=1e-139, Identity=91%"; Hit description =Prolyl endopeptidase
  Pfam annotation: Domain name=Peptidase_S9_N; Domain location=1-278; Score=90.5; E_value=6e-24; Accession=PF02897.7; Description=Prolyl oligopeptidase, N-terminal beta-propeller domain
IHVMSVSNKQSMPDKLSWVKFSSISWTHDGKGFFYGRYPAPREGGELDAGTETNINLNHQIYYHVLGSDQSEDILCWKDPEHPKYSFGASVTEDGKFIILGTYDGCDPVNKLYYCKISSLPRGIEGFRESQEMLPFVKLIDNFDAQYQVVANDGDEFTFLTNKNAPKNKLVRVNINNPELWTDVLPEHEKDVLESADAVNNNQLLVCYMSDVKHILQIRDLSTGNLIHQLPLEIGSVSEISCRREDKEVFIGFTSVCSPCSFTCLEISSYVHPKLCKTG

SEQ ID NO: 113229 - protein, 121 aa, Setaria italica
  Transcript Sequence Number=SeqID_47255
  Gene Ontology: Mol. function=serine-type endopeptidase activity; Cellular component=cytoplasm; Biological process=proteolysis
  Homolog annotation: Hit_ID=B6U134; Match level="QueryCoverage=80%, HitCoverage=13%, E-value=2e-52, Identity=95%"; Hit description =Prolyl endopeptidase
  Pfam annotation: Domain name=Peptidase_S9; Domain location=1-121; Score=-37.3; E_value=0.00016; Accession=PF00326.13; Description =Prolyl oligopeptidase family
FLISINQRPDLFGCALAHVGVMDMLRFHKFTIGHAWTTDYGCSDKEEEFQWLIKYSPLHNVRRPWEQSSGDHCEYPATMLLTADHDDRVVPLHSLKLLAVSSFLYSVSLNSHFKQKRSLYS

SEQ ID NO: 113230 - protein, 68 aa, Setaria italica
  misc_feature (49)..(49): Xaa can be any naturally occurring amino acid
  Transcript Sequence Number=SeqID_47256
  Gene Ontology: Mol. function=receptor binding; Cellular component =cell soma; Biological process=wing disc development
  Homolog annotation: Hit_ID=B4FKM1; Match level="QueryCoverage=95%, HitCoverage=19%, E-value=1e-26, Identity=89%"; Hit description =Guanine nucleotide-binding protein beta subunit-like protein
  Pfam annotation: Domain name=WD40; Domain location=11-49; Score=35.6; E_value=1.9e-07; Accession=PF00400.24; Description=WD domain, G-beta repeat
TPDSGAAADYGVPFRRLTGHSHFVQDVVLSSDGQFALSGSWDGELRLWXLSTGLTTRRFVGPTKEKET

SEQ ID NO: 113231 - protein, 123 aa, Setaria italica
  misc_feature (46)..(46): Xaa can be any naturally occurring amino acid
  misc_feature (102)..(102): Xaa can be any naturally occurring amino acid
  Transcript Sequence Number=SeqID_47257
  Gene Ontology: Mol. function=receptor binding; Cellular component =cell soma
  Homolog annotation: Hit_ID=B4FKM1; Match level="QueryCoverage=78%, HitCoverage=28%, E-value=4e-38, Identity=84%"; Hit description =Guanine nucleotide-binding protein beta subunit-like protein
  Pfam annotation: Domain name=WD40; Domain location=44-80; Score=17.2; E_value=0.069; Accession=PF00400.24; Description=WD domain, G-beta repeat
  Subcellular localization annotation: CTP_CleavageSite=27; ConfidenceScore=5.22e-01
FCFSFSVFSFSFPFVYGFSLLFVRSFRSGKVRSYTLLWDLTEGKRXLYSLDAGSIIHSLCFSPNRYWLCAATQDSVKIWDLESKHVVQDLKPDIPDLQRTRXLYCTSLSWSADGSTLYTGYTD

SEQ ID NO: 113232 - protein, 51 aa, Setaria italica
  Transcript Sequence Number=SeqID_47258
  Homolog annotation: Hit_ID=P49027; Match level="QueryCoverage=74%, HitCoverage=11%, E-value=2e-12, Identity=89%"; Hit description =Guanine nucleotide-binding protein subunit beta-like protein
VLIVLSGWFHLCNQILYCTSLSWSADGSTLYAGYTDGTIRIFKISGFSYSV

SEQ ID NO: 113233 - protein, 258 aa, Setaria italica
  misc_feature (96)..(96): Xaa can be any naturally occurring amino acid
  Transcript Sequence Number=SeqID_47259
  Gene Ontology: Mol. function=receptor activity; Cellular component =cell soma; Biological process=wing disc development
  Homolog annotation: Hit_ID=P49027; Match level="QueryCoverage=86%, HitCoverage=66%, E-value=1e-93, Identity=80%"; Hit description =Guanine nucleotide-binding protein subunit beta-like protein
  Pfam annotation: Domain name=WD40; Domain location=121-159; Score =26.0; E_value=0.00016; Accession=PF00400.24; Description=WD domain, G-beta repeat
  Pfam annotation: Domain name=WD40; Domain location=212-250; Score =19.6; E_value=0.013; Accession=PF00400.24; Description=WD domain, G -beta repeat
  Pfam annotation: Domain name=WD40; Domain location=28-66; Score=51.7; E_value=2.8e-12; Accession=PF00400.24; Description=WD domain, G-beta repeat
  Pfam annotation: Domain name=WD40; Domain location=76-117; Score =40.3; E_value=7.6e-09; Accession=PF00400.24; Description=WD domain, G-beta repeat
  Pfam module annotation: Pfam domain module=WD40::WD40::WD40::WD40; Domain location=121-159::212-250::28-66::76-117
AGWCWARSGRTRPSRCGPRWRRGRRQWCTCTRRFVGHEKDVLSVAFSVDNRQIVSASRDKTIKLWNTLGECKYTIGGDHGASEGHSGWVSCVRFSXPNTIQPTIVSGSWDRSVKVWNLTNCKLRSNLQGHGGYVNAVAVSPDGSLCASGGKDNVTLLLGLCLVTSFGTSGLPILFLLRLLVFSPNRYWLCAATQDSIKIWDLESKHIVQDLRPEVSAGKNQILYCTSLSWSADGSTLYAGYTDGTIRIFKISGFSYSV

SEQ ID NO: 113234 - protein, 117 aa, Setaria italica
  Transcript Sequence Number=SeqID_47260
  Gene Ontology: Mol. function=receptor binding; Cellular component =cell soma
  Homolog annotation: Hit_ID=B4FKM1; Match level="QueryCoverage=100%, HitCoverage=35%, E-value=1e-60, Identity=96%"; Hit description =Guanine nucleotide-binding protein beta subunit-like protein
  Pfam annotation: Domain name=WD40; Domain location=24-60; Score=19.2; E_value=0.017; Accession=PF00400.24; Description=WD domain, G-beta repeat
  Pfam annotation: Domain name=WD40; Domain location=71-109; Score =25.2; E_value=0.00026; Accession=PF00400.24; Description=WD domain, G-beta repeat
  Pfam module annotation: Pfam domain module=WD40::WD40; Domain location=24-60::71-109
SPDGSLCASGGKDGYTLLWDLTEGKRLYSLDAGSIIHSLCFSPNRYWLCAATQDSVKIWDLESKHVVQDLKPDIQISKNQILYCTSLSWSADGSTLYTGYTDGSIRVWKISGFGYAG

SEQ ID NO: 113235 - protein, 335 aa, Setaria italica
  misc_feature (50)..(50): Xaa can be any naturally occurring amino acid
  Transcript Sequence Number=SeqID_47261
  Gene Ontology: Mol. function=receptor binding; Cellular component =cell soma; Biological process=wing disc development
  Homolog annotation: Hit_ID=P49027; Match level="QueryCoverage=99%, HitCoverage=99%, E-value=1e-170, Identity=89%"; Hit description =Guanine nucleotide-binding protein subunit beta-like protein
  Pfam annotation: Domain name=WD40; Domain location=108-146; Score =47.5; E_value=5.3e-11; Accession=PF00400.24; Description=WD domain, G-beta repeat
  Pfam annotation: Domain name=WD40; Domain location=156-196; Score =44.6; E_value=4e-10; Accession=PF00400.24; Description=WD domain, G -beta repeat
  Pfam annotation: Domain name=WD40; Domain location=200-238; Score =40.4; E_value=6.9e-09; Accession=PF00400.24; Description=WD domain, G-beta repeat
  Pfam annotation: Domain name=WD40; Domain location=242-278; Score =19.1; E_value=0.019; Accession=PF00400.24; Description=WD domain, G -beta repeat
  Pfam annotation: Domain name=WD40; Domain location=289-327; Score =19.6; E_value=0.013; Accession=PF00400.24; Description=WD domain, G -beta repeat
  Pfam annotation: Domain name=WD40; Domain location=66-104; Score =39.9; E_value=1e-08; Accession=PF00400.24; Description=WD domain, G -beta repeat
  Pfam annotation: Domain name=WD40; Domain location=8-47; Score=30.4; E_value=7.5e-06; Accession=PF00400.24; Description=WD domain, G-beta repeat
  Pfam module annotation: Pfam domain module=WD40::WD40::WD40::WD40::WD4 0::WD40::WD40; Domain location=108-146::156-196::200-238::242 -278::289-327::66-104::8-47
MAGAQETLVLAGVMRGHNDVVTAIAAPIDNSPFIVSSSRDKSLLVWDLTXNPVHVAGDGTTTADYGVPFRRLTGHSHFVQDVVLSSDGQFALSGSWDGELRLWDLSTGLTTRRFVGHEKDVLSVAFSVDNRQIVSASRDKTIKLWNTLGECKYTIGGDHGASEGHSGWVSCVRFSPNTIQPTIVSGSWDRSVKVWNLTNCKLRSNLQGHGGYVNAVAVSPDGSLCASGGKDNVTLLWDLTEGKRLYALDAGSIIHSLCFSPNRYWLCAATQDSIKIWDLESKHIVQDLRPEVSAGKNQILYCTSLSWSADGSTLYAGYTDGTIRIFKISGFSYSV

SEQ ID NO: 113236 - protein, 114 aa, Setaria italica
  misc_feature (86)..(86): Xaa can be any naturally occurring amino acid
  Transcript Sequence Number=SeqID_47262
  Gene Ontology: Mol. function=ATPase activity, coupled to transmembrane movement of substances; Cellular component=integral to membrane; Biological process=transport
  Homolog annotation: Hit_ID=Q6Y3I1; Match level="QueryCoverage=100%, HitCoverage=7%, E-value=1e-37, Identity=63%"; Hit description =Multidrug resistance associated protein 1
  Subcellular localization annotation: CTP_CleavageSite=50; ConfidenceScore=5.00e-01
VISDSRPPPSWPSKGRIDLENLRVKYRPNAPTVLRGITCTFAAGNKIGVVGRTGSGKTTLLSALFRLIDPSSGRILIDDLDICTLXSSEKGWLPASIPQEPTLFRGSVRSNVDP

SEQ ID NO: 113237 - protein, 103 aa, Setaria italica
  Transcript Sequence Number=SeqID_47263
VLVITCIYNLNLYILIYITEMITHIWPSSIAICKFYFVNLLIMDNKKIRCTLLVKRKFSVTLPLLTLEAEEGALEVLNAWKDRNHSMQMKTDRGEFAVIYTCV

SEQ ID NO: 113238 - protein, 275 aa, Setaria italica
  misc_feature (22)..(22): Xaa can be any naturally occurring amino acid
  Transcript Sequence Number=SeqID_47264
  Gene Ontology: Mol. function=6-phosphogluconolactonase activity; Cellular component=chloroplast; Biological process=carbohydrate metabolic process
  Homolog annotation: Hit_ID=B6U705; Match level="QueryCoverage=92%, HitCoverage=78%, E-value=1e-130, Identity=89%"; Hit description=6 -phosphogluconolactonase
  Pfam annotation: Domain name=Glucosamine_iso; Domain location=39-275; Score=-59.1; E_value=0.00028; Accession=PF01182.12; Description =Glucosamine-6-phosphate isomerases6-phosphogluconolactonase
SPLRPVSAMASYPAAAGEAASXRKKLIIFDAEEDLAASLAKRTAELSAKFAAERGAFTVVLSGGSLVKALRKLAEPPYLEAVDWSRWHVFWVDERVVPKDHADSNYKLASDEFLSKVPIPADQVYAINDTLSAEGAAEEYETRLRQLVKDGVIGMSPVTGFPKFDLMLMGMGPDGHVASLLPGHPVVHENQKWVTFVKDSPKPPPERITFTLPVINSSAHIALVVTGAGKAGAIHKALSEQQNTSDLLPVEMVSLKDGELTWFTDKPAVSMLSSI

SEQ ID NO: 113239 - protein, 53 aa, Setaria italica
  misc_feature (22)..(22): Xaa can be any naturally occurring amino acid
  misc_feature (26)..(26): Xaa can be any naturally occurring amino acid
  Transcript Sequence Number=SeqID_47265
  Gene Ontology: Mol. function=1-phosphatidylinositol-4-phosphate 5 -kinase activity; Biological process=phosphatidylinositol metabolic process
  Homolog annotation: Hit_ID=Q6EX42; Match level="QueryCoverage=100%, HitCoverage=6%, E-value=5e-11, Identity=67%"; Hit description =Phosphatidylinositol-4-phosphate 5-kinase 1
ELRIHRKYDLKGSTQGRSTKKXQNNXNENTTLKDLDLSYVFHVDKPWRDALIR

SEQ ID NO: 113240 - protein, 767 aa, Setaria italica
  Transcript Sequence Number=SeqID_47266
  Gene Ontology: Mol. function=1-phosphatidylinositol-4-phosphate 5 -kinase activity; Cellular component=plasma membrane; Biological process=phosphatidylinositol metabolic process
  Homolog annotation: Hit_ID=Q6EX42; Match level="QueryCoverage=98%, HitCoverage=96%, E-value=0.0, Identity=82%"; Hit description =Phosphatidylinositol-4-phosphate 5-kinase 1
  Pfam annotation: Domain name=MORN; Domain location=115-137; Score =38.7; E_value=2.3e-08; Accession=PF02493.12; Description=MORN repeat
  Pfam annotation: Domain name=MORN; Domain location=138-160; Score =36.0; E_value=1.5e-07; Accession=PF02493.12; Description=MORN repeat
  Pfam annotation: Domain name=MORN; Domain location=164-183; Score =9.9; E_value=0.74; Accession=PF02493.12; Description=MORN repeat
  Pfam annotation: Domain name=MORN; Domain location=184-205; Score =19.8; E_value=0.011; Accession=PF02493.12; Description=MORN repeat
  Pfam annotation: Domain name=MORN; Domain location=23-45; Score=19.2; E_value=0.018; Accession=PF02493.12; Description=MORN repeat
  Pfam annotation: Domain name=MORN; Domain location=46-68; Score=14.4; E_value=0.19; Accession=PF02493.12; Description=MORN repeat
  Pfam annotation: Domain name=MORN; Domain location=69-91; Score=13.8; E_value=0.23; Accession=PF02493.12; Description=MORN repeat
  Pfam annotation: Domain name=MORN; Domain location=92-114; Score =31.8; E_value=2.8e-06; Accession=PF02493.12; Description=MORN repeat
  Pfam annotation: Domain name=PIP5K; Domain location=433-763; Score =466.9; E_value=2.9e-137; Accession=PF01504.10; Description =Phosphatidylinositol-4-phosphate 5-Kinase
  Pfam module annotation: Pfam domain module=MORN::MORN::MORN::MORN::MOR N::MORN::MORN::MORN::PIP5K; Domain location=115-137::138-160::164 -183::184-205::23-45::46-68::69-91::92-114::433-763
MATGEASTGNIQRGSTLPNGDIYVGNFAGLVPHGFGKYMWTDGTLYYGEWDTSKMTGRGEIQWPSGASYDGDLCGGFIDGTGTFKGVDGSLYKGSWRMNKKHGMGTMVYANSDTYEGFWNEGLPDGFGKYTWADGNTYIGRWKSGKMNGRGVMKWTNGDTLDCNWLNGLAHGKGFCKYSSGACYIGTWDRGLKDGHGMFYQPGSKMPCNLEVSECVTDHDVSSASSSGNENVNSGLLFLLQKLCNTWRIRSLFHRPRRISNGTAPVFDDNSGNRLSEDSSTVPLTTGECLQDNVADKVLVYEREYVQGVLISEKPKGHDSGMPDSSKSHDQTLQKQAGGPMETIYRGHRSYYLMLNLQLGIRYTVGKITPVPLREVRSNDFGPRARIRMYFPSEGSQYTPPHCSVNFFWKDYCPMVFRNLREMFHIDAADYMMSLCGDDSLKELSSPGKSGSIFYLSQDERFVIKTLRKAELKILLKMLPKYYNHVRAYDNTLITKFFGVHRITLKGGRKVRFVVMGNMFCTELRIHRKYDLKGSTQGRSTKKQNINENTTLKDLDLSYVFHVDKPWRDALIRQISLDCMFLESQSIIDYSMLLGIHFRAPSHLKTSSSHQNSLESGISDTDLLQYEEKSSWKGFLLVAHEPGTTVGGSHIRGSMVRASEAGYEEVDLVLPGTGRFRVQLGVNMPARALKVREDMNTELENPDNIEEYDVVLYLGIIDILQEYNVSKRVEHAVKSLKFDPLSISAVDPSSYAKRFVKFLESVFPEQY

SEQ ID NO: 113241 - protein, 82 aa, Setaria italica
  Transcript Sequence Number=SeqID_47267
FQLPLTLSYMKPITWYNLELIQCNWFQLPLTLSYMKQTSKCPLKVKTIGSSATMLTCHTFHPFPRPFSSRQQSEGQAIGSSA

SEQ ID NO: 113242 - protein, 160 aa, Setaria italica
  misc_feature (105)..(105): Xaa can be any naturally occurring amino acid
  Transcript Sequence Number=SeqID_47268
  Gene Ontology: Mol. function=hydrolase activity, acting on acid anhydrides, in phosphorus-containing anhydrides; Cellular component =protein complex; Biological process=proteasomal ubiquitin-dependent protein catabolic process
  Homolog annotation: Hit_ID=O24412; Match level="QueryCoverage=88%, HitCoverage=45%, E-value=2e-75, Identity=95%"; Hit description =Probable 26S proteasome non-ATPase regulatory subunit 7
  Pfam annotation: Domain name=Mov34; Domain location=2-90; Score=67.5; E_value=4.9e-17; Accession=PF01398.13; Description=Mov34MPNPAD-1 family
GRRSRSNDPHNLPITRADSVDVTNSYAVPFEEDDKDPRIWFLDHNYHESMFSMFKRINAKEHVVGWYSTGPKLRENDLDVHALFNSYVPNPVLVIIDVQPKELGXPTKAYYAVEEVKENATQKSQKVFVHVPSEIAAHEVEEIGVEHLLRDVKDTTISTL

SEQ ID NO: 113243 - protein, 310 aa, Setaria italica
  Transcript Sequence Number=SeqID_47269
  Gene Ontology: Mol. function=protein binding; Cellular component =protein complex; Biological process=anaphase-promoting complex -dependent proteasomal ubiquitin-dependent protein catabolic process
  Homolog annotation: Hit_ID=O24412; Match level="QueryCoverage=99%, HitCoverage=100%, E-value=1e-165, Identity=91%"; Hit description =Probable 26S proteasome non-ATPase regulatory subunit 7
  Pfam annotation: Domain name=Mov34; Domain location=12-125; Score =170.8; E_value=4.1e-48; Accession=PF01398.13; Description =Mov34MPNPAD-1 family
MDVVKAAQLSGRTLERVVVHPLVLLSIVDHYNRVARDTRKRVVGVLLGTSSRGSVDVTNSYAVPFEEDDKDPRIWFLDHNYHESMFSMFKRINAKEHVVGWYSTGPKLRENDLDVHALFNSYVPNPVLVIIDVQPKELGIPTKAYYAVEEVKENATQKSQKVFVHVPSEIAAHEVEEIGVEHLLRDVKDTTISTLATEVTSKLAALKGLDARLREIRSYLDLVIEGKLPLNHEILYHLQDVFNLLPNLNVNELIKAFAVKTNDMMLVIYLSSLIRSVIALHNLINNKMLNKEHEKAEDSKPTAIPTAAGS

SEQ ID NO: 113244 - protein, 176 aa, Setaria italica
  misc_feature (40)..(40): Xaa can be any naturally occurring amino acid
  misc_feature (48)..(48): Xaa can be any naturally occurring amino acid
  misc_feature (145)..(145): Xaa can be any naturally occurring amino acid
  Transcript Sequence Number=SeqID_47270
  Gene Ontology: Mol. function=zinc ion binding; Cellular component =intracellular
  Homolog annotation: Hit_ID=B6TCQ2; Match level="QueryCoverage=100%, HitCoverage=42%, E-value=1e-63, Identity=69%"; Hit description=CCT motif family protein
  Pfam annotation: Domain name=zf-B_box; Domain location=1-38; Score =18.7; E_value=0.0015; Accession=PF00643.16; Description=B-box zinc finger
  Pfam annotation: Domain name=zf-B_box; Domain location=42-90; Score =15.4; E_value=0.0034; Accession=PF00643.16; Description=B-box zinc finger
  Pfam module annotation: Pfam domain module=zf-B_box::zf-B_box; Domain location=1-38::42-90
MAALCDFCGKQRSMIYCRSDAASLCLSCDRSVHSANALSXRMLHLICXDHCGSQPAAAHCIEENTSLCQNCDWNGHDATSGATGHKRQAINCYSGCPSSSELSRIWSFVMDIPTVAAEPNCEDGISMMTIDDSDVTNHCDASDDXRLLEIANTTLMSDPPTGDKLKPLIGSPSGDG

SEQ ID NO: 113245 - protein, 85 aa, Setaria italica
  misc_feature (5)..(5): Xaa can be any naturally occurring amino acid
  Transcript Sequence Number=SeqID_47271
TSTIXLRQSTCTLCFLFSFHASHLVSIRLRHQDDTLFCLSSLNLFQLVSAYSLSHNTIESAEISRNKPKKKRSADSVALGNAYLQ

SEQ ID NO: 113246 - protein, 196 aa, Setaria italica
  Transcript Sequence Number=SeqID_47272
  Gene Ontology: Mol. function=hydrolase activity; Cellular component =mitochondrion
  Homolog annotation: Hit_ID=B6T675; Match level="QueryCoverage=99%, HitCoverage=78%, E-value=6e-78, Identity=74%"; Hit description =Peroxisomal coenzyme A diphosphatase NUDT7
  Pfam annotation: Domain name=NUDIX; Domain location=3-137; Score =62.4; E_value=1.7e-15; Accession=PF00293.20; Description=NUDIX domain
RPRRAAVLVCLFRGAAGELRVILTKRSSSLSTHSGEVALPGGKAEEGDADDAATALRESKEEIGLDPSLVTIVTSLEHFLSKHLLVVVPVVGILSYIQAFKPVLNAAEVDEIFDVPLEMFLKDENRTSDELEWMGQAFTIHHFNYKKGNKKYRIWGLTAGILIHAASVVYERPPDFAEKRPKLNLPKYSKECRSMP

SEQ ID NO: 113247 - protein, 155 aa, Setaria italica
  misc_feature (126)..(126): Xaa can be any naturally occurring amino acid
  Transcript Sequence Number=SeqID_47273
  Gene Ontology: Mol. function=transposase activity; Biological process= transposition, DNA-mediated
  Homolog annotation: Hit_ID=B6TR81; Match level="QueryCoverage=97%, HitCoverage=43%, E-value=9e-60, Identity=74%"; Hit description =Regulatory protein
REGDGTAQLIDHVLFVAMDRQAFRRCRSLGGLRCYLLRQRYGTHADDDLASEQLYMSDGFIRMMWRRIRFLGDVLKHGYNFIFTDMDVMWLRNPFPRLDLGDGGEDLLISSDKFNGVARDYVGTSXDTGFFFVASNGRTTALFDEWHAARRGRRA

SEQ ID NO: 113248 - protein, 130 aa, Setaria italica
  Transcript Sequence Number=SeqID_47274
  Gene Ontology: Mol. function=oxidoreductase activity; Biological process=oxidation reduction
  Homolog annotation: Hit_ID=B6TBU1; Match level="QueryCoverage=99%, HitCoverage=32%, E-value=3e-33, Identity=58%"; Hit description=1 -aminocyclopropane-1-carboxylate oxidase
  Pfam annotation: Domain name=2OG-FeII_Oxy; Domain location=1-69; Score=16.7; E_value=0.004; Accession=PF03171.12; Description=2OG -Fe(II) oxygenase superfamily
MGGLQVLVDRGDGRRGWLEVPPLPGALVINIGDLLQLVSNGKFRSVEHRVLANKSRDTPRVSVAAFCSTDVIRSTRVYGPIEELTSSDGSDPPLYRSITIHEYLAHFLKKGLDGRHTLDHFLLLQPTPTV

SEQ ID NO: 113249 - protein, 317 aa, Setaria italica
  Transcript Sequence Number=SeqID_47275
  Gene Ontology: Mol. function=RNA methyltransferase activity; Cellular component=chloroplast; Biological process=RNA processing
  Homolog annotation: Hit_ID=Q5JKV8; Match level="QueryCoverage=100%, HitCoverage=61%, E-value=1e-140, Identity=79%"; Hit description =Putative tRNA/rRNA methyltransferase
  Pfam annotation: Domain name=SpoU_methylase; Domain location=126-298; Score=113.2; E_value=8.8e-31; Accession=PF00588.11; Description=SpoU rRNA Methylase family
  Pfam annotation: Domain name=SpoU_sub_bind; Domain location=24-110; Score=38.9; E_value=2e-08; Accession=PF08032.4; Description=RNA 2'-O ribose methyltransferase subs
  Pfam module annotation: Pfam domain module=SpoU_methylase::SpoU_sub _bind; Domain location=126-298::24-110
QENWGRKTGKEAGESTVPKMVGQGVYGVGPVLAALMAGRREFYALYMQEGMDLSGSNKKKKDKKAVEKVLRMAEKISLKVIETSKHDLNMVVDNRPHQGLVLDASPLEMVNMKELDPVRLEGGKAPVWIALDEVMDPQNLGAIIRSAYYFGAEGVVLCAKNSAPLSGVVSKASAGSLELIELLSCRNMMHFLSSSAENGWRVLGGTIANKAVPLSEVQTGVPTILVLGSEGTGLRPLVERSCTHLVRIPGNAGAFVEGADADTDEGEEGDSSSSNQDLRSFLAVESLNVSVAAGVLLYHLAGKHACPVSDTSSVAQM

SEQ ID NO: 113250 - protein, 82 aa, Setaria italica
  Transcript Sequence Number=SeqID_47276
LISLIVDCNLVLVYLVCGITRMLMIAIQPSKRKSLFERLLLPLQLRRSLPSSSRQLQSSTRPRKWQCKNTEIPSSSASLPAT

SEQ ID NO: 113251 - protein, 60 aa, Setaria italica
  Transcript Sequence Number=SeqID_47277
VIGRLKNTANYFYMLCCFSTLVSNVQAETKVMTATYFMSFGKSLAADVYGFKHNYSKLQN

SEQ ID NO: 113252 - protein, 84 aa, Setaria italica
  misc_feature (61)..(61): Xaa can be any naturally occurring amino acid
  misc_feature (69)..(69): Xaa can be any naturally occurring amino acid
  Transcript Sequence Number=SeqID_47278
  Gene Ontology: Mol. function=nucleic acid binding; Biological process= transposition, DNA-mediated
  Homolog annotation: Hit_ID=Q75LB7; Match level="QueryCoverage=96%, HitCoverage=12%, E-value=3e-22, Identity=55%"; Hit description =Putative MuDR transposon protein
  Pfam annotation: Domain name=MULE; Domain location=1-74; Score=13.4; E_value=0.0032; Accession=PF10551.1; Description=MULE transposase domain
IFKGQLATAYAGHNWMYPVASRVSDSETSENWTWFMKMLREAIGPSRGLAICTDVGQAVMXQRECMFHXVSNFKKKFHGKVFLY

SEQ ID NO: 113253 - protein, 130 aa, Setaria italica
  Transcript Sequence Number=SeqID_47279
  Gene Ontology: Mol. function=sugar binding
  Homolog annotation: Hit_ID=B6SSM9; Match level="QueryCoverage=93%, HitCoverage=38%, E-value=4e-35, Identity=71%"; Hit description =Legume lectins beta domain containing protein
  Subcellular localization annotation: CTP_CleavageSite=27; ConfidenceScore=5.10e-01
GGPVLAGFRTPSGNCTLFSWAFHAAPYRMHSQPLNPASLLATPPPDRADRHYSPWGAAVSLLFAAACGAMVTFFVLYLWYAVTARRPVAPVEYPMHPSDVAYQKIVLVGVKDDSATTDDDGHPPPASANK

SEQ ID NO: 113254 - protein, 241 aa, Setaria italica
  misc_feature (8)..(8): Xaa can be any naturally occurring amino acid
  Transcript Sequence Number=SeqID_47280
  Homolog annotation: Hit_ID=B9RS75; Match level="QueryCoverage=97%, HitCoverage=10%, E-value=8e-67, Identity=54%"; Hit description=Zinc finger protein, putative
SSRQEPLXYPLQLNLVKHLAQLSSVRAVLACVFGSSILSGDNESSPTYVKDTTQAPEIERSFFEFALEQSERYPTLNRWIQMQSNLHRVSESSVTDKSENEVSLHQSKGKFSMKRAREHDSDGESELDDIIISGNATSGPLESPKHEDTRLEPTAFISFDWENEGPYEKAVERLITEGKLTDALAVSDRCLRNGASDKLLQLLIEQKEDRSQGTGQIRAYGSHNLGSDSWQYCLRLRDKKL

SEQ ID NO: 113255 - protein, 61 aa, Setaria italica
  misc_feature (34)..(34): Xaa can be any naturally occurring amino acid
  Transcript Sequence Number=SeqID_47281
  Gene Ontology: Mol. function=peptidase activity
  Homolog annotation: Hit_ID=Q84P70; Match level="QueryCoverage=100%, HitCoverage=20%, E-value=3e-19, Identity=70%"; Hit description =Putative serine protease-like protein (Fragment)
ELNSLSNACSQLWELDMNCLLPAKDYRIGCQGEXLYQKGDMTHVSLLSWLGDDVLRKPTMT

SEQ ID NO: 113256 - protein, 97 aa, Setaria italica
  Transcript Sequence Number=SeqID_47282
  Subcellular localization annotation: CTP_CleavageSite=3; ConfidenceScore=5.13e-01
MVPFSMYRGNLHIGGRDSIAAAPRRWEPPRPTLTVKRFRRLLRNRSLAIARLAAEQQRRGSPSSAGADGGRGAAEHDGEARGEEEADRLEELVGQQP

SEQ ID NO: 113257 - protein, 89 aa, Setaria italica
  Transcript Sequence Number=SeqID_47283
RRRRRHARLVDARPRRHARRGEHGGGVCALTAATATRITRLRARLDSQTSAAARELFGQQIMGVDLLGNFLTYFLVHLVARDFYQVQST

SEQ ID NO: 113258 - protein, 130 aa, Setaria italica
  Transcript Sequence Number=SeqID_47284
  Homolog annotation: Hit_ID=B6U6U0; Match level="QueryCoverage=44%, HitCoverage=17%, E-value=5e-13, Identity=71%"; Hit description =Calmodulin binding protein
  Pfam annotation: Domain name=DUF1645; Domain location=1-130; Score =55.8; E_value=1.7e-13; Accession=PF07816.3; Description=Protein of unknown function (DUF1645)
  Subcellular localization annotation: CTP_CleavageSite=60; ConfidenceScore=5.26e-01
ELFEGGRIRPLNTPHPSILLVDDTSSSYSSSSSTRPRSPRRAQPEALERGRSGRPAAPASAASSRSRRATRSLSPFRVGGAGIEDDEFPSSPPSPRTSMMRGCGSGSKKWRLKDLFLFRSASEGRATGGG

SEQ ID NO: 113259 - protein, 187 aa, Setaria italica
  Transcript Sequence Number=SeqID_47285
  Gene Ontology: Mol. function=catalytic activity; Cellular component =plasma membrane; Biological process=metabolic process
  Homolog annotation: Hit_ID=B6SW95; Match level="QueryCoverage=96%, HitCoverage=31%, E-value=7e-90, Identity=87%"; Hit description =Neutral/alkaline invertase
  Pfam annotation: Domain name=Invertase_neut; Domain location=1-184; Score=51.8; E_value=4.9e-18; Accession=PF04853.4; Description=Plant neutral invertase
PTRGGYFVGNVSPARMDFRWFALGNCVAILASLATPDQASAIMDLIEERWEELVGEMPVKICFPAIEGHEWQIVTGCDPKNTRWSYHNGGSWPVLLWLLTAACIKTGRLKIARRAIELAEARLARDGWPEYYDGKLGRYIGKQARKFQTWSIAGYLVAKMMLEDPSHLGMISLEEDKAMKTGRLQGR

SEQ ID NO: 113260 - protein, 57 aa, Setaria italica
  Transcript Sequence Number=SeqID_47286
GLTTGWMEWSARSIPRSSSNCNGCAAACRRRSGLLIPSAPHRHVEPAGHVRRHQRQE

SEQ ID NO: 113261 - protein, 50 aa, Setaria italica
  Transcript Sequence Number=SeqID_47287
VDVLNVSKTATSLLPRLHEVCAKCRQIEQTTLWLSTYIKTMSFSILGFAS

SEQ ID NO: 113262 - protein, 55 aa, Setaria italica
  Transcript Sequence Number=SeqID_47288
SAELQYCRYRMSFSRTFDLCCLTASSFLIYSSLTVALLLEFWYVGVVATGVLVPR

SEQ ID NO: 113263 - protein, 51 aa, Setaria italica
  Transcript Sequence Number=SeqID_47289
  Subcellular localization annotation: CTP_CleavageSite=9; ConfidenceScore=5.07e-01
ITRLFKICSCAQVKKATSSNFKQSGDLTFQGKVKLRWRGATTKTYTSLPVV

SEQ ID NO: 113264 - protein, 66 aa, Setaria italica
  Transcript Sequence Number=SeqID_47290
TKINFCHGTVHSTTLSALMICMYRTLSITSVSTKDPRTINLACCHMTHEHLLFLDPWLKLSITSVS

SEQ ID NO: 113265 - protein, 70 aa, Setaria italica
  Transcript Sequence Number=SeqID_47291
AELQIFADYRMSFSRTFDLCCLTASSFLIYSSLTVALLFLEFWYVAVVATGVLVPRLRKLQVQILNNLVI

SEQ ID NO: 113266 - protein, 69 aa, Setaria italica
  Transcript Sequence Number=SeqID_47292
AELQYCRYRMSFSRTFDLCCLTASSFLIYSSLTVALLFLEFWYVAVVATGVLVPRLRKLQVQILNNLVI

SEQ ID NO: 113267 - protein, 51 aa, Setaria italica
  Transcript Sequence Number=SeqID_47293
  Gene Ontology: Mol. function=serine-type peptidase activity; Biological process=proteolysis
  Homolog annotation: Hit_ID=B6SPN8; Match level="QueryCoverage=96%, HitCoverage=10%, E-value=3e-20, Identity=89%"; Hit description =Carboxyl-terminal-processing protease
MVTGIVVTVGKYVTPDHKDINGNGIEPDYNRLPDFNEARDYLSRCRLKELS

SEQ ID NO: 113268 - protein, 193 aa, Setaria italica
  Transcript Sequence Number=SeqID_47294
  Gene Ontology: Mol. function=ATP binding; Biological process=apoptosis
  Homolog annotation: Hit_ID=Q2R1P5; Match level="QueryCoverage=71%, HitCoverage=9%, E-value=9e-39, Identity=64%"; Hit description =Leucine Rich Repeat family protein, expressed
TLPTAASCKDTPSSVKLPNNIGSCLKQNPKILESLSIRGTTLKGHLLPVITNGGNNKLAKVTLSRTLLNQDDLDVLAKLPKLQCVRLHHIDCTEGKLTFKKDRFISLKCLFVEGSDLTNITFEDEAACELEKMVLSFTSTPLPKVLSPTRTALQLSWSAEATISLALAVLLFTSNIRGVAIIGPLSATIVFWT

SEQ ID NO: 113269 - protein, 366 aa, Setaria italica
  misc_feature (36)..(36): Xaa can be any naturally occurring amino acid
  Transcript Sequence Number=SeqID_47295
  Gene Ontology: Mol. function=serine-type peptidase activity; Cellular component=extracellular region; Biological process=proteolysis
  Homolog annotation: Hit_ID=B6SPN8; Match level="QueryCoverage=98%, HitCoverage=77%, E-value=0.0, Identity=94%"; Hit description =Carboxyl-terminal-processing protease
  Pfam annotation: Domain name=PDZ; Domain location=66-148; Score=24.2; E_value=0.00054; Accession=PF00595.16; Description=PDZ domain (Also known as DHR or GLGF)
  Pfam annotation: Domain name=Peptidase_S41; Domain location=183-346; Score=223.4; E_value=5.8e-64; Accession=PF03572.10; Description =Peptidase family S41B
  Pfam module annotation: Pfam domain module=PDZ::Peptidase_S41; Domain location=66-148::183-346
WVGWFNESFLPDAGSRPWSPEMWMQRKQDILQGTIXKSRARAHDIIQKMLASLGDPYTRFLSPSEFSKMSKYDMTGIGLNLREIPDDNGSFKLMVLGLLLDGPAYSAGVRQGDELLSVNGIDVRGKSAFDASSMLQGPKETFVTIKVKHGDCGPVESMKVQRQLVARTPVFYHLEKRENDDSSVGYIRIKEFNAVAKKDLVSALKRLQNSGASYFVLDLRDNLGGLVQAGIETAKLFLNKGDTVIYTAGRDRQVQNTIVAESGPMIATPLMLLVNNRTASASEIVASALHDNCKAVLVGERTFGKGLIQSVFELHDGSGIVVTVGKYVTPDHKDINGNGIEPDYNRLPDFNEARDYLSRCRLKELS

SEQ ID NO: 113270 - protein, 196 aa, Setaria italica
  Transcript Sequence Number=SeqID_47296
  Gene Ontology: Mol. function=receptor activity; Cellular component =integral to membrane
  Homolog annotation: Hit_ID=B6TSK1; Match level="QueryCoverage=72%, HitCoverage=37%, E-value=9e-43, Identity=64%"; Hit description =Hemolysin-III related family protein
  Pfam annotation: Domain name=HlyIII; Domain location=2-196; Score =56.4; E_value=1.1e-13; Accession=PF03006.12; Description=Haemolysin -III related
LFLALAVAGGAREAADEAAPGIMRFVVGSANASWDSDHSGLPGHDAGAAALSSGVPQWPRMVFLLGAMSCLAISATAHLLACHSRRATAVFWQLDYAGISVMIVASFVPPVYYAFLCHPGARAAYLSGITALGVLVVGALLSPSCSSPRYRRLRASLFLAMGLSGVLPALHALWLNWGHPACYLALGLEVAMGLAY

SEQ ID NO: 113271 - protein, 260 aa, Setaria italica
  misc_feature (16)..(16): Xaa can be any naturally occurring amino acid
  misc_feature (18)..(18): Xaa can be any naturally occurring amino acid
  Transcript Sequence Number=SeqID_47297
  Gene Ontology: Mol. function=chitinase activity; Cellular component =vacuole; Biological process=cell wall catabolic process
  Homolog annotation: Hit_ID=B4G1H3; Match level="QueryCoverage=99%, HitCoverage=78%, E-value=1e-116, Identity=74%"; Hit description =Endochitinase A2
  Pfam annotation: Domain name=Glyco_hydro_19; Domain location=7-245; Score=236.7; E_value=5.6e-68; Accession=PF00182.11; Description =Chitinase class I
NEAISDYFKAYQFEEXFXHRNDAQAHAADFWDYQAFITAAALFEPRGFGTTGGKEMGMREVAAFLGHVGAKTSCGYREAPGGETAWGLCYNHELSPSQSYCDDSNELYPCVEGVEYYGRGAIPIYWNQNYGIVGKGIKQDLLNHPELLEQNATLAFEAAIWRWMTPMKRKQPSAHDVFVGNWKPTKNDTLSKRYPGFGATMNVLYGDAICGQGSTDKMNFIISHYQHYLDLMGVGREHSGDNLDCDDQVAFNPSSENSDF

SEQ ID NO: 113272 - protein, 113 aa, Setaria italica
  Transcript Sequence Number=SeqID_47298
HGNSSSTCLPLRLKLNLQQRHLLLHRQHGSIQLSAPKIFLLHDLLHQLRCLDRVTSKSPNHFFRSIEAKRLATPAREPKVSLPNLCTLLQEDNHQGTKTRCGSSSAASVRPCH

SEQ ID NO: 113273 - protein, 144 aa, Setaria italica
  Transcript Sequence Number=SeqID_47299
MKGATIGANNERQSDERNLLAAMLSLVVVICNEHIISREDFVRAIHEDAALVKKLAEVLKVNKQCTAECLRVAKLTCQVVIAMVQAKPSFVQHFNEHNFKEELTEALEIMSEVDGCMLFASLVKEAHKLLNSAQEHGVRSTEFH

SEQ ID NO: 113274 - protein, 80 aa, Setaria italica
  misc_feature (54)..(54): Xaa can be any naturally occurring amino acid
  Transcript Sequence Number=SeqID_47300
RRRPGRTEDVGDRTNRPGARVGAQEDGAAQRPHRAHLPRAVRLPKGEDGGLGRXEGAPDQEVGRLTEGSSLLLPWREIMS

SEQ ID NO: 113275 - protein, 224 aa, Setaria italica
  misc_feature (56)..(56): Xaa can be any naturally occurring amino acid
  misc_feature (88)..(88): Xaa can be any naturally occurring amino acid
  misc_feature (145)..(145): Xaa can be any naturally occurring amino acid
  misc_feature (161)..(161): Xaa can be any naturally occurring amino acid
  misc_feature (177)..(177): Xaa can be any naturally occurring amino acid
  misc_feature (202)..(202): Xaa can be any naturally occurring amino acid
  misc_feature (214)..(214): Xaa can be any naturally occurring amino acid
  Transcript Sequence Number=SeqID_47301
  Gene Ontology: Mol. function=ribonucleoprotein binding; Cellular component=spliceosome; Biological process=mRNA processing
  Homolog annotation: Hit_ID=A2Q2G1; Match level="QueryCoverage=96%, HitCoverage=44%, E-value=6e-69, Identity=62%"; Hit description=Pre -mRNA processing ribonucleoprotein, binding region; NOSIC
  Pfam annotation: Domain name=Nop; Domain location=31-182; Score =118.5; E_value=2.2e-32; Accession=PF01798.10; Description=Putative snoRNA binding domain
GDTGSSHDIMWITMAESTTSGEPLSEENLLKTIEACNRALNLDATKNKILDFLKSXWDALRQNLAAVVGSAVASKLMGTAGGLEALAXKMPDCNVLLLVAKKKNMSGFSTAAAQSRVGYLEQTEVVQSTSPPLRSQSSRLIAAKXSTLAARIGSIRGDPNXEKAGQNLLEEISKKIXKWQELPSARLPKPLPIPDSILKKKXGGRRLRQMKERXAQTNMIKLVN

SEQ ID NO: 113276 - protein, 113 aa, Setaria italica
  Transcript Sequence Number=SeqID_47302
  Gene Ontology: Mol. function=inositol or phosphatidylinositol phosphatase activity; Biological process=abscisic acid mediated signaling
  Homolog annotation: Hit_ID=Q5Z483; Match level="QueryCoverage=76%, HitCoverage=18%, E-value=6e-35, Identity=77%"; Hit description =Putative inositol polyphosphate 5-phosphatase II
SDFRISFWSSRIFWFGDLNYRIDLLDAEVRHLVAMKRWDDLLKSDQLTKELISGSTFVGWKEGLINFPPTYKYERNSSRYVGEIHNEVEKRRTPAWLRLFLIILYFYLQVPMF

SEQ ID NO: 113277 - protein, 502 aa, Setaria italica
  misc_feature (27)..(27): Xaa can be any naturally occurring amino acid
  misc_feature (354)..(354): Xaa can be any naturally occurring amino acid
  Transcript Sequence Number=SeqID_47303
  Gene Ontology: Mol. function=inositol or phosphatidylinositol phosphatase activity; Biological process=abscisic acid mediated signaling
  Homolog annotation: Hit_ID=B9SNR8; Match level="QueryCoverage=100%, HitCoverage=70%, E-value=1e-144, Identity=51%"; Hit description=Type I inositol polyphosphate 5-phosphatase, putative
  Pfam annotation: Domain name=Exo_endo_phos; Domain location=1-473; Score=94.6; E_value=3.4e-25; Accession=PF03372.15; Description =EndonucleaseExonucleasephosphatase family
VAGIAPSDDLDLDQWLCTQEPADLYVXGFQEVVPLSAGNVLGAEDSRPVRKWEALIRQTLNRSQQPKTICKSYSAPLSPLLRPVASGDGHEYMKSKLEDEALGSLTQFRDWQTSTTELRCNWLYGTSSLDWPEYPLDTPSKVLVPGTGLRRVTSLGLFSTNFMEHPQGLELQSVDLQVGIRRQYHSSGNLSMLWSEQQEKLDLLNSLDCISDLTSEEDSPSVGTDEGCATLGKRESSKHRTNYVRIVSKQMVGIYVSVWVSRKLRRHVNNLEVSPVGVGLLGYMGNKGSISISMSLFQTRLCFVCSHLASGHKSGDQQKRNADVYEILQRTRFSSLCAAGRPQKIPSHEFQEEXRIFWFGDLNYRIDLLDAEVRHLVAMKRWDDLLKSDQLTKELISGSTFVGWKEGLINFPPTYKYERNSSRYVGEIHNEVEKRRTPAWCDRILWLGKGTKQLSYWSSDLSFSDHRPVSAIFLVEVEVFNQQKLERVLNFNPGSFQRGNIT

SEQ ID NO: 113278 - protein, 155 aa, Setaria italica
  Transcript Sequence Number=SeqID_47304
LDLNYICRCDTTTGTIKGKLELNANTRIYGRDLNYIHAVVIRIDQLWLAWWWRRAGRRHGVEAAGSDAEGRAQPSDPHFARREEEVDIVQDSRGDGNDVIARVRTEAIAETTASRAAVVLDVSHRRRRTHGEQGQRDAGGNNGHLEHRGSHGDQD

SEQ ID NO: 113279 - protein, 125 aa, Setaria italica
  Transcript Sequence Number=SeqID_47305
AIAATTSPDHHGSANGAMLRKAIPVAACIVLVLLSMGPPVMADIQDECRAACLPPCNDFVSDACNIVTRIAPVLQLKKSFLRECKEQVSPVCVPTCIRFCIGFSMLPGAPTPAPASTAAPPPCKP

SEQ ID NO: 113280 - protein, 115 aa, Setaria italica
  Transcript Sequence Number=SeqID_47306
TMASANGAVLQKVVPVATCIALVLLSMGSPAMADIQDDCRPTCVPICQGLATNVCNAVIDLIHIQLPVDIFPTCKVRVSAICDPVCINVCSLNTLSPGAPTPAPASTAAPPPCKP

SEQ ID NO: 113281 - protein, 127 aa, Setaria italica
  Transcript Sequence Number=SeqID_47307
EILLHRYYVVIFKKLTRRQHQGLHGGGAAVLAGAGVGAPGDRVLRLHTLTQTGVHSPETLTLHVVKKKLRLFRIVGAMPMTALHTSELKPSQRGRQVARQSSWMSAIAGEPMDNRTSAMQVATRTTF

SEQ ID NO: 113282 - protein, 278 aa, Setaria italica
  Transcript Sequence Number=SeqID_47308
  Gene Ontology: Cellular component=integral to membrane
  Homolog annotation: Hit_ID=Q9XHZ7; Match level="QueryCoverage=92%, HitCoverage=88%, E-value=1e-85, Identity=62%"; Hit description =F8K7.23
  Pfam annotation: Domain name=TRAM_LAG1_CLN8; Domain location=68-265; Score=112.9; E_value=1.1e-30; Accession=PF03798.8; Description=TLC domain
  Subcellular localization annotation: CTP_CleavageSite=60; ConfidenceScore=5.05e-01
MPPHRAGGAAGGGDTSAFFAATLVLWAVSVGFEIGVRGRRELAPVAAGFAFFQAANAAVRASVSRDPLFVNTAVSLLHSSLTSASVIFVLVNQWRNKGLENMFEHEELFGGSWIGAYSALCFSCGYFAYDQLDMLRYRLYSGWIPGILMHHLILLICFTLALYRNVTINYLILSLVCELHSIFLHIRKVRRMAGFRDSNRKVVKLEWVLNWTTFVTARVVCHILITYKLIADAHKFGKGIELPLALLGMAGMNLLNIFLGLDLFKAYARERNQQRHQD

SEQ ID NO: 113283 - protein, 109 aa, Setaria italica
  Transcript Sequence Number=SeqID_47309
  Subcellular localization annotation: CTP_CleavageSite=20; ConfidenceScore=5.20e-01
PFCRFPAWRPAMHAEHQPTRVAAVPQPAPLMSGTTAPAAVASDAACMMTPGDVSFSSGSDGEDTEDPRDGGKRKRQGGDVGGGGSGSGKMMRFFEGLMRQVMERQGRKM

SEQ ID NO: 113284 - protein, 95 aa, Setaria italica
  Transcript Sequence Number=SeqID_47310
IISIDWNRRKYILFYKLQQCKLTYMLQTCIYVTNMLYSNRLLYTTVALYNNIKPQKTFYAQAAAHCNLTESQSQVSQLSTRVAVSKLRIVILAVG

SEQ ID NO: 113285 - protein, 70 aa, Setaria italica
  Transcript Sequence Number=SeqID_47311
SCTVPPVGMIVCSLNSLCCIAILPECHSRQFLYVESVEIRYCRFLLLFFSCTSSEDCKSSIHSHNEDDSI

SEQ ID NO: 113286 - protein, 110 aa, Setaria italica
  Transcript Sequence Number=SeqID_47312
  Gene Ontology: Mol. function=hydrolase activity, acting on ester bonds; Cellular component=RNA-induced silencing complex; Biological process=RNA interference
  Homolog annotation: Hit_ID=Q8L5C2; Match level="QueryCoverage=97%, HitCoverage=10%, E-value=5e-20, Identity=50%"; Hit description=110 kDa 4SNc-Tudor domain protein
IVSEHQGPMEREFLVFYIDYGNQEIVTYSRLRPAHANQSTSLIPPLAKLFLLAFIAVPNLAADNLGEQAARYLSMVLLENEKEFKATIEERATVESKQEGQGTGEVLVCF

SEQ ID NO: 113287 - protein, 109 aa, Setaria italica
  Transcript Sequence Number=SeqID_47313
FLHLRSYSALHSSQFLTYFAYLQNGLAQIETHRLISRERRAAVKNLEEFQEHAKKERRGIWRLEGVGVPDKSRRAPPDPRAPVSPLAAAPLRRTPTRRCSPCLVGHRAS

SEQ ID NO: 113288 - protein, 143 aa, Setaria italica
  misc_feature (28)..(28): Xaa can be any naturally occurring amino acid
  Transcript Sequence Number=SeqID_47314
  Gene Ontology: Mol. function=hydrolase activity, acting on ester bonds; Cellular component=RNA-induced silencing complex; Biological process=RNA interference
  Homolog annotation: Hit_ID=B9RA39; Match level="QueryCoverage=93%, HitCoverage=13%, E-value=9e-43, Identity=61%"; Hit description=Ebna2 binding protein P100, putative
IWEWSANMLGAETKRKLKNAELQAKKEXLRIWTGFQPPVTNTAPIHNQKFTGNVIEVVNGYCIVIADDMVPVGSPLAERRVNISSIRPPKLVDSSGESKTIEHFARAAKEFLRTRLIGKQVHVSMEYSRRINISNGHAADKPT

SEQ ID NO: 113289 - protein, 79 aa, Setaria italica
  Transcript Sequence Number=SeqID_47315
  Gene Ontology: Mol. function=hydrolase activity, acting on ester bonds; Cellular component=RNA-induced silencing complex; Biological process=RNA interference
  Homolog annotation: Hit_ID=B9RA39; Match level="QueryCoverage=49%, HitCoverage=3%, E-value=3e-09, Identity=71%"; Hit description=Ebna2 binding protein P100, putative
GLAKYMEWSANMLGAETKRKLKNAELQAKKEQLRIWTGFQPPRRAPPDPRAPVSPLAAAPLRRTPTRRCSPCLVGHRAS

SEQ ID NO: 113290 - protein, 93 aa, Setaria italica
  Transcript Sequence Number=SeqID_47316
  Gene Ontology: Mol. function=hydrolase activity, acting on ester bonds; Cellular component=RNA-induced silencing complex; Biological process=RNA interference
  Homolog annotation: Hit_ID=B9RA39; Match level="QueryCoverage=63%, HitCoverage=5%, E-value=6e-19, Identity=72%"; Hit description=Ebna2 binding protein P100, putative
FFFFFISDGNTAKDLALELVENGLAKYMEWSANMLGAETKRKLKNAELQAKKEQLRIWTGFQPQSLETCTCKSIYFLDSSTCEVIPPCIHRSS

SEQ ID NO: 113291 - protein, 135 aa, Setaria italica
  misc_feature (13)..(13): Xaa can be any naturally occurring amino acid
  misc_feature (109)..(109): Xaa can be any naturally occurring amino acid
  Transcript Sequence Number=SeqID_47317
MVSANLGLAHYVXGTLLHRTKLGTPFFSKGWGGTKLDLLESMVKQLFPEAHCQSWPPTAVQPMWKTIWETNSSCLREGVFRTKCDERLVDALPPENHNAGVAFLTPKNXTPEKMSCMVHLAGTGDHTFERRLWLG

SEQ ID NO: 113292 - protein, 101 aa, Setaria italica
  misc_feature (69)..(69): Xaa can be any naturally occurring amino acid
  Transcript Sequence Number=SeqID_47318
MVSVNLGLVHYVLDHIYGTLLHRTKLGTPFFSKGWGGTKLDLLEKMVKQLFPEARLQSQPPTAVQPMWXTVWETNSSCLREGVFRTTCDSQGAMRRLVSHH

SEQ ID NO: 113293 - protein, 100 aa, Setaria italica
  misc_feature (32)..(32): Xaa can be any naturally occurring amino acid
  Transcript Sequence Number=SeqID_47319
  Gene Ontology: Cellular component=nucleus; Biological process =interspecies interaction between organisms
  Homolog annotation: Hit_ID=Q8H0J6; Match level="QueryCoverage=100%, HitCoverage=11%, E-value=6e-46, Identity=92%"; Hit description =Retinoblastoma-related protein 2
VYVSPLRQTKMDLLLSPSSRSLYACIGEGTHXAYQSPSKDLAAINSRLNYNGRRINTRINFDMVSDSVVAGSLGQPNGGSTSLDPAAAFSSPSKKRKPDT

SEQ ID NO: 113294 - protein, 138 aa, Setaria italica
  misc_feature (88)..(88): Xaa can be any naturally occurring amino acid
  Transcript Sequence Number=SeqID_47320
  Gene Ontology: Cellular component=nucleus; Biological process =interspecies interaction between organisms
  Homolog annotation: Hit_ID=Q8H0J6; Match level="QueryCoverage=98%, HitCoverage=14%, E-value=3e-60, Identity=86%"; Hit description =Retinoblastoma-related protein 2
  Subcellular localization annotation: CTP_CleavageSite=28; ConfidenceScore=5.60e-01
VIANSQIFGSPKPSPFPNLPDMSPKKVSSSHNVYVSPLRQTKMDLLLSPSSRSFYACIGEGTHAYQSPSKDLAAINSRLNYSFVLILXNGRRINTRINFDMVSDSVVAGSLGQPNGGSTSLDPAAAFSSPSKKRKPDT

SEQ ID NO: 113295 - protein, 971 aa, Setaria italica
  Transcript Sequence Number=SeqID_47321
  Gene Ontology: Mol. function=DNA binding; Cellular component=nucleus; Biological process=interspecies interaction between organisms
  Homolog annotation: Hit_ID=Q2R374; Match level="QueryCoverage=93%, HitCoverage=93%, E-value=0.0, Identity=75%"; Hit description =Retinoblastoma-related protein 2
  Pfam annotation: Domain name=RB_A; Domain location=402-603; Score =407.7; E_value=1.9e-119; Accession=PF01858.9; Description =Retinoblastoma-associated protein A domain
  Pfam annotation: Domain name=RB_B; Domain location=722-849; Score =258.6; E_value=1.5e-74; Accession=PF01857.12; Description =Retinoblastoma-associated protein B domain
  Pfam module annotation: Pfam domain module=RB_A::RB_B; Domain location=402-603::722-849
HDSLDASHGGRDESAGGVAGERGLRRARVWGFGGSRRGLGLGEGVAGEAAALLDEVKGVLLAAPSVGGRSAKDAERLCFAFVLYCAVKLKGRKEGSGVRLCEILKSCKLKYDDFFKEMQQLGLKIEKILESRYGRDWEGQLELKQLEGLVNLLADASRFYRKAYNELFSSASTDQEPGLATSTPDYILFGWHVFLMLRSRSPELFKDLVSCIHGLVAVLAILLIHVPAKLRSFTIEGSSHLIKQTEKGVDIIASLCHNYHTSEERLKEMMGKSHEAIEDFFGMKALSASKCKTENLDKIDTDGLMCFKGLIDEESFQQNLEKLEKLRNSNSWEGELDLKLFLSNDYVPSAENTSGASSNLGCSKRAFETLASPTKTIKNMLTVPCSPSSPASGGSVKIVQMTPVTSAMTTAKWLREVISSLPEKPSSKLQQLLSSCDRDLTNDVTKRVSIVLEAIFPTKPSADRGGSIGLNCANAFDIPWAEARKMEASKLYYRVLEAICRAESQNSSVNNLTPLLSNERFHRCLIACSAELVLATHKTVIMMFPAVLESTGLTAFDLSKIIENLVRHEETLPRELKRHLNSLEEQLLESMAWEKGSSLYNSLIVARPSLASEINRLGLLAEPMPSLDELVVRQNFHVEGLPATPSKNRAAASDDNTDPRSPKRLCNESRNTVVERNLQTPPPKQSHSVPTNLKAKCQPLQSTFASPTVSNPVGGNEKCADITVQIFFSKILKLAAIRIRNLCERVQYVEQTERVYNVFKQILDQRTALFFNRHIDQLILCCLYGIAKVCQLELTFREILNNYKREPQCKPEVFLSIYVGSRNRNGVLGSRHVDIITFYNEVFVPAAKPFLVSFIGSGTRPEDKKNANSQIFGSPKPSPFPNLPDMSPKKVSSSHNVYVSPLRQTKMDLLLSPSSRSFYACIGEGTHAYQSPSKDLAAINSRLNYNGRRINTRINFDMVSDSVVIDNKTIR

SEQ ID NO: 113296 - protein, 85 aa, Setaria italica
  Transcript Sequence Number=SeqID_47322
  Homolog annotation: Hit_ID=Q6AA12; Match level="QueryCoverage=94%, HitCoverage=47%, E-value=1e-24, Identity=72%"; Hit description =Conserved protein
GLMMMFFTSGEAVLLLLLTGLIVGVVIGMITAAITYSMSGGERDFNSVQQVVATHYEVLAEHKVAAQAREMVSDMPFMRTKAFEG

SEQ ID NO: 113297 - protein, 60 aa, Setaria italica
  Transcript Sequence Number=SeqID_47323
KNNCSFRDQFELYNSCNTEYIRVCIICTNPTVLLIELDLCLRTVMLEYKFYRVANAFSSK

SEQ ID NO: 113298 - protein, 75 aa, Setaria italica
  Transcript Sequence Number=SeqID_47324
  Homolog annotation: Hit_ID=Q948J7; Match level="QueryCoverage=93%, HitCoverage=15%, E-value=7e-23, Identity=75%"; Hit description =Proline transporter
MDAADEKGERPDLSEDTAHQISVDPWYQVGFVLITGVNSAYVLGYSGSIMVPLGWIGGTCGLLLAAAISMYANAL

SEQ ID NO: 113299 - protein, 112 aa, Setaria italica
  misc_feature (9)..(9): Xaa can be any naturally occurring amino acid
  misc_feature (29)..(29): Xaa can be any naturally occurring amino acid
  Transcript Sequence Number=SeqID_47325
  Homolog annotation: Hit_ID=Q948J7; Match level="QueryCoverage=99%, HitCoverage=24%, E-value=1e-41, Identity=73%"; Hit description =Proline transporter
LKATYALLXDDGALKLPYCIAISGFTCAXFAFGIPYLSALRIWLGFSTLFSLIYIVITFVLSLRDGITAPARDYSIPGSHGTRIFTTIGAVADLVFAYNTGMLPEIQATIRP

SEQ ID NO: 113300 - protein, 80 aa, Setaria italica
  Transcript Sequence Number=SeqID_47326
MAAASTSEVRVGSRRIVDYLNDGEELGVEGVVGTPPCTPAAAVVVGEAARSSVLPRFRWPRLVRLGKKGAGAGKGKGRGG

SEQ ID NO: 113301 - protein, 334 aa, Setaria italica
  Transcript Sequence Number=SeqID_47327
  Gene Ontology: Mol. function=protein dimerization activity; Cellular component=nucleus; Biological process=regulation of transcription, DNA-dependent
  Homolog annotation: Hit_ID=B9RG75; Match level="QueryCoverage=95%, HitCoverage=68%, E-value=1e-125, Identity=71%"; Hit description =Transcription factor HBP-1b(C1), putative
  Pfam annotation: Domain name=bZIP_1; Domain location=44-98; Score =21.2; E_value=0.0021; Accession=PF00170.13; Description=bZIP transcription factor
  Pfam annotation: Domain name=bZIP_2; Domain location=46-96; Score =20.4; E_value=0.0036; Accession=PF07716.7; Description=Basic region leucine zipper
  Pfam module annotation: Pfam domain module=bZIP_1::bZIP_2; Domain location=44-98::46-96
MADASSRTDTSTVLDDNDKNQRMENGQIMAAAPSNSSDRSDRSDKPLDQKTLRRLAQNREAARKSRLRKKAYVQQLESSKLKLAQLEQELQKARQQGIFISSSGDQTHAMSGNGALTFDIEYTRWLEEQNKQINELRTAVNAHASDSDLRLIVDGIMAHYDEIFKVKGVAAKADVFHILSGMWKTPAERCFLWLGGFRPSELLKLLANHLEPLTEQQLLGLTNLQQSSQQAEDALSQGMEALQQSLAETLAGSLGPSGSSGNVANYMGQMAMAMGKLGTLENFLRQADNLRQQTLHQMQRILTIRQASRALLAIHDYFSRLRALSSLWLARPRE

SEQ ID NO: 113302 - protein, 77 aa, Setaria italica
  Transcript Sequence Number=SeqID_47328
PSVQVLNTSMNIQITALPSLLTGVHKLSPICPKTPRLVNHTEKYNKLNLIHIFGDQPHMNSLVSRTLYSHLACVLII

SEQ ID NO: 113303 - protein, 98 aa, Setaria italica
  Transcript Sequence Number=SeqID_47329
  Gene Ontology: Mol. function=transcription regulator activity; Cellular component=nucleus; Biological process=regulation of transcription
  Homolog annotation: Hit_ID=B6TJC2; Match level="QueryCoverage=97%, HitCoverage=28%, E-value=1e-33, Identity=76%"; Hit description=DNA binding protein
MYHPQCELLMAHETRDLDAGQPHLTASAGVATIPSELSFHLLHSLDAAAAVAPQPTIDYFFGGAADPHQPAVQYEPLAAGHQHTMNMLRDYCNGHYTA

SEQ ID NO: 113304 - protein, 80 aa, Setaria italica
  Transcript Sequence Number=SeqID_47330
  Gene Ontology: Mol. function=ATPase activity, coupled to transmembrane movement of substances; Cellular component=integral to membrane; Biological process=transport
  Homolog annotation: Hit_ID=Q8GU76; Match level="QueryCoverage=98%, HitCoverage=6%, E-value=3e-39, Identity=97%"; Hit description=MDR -like ABC transporter
VVAEQAIAQVRTVYSFVGESKALNSYSEAIQNTLKLGYKAGMAKGLGIGCTYGIACMSWALVFWYAGVFIRNGQSDGGKD

SEQ ID NO: 113305 - protein, 358 aa, Setaria italica
  Transcript Sequence Number=SeqID_47331
  Gene Ontology: Mol. function=zinc ion binding; Cellular component =intracellular
  Homolog annotation: Hit_ID=B6TH99; Match level="QueryCoverage=99%, HitCoverage=93%, E-value=2e-47, Identity=38%"; Hit description=B-box zinc finger family protein
  Pfam annotation: Domain name=zf-B_box; Domain location=44-91; Score =50.8; E_value=5.1e-12; Accession=PF00643.16; Description=B-box zinc finger
EAALCAACDEEVHAANKLAGKHQRVPLLSDADAAAGPTAAAAAPAVPKCDICQEASGYFFCLEDRALLCRDCDVAIHTVNSFVSVHQRFLLTGVQVGLDPADPVPPIADKHVNAAGGSAHQPAKHLPRRSPTVQFSGEGSASVPSKNVTNGGYARQNSVPTAKTGVVDWTMHNSAIQSVESPPKYMSEESPTLLQSSQTTAFSNQINSDSDRAYNLPFSGGNGSDSLPDWPVDEFFNNSEYSPNFSFVEHGSSKSDNAKLGSAGGSPQCRLAEGFVAEELLGQVPGLVNDEYMSRVPENSWTVPEVPSPPTASGLNWHGNLHFPAYDSTMFVPEISSLQGSQNQFAVPCGFKRPRRQY

SEQ ID NO: 113306 - protein, 109 aa, Setaria italica
  misc_feature (92)..(92): Xaa can be any naturally occurring amino acid
  Transcript Sequence Number=SeqID_47332
  Gene Ontology: Mol. function=receptor activity; Cellular component =extracellular region
  Homolog annotation: Hit_ID=Q6H663; Match level="QueryCoverage=95%, HitCoverage=35%, E-value=1e-29, Identity=61%"; Hit description =Receptor-like protein kinase-like
  Pfam annotation: Domain name=DUF26; Domain location=15-67; Score =62.6; E_value=1.5e-15; Accession=PF01657.9; Description=Domain of unknown function DUF26
PWAPAGYKVASSGSVRGLAQCLGDLAAADCTACLAQAAGQLKGTCGNALAADVYLAQCYVRYWADGYYFRPTQDYSQDDIGRTLAIVVGIMXGLALFVVFISFLRKTCN

SEQ ID NO: 113307 - protein, 93 aa, Setaria italica
  Transcript Sequence Number=SeqID_47333
  Subcellular localization annotation: CTP_CleavageSite=24; ConfidenceScore=5.42e-01
EFFLTIFASFQLLPFSNSNIFISRATNSRSRKHNKKEGKRNTQKNSTLFIPRIIIYTMAVGTSNPRGEKEKKKKKSQNSEEFSKKSTKPGSRW

SEQ ID NO: 113308 - protein, 95 aa, Setaria italica
  Transcript Sequence Number=SeqID_47334
  Gene Ontology: Mol. function=nucleoside-triphosphatase activity; Cellular component=peroxisome; Biological process=peroxisome organization and biogenesis
  Homolog annotation: Hit_ID=B9RV01; Match level="QueryCoverage=69%, HitCoverage=5%, E-value=6e-10, Identity=49%"; Hit description =Peroxisome biogenesis factor, putative
MSGGGMEVEVRVVGGARSCFVALPLHLIHALERTSASGDLPPVLALDLRGPAGGRWSLAWSGAASRSRAIEVAQELAECISLPDGTIAQLSRNPF

SEQ ID NO: 113309 - protein, 109 aa, Setaria italica
  Transcript Sequence Number=SeqID_47335
  Gene Ontology: Mol. function=solute:hydrogen antiporter activity; Cellular component=integral to membrane; Biological process =regulation of pH
  Homolog annotation: Hit_ID=B9INS2; Match level="QueryCoverage=97%, HitCoverage=12%, E-value=3e-10, Identity=31%"; Hit description =Cation proton exchanger
  Subcellular localization annotation: CTP_CleavageSite=56; ConfidenceScore=5.30e-01
RACYDNNLVNSQGMFLGDQPLRFSLPLLLVQVSVILVLSAAAHVVLRRLGQSRFVTHMLVGVFLGPTVLGRSETFRGVLFSERGTYILESVSLVALILFLFSMGVKTDL

SEQ ID NO: 113310 - protein, 104 aa, Setaria italica
  Transcript Sequence Number=SeqID_47336
  Subcellular localization annotation: CTP_CleavageSite=37; ConfidenceScore=5.31e-01
MISGNVEHTVGEASQSSPYGMYARNHFSNFAGVRSLRSESSNSVSEKQPGTCPESSEALSNDFGSSVFHQQQNAFVSKLLDHSVAEDTSYSPRDKISFNILLVL

SEQ ID NO: 113311 - protein, 70 aa, Setaria italica
  Transcript Sequence Number=SeqID_47337
  Subcellular localization annotation: CTP_CleavageSite=31; ConfidenceScore=5.10e-01
DRSPCPHSAGTASSTTKLRREGRRGAILKPRAASRPERRHACGARAPSPRHPPLFPPHRKSGEGRGRGGG

SEQ ID NO: 113312 - protein, 145 aa, Setaria italica
  Transcript Sequence Number=SeqID_47338
  Gene Ontology: Mol. function=metal ion binding; Biological process =metal ion transport
  Homolog annotation: Hit_ID=Q9S770; Match level="QueryCoverage=68%, HitCoverage=13%, E-value=3e-13, Identity=51%"; Hit description =F18B13.8 protein
DDTELSSPSGSKKFDSRLTVGQPGDQGEERTSFTYGGTHVLGATGAMGLTLGDQNFHGTPALLPVMRFGGQRPVGPGVPSIGMALPGFVSQQQLGLSNSEMTWLPILTGASGALGAPYGSPYISMDGSYYSRPSEQASSSGSIGT

SEQ ID NO: 113313 - protein, 353 aa, Setaria italica
  Transcript Sequence Number=SeqID_47339
  Gene Ontology: Mol. function=protein dimerization activity; Cellular component=endoplasmic reticulum lumen; Biological process=proteolysis
  Homolog annotation: Hit_ID=Q8H3C9; Match level="QueryCoverage=96%, HitCoverage=76%, E-value=1e-153, Identity=78%"; Hit description=IAA -amino acid hydrolase ILR1-like 7
  Pfam annotation: Domain name=M20_dimer; Domain location=119-227; Score=39.9; E_value=9.8e-09; Accession=PF07687.6; Description =Peptidase dimerisation domain
  Pfam annotation: Domain name=Peptidase_M20; Domain location=16-332; Score=226.0; E_value=9.8e-65; Accession=PF01546.20; Description =Peptidase family M20M25M40
  Pfam module annotation: Pfam domain module=M20_dimer::Peptidase_M20; Domain location=119-227::16-332
GVVATIAGGGDGPVVALRADMDALPLQELVDWEHKSKESGKMHACGHDAHTTMLLGAAKLLHSRKDDLKGTVKLVFQPAEEGYAGAFHVLREGVLDDVSAIFGLHVDPSLPVGAVASRPGPFLAASGRFLVTVTGKGGHAAGPQDAVDPIVAASSAIVNLQLLVAREIDPLQAAVVSVTFMKGGHAHNVIPELVSFGGTLRSLTTEGFSYLKKRIKEIIEAHAIVHRCTASVDFMEEQLRPYPATVNDEGMYHHAKEVAETMLGQDNVRRGTPLMAAEDFSFYAQKFAGAFFMIGVRNKTMEAVHPLHSPYFVIDEDVLPVGAAFHASVAIEYLNKHAAMANGTGHRHLLIAL

SEQ ID NO: 113314 - protein, 47 aa, Setaria italica
  Transcript Sequence Number=SeqID_47340
PLILTGSYFDRAGRTSPDRHHAGRLLGLDGAGPAVRRQRGRRRRRAG

SEQ ID NO: 113315 - protein, 129 aa, Setaria italica
  Transcript Sequence Number=SeqID_47341
  Homolog annotation: Hit_ID=Q9LMU3; Match level="QueryCoverage=97%, HitCoverage=33%, E-value=6e-31, Identity=50%"; Hit description =F2H15.8 protein
KAEGPAGWVGNLFVFDGRLSLPPATFRRQLSQEEEAAGAAAVEERWVGRCYTCGSEVVELRHRNCANIDCNRLYLCCGWCAEELAGCCCSDCKAAPRLRPLLPGHQRYLKWHVYRDGFLTAHRRGRRCC

SEQ ID NO: 113316 - protein, 97 aa, Setaria italica
  Transcript Sequence Number=SeqID_47342
KNMNTYVCAYVYRTYAKTRMDDDDVRGGSHTSPSRPWTCGPSGAWGSCLGQVTETPSWTRSTPIIVLCVCYIHVRSHAWLAICYIIFFVCLDKNRSP

SEQ ID NO: 113317 - protein, 166 aa, Setaria italica
  misc_feature (117)..(117): Xaa can be any naturally occurring amino acid
  Transcript Sequence Number=SeqID_47343
  Gene Ontology: Mol. function=aspartic-type endopeptidase activity; Biological process=DNA integration
  Homolog annotation: Hit_ID=Q7XM33; Match level="QueryCoverage=98%, HitCoverage=12%, E-value=8e-65, Identity=71%"; Hit description =OSJNBa0083I11.5 protein
  Pfam annotation: Domain name=zf-CCHC; Domain location=9-26; Score =28.3; E_value=1.1e-05; Accession=PF00098.15; Description=Zinc knuckle
GKHRPPRDDTCRNCGRLGHWTKDCRQPRRGQAHVALAEEEEPALLLAHASIELTPAASAAAVLLHLDEPRAHAFLGDGFSNDRTEGWCLDTGATQHMTGRREFFTELDSSIRGTVKXFGDASGVEIKGVGSVIFTAESGEHRLLTGVYYIPALRNSIISLGQLEEN

SEQ ID NO: 113318 - protein, 58 aa, Setaria italica
  Transcript Sequence Number=SeqID_47344
  Subcellular localization annotation: CTP_CleavageSite=24; ConfidenceScore=5.36e-01
SPYEWLGFYAGSPSLSQPPSSFIRAMLKQHRLTGRVLGMSMCSLSILLPSWFAFCSDI

SEQ ID NO: 113319 - protein, 81 aa, Setaria italica
  Transcript Sequence Number=SeqID_47345
  Gene Ontology: Cellular component=integral to membrane; Biological process=regulation of transcription
  Homolog annotation: Hit_ID=B9SIS5; Match level="QueryCoverage=95%, HitCoverage=40%, E-value=9e-17, Identity=55%"; Hit description =Protein pof4, putative
  Pfam annotation: Domain name=Elongin_A; Domain location=25-81; Score=- 2.0; E_value=0.0049; Accession=PF06881.3; Description=RNA polymerase II transcription factor SIII
MESGRKPRSLVDLCVQKVIDNLRYVGHVDGIETELLKRILPHCTLEQLTRIENRTQMDLSPITDPLWRRFYQKEFGEDHTN

SEQ ID NO: 113320 - protein, 214 aa, Setaria italica
  misc_feature (108)..(108): Xaa can be any naturally occurring amino acid
  misc_feature (172)..(172): Xaa can be any naturally occurring amino acid
  Transcript Sequence Number=SeqID_47346
  Gene Ontology: Cellular component=integral to membrane; Biological process=regulation of transcription
  Homolog annotation: Hit_ID=B9SIS5; Match level="QueryCoverage=64%, HitCoverage=70%, E-value=4e-28, Identity=45%"; Hit description =Protein pof4, putative
  Pfam annotation: Domain name=Elongin_A; Domain location=25-141; Score= 57.7; E_value=4.6e-14; Accession=PF06881.3; Description=RNA polymerase II transcription factor SIII
MESGRKPRSLLDLCVQKVIDNLRYVGHVDGIETELLKRILPHCTLEQLTRIENRTQMDLSPITDPLWRRFYQKEFGEDHTNLVIKRMKEAKGKARYTWKELFKAKTEXQKEVEDRMLEKITKKFQAEKAEKQSKQIKLCSKVPPSSKRSFFGGGGPSSLSNSNYKSPILKKXARMEANSRARLQSAIQKNTFQRSSQQRTTSLSGQPVRTTTIH

SEQ ID NO: 113321 - protein, 238 aa, Setaria italica
  Transcript Sequence Number=SeqID_47347
  Gene Ontology: Cellular component=integral to membrane; Biological process=regulation of transcription
  Homolog annotation: Hit_ID=B9SIS5; Match level="QueryCoverage=57%, HitCoverage=70%, E-value=1e-28, Identity=46%"; Hit description =Protein pof4, putative
  Pfam annotation: Domain name=Elongin_A; Domain location=25-141; Score= 58.7; E_value=2.2e-14; Accession=PF06881.3; Description=RNA polymerase II transcription factor SIII
MESGRKPRSLVDLCVQKVIDNLRYVGHVDGIETELLKRILPHCTLEQLTRIENRTQMDLSPITDPLWRRFYQKEFGEDHTNLVIKRMKEAKGKARYTWKELFKAKTERQKEVEDRMLEKITKKFQAEKAEKQSKQIKLCSKVPPSSKRSFFGGGGPSSLSNSNYKSPILKKARMEANSRARLQSAIQKNTFQRSSQQRTTSLSGQPVRTTTIHRPNSTITITKPIGSNRQIQNSRPKF

SEQ ID NO: 113322 - protein, 157 aa, Setaria italica
  Transcript Sequence Number=SeqID_47348
  Subcellular localization annotation: CTP_CleavageSite=52; ConfidenceScore=5.41e-01
LRTSSVTVVVPSSTGGGLVLPLATAGVLARSACMLATDSGRRRGCLPASHTRSSAFEELGLVDAIVLAMLILCLWLHYESATLGVRGCLAPLRGLGKDPSLFATSYSCDVGSCAARAPRQVRGEVLHLRTSRRGIFSFLHQHLQCFVVTAFAYCSRL

SEQ ID NO: 113323 - protein, 171 aa, Setaria italica
  Transcript Sequence Number=SeqID_47349
  Subcellular localization annotation: CTP_CleavageSite=78; ConfidenceScore=5.14e-01
GKKEPEPPRRSHRGDTGGAQRCCPRGPPNPPFFSLVAAGVARRKPVQPPGWRQWGLFRAGSSSSAICGFVVAQIPVARAAGVDGAARIHGQQRRIRRRHPRRVLDLRRLEQGATVGGACCRRRRGVPQRVATGKSAPGVGVGVRMQRGDDAAAVQRAASRAGAAQEQLQLR

SEQ ID NO: 113324 - protein, 78 aa, Setaria italica
  Transcript Sequence Number=SeqID_47350
TTEDSDRQSRGSWGHILYRVRAGVRRLVMSTHSLPTTQKQSSLPSSAVQQHNAQCKPAAALAYVQRQSFHHNGHAMAH

SEQ ID NO: 113325 - protein, 133 aa, Setaria italica
  Transcript Sequence Number=SeqID_47351
  Gene Ontology: Mol. function=hydrolase activity, hydrolyzing O -glycosyl compounds; Cellular component=cell wall; Biological process= carbohydrate metabolic process
  Homolog annotation: Hit_ID=Q2R4T2; Match level="QueryCoverage=90%, HitCoverage=26%, E-value=1e-49, Identity=78%"; Hit description =Glycosyl hydrolases family 18 protein, expressed
  Pfam annotation: Domain name=Glyco_hydro_18; Domain location=1-131; Score=-51.7; E_value=0.027; Accession=PF00704.20; Description =Glycosyl hydrolases family 18
  Subcellular localization annotation: CTP_CleavageSite=57; ConfidenceScore=5.18e-01
LAAFSSTVKSGSPSVKTILSIGTDEYKVDVSNAAFSRMASDKNLRGVFINSSVELARANGFDGIDMSWIFPATQMDMENLGVLLAEWRARIMEESATNSLSEPLLLTATLYFSNHLFGMPDSNLDYPIDDISN

SEQ ID NO: 113326 - protein, 206 aa, Setaria italica
  misc_feature (14)..(14): Xaa can be any naturally occurring amino acid
  Transcript Sequence Number=SeqID_47352
  Gene Ontology: Mol. function=hydrolase activity, acting on ester bonds; Biological process=lipid metabolic process
  Homolog annotation: Hit_ID=Q2QU40; Match level="QueryCoverage=39%, HitCoverage=20%, E-value=2e-22, Identity=62%"; Hit description=GDSL -motif lipase/hydrolase, putative
AARLAEHLGRCIFXVGMGSNDYLNNYFMPNYYDTARRYSPRDYAALLLQGYAAQITELYGLGARKFVVAGVGQIGCIPYELARMNNDNQPDTPSSVGSEDIAISIGIGGGGGGGGGGWGGGIGVGRSSSTSSNPNGGSGSGGGGSYSATNPTLTPADAGSGGACNETINSAIAIYNRGLLDMVKRFNGRGPQQLRGARLVFLDTVQ

SEQ ID NO: 113327 - protein, 191 aa, Setaria italica
  misc_feature (112)..(112): Xaa can be any naturally occurring amino acid
  Transcript Sequence Number=SeqID_47353
  Gene Ontology: Mol. function=DNA binding; Cellular component =intracellular; Biological process=translation
  Homolog annotation: Hit_ID=B9S0I6; Match level="QueryCoverage=75%, HitCoverage=19%, E-value=3e-57, Identity=75%"; Hit description=DNA binding protein, putative
  Pfam annotation: Domain name=Myb_DNA-binding; Domain location=49-94; Score=34.1; E_value=5.6e-07; Accession=PF00249.23; Description=Myb -like DNA-binding domain
MEKEVHEELNPLLQTIEFAPSTSDPNQKLDSAQPSDPNRKPAKKPTRQWAAWTRQEEENFFNALRQVGKNFEKITHRVQSKNKDQVRHYYYRLVRRMKKLLGPGFSLDAKNXKDTIAAMLRWWSLLEKFSCSASKLHLKPRRFKTFVEALGNQLLKDRNKSRRKCPRVDMCVSSPSPIVGKTPGNEAFSLL

SEQ ID NO: 113328 - protein, 161 aa, Setaria italica
  Transcript Sequence Number=SeqID_47354
  Gene Ontology: Mol. function=aspartic-type endopeptidase activity; Biological process=DNA integration
  Homolog annotation: Hit_ID=Q6ATH4; Match level="QueryCoverage=61%, HitCoverage=6%, E-value=3e-29, Identity=58%"; Hit description =Putative polyprotein
  Subcellular localization annotation: CTP_CleavageSite=47; ConfidenceScore=5.80e-01
MSTISTANSEMSGTLFATRTSSSPALGANTTPALGSPSMPTLSANTMASTGDSFIQGTAPLTVIHHYATVSVKCAVTPEMKNSNYSKWASYFKSMCGKFGLKPHIDVMLPPRPTDPYWDQADCCIRSWIFGSVDDSILDLAMEHDDQTAHNLWVAIEALFR

SEQ ID NO: 113329 - protein, 89 aa, Setaria italica
  Transcript Sequence Number=SeqID_47355
  Gene Ontology: Mol. function=amino acid transmembrane transporter activity; Cellular component=integral to membrane; Biological process=amino acid transport
  Homolog annotation: Hit_ID=B9GZX1; Match level="QueryCoverage=100%, HitCoverage=18%, E-value=2e-37, Identity=80%"; Hit description =Neutral amino acid transport protein
SDGYFADLAKLLGGAWLMWWVQAAAALSNMGMFVAEMSSDSYQLLGMAERGMLPAFFARRSRHGTPLVGILFSASGVLLLSSMSFQEIV

SEQ ID NO: 113330 - protein, 177 aa, Setaria italica
  misc_feature (80)..(80): Xaa can be any naturally occurring amino acid
  Transcript Sequence Number=SeqID_47356
  Gene Ontology: Mol. function=hydrolase activity, hydrolyzing O -glycosyl compounds; Biological process=carbohydrate metabolic process
  Homolog annotation: Hit_ID=Q53NF0; Match level="QueryCoverage=96%, HitCoverage=43%, E-value=2e-58, Identity=63%"; Hit description =Cyanogenic beta-glucosidase, putative
  Pfam annotation: Domain name=Glyco_hydro_1; Domain location=2-175; Score=-281.4; E_value=0.00016; Accession=PF00232.10; Description =Glycosyl hydrolase family 1
PPYVSKSCFPGDSAREPYIVTHNIILAHAQAVALYRAKYQPSQRGQIGITVVTNWYVPNTDSAEDRKAVQRSLDYIYRVXDTIVHGSYPGTMTSYLGDRLPRFTPEQMALVKGSYDFIGVNYYTGYYTSAAAPPNGLEQTYDGDIRANTSGYRDGVPIGPPEFVSIFFNLPRRGLPS

SEQ ID NO: 113331 - protein, 179 aa, Setaria italica
  Transcript Sequence Number=SeqID_47357
  Gene Ontology: Mol. function=hydrolase activity, hydrolyzing O -glycosyl compounds; Biological process=carbohydrate metabolic process
  Homolog annotation: Hit_ID=Q53NF0; Match level="QueryCoverage=90%, HitCoverage=41%, E-value=6e-62, Identity=66%"; Hit description =Cyanogenic beta-glucosidase, putative
  Pfam annotation: Domain name=Glyco_hydro_1; Domain location=1-179; Score=-177.9; E_value=1e-09; Accession=PF00232.10; Description =Glycosyl hydrolase family 1
GSLRENIIKDYVDFAEVCFKEFGDRVKDWTTFNEPWTYAERGYSAGLFAPGRCSPHVSKSCLSGDSAREPYVVTHNILLAHAQAVALYRAKYQKVQGGQIGIAVVSHWFVPNTNSTADSFAVQRSLDFMYGWFLDPIVHGGYPATMIGYLGDRLPKFTAEQMTLVQRDYLTNLQYGRNK

SEQ ID NO: 113332 - protein, 67 aa, Setaria italica
  Transcript Sequence Number=SeqID_47358
  Gene Ontology: Mol. function=hydrolase activity, hydrolyzing O -glycosyl compounds; Biological process=carbohydrate metabolic process
  Homolog annotation: Hit_ID=Q7X9A9; Match level="QueryCoverage=88%, HitCoverage=11%, E-value=5e-13, Identity=54%"; Hit description=Beta -primeverosidase
FVKHAISTGVNVKGYFTWTFMDCFEWGDGYLDRFGLIFIDRLNDLKRYRKQSSMWVESFLRRKKTHY

SEQ ID NO: 113333 - protein, 176 aa, Setaria italica
  Transcript Sequence Number=SeqID_47359
  Gene Ontology: Mol. function=hydrolase activity, hydrolyzing O -glycosyl compounds; Biological process=carbohydrate metabolic process
  Homolog annotation: Hit_ID=A8TVQ9; Match level="QueryCoverage=82%, HitCoverage=28%, E-value=8e-52, Identity=63%"; Hit description=Beta -glucosidase G3
  Pfam annotation: Domain name=Glyco_hydro_1; Domain location=30-176; Score=-172.5; E_value=5.6e-10; Accession=PF00232.10; Description =Glycosyl hydrolase family 1
MGVGTGMAKGLLAAVLLAVLACGGAHAKFSRYSFPKDFVFGTGSAAYQYEGAYNEGGKGLSVWDNFTHIPGKIKNNDTGDVALDMYHRYKGDVQLLKDMNMDAFRFSIAWSRILPTGSLSGGINKKGVAFYNNLINEVIAKGMRPFVTIFHWDTPLALEEKYEGFLSENIVCVQFY

SEQ ID NO: 113334 - protein, 506 aa, Setaria italica
  Transcript Sequence Number=SeqID_47360
  Gene Ontology: Mol. function=hydrolase activity, hydrolyzing O -glycosyl compounds; Biological process=carbohydrate metabolic process
  Homolog annotation: Hit_ID=Q7X9A9; Match level="QueryCoverage=94%, HitCoverage=93%, E-value=1e-164, Identity=55%"; Hit description=Beta- primeverosidase
  Pfam annotation: Domain name=Glyco_hydro_1; Domain location=31-504; Score=655.2; E_value=6.1e-194; Accession=PF00232.10; Description =Glycosyl hydrolase family 1
MGPGTGMAPKRVLSALLLAALACNVAHAKFSRYSFPEGFVFGTGSASYQYEGAYKEGGKGPSIWDTFSHIPGKIKNNDTGDVADDMYHRYKEDVQLLKDMNMDAFRFSIAWTRILPTGSLSGGINKEGVAFYNNLINEVIANGLRPFVTLFHWDTPLALEAKYEGFLSENIIKDYVDFAEVCFKEFGDRVKDWTTFNEPWTYAQRGYAVGLFAPGRCSPYVSKSCFPGDSAREPYIVTHNIILAHAQAVALYRAKYQPSQRGQIGITVVTNWYVPNTDSAEDRKAVQRSLDYIYGWFLDTIVHGSYPGTMTSYLGDRLPRFTPEQMALVKGSYDFIGVNYYTGYYTSAAAPPNGLEQTYDGDIRANTSGYRDGVPIGPPEFVSIFFNYPEGLRELLLYTARRYNNPVIYVMENGIAEENNASIPLKEALKDGHRIEFHSKHLQFVNHAIRNGVKVKGYFTWTFMDCFEWGDGYLDRFGLIFIDRLNGLKRYRKQSSYWIENFLKRY

SEQ ID NO: 113335 - protein, 88 aa, Setaria italica
  Transcript Sequence Number=SeqID_47361
  Gene Ontology: Mol. function=protein serine/threonine kinase activity; Biological process=protein amino acid phosphorylation
  Pfam annotation: Domain name=LRR_1; Domain location=23-45; Score =10.7; E_value=2.7; Accession=PF00560.25; Description=Leucine Rich Repeat
  Pfam annotation: Domain name=LRR_1; Domain location=47-69; Score=8.5; E_value=7.2; Accession=PF00560.25; Description=Leucine Rich Repeat
  Pfam annotation: Domain name=LRR_1; Domain location=71-85; Score=3.2; E_value=75; Accession=PF00560.25; Description=Leucine Rich Repeat
  Pfam module annotation: Pfam domain module=LRR_1::LRR_1::LRR_1; Domain location=23-45::47-69::71-85
IIDYITNVMQGNLPGSVGSLANTLNALWLHANKISGTIPPEIGNLTNLMRLRLEQNYFAGNLPGTIGNLANLTSLSLSQNNLSGQIPL

SEQ ID NO: 113336 - protein, 118 aa, Setaria italica
  Transcript Sequence Number=SeqID_47362
  Subcellular localization annotation: CTP_CleavageSite=61; ConfidenceScore=5.48e-01
AGRSSELPALAAWTPGVQIRSPGSRRTCLGLIKRFTTAQTHFALLDFPFCLSKNNSVTSFSRMHGRRKQEGFLDFVFRIALSFRSYIVISSGKNISELFLSFFQFNQFHLICLDLSTI

SEQ ID NO: 113337 - protein, 103 aa, Setaria italica
  Transcript Sequence Number=SeqID_47363
PNRALQWPSLWAIANRSADQESYNVTLTGIVAAWQARTVPQQSTLHRSKHSHHCFQTVNLVYNKGTAVRPHVHLSLASCHSQTTIIQVSSSAPSTNILQVSLS

SEQ ID NO: 113338 - protein, 195 aa, Setaria italica
  Transcript Sequence Number=SeqID_47364
  Gene Ontology: Mol. function=calcium ion binding; Cellular component =flagellin-based flagellum; Biological process=ciliary or flagellar motility
  Homolog annotation: Hit_ID=Q0JC44; Match level="QueryCoverage=71%, HitCoverage=53%, E-value=6e-44, Identity=69%"; Hit description =Probable calcium-binding protein CML22
  Pfam annotation: Domain name=efhand; Domain location=154-182; Score =40.1; E_value=8.9e-09; Accession=PF00036.24; Description=EF hand
  Pfam annotation: Domain name=efhand; Domain location=62-90; Score =35.5; E_value=2.1e-07; Accession=PF00036.24; Description=EF hand
  Pfam annotation: Domain name=efhand; Domain location=98-126; Score =30.4; E_value=7.2e-06; Accession=PF00036.24; Description=EF hand
  Pfam module annotation: Pfam domain module=efhand::efhand::efhand; Domain location=154-182::62-90::98-126
  Subcellular localization annotation: CTP_CleavageSite=42; ConfidenceScore=5.69e-01
AAFPTSPPPILPSSGRESTITPTTSSPSTPPQPAPPSPKKMSSSPGQQQQAGSGGGKADSAELARVFELFDKNGDGRITREELEESLGKLGMSVPGDELASMIARIDANGDGCVDVEEFGELYRAIMAGDGGRAGGEGAGAGEEGAGGEDADEDMREAFRVFDANGDGYITVDELGAVLSSLGLKQGRTAEECRR

SEQ ID NO: 113339 - protein, 100 aa, Setaria italica
  Transcript Sequence Number=SeqID_47365
  Gene Ontology: Mol. function=calcium ion binding; Cellular component =flagellin-based flagellum; Biological process=ciliary or flagellar motility
  Homolog annotation: Hit_ID=B6SMJ0; Match level="QueryCoverage=68%, HitCoverage=30%, E-value=1e-21, Identity=77%"; Hit description =Calmodulin
  Pfam annotation: Domain name=efhand; Domain location=28-56; Score =40.1; E_value=8.9e-09; Accession=PF00036.24; Description=EF hand
  Pfam annotation: Domain name=efhand; Domain location=66-94; Score =37.5; E_value=5.2e-08; Accession=PF00036.24; Description=EF hand
  Pfam module annotation: Pfam domain module=efhand::efhand; Domain location=28-56::66-94
MSGDGGRAGGEGAGAGEEGAGGEDADEDMREAFRVFDANGDGYITVDELGAVLSSLGLKQGRTAEECRRMIGRVDRDGDGRVDFHEFRQMMRAGGLATLG

SEQ ID NO: 113340 - protein, 157 aa, Setaria italica
  Transcript Sequence Number=SeqID_47366
  Gene Ontology: Mol. function=protein serine/threonine kinase activity; Cellular component=extracellular region; Biological process=xenobiotic metabolic process
  Homolog annotation: Hit_ID=P33679; Match level="QueryCoverage=96%, HitCoverage=66%, E-value=1e-78, Identity=94%"; Hit description =Zeamatin
  Pfam annotation: Domain name=Thaumatin; Domain location=1-157; Score =292.5; E_value=9.2e-85; Accession=PF00314.9; Description=Thaumatin family
TGYERRTGRGSCRTGDCGGVLACTAYGRAPNTLAEFALNQFNNLDFFDISLIDGFNVPMNFLPDGGSGCSRGPRCAVDVNARCPAELRQDGVCNNACPVFKKDVYCCVGSAANSCGPTNYSRYFKGQCPDAYSYPKDDATSTFTCPAGTNYKVVFCP

SEQ ID NO: 113341 - protein, 253 aa, Setaria italica
  Transcript Sequence Number=SeqID_47367
  Gene Ontology: Mol. function=protein kinase activity; Cellular component=plastoglobule; Biological process=protein amino acid phosphorylation
  Homolog annotation: Hit_ID=B9SMA1; Match level="QueryCoverage=43%, HitCoverage=15%, E-value=3e-41, Identity=74%"; Hit description =Protein ABC1, mitochondrial, putative
FNPNYKVLGSSYPWIARKVLTDSSPKLRSTLQALLYKDGTFQIDRLESLLTESLRARTEQSLVRNQQEDVDSTRYAIKQVLSFTLTDQGAFVKDLLLQEIAKGIDALGVATLSSATSAAASRLPFAGGPSPLTSLDDEDVNNLRNLYRLLLLLSKVSQKENSSPSPGNNNAIENGGSTDELSLALYEMASLPEQEPVLSIIPELPPESQQQLLLLPTDLANRILSVPLALHEHSSNAKAPVPPLQHTNETLFN

SEQ ID NO: 113342 - protein, 122 aa, Setaria italica
  Transcript Sequence Number=SeqID_47368
  Homolog annotation: Hit_ID=B9STM5; Match level="QueryCoverage=84%, HitCoverage=20%, E-value=5e-26, Identity=54%"; Hit description =Pentatricopeptide repeat-containing protein, putative
  Pfam annotation: Domain name=PPR; Domain location=68-102; Score=37.0; E_value=7.6e-08; Accession=PF01535.12; Description=PPR repeat
RVSVVSLLSASAELEAVDEGRQGHAVAVSSGLEIDVILGSSMINFYCKVGLVEAAEAVFEQMEERDIVTWNLMIAGYFQDGQVDKAFDACRRMLETNLKFDCVTLASIIMACVKSCSMMVGT

SEQ ID NO: 113343 - protein, 87 aa, Setaria italica
  Transcript Sequence Number=SeqID_47369
  Gene Ontology: Mol. function=DNA-directed DNA polymerase activity; Biological process=DNA replication
  Homolog annotation: Hit_ID=B6T490; Match level="QueryCoverage=78%, HitCoverage=15%, E-value=1e-16, Identity=70%"; Hit description =Protein trpH
MGSKKKSKPCRSKKKAKTSADQAQALDYVRAWAHLAPPEPSAADADTDDFLPAQAARGGGGGDVLFELHSHSNHSDGFLSPTALVER

SEQ ID NO: 113344 - protein, 137 aa, Setaria italica
  misc_feature (79)..(79): Xaa can be any naturally occurring amino acid
  Transcript Sequence Number=SeqID_47370
  Gene Ontology: Mol. function=ATP-dependent helicase activity; Biological process=DNA protection
  Homolog annotation: Hit_ID=B9RLI9; Match level="QueryCoverage=91%, HitCoverage=10%, E-value=3e-37, Identity=56%"; Hit description=Dead box ATP-dependent RNA helicase, putative
  Pfam annotation: Domain name=DUF1998; Domain location=88-137; Score= -4.5; E_value=0.022; Accession=PF09369.2; Description=Domain of unknown function (DUF1998)
  Subcellular localization annotation: CTP_CleavageSite=12; ConfidenceScore=5.09e-01
MLKAYIPTSTCRTNRVKTTAQANDCTVTTKWFGFYRISKSSNKISDSVELNIPPYSFVSQAFWVRIPHSVKILVEERKXLQFRGGSHAASHALLNIVPLHMMCSTSDLGTECANPHETRGIPDRILLYDRHPGGIGY

SEQ ID NO: 113345 - protein, 69 aa, Setaria italica
  Transcript Sequence Number=SeqID_47371
  Gene Ontology: Mol. function=catalytic activity
LRSNYTAKPGTSGAPVLLARERLVVGVHSESARGCKFAVSVPTIKAALRGWLQIADENVSILAMLARIV

SEQ ID NO: 113346 - protein, 90 aa, Setaria italica
  Transcript Sequence Number=SeqID_47372
RYLHLSYVRLALSTLHSITNWQQRCSWCDIVVSFIAISINIIINAYGCMGILPSTIYGRDVKMYTKLHVLCQIIAKCSENFRCTYCNYSS

SEQ ID NO: 113347 - protein, 45 aa, Setaria italica
  misc_feature (1)..(3): Xaa can be any naturally occurring amino acid
  Transcript Sequence Number=SeqID_47373
XXXFFFFFKLTRCGNIFFILHCSELIYDSLDATNKSISLSTVHGP

SEQ ID NO: 113348 - protein, 95 aa, Setaria italica
  Transcript Sequence Number=SeqID_47374
YRLAGVRRRRRGALSPCRCRGLSRRRSWEPVPSSHGSEQACSSPPASCLHRDKYPLLICALLSSSLLQSQALATSLLTVVPACTSILPKPNLADP

SEQ ID NO: 113349 - protein, 89 aa, Setaria italica
  Transcript Sequence Number=SeqID_47375
  Subcellular localization annotation: CTP_CleavageSite=31; ConfidenceScore=5.31e-01
FLIHPHATSLRSCRSSSALTHVHPSISLHPLAAPSRACLSRPPMAQPHPTGLRPMLACRHCHRAHEAHPGAPLYSRGATIGKLYPYSSK

SEQ ID NO: 113350 - protein, 204 aa, Setaria italica
  Transcript Sequence Number=SeqID_47376
  Gene Ontology: Mol. function=phosphatidate cytidylyltransferase activity; Cellular component=membrane; Biological process =phospholipid biosynthetic process
  Homolog annotation: Hit_ID=B6TI87; Match level="QueryCoverage=100%, HitCoverage=55%, E-value=2e-99, Identity=91%"; Hit description =Phosphatidate cytidylyltransferase
  Pfam annotation: Domain name=CTP_transf_1; Domain location=1-198; Score=153.2; E_value=8e-43; Accession=PF01148.12; Description =Cytidylyltransferase family
  Pfam annotation: Domain name=SNARE_assoc; Domain location=55-149; Score=-28.6; E_value=0.086; Accession=PF09335.3; Description=SNARE associated Golgi protein
  Pfam module annotation: Pfam domain module=CTP_transf_1::SNARE_assoc; Domain location=1-198::55-149
VIAISLLLQRGNPRFAQLTSSVFGLFYCGYLPSFWVKLRSGLAAPALNTRIAYSWPILLGGQAHWTVGLVATLIAISSIIAADTSAFLCGRAFGRTPLTNISPKKTLEGALAGLAGCVLTTVLLSTFLRWPRSLLSATAYGILIFLGSLFGDLVESLIKRDAGVKDSGSLIPGHGGILDRVDSYVFTGALCYSFVRVALPLYGV

SEQ ID NO: 113351 - protein, 97 aa, Setaria italica
  Transcript Sequence Number=SeqID_47377
  Homolog annotation: Hit_ID=B6SSJ0; Match level="QueryCoverage=82%, HitCoverage=14%, E-value=2e-09, Identity=51%"; Hit description=Zinc finger, C3HC4 type family protein
MAADDAARSSRRMDLNLYLGLPRAPRARRPDLGSDLALGTPMLSSSSPSSSAASADAPPPEGEPLHPPYSPSRADLVRPPTPAHEPYNPFAPEALPP

SEQ ID NO: 113352 - protein, 142 aa, Setaria italica
  misc_feature (77)..(77): Xaa can be any naturally occurring amino acid
  Transcript Sequence Number=SeqID_47378
  Gene Ontology: Mol. function=RNA splicing factor activity, transesterification mechanism; Cellular component=spliceosome; Biological process=nuclear mRNA splicing, via spliceosome
  Homolog annotation: Hit_ID=B9RV85; Match level="QueryCoverage=97%, HitCoverage=7%, E-value=8e-55, Identity=64%"; Hit description=Pre -mRNA-processing-splicing factor, putative
MRSLSAEIAPPSQQRQQIAEIEKQSRETTQLTAVTTRTTNVHGDELIITTTSPYEQQAFASKTDWRVRAISATNLYXICVADLRTQIAGFLYGLSPQDNPQVKEIRCIAIPPQHGTHQMVTLPANLPEHEFLNDLEPLGWMH

SEQ ID NO: 113353 - protein, 120 aa, Setaria italica
  Transcript Sequence Number=SeqID_47379
  Gene Ontology: Mol. function=RNA splicing factor activity, transesterification mechanism; Cellular component=spliceosome; Biological process=nuclear mRNA splicing, via spliceosome
  Homolog annotation: Hit_ID=Q9SSD2; Match level="QueryCoverage=100%, HitCoverage=5%, E-value=2e-60, Identity=90%"; Hit description =F18B13.15 protein
DEDFCLPEDVEPLLKSTELYTDTTAAGISLLFAPKPFNMRSGRTRRAEDIPLVSEWFKEHCPPAYPVKVRVSYQKLLKCYVLNELHHRPPKAQKKKHLFRSLQATKFFQTTELDWAEAGL

SEQ ID NO: 113354 - protein, 2291 aa, Setaria italica
  misc_feature (391)..(391): Xaa can be any naturally occurring amino acid
  misc_feature (2233)..(2233): Xaa can be any naturally occurring amino acid
  Transcript Sequence Number=SeqID_47380
  Gene Ontology: Mol. function=RNA splicing factor activity, transesterification mechanism; Cellular component=spliceosome; Biological process=nuclear mRNA splicing, via spliceosome
  Homolog annotation: Hit_ID=B9RV85; Match level="QueryCoverage=99%, HitCoverage=97%, E-value=0.0, Identity=91%"; Hit description=Pre -mRNA-processing-splicing factor, putative
  Pfam annotation: Domain name=Mov34; Domain location=2055-2161; Score =58.5; E_value=2.5e-14; Accession=PF01398.13; Description=Mov34MPNPAD- 1 family
  Pfam annotation: Domain name=PRO8NT; Domain location=10-161; Score =417.2; E_value=2.6e-122; Accession=PF08082.3; Description=PRO8NT (NUC069), PrP8 N-terminal domai
  Pfam annotation: Domain name=PROCN; Domain location=347-756; Score =1098.1; E_value=0; Accession=PF08083.3; Description=PROCN (NUC071) domain
  Pfam annotation: Domain name=PROCT; Domain location=2167-2290; Score =306.7; E_value=4.7e-89; Accession=PF08084.3; Description=PROCT (NUC072) domain
  Pfam annotation: Domain name=RRM_4; Domain location=941-1034; Score =247.5; E_value=3.2e-71; Accession=PF10598.1; Description=RNA recognition motif of the spliceoso
  Pfam annotation: Domain name=U5_2-snRNA_bdg; Domain location=1164 -1299; Score=372.0; E_value=1.1e-108; Accession=PF10597.1; Description=U5-snRNA binding site 2 of PrP8
  Pfam annotation: Domain name=U6-snRNA_bdg; Domain location=1385-1557; Score=446.5; E_value=4.1e-131; Accession=PF10596.1; Description=U6 -snRNA interacting domain of PrP8
  Pfam module annotation: Pfam domain module=Mov34::PRO8NT::PROCN::PROCT ::RRM_4::U5_2-snRNA_bdg::U6-snRNA_bdg; Domain location=2055-2161::10 -161::347-756::2167-2290::941-1034::1164-1299::1385-1557
ASLGFVEAQKEDMPPEHVRKIIRDHGDMSSKKYRHDKRVYLGALKFVPHAVYKLLENMPMPWEQVRHVKILYHITGAITFVNEIPWVVEPIYLAQWGTMWIMMRREKRDRRHFKRMRFPPFDDEEPPLDYADNLLDVEPLEAIQLELDSEEDAAVYEWFYDHKPLMKTKLINGPSYRKWHLSLPIMATLYRLAGQLLSDLIDRNYFYLFDMESFFTAKALNMCIPGGPKFEPLYRDMEKGDEDWNEFNDINKLIIRQPLRTEYRIAFPHLYNNRPRKVRLGIYHTPMIMYIKTEDPDLPAFYYDPLINPITSTNKVDRRERKVTEEDDDEDFCLPEDVEPLLKSTELYTDTTAAGISLLFAPKPFNMRSGRTRRAEDIPLVSEWFKEHCPXPAYPVKVRVSYQKLLKCYVLNELHHRPPKAQKKKHLFRSLQATKFFQTTELDWAEAGLQVCKQGYNMLNLLIHRKNLNYLHLDYNFNLKPVKTLTTKERKKSRFGNAFHLCREILRLTKLVVDANIQFRLGNVDAFQLADGLQYIFSHVGQLTGMYRYKYRLMRQIRMCKDLKHLIYYRFNTGPVGKGPGCGFWAPMWRVWLFFLRGIVPLLERWLGNLLARQFEGRHSKGVAKTVTKQRVESHFDLELRAAVMHDVLDAMPEGIKQNKARTILQHLSEAWRCWKANIPWKVPGLPVPIENMILRYVKSKADWWTNVAHYNRERIRRGATVDKTVCRKNLGRLTRLWLKAEQERQHNYLKDGPYVTPEEAVAIYTTTVHWLESRKFSPIPFPPLSYKHDTKLLILALERLKESYSVAVRLNQLQREELGLIEQAYDNPHEALSRIKRHLLTQRAFKEVGIEFMDLYSYLIPVYEIEPLEKITDAYLDQYLWYEGDKRHLFPNWVKPADSEPPPLLVYKWCQGINNLQDVWDTSDGQCVVMLQTKFEKFFEKIDLTLLNRLLRLVLDHNIADYVTAKNNVVLSYKDMSHTNSYGLIRGLQFASFVVQYYGLVLDLLILGLTRASELAGPPQMPNEFLTYADTKIETRHPIRLYSRYIDKVHILFRFTHEEARDLIQRYLTEHPDPNNENMVGYNNKKCWPRDARMRLMKHDVNLGRSVFWDMKNRLPRSITTLEWENSFVSVYSKDNPNLLFSMCGFEVRILPKIRMTQEAFSNTKDGVWNLQNEQTKERTAIAFLRVDDEHMKVFENRVRQILMSSGSTTFTKIVNKWNTALIGLMTYFREATVHTQELLDLLVKCENKIQTRIKIGLNSKMPSRFPPVIFYTPKEIGGLGMLSMGHILIPQSDLRYSKQTDVGVTHFRSGMSHEEDQLIPNLYRYIQPWESEFIDSQRVWAEYALKRQEAQSQNRRLTLEDLEDSWDRGIPRINTLFQKDRHTLAYDKGWRVRTDFKQYQVLKQNPFWWTHQRHDGKLWNLNNYRTDVIQALGGVEGILEHTLFKGTYFPTWEGLFWEKASGFEESMKYKKLTNAQRSGLNQIPNRRFTLWWSPTINRANVYVGFQVQLDLTGIFMHGKIPTLKISLIQIFRAHLWQKIHESVVMDLCQVLDQELDALEIETVQKETIHPRKSYKMNSSCADILLFAAHRWQMSKPSLVSESKDLFDQKASNKYWIDVQLRWGDYDSHDIERYTRAKFMDYTTDNMSIYPSPTGVMIGIDLAYNLHSAFGNWFPGSKPLLQQAMNKIMKSNPALYVLRERIRKGLQLYSSEPTEPYLSSQNYGEIFSNQIIWFVDDTNVYRVTIHKTFEGNLTTKPINGAIFIFNPRTGQLFLKVIHTSVWAGQKRLGQLAKWKTAEEVAALVRSLPVEEQPKQIIVTRKGMLDPLEVHLLDFPNIVIKGSELQLPFQACLKIEKFGDLILKATEPQMVLYNIYDDWLKSISSYTAFSRIVLILRALHVNNEKAKMLLKPDKTIVTEPHHIWPTLNDEQWLKVECALRDLILSDYAKKNNVNTSALTQSEIRDIILGAEIAPPSQQRQQIAEIEKQSRETTQLTAVTTRTTNVHGDELIITTTSPYEQQAFASKTDWRVRAISATNLYLRVNHIYVNSDDIKETGYTYIMPKNILKKFICVADLRTQIAGFLYGLSPQDNPQVKEIRCIAIPPQHGTHQMVTLPANLPEHEFLNDLEPLGWMHTQPNEAPQLSPQDLTSHAKILEGNKQWDGEKCIILTCSFTPGSCSLTAYKLTPSGYEWGRSNKDNGSNPHGYLPTHYEKVQMLLSDRFLGFYMVPDNXPWNFNFMGVKHDPLMKYNMKLGMPRDFYHEDHRPTHFLEFSNIEEGEVAEGDREDTFS

SEQ ID NO: 113355 - protein, 211 aa, Setaria italica
  Transcript Sequence Number=SeqID_47381
  Gene Ontology: Mol. function=binding
  Homolog annotation: Hit_ID=B9SQW7; Match level="QueryCoverage=80%, HitCoverage=10%, E-value=3e-43, Identity=51%"; Hit description =Eukaryotic translation initiation factor 3 subunit, putative
MAPKAGRGKGRGGGGGGGKGDRRKKEEKVVPSVIDVTVVTPYESQVTLKGISTDRVLDVRKLLGSNVETCHLTNYSLSHVARGQRLEDVVEIVALKPCTLRIVEEEYATEEQAVAHVRRLLDIVACTTAFAKPRDGAAKHKSSKHGRPATPPSPPTPASTGAHGGGSGSGEGAPPISEAHDMAAIRPPPKLGEFYDFFSFAHLTPPVHFIR

SEQ ID NO: 113356 - protein, 123 aa, Setaria italica
  Transcript Sequence Number=SeqID_47382
  Pfam annotation: Domain name=PPR; Domain location=44-78; Score=7.8; E_ value=1.1; Accession=PF01535.12; Description=PPR repeat
  Pfam annotation: Domain name=PPR; Domain location=9-43; Score=29.2; E_ value=1.7e-05; Accession=PF01535.12; Description=PPR repeat
  Pfam module annotation: Pfam domain module=PPR::PPR; Domain location =44-78::9-43
FCFSCIVGVAYNTLIRHLSFLGKAYEACLVLHEVIEKGITPNDITDSLVADCLCREGKLLVALSYLKRSLENGLSRSAVSSIMRGLIAGSKLHELHTLVGWMLGQGFILDVYMYQELIIAFCR

SEQ ID NO: 113357 - protein, 78 aa, Setaria italica
  Transcript Sequence Number=SeqID_47383
  Subcellular localization annotation: CTP_CleavageSite=14; ConfidenceScore=5.29e-01
QSSASVSQAVINTMEQAKKQPRRACNQRVTALLLSARCSSYITARPTLYRDTALAISTKLYSAYEQQSNGSSLPIFQH

SEQ ID NO: 113358 - protein, 72 aa, Setaria italica
  Transcript Sequence Number=SeqID_47384
FSHLSHVSCDFNLECWISFVITPLICSLFNPLGRNTTRICNKMCPQSFEFFQAQCYIPTDLWALEVILYEYP

SEQ ID NO: 113359 - protein, 48 aa, Setaria italica
  Transcript Sequence Number=SeqID_47385
  Gene Ontology: Mol. function=protein serine/threonine kinase activity; Cellular component=plasma membrane; Biological process =protein amino acid phosphorylation
  Homolog annotation: Hit_ID=C5DB54; Match level="QueryCoverage=97%, HitCoverage=11%, E-value=4e-16, Identity=74%"; Hit description=ATP binding / kinase/ protein kinase/ protein serine/threonine kinase/ protein-tyrosine kinase
HPNLVKLIGYCCEDDHRVLVYEFMPLGSVESHLFSRVMVPLQWSIRMK

SEQ ID NO: 113360 - protein, 114 aa, Setaria italica
  Transcript Sequence Number=SeqID_47386
  Gene Ontology: Mol. function=protein serine/threonine kinase activity; Cellular component=plasma membrane; Biological process =protein amino acid phosphorylation
  Homolog annotation: Hit_ID=B9SBN3; Match level="QueryCoverage=100%, HitCoverage=28%, E-value=1e-25, Identity=57%"; Hit description =Protein kinase APK1B, chloroplast, putative
MGNCWFKGNPYFNRVSSNAFAAESPKIQSPSERIGKEDSQLPSNPKEVEALRKDTARNPLIAFTFEELKRITKNFRQDSLLGGGGFGRVYRGYITKDLREGLEIEEPLRVAVKV

SEQ ID NO: 113361 - protein, 121 aa, Setaria italica
  Transcript Sequence Number=SeqID_47387
  Gene Ontology: Mol. function=protein serine/threonine kinase activity; Cellular component=plasma membrane; Biological process =protein amino acid phosphorylation
  Homolog annotation: Hit_ID=B9SBN3; Match level="QueryCoverage=76%, HitCoverage=23%, E-value=3e-36, Identity=80%"; Hit description =Protein kinase APK1B, chloroplast, putative
MGRPRHRQRGVGRTKSGFLPMPPNQGGGFGRVYKGYITKDLREGLEIEEPLRVAVKVHDGDNSLQGHREWLAEVIFPGQLSHPNLVKLIGYCCEDDHRVLVYEFMPLGSVESHLFSKWNAD

SEQ ID NO: 113362 - protein, 345 aa, Setaria italica
  misc_feature (177)..(177): Xaa can be any naturally occurring amino acid
  Transcript Sequence Number=SeqID_47388
  Gene Ontology: Mol. function=electron carrier activity; Cellular component=membrane; Biological process=oxidation reduction
  Homolog annotation: Hit_ID=B6U863; Match level="QueryCoverage=91%, HitCoverage=60%, E-value=1e-139, Identity=79%"; Hit description =Cytochrome P450 CYP81A4
  Pfam annotation: Domain name=p450; Domain location=42-345; Score= -106.4; E_value=1.6e-06; Accession=PF00067.14; Description=Cytochrome P450
MEPAAYVAAILSFLFLFSLHRLLGSDRHRKINGKNKEMQRLPPSPPAIPVLGHLHLLGKPIHAALARLAERYGPVFSLRLGSRETVVVSSAAHARECFTEHDVCFANRPRFPSLLLISFGGATLPMCGYGSYWRNLRRVATVQLLSAHRVSCMLPVISVEVRAMARRMFRSAAAAPXGAARVELKRRLFEVSLSALMEVIARTKTSRTEADADTDISPEAQEFMKALDVFIPLLSASNKWDYLPVLRWFDVFGVRSKILAAVTARDAFLRRLIDAERRRLDDDESEKNKSMIGVLLSLQKSEPEVYTDTTIMALCSSMFSGGAETTSTTAEWAMSLLLNHPEALK

SEQ ID NO: 113363 - protein, 109 aa, Setaria italica
  Transcript Sequence Number=SeqID_47389
  Homolog annotation: Hit_ID=Q10G99; Match level="QueryCoverage=79%, HitCoverage=11%, E-value=7e-14, Identity=52%"; Hit description =Tesmin/TSO1-like CXC domain containing protein, expressed
STCSEPPLSTAGYSSRLHNSQSPIKADVLLSYFDTCAAEMIVGDGSANIQEVGSSCISSVKVVSPNKKRVSPLHTGTGLSPIGRSGRKLVLKSIPSFPSLTGDADSEPH

SEQ ID NO: 113364 - protein, 92 aa, Setaria italica
  Transcript Sequence Number=SeqID_47390
  Gene Ontology: Mol. function=hydrolase activity, acting on ester bonds; Biological process=lipid metabolic process
EAAGSYAQACIAVAKELGHPVIDIWTKMQEFPDWQTSALSDGLHFTPTGNKILFDEVVQTLAGIGFSKESLPYDLPLYPEIDPKDPMKAFGA

SEQ ID NO: 113365 - protein, 85 aa, Setaria italica
  Transcript Sequence Number=SeqID_47391
  Homolog annotation: Hit_ID=B6T0U0; Match level="QueryCoverage=82%, HitCoverage=81%, E-value=7e-16, Identity=62%"; Hit description=Wound induced protein
MAAAAKASWMVAMSVGAVEALKDQAGLCRWNYALRSIHRMAKANAPSLAQAKKLAPATAAAERRRADKAEEGMRTVMYLSCWGPN

SEQ ID NO: 113366 - protein, 107 aa, Setaria italica
  Transcript Sequence Number=SeqID_47392
  Gene Ontology: Mol. function=protein binding
  Homolog annotation: Hit_ID=B6TAI6; Match level="QueryCoverage=95%, HitCoverage=23%, E-value=3e-39, Identity=79%"; Hit description=AtGRF2
  Pfam annotation: Domain name=WRC; Domain location=1-43; Score=76.3; E_ value=1.1e-19; Accession=PF08879.2; Description=WRC
SGRCRRTDGKKWRCSKEAMADHKYCERHINRNRHRSRKPVENQPKKTAKDTPAAAAAGSLPCAVSQGSLKKAKVNDSKPGTVSYWTDSLNRTMLSKEKAKPTNRRQQ

SEQ ID NO: 113367 - protein, 132 aa, Setaria italica
  Transcript Sequence Number=SeqID_47393
  Homolog annotation: Hit_ID=B6SI40; Match level="QueryCoverage=95%, HitCoverage=31%, E-value=2e-36, Identity=63%"; Hit description=mTERF family protein
CQARILKSTLGCHESEIATAVSKLPTILGISEQSLHRKIQFLVNEVGLEPQYILQRPALFTYSLEKRLVPRHCVMKVLQAKGFLISNTSFNTFAQYGEETFKLRYIDSHKDSVPGLADAYATACGGVVPSAV

SEQ ID NO: 113368 - protein, 50 aa, Setaria italica
  Transcript Sequence Number=SeqID_47394
  Gene Ontology: Mol. function=serine-type carboxypeptidase activity; Cellular component=extracellular region; Biological process =proteolysis
  Homolog annotation: Hit_ID=B6T4S1; Match level="QueryCoverage=100%, HitCoverage=10%, E-value=9e-22, Identity=94%"; Hit description=SCPL33
KQVAGRFVEYHGMTMVTIRGAGHLVPLNKPAEGLALIDTFLRGKQLPSQR

SEQ ID NO: 113369 - protein, 132 aa, Setaria italica
  Transcript Sequence Number=SeqID_47395
KSIFRNLMSKNDFHMTLHMPSTISTFMYFIIQLAYGNHHLHENSSQKISINCKTSCRSYLSFDSCFLNIATSIGYLCGAIPTNILVFLHQYYAMLKFLFGTYCNFSLINLLLITLQHLCPFFPFFFSCSCSC

SEQ ID NO: 113370 - protein, 160 aa, Setaria italica
  Transcript Sequence Number=SeqID_47396
LGIILGPALSPSIARGIAEGHLNPITMKAFDQYSRIISLIDFLDTSAFEVANQCGSQEISTQKSCITILSSQESNENMIVDEISSDGKKCKKGVLALSKFLLQKQSPRVEGNEVEPKNIPENNPFKKRKLPTDKGQEVGQNELVLDLQDEKSSLSCSSLF

SEQ ID NO: 113371 - protein, 78 aa, Setaria italica
  Transcript Sequence Number=SeqID_47397
FQKQMGKTSIHSFCSNTNVKIIMCPIMFIALDLKKRNNSLQNITLVPIVGGSRWDLFQPTPTFLDSKLLFLLAQRRER

SEQ ID NO: 113372 - protein, 66 aa, Setaria italica
  Transcript Sequence Number=SeqID_47398
GKSLNAIKGAQDKIRHAASERRQSLQLQLLEDIANQLQGIKDAAEAGQHIYCAPPKSSKKARNHIW

SEQ ID NO: 113373 - protein, 110 aa, Setaria italica
  misc_feature (71)..(71): Xaa can be any naturally occurring amino acid
  Transcript Sequence Number=SeqID_47399
YCLNCSYDVHVVDDICFSTEAKGLIGRSFSDATMQAEKLQTRAAADDLLGKSLNAIKGAQDKIRHAASERXQSLQLQLLEDIANQLQGIKDAAEAGRHIYCAPPKSSKKS

SEQ ID NO: 113374 - protein, 306 aa, Setaria italica
  Transcript Sequence Number=SeqID_47400
SEREARALRKEVDAYRRLLGLGPAQDAGCDEEEEDDDDQEMVTPHSMLMSEGEPSSSRSVDASLIMQQRLGNDSGFSFKTPFFREQSVVPPVIGDRGNGGSEDGIAVQTPAKATAVQSRLELSSTEDEDGAETEDDGAETVEILPLSARSQDLDQGCDLHVDAAPGMESTKEQTPHGFQEVGCGGIDKIGRDHTGSENDANVYDVHVVDDICFSTEAKGLIGRSFSDATMQAEKLQTRAAADDLLGKSLNAIKGAQDKIRHAASERRQSLQLQLLEDIANQLQGIKDAAEAGRHIYCAPPKSSKKS

SEQ ID NO: 113375 - protein, 156 aa, Setaria italica
  Transcript Sequence Number=SeqID_47401
  Gene Ontology: Mol. function=DNA binding; Cellular component=nucleus
  Homolog annotation: Hit_ID=Q6H976; Match level="QueryCoverage=75%, HitCoverage=13%, E-value=8e-10, Identity=37%"; Hit description =STYLOSA protein
NQAGNNLTLKGWPLTGLDQLRSGILQQKSFMQSPQQFQQLQFLTPQQQQQLLLHAQQNIPSSIGDVDTRRLRMLLNNRNVVLGQDGQTNSGGDIIPNLGSPGQSGGSRNDIDMLIKKKLALLQQQQQQQQSQQHSHSQQQLQQPALSGQQSQSFKP

SEQ ID NO: 113376 - protein, 33 aa, Setaria italica
  Transcript Sequence Number=SeqID_47402
PQSYALTAHSIGHKPEFRKFDATNLHSLNHSLK

SEQ ID NO: 113377 - protein, 480 aa, Setaria italica
  Transcript Sequence Number=SeqID_47403
  Gene Ontology: Mol. function=molecular_function; Cellular component =endoplasmic reticulum membrane; Biological process=vesicle docking during exocytosis
  Homolog annotation: Hit_ID=Q851W1; Match level="QueryCoverage=97%, HitCoverage=74%, E-value=0.0, Identity=83%"; Hit description=SEC1 family transport protein SLY1
  Pfam annotation: Domain name=Sec1; Domain location=1-458; Score=98.9; E_value=1.8e-26; Accession=PF00995.15; Description=Sec1 family
IRIYVLDLRKEGLFSLAQPRAYVALNDPAAADADITSLVDAVALGLFCVFATLGVVPVIRCARGGPAEMVAAALDARFRDHLLAKPNLFTEAASAAVASFQRPVLCLFDRNFELSVGVQHDWSYRPLVHDVLGLKLNKLKLPAEKYELDDSDKFWVTNSWSPFPKVAEEIEAQLAKYKQDVDEVNQRTGGGSGVEFDGTDLIGNTRHLMNAVNSLPELTERKKMIDKHTNIATALLGHIKERSLDGYCDCENDMLVNGTVDRNTLLSLLKGKGTKEDKLRLAVTYLLSFETPPSSELEQVEAALRESEVDMSAFQYVKRIKALNTQFAAASGTATKSNIVDWAEKLYGQSLSAVTAGVKNLLSDGRQLALTRTVEALMEGKPNPEVDDYLLFDPRAPRSGTGGQFKGPFREAAVFMIGGGNYIEYRSLMELEQRTQPSKHVIYGATEILSGAEFIHQLAELGQKAGLGGGSSNIPPGAAQ

SEQ ID NO: 113378 - protein, 512 aa, Setaria italica
  misc_feature (205)..(205): Xaa can be any naturally occurring amino acid
  Transcript Sequence Number=SeqID_47404
  Gene Ontology: Mol. function=carbon-nitrogen ligase activity, with glutamine as amido-N-donor; Cellular component=chloroplast
  Homolog annotation: Hit_ID=B6UCR6; Match level="QueryCoverage=99%, HitCoverage=86%, E-value=0.0, Identity=87%"; Hit description=Toc64
  Pfam annotation: Domain name=Amidase; Domain location=1-363; Score= -6.1; E_value=4.8e-11; Accession=PF01425.13; Description=Amidase
  Pfam annotation: Domain name=TPR_1; Domain location=396-429; Score =25.0; E_value=0.0003; Accession=PF00515.20; Description =Tetratricopeptide repeat
  Pfam annotation: Domain name=TPR_1; Domain location=430-463; Score =28.2; E_value=3.5e-05; Accession=PF00515.20; Description =Tetratricopeptide repeat
  Pfam annotation: Domain name=TPR_1; Domain location=464-497; Score =29.7; E_value=1.2e-05; Accession=PF00515.20; Description =Tetratricopeptide repeat
  Pfam annotation: Domain name=TPR_2; Domain location=396-429; Score =24.6; E_value=0.0004; Accession=PF07719.9; Description =Tetratricopeptide repeat
  Pfam annotation: Domain name=TPR_2; Domain location=430-463; Score =22.4; E_value=0.0018; Accession=PF07719.9; Description =Tetratricopeptide repeat
  Pfam annotation: Domain name=TPR_2; Domain location=464-497; Score =26.0; E_value=0.00015; Accession=PF07719.9; Description =Tetratricopeptide repeat
  Pfam module annotation: Pfam domain module=Amidase::TPR_1::TPR_1::TPR_ 1::TPR_2::TPR_2::TPR_2; Domain location=1-363::396-429::430-463::464 -497::396-429::430-463::464-497
LTSFGSLEWAKTHDAETQTSPVVSALVDGGAICVGKTVIDEMAYSIHGENKHFDTPTNPAAPERVPGGCSSGSAVAVAGGMVDFALGIDSIGGVRIPGAYCGVLAFRPSHAVSSGGVIPVAPSLDTIGWFARDPNVLRRVGHLLLRLPYADIRPPRHFYIADDCFELSKIPARRLTQVVTKSVEKLFGRQVTRVNLENYLASKIXSSLRNYSNGHKNGDSKFPSLLALCNAMRSLHKREFKDQHMEWINSVKPAVDARIVSNLSEDGDSDIDACQDARNKARLALGALLKDDGILVIPTALGCPPKLNAKELSSESYNSQTLCLSSLASMSGCCQVSIPLGTHDKCPISVSFIARHGGDRFLLDTVQTMYATIQEQVEILAKSNVSSKQAMNEEAAETAKEKGNAAFKEKQWQKAVNLYTEAIKLNGKVATYYSNRAAAFLELTNYRQAEADCTNAIDLEPKSVKAYLRRGTAREMMGYYKEAVEDFNHALVLEPMNKTAGVAVNRLKKLFA

SEQ ID NO: 113379 - protein, 93 aa, Setaria italica
  misc_feature (46)..(46): Xaa can be any naturally occurring amino acid
  misc_feature (67)..(67): Xaa can be any naturally occurring amino acid
  Transcript Sequence Number=SeqID_47405
  Gene Ontology: Mol. function=DNA-3-methyladenine glycosylase I activity; Biological process=base-excision repair
  Homolog annotation: Hit_ID=B9R7Q5; Match level="QueryCoverage=68%, HitCoverage=18%, E-value=3e-17, Identity=65%"; Hit description=DNA-3- methyladenine glycosylase, putative
  Pfam annotation: Domain name=Adenine_glyco; Domain location=6-86; Score=-51.8; E_value=6.4e-08; Accession=PF03352.5; Description =Methyladenine glycosylase
MDAIRYCSQNGVYHKELQVVREFGSFNNYYWSFVNHKPITNCFFYXLRQISTKTPKVEAISKDLMRXGFQCVGPTTIYSFCPSCRLDRLQPFI

SEQ ID NO: 113380 - protein, 285 aa, Setaria italica
  misc_feature (39)..(39): Xaa can be any naturally occurring amino acid
  Transcript Sequence Number=SeqID_47406
  Gene Ontology: Mol. function=phosphoinositide binding; Biological process=cell communication
  Homolog annotation: Hit_ID=B4FAI4; Match level="QueryCoverage=94%, HitCoverage=52%, E-value=1e-133, Identity=85%"; Hit description=PX domain containing protein
  Pfam annotation: Domain name=Vps5; Domain location=30-277; Score= -40.1; E_value=1.5e-05; Accession=PF09325.2; Description=Vps5 C terminal like
VQVPTSMAAAAPATPTKSGRDFFGVFKDLKQTVTNGWVXAVRPPPVEEEIDTKYLAHKAKLEDLEQHLVTASQQAEALVKSYDDLRATTGLLGMSFIKLAKFEKEQAMCASQKIRAADINNFANAVVRVSRSQTKLNAEIVKHLGIIHEYMETMAAVHNAFTDRSNALLRVQNLSADLYFLHTRAGKLESVSSRGMDQERSRYQKIEELKETIRTTEDAKTHALKELELIKENNMNEIKRFNKERRHDLVEMLKGFVSDQAAYSDHFASIWTKVAEDTKGYANRS

SEQ ID NO: 113381 - protein, 79 aa, Setaria italica
  Transcript Sequence Number=SeqID_47407
ILMEQDAAGFMPHFVHEAGVINLQANSRQSTACLHCIPNYQSQASPIGWFVATSAAPCPCPCLEAASQIFPNRFEPDHT

SEQ ID NO: 113382 - protein, 126 aa, Setaria italica
  Transcript Sequence Number=SeqID_47408
  Gene Ontology: Mol. function=calcium ion binding; Cellular component =integral to membrane
  Homolog annotation: Hit_ID=B9S836; Match level="QueryCoverage=81%, HitCoverage=18%, E-value=7e-42, Identity=84%"; Hit description =Calcium ion binding protein, putative
GRPVSGGWSLLPGDAGATVLRLPSEAAAEGCEMTYGFLPCTDTALGNLFLVLAYGFLMFKAATYLSAGSELLLEILGPGIVGGLFLPILGALPDAMLILVSGLSGSKEVAQSQVLIGMGLLAGSTV

SEQ ID NO: 113383 - protein, 256 aa, Setaria italica
  Transcript Sequence Number=SeqID_47409
  Gene Ontology: Mol. function=ATP-dependent peptidase activity; Cellular component=integral to membrane; Biological process=ATP -dependent proteolysis
  Homolog annotation: Hit_ID=B9RS08; Match level="QueryCoverage=75%, HitCoverage=35%, E-value=8e-75, Identity=64%"; Hit description=ATP -dependent peptidase, putative
RQKRRSMRESGASSRSDKKTNTSNEDDLCLTPLRSLPTARTRDTKRLRQYHAYSMQASQAPLSFWHRWVYEMYDSYTLARRAAELWRQIIAKPSMDDHVRKPDILSFHIGSKLPVSESVRQKLLEIDGISYRLQKEIQLLKAFNLIKCRICQSHIAKRSNMVVMSTDGPLGAYVNPHGCVHETITVSNATGLALIGNPSTVHSWFPGYSWTIASCAACESHIGWLFRATKKNLRPRSFWGIRSSQIADDAQVDQSE

SEQ ID NO: 113384 - protein, 264 aa, Setaria italica
  Transcript Sequence Number=SeqID_47410
  Gene Ontology: Mol. function=transferase activity; Cellular component= chloroplast
  Homolog annotation: Hit_ID=B4G0H5; Match level="QueryCoverage=94%, HitCoverage=50%, E-value=5e-20, Identity=28%"; Hit description =Membrane-associated salt-inducible protein like
  Pfam annotation: Domain name=PPR; Domain location=130-164; Score =31.5; E_value=3.5e-06; Accession=PF01535.12; Description=PPR repeat
  Pfam annotation: Domain name=PPR; Domain location=21-55; Score=16.2; E_value=0.11; Accession=PF01535.12; Description=PPR repeat
  Pfam annotation: Domain name=PPR; Domain location=60-94; Score=16.6; E_value=0.097; Accession=PF01535.12; Description=PPR repeat
  Pfam annotation: Domain name=PPR; Domain location=95-129; Score=29.2; E_value=1.6e-05; Accession=PF01535.12; Description=PPR repeat
  Pfam module annotation: Pfam domain module=PPR::PPR::PPR::PPR; Domain location=130-164::21-55::60-94::95-129
CPQVPPFASAESSLGVAPDRASHNVLLHALVKNSELAAAQKLLDEMANKKLKHRPAPDIISYNTVLAGYSAQDDDEGFNNLLKEINARKLEPNVVTYNCRIQWFAKKGETVKGEELLDVMESKEVAPNYLTYNALVQGYCKEGNVGLAMRVFKRMKVMKRREGRSDLGVSAHSQTYVVLFRSLVEKEKLDDALWICKSCFAMKAAPPFEAVKGLVEGLVKAGRSAEARDVVAKMDLLVKGDAKLAWGKVVGELSLEEGAPSSNP

SEQ ID NO: 113385 - protein, 141 aa, Setaria italica
  Transcript Sequence Number=SeqID_47411
  Subcellular localization annotation: CTP_CleavageSite=2; ConfidenceScore=5.58e-01
CQAPAYTPTPGGGGGGGGGHGRGGRGSGRQPPTPVGSPPRRGRAGNQPPSSSPTPSYPSPPSSTPTPSYPSPPSSATTPSSHSPPKSSTPSYPSPPQGSTTPSYPPPPSSATTPSYHSPPQGSPTTPSYPSPPSSATTPSY

SEQ ID NO: 113386 - protein, 87 aa, Setaria italica
  Transcript Sequence Number=SeqID_47412
  Homolog annotation: Hit_ID=Q93ZR8; Match level="QueryCoverage=100%, HitCoverage=16%, E-value=4e-34, Identity=80%"; Hit description =Putative auxin-independent growth promoter protein
  Pfam annotation: Domain name=DUF246; Domain location=1-87; Score= -208.7; E_value=0.02; Accession=PF03138.6; Description=Plant protein family
LKRKDGLCPLTPEETALVLRALDIDRSMQIYIAAGEIYGGKRRMAALTSAYPNVVRKETLLEPSDLMFFQNHSSQMAALDYLVSLES

SEQ ID NO: 113387 - protein, 396 aa, Setaria italica
  Transcript Sequence Number=SeqID_47413
  Homolog annotation: Hit_ID=Q93ZR8; Match level="QueryCoverage=97%, HitCoverage=75%, E-value=0.0, Identity=77%"; Hit description =Putative auxin-independent growth promoter protein
  Pfam annotation: Domain name=DUF246; Domain location=2-348; Score =736.4; E_value=2.2e-218; Accession=PF03138.6; Description=Plant protein family
FSCNGGLNQMRAAICDMVVIARYLNVTLVVPELDKTSFWNDPSEFQDIFDVEHFITSLRGEVRILRELPPRVKRRVELGMFHSMPPISWSDISYYQNQILPLIRKYKVLHLNRTDARLANNGLPIDIQKLRCRVNYASLRFTPQIEELGKRVIRILRQNGPFLVLHLRYEMDMLAFSGCTQGCSNEEAEELTRMRYAYPWWKEKVIDSDLKRKDGLCPLTPEETALVLRALDIDRSMQIYIAAGEIYGGKRRMAALTSAYPNVVRKETLLEPSDLMFFQNHSSQMAALDYLVSLESDIFVPTYDGNMAKVVEGHRRFMGFKKTVLLDRKLIVELVDRYTNGSLQWDEFSSLIKAAHAKRMGSASKRTVIPDRPKEEDYFYANPQECLQDRDLLQTS

SEQ ID NO: 113388 - protein, 104 aa, Setaria italica
  Transcript Sequence Number=SeqID_47414
  Gene Ontology: Mol. function=metal ion binding; Cellular component =integral to membrane
  Homolog annotation: Hit_ID=B4FM57; Match level="QueryCoverage=97%, HitCoverage=41%, E-value=2e-38, Identity=76%"; Hit description=PHD finger protein
METAAPVSSSPRTVGEIYRDYTARRAGLVRALTSDVDEFYAFCDPEKENLCLYGLPNGSWEVSLPAEEVPPEMPEPALGINFARDGMKRRDWLSLVAVHSDAWL

SEQ ID NO: 113389 - protein, 224 aa, Setaria italica
  Transcript Sequence Number=SeqID_47415
  Gene Ontology: Mol. function=metal ion binding
  Homolog annotation: Hit_ID=B4FM57; Match level="QueryCoverage=91%, HitCoverage=85%, E-value=1e-93, Identity=80%"; Hit description=PHD finger protein
  Pfam annotation: Domain name=C1_3; Domain location=171-201; Score =10.1; E_value=0.038; Accession=PF07649.4; Description=C1-like domain
  Pfam annotation: Domain name=PHD; Domain location=172-222; Score =48.0; E_value=3.6e-11; Accession=PF00628.21; Description=PHD-finger
  Pfam module annotation: Pfam domain module=C1_3::PHD; Domain location= 171-201::172-222
SNVLTQFFSCTQYIAFCFVDEFYAFCDPEKENLCLYGLPNGSWEVSLPAEEVPPEMPEPALGINFARDGMKRRDWLSLVAVHSDAWLVSVAYFFAARLNGNDRKRLFNMINDHPSVYEAMVDRKQRENKSGVDNSGKSRHSTKRTNDGKMKNSRSAVVEDGYEDDEEHSETLCGTCKGLYNSNEFWIACDICERWFHGKCVRITPAKADQIKQYKCPDCSKKSR

SEQ ID NO: 113390 - protein, 123 aa, Setaria italica
  misc_feature (96)..(96): Xaa can be any naturally occurring amino acid
  misc_feature (111)..(111): Xaa can be any naturally occurring amino acid
  Transcript Sequence Number=SeqID_47416
  Gene Ontology: Mol. function=protein serine/threonine kinase activity; Biological process=protein amino acid phosphorylation
  Homolog annotation: Hit_ID=B9RRA2; Match level="QueryCoverage=83%, HitCoverage=22%, E-value=4e-34, Identity=70%"; Hit description =Protein kinase APK1B, chloroplast, putative
ATARLRSLSLDDLSRTLATSGLHAFTLAELKAATRNFSSSHFIGEGGFGPVYKGFLDERLRPGELQPQHVAVKYLDADGPQGHREWLAEVVYLGMXLSHPHLVKLIGYGCXRTEQRMLVYEYM

SEQ ID NO: 113391 - protein, 139 aa, Setaria italica
  Transcript Sequence Number=SeqID_47417
  Gene Ontology: Cellular component=integral to membrane
  Homolog annotation: Hit_ID=B6SZ71; Match level="QueryCoverage=87%, HitCoverage=21%, E-value=7e-30, Identity=59%"; Hit description=K -exchanger-like protein
RDLCFLLLALCYLLAVLVNGAVTVWVAVSFVSLYVGYVVVVWTSHCCAEQGKPPAAGLAAPLLLDEDDDVPSLPSHSKTEASRGRAWLHCLATALCMPLYLPRRLTIPDIAAHRWSRPYAIASAALAPVLLAFTWTSQR

SEQ ID NO: 113392 - protein, 68 aa, Setaria italica
  Transcript Sequence Number=SeqID_47418
  Homolog annotation: Hit_ID=Q8S615; Match level="QueryCoverage=92%, HitCoverage=6%, E-value=2e-10, Identity=52%"; Hit description =Putative polyprotein
WVCNIFFDNYDQVEPILNKDSAQCFLQFFDKCEGRGMSWNLTITALTLTYMISFNALRCAEVVLEGKA

SEQ ID NO: 113393 - protein, 373 aa, Setaria italica
  Transcript Sequence Number=SeqID_47419
  Homolog annotation: Hit_ID=Q8S615; Match level="QueryCoverage=87%, HitCoverage=35%, E-value=2e-86, Identity=52%"; Hit description =Putative polyprotein
  Pfam annotation: Domain name=Ank; Domain location=176-208; Score =34.3; E_value=5e-07; Accession=PF00023.22; Description=Ankyrin repeat
SSLERNSRSNFLVSKNARMELKLKAPACDKDNGNGNDGSITVRNKYPRQPAPVVYLTEDRGWSFYEKFLYQRYAEMARSVVNDIIIQDPTPEWVCNTFFDKYDQMEPILEKDSAQCFLQFFKKCAGRGMTWNFTITSQTLTYMISFNALRCAEVVLEGKAPELSGMHANPNCINNNGYFPLHEAAEKFSVEMIELLLRHGASANVRTVGNVVIENLLPLHVAVENTCLHKYLEDNLSSSQNHLDYIYKLIHLLYLPEMKIFLDTTRLLAEKTNNLLEEVWIYIEGGKLIQSAVLLLAAQEHIRGSCSSNINGSSKKDGFDIINKRLLRLSIALRWGKGSNEMAQKLLEEKRTLIDCCLGSCLCFVICLIFPLF

SEQ ID NO: 113394 - protein, 189 aa, Setaria italica
  misc_feature (18)..(18): Xaa can be any naturally occurring amino acid
  misc_feature (157)..(157): Xaa can be any naturally occurring amino acid
  Transcript Sequence Number=SeqID_47420
VTLNDCARLLVDVISHVXEPLSAYIQAHSEVSRMEVLEHVSSILKDYGFLPNEEVMDTINLQPYDCKMSDKKSCSKGANRAVMETAILHAAEEKAARTEVGGGWDPTYARRSYFPYWRSLLRTRCPVRVYPPYATAEAKFPMVNGCTPITDHKLSSXGRITALTSNQPKRSFSTAAIGAFRLLKLLKHA

SEQ ID NO: 113395 - protein, 263 aa, Setaria italica
  misc_feature (150)..(150): Xaa can be any naturally occurring amino acid
  Transcript Sequence Number=SeqID_47421
  Homolog annotation: Hit_ID=Q8S615; Match level="QueryCoverage=48%, HitCoverage=13%, E-value=1e-21, Identity=48%"; Hit description =Putative polyprotein
SEGGKLIQSAVLLLAAQEHIRGSCSSNINGSSKKDGFDIINKRLLRLSIALRWGKGSNEMAQKLLEEKRTLIDCARLLVDVISHVVEPLSAYIQAHSEVSRMEVLEHVSSILKDYGFLPTEEVMDTINLQPYDCKMSDKKSCSKGAMDLXGANRGVMETAILHAAEEKAARTEVGGGWDPTYARRSYFPYWRSLLRTRCPVRVYPAYARAEARFPMVNGCTPITDHKLSSVGRITALTSNQPKRSFSTAAIGAFRLLKLLKHA

SEQ ID NO: 113396 - protein, 85 aa, Setaria italica
  Transcript Sequence Number=SeqID_47422
  Subcellular localization annotation: CTP_CleavageSite=58; ConfidenceScore=5.91e-01
MPGHMTMMALAWASSSPSSVKLRFGSGGGGKTTTTSAMPLVTKRSSSSAHLLGRGRALAAAAATATAACDEQRLQKEESCLVFRP

SEQ ID NO: 113397 - protein, 80 aa, Setaria italica
  Transcript Sequence Number=SeqID_47423
SSGLLGRRLVLCWWQYRSFCLPVTVFNYWEERERARRRSMAHLPLVCSLLKYGLLLQLQCPGFVMVEVFYPSPMHEFVLK

SEQ ID NO: 113398 - protein, 108 aa, Setaria italica
  misc_feature (42)..(42): Xaa can be any naturally occurring amino acid
  Transcript Sequence Number=SeqID_47424
  Gene Ontology: Mol. function=metal ion binding
  Homolog annotation: Hit_ID=B6SL08; Match level="QueryCoverage=98%, HitCoverage=30%, E-value=5e-51, Identity=88%"; Hit description =Ubiquitin-protein ligase/ zinc ion binding protein
VEEAVITNVECPHCCRMFCAQCKVPWHDGVTCTEFQRLGKDXRTREDLLLRKAAQKSKWQRCPKCKMYVERVTGCVFIICRCGHCFCYLCASPMSRDNHHCKTCKRTW

SEQ ID NO: 113399 - protein, 140 aa, Setaria italica
  Transcript Sequence Number=SeqID_47425
  Gene Ontology: Mol. function=DNA binding; Cellular component=nucleus; Biological process=regulation of transcription
  Homolog annotation: Hit_ID=Q5QT30; Match level="QueryCoverage=97%, HitCoverage=54%, E-value=5e-65, Identity=88%"; Hit description =Transcription factor (Fragment)
  Pfam annotation: Domain name=Myb_DNA-binding; Domain location=44-90; Score=63.4; E_value=8.4e-16; Accession=PF00249.23; Description=Myb -like DNA-binding domain
  Pfam annotation: Domain name=Myb_DNA-binding; Domain location=96-140; Score=42.9; E_value=1.3e-09; Accession=PF00249.23; Description=Myb -like DNA-binding domain
  Pfam module annotation: Pfam domain module=Myb_DNA-binding::Myb_DNA -binding; Domain location=44-90::96-140
ERVKKGGEDPGLPPASREGENSHEPQRQRSLNGRTTGPTRRSTKGNWTPEEDSILSRAVQTYQGKNWKKIAECFPDRTDVQCLHRWQKVLNPELVKGPWSKEEDEIIVQMVNKYGPKKWSTIAQALPGRIGKQCRERWHN

SEQ ID NO: 113400 - protein, 69 aa, Setaria italica
  misc_feature (58)..(58): Xaa can be any naturally occurring amino acid
  misc_feature (64)..(64): Xaa can be any naturally occurring amino acid
  Transcript Sequence Number=SeqID_47426
  Gene Ontology: Mol. function=hydrolase activity; Biological process =metabolic process
  Homolog annotation: Hit_ID=B6TKL4; Match level="QueryCoverage=73%, HitCoverage=12%, E-value=1e-16, Identity=82%"; Hit description=CHY1
CKISCEILFLNFYHVSSPGEYVALAGARLDGAEMHACGLATHFVQINRLPSLEESLKXVDTSNXFVVCG

SEQ ID NO: 113401 - protein, 66 aa, Setaria italica
  Transcript Sequence Number=SeqID_47427
  Gene Ontology: Mol. function=catalytic activity; Biological process =metabolic process
  Homolog annotation: Hit_ID=B6TIM6; Match level="QueryCoverage=100%, HitCoverage=17%, E-value=3e-22, Identity=81%"; Hit description=CHY1
MASLPPAGAAGADSDQLLVEANDSTRTLILNRPKQLNALSSAMIMGLLRCFTAYEKDDGVKLLIMK

SEQ ID NO: 113402 - protein, 93 aa, Setaria italica
  Transcript Sequence Number=SeqID_47428
  Gene Ontology: Mol. function=hydrolase activity; Biological process =metabolic process
  Homolog annotation: Hit_ID=B6TKL4; Match level="QueryCoverage=100%, HitCoverage=22%, E-value=2e-49, Identity=90%"; Hit description=CHY1
IREGRIQTVGECLRREYRMVCHVMRGDFSRDFFEGCRAILVDKDRNPKWMPPRLEQVHDEAVEQYFSTIDDPQWEELNLPTRHFHGRNIKSKL

SEQ ID NO: 113403 - protein, 321 aa, Setaria italica
  misc_feature (198)..(198): Xaa can be any naturally occurring amino acid
  Transcript Sequence Number=SeqID_47429
  Gene Ontology: Mol. function=hydrolase activity; Biological process =metabolic process
  Homolog annotation: Hit_ID=B6TKL4; Match level="QueryCoverage=94%, HitCoverage=72%, E-value=1e-160, Identity=91%"; Hit description=CHY1
  Pfam annotation: Domain name=ECH; Domain location=8-179; Score=39.0; E_value=4.5e-10; Accession=PF00378.12; Description=Enoyl-CoA hydrataseisomerase family
IVFLNSTRTLILNRPKQLNALSSAMIMGLLRCFTAYEKDDGVKLLIMKGKGRAFCAGGDVAAVVRAINNGSWKYGADFFRNEFLLNYIIATYSKPQVSLLAGIVMGGGAGVSLHGRFRVVTENTVFAMPETALGLFPDIGASYFLSRLPGFYGEYVALAGARLDGAEMHACGLATHFVQINRLPSLEESLKKVDTSNXFVVCGIIDQFAQQPSLKENSSLNRLEIINKCFSKRTVEEIISSLEQVASNLPDEWVAATIQSLKNASPTSLKISLRSIREGRTQTVGECLRREYRMVCHVVRGDFSRDFFEEYINILNTTLFH

SEQ ID NO: 113404 - protein, 241 aa, Setaria italica
  Transcript Sequence Number=SeqID_47430
  Gene Ontology: Mol. function=hydrolase activity; Biological process =metabolic process
  Homolog annotation: Hit_ID=B6TKL4; Match level="QueryCoverage=99%, HitCoverage=57%, E-value=1e-127, Identity=91%"; Hit description=CHY1
TKKTALGLFPDIGASYFLSRLPGFYGEYVALAGARLDGAEMHACGLATHFVQINRLPSLEESLKKVDTSNPFVVCGIIDQFAQQPSLKENSSLNRLEIINKCFSKRTVEEIISALEQETSNSADEWIASTIQSLKKASPTSLKISLRSIREGRIQTVGECLRREYRMVCHVMRGDFSRDFFEGCRAILVDKDRNPKWMPPRLEQVHDEAVEQYFSRIDDPQWEDLDLPARRSYGRIIESKL

SEQ ID NO: 113405 - protein, 105 aa, Setaria italica
  Transcript Sequence Number=SeqID_47431
  Gene Ontology: Mol. function=phosphoprotein phosphatase activity; Cellular component=plastid stroma; Biological process=mitotic cell cycle spindle assembly checkpoint
  Homolog annotation: Hit_ID=Q6EPR6; Match level="QueryCoverage=74%, HitCoverage=25%, E-value=3e-38, Identity=96%"; Hit description =Serine/threonine protein phosphatase
LKYLQVRYPDRITLIRGNHESRQITQVYGFYDECLRKYGSVNVWRYCTDIFDYLSLSALIENKIFSVHGGLSPAITTLDQVSYYLGVVSVCMCHFSKCFNLCSIR

SEQ ID NO: 113406 - protein, 307 aa, Setaria italica
  Transcript Sequence Number=SeqID_47432
  Gene Ontology: Mol. function=phosphoprotein phosphatase activity; Cellular component=plastid stroma
  Homolog annotation: Hit_ID=Q6EPR6; Match level="QueryCoverage=100%, HitCoverage=100%, E-value=1e-180, Identity=98%"; Hit description =Serine/threonine protein phosphatase
  Pfam annotation: Domain name=Metallophos; Domain location=46-242; Score=142.7; E_value=1.1e-39; Accession=PF00149.20; Description =Calcineurin-like phosphoesterase
MGASDLDRQIEQLKRCEPLTEAEVKALCLKAMEILVEESNVQRVDAPVTICGDIHGQFYDMKELFKVGGDCPKTNYLFLGDFVDRGFYSVETFLLLLALKVRYPDRITLIRGNHESRQITQVYGFYDECLRKYGSVNVWRYCTDIFDYLSLSALIENKIFSVHGGLSPAITTLDQIRVIDRKQEVPHDGAMCDLLWSDPEDAVDGWGLSPRGAGFLFGGNVVSSFNHSNNIDYICRAHQLVMEGYKWMFNNKIVTVWSAPNYCYRCGNVAAILELDENLNKQFRVFEAAPHESRGVPSKRPAPDYFL

SEQ ID NO: 113407 - protein, 528 aa, Setaria italica
  misc_feature (514)..(514): Xaa can be any naturally occurring amino acid
  Transcript Sequence Number=SeqID_47433
  Gene Ontology: Mol. function=transcription initiation factor activity; Cellular component=transcription factor TFIID complex; Biological process=transcription initiation
  Homolog annotation: Hit_ID=Q10IY9; Match level="QueryCoverage=68%, HitCoverage=48%, E-value=2e-98, Identity=55%"; Hit description =Transcription initiation factor TFIID component TAF4 family protein, expressed
  Pfam annotation: Domain name=TAF4; Domain location=223-519; Score =296.7; E_value=5.1e-86; Accession=PF05236.6; Description =Transcription initiation factor TFIID component TAF4 family
  Subcellular localization annotation: CTP_CleavageSite=46; ConfidenceScore=5.75e-01
MQHHVQRPQTPSPMFGTNSIHARPFPRPVGSPAASFRPQMTDPNQRAQLVQGAVTTVAGSVPTQSIVSGNAPTNQSTWQKSANKEQKTNSFTPTAHMNKETISQNSESSQNSFVAMHAKQVNQAPGSSKGGGGMENQSPKLSASKSSTTTNSSQTQSHVTQAEPKLQVQSSVQAPPAAASKTPQRKASSGQKKPLEALGSSPPPSSKKQKTSGGFHEQSIDQLNDVTAVSGVNLREEEEQLFSAPKEESRVSEAARRVVQLEEEKLILQKGPLARKLAEIMRKCNLKVIGTDVERCLSMCVEERLRGFISDIIRFSKQRVDVEKSRHRFYPLSSDVRSHIMRVNREAKEQWEKKQAEDAERIRKQNDGDGNANIDLEKDKNETRASSKHAKTYKEDDDKMRTTAANVAARVAAGGDDMLSKWQLLAERNKQRSEGGDGSSGSVPGNMLQHKPSLKSGKDSMEDQGIEKRGYSTMLGSGGIRRSPLTKVARSVSVKDVIAALEREPQMSKSSLLXFQLYGRPLTEPAAK

SEQ ID NO: 113408 - protein, 427 aa, Setaria italica
  Transcript Sequence Number=SeqID_47434
  Gene Ontology: Mol. function=nucleoside-triphosphatase activity; Cellular component=membrane; Biological process=transport
  Homolog annotation: Hit_ID=Q8GU83; Match level="QueryCoverage=100%, HitCoverage=75%, E-value=0.0, Identity=54%"; Hit description=PDR -like ABC transporter
  Pfam annotation: Domain name=ABC2_membrane; Domain location=149-365; Score=236.9; E_value=5.1e-68; Accession=PF01061.16; Description=ABC -2 type transporter
EPTSGLDARAAAIVMRAVKNVTDTGRTVVCTIHQPSIEIFEAFDQLMLMKRGGELIYAGPLGHHSCKVIQYFQAISGVPKIKDNYNPSTWMLEVTSTSMEIQLGVDFAQVYRDSSMYKDKDELVRRLSIPPLGTNNLHFPTRYPQKFWEQFKACLWKQCLSYWRSPSYNLVRIVFLTVSCIAFGVLYWQQGNINHINDQQGLFTILGCMYGTTLFAGINNCQSVMPFVSIERSVMYRERFAGMYSPWAYSFAQVAMEIPYVFVQIMLFMFIAYPLIGYAWELAKFFWFLYTMFCTLLYFLYLGMMMVSITPNIQVASILASMFYTIQNLMSGFIVPAPQIPKWWLWLYYTSPMSWTLNVFFTTQFGYEDDKKIEVFGETKSVAAFVRDYFGFRCDLLPLAAVVLAAFPIFFATLFGYSISKLNFQRR

SEQ ID NO: 113409 - protein, 138 aa, Setaria italica
  Transcript Sequence Number=SeqID_47435
  Gene Ontology: Mol. function=metal ion binding; Cellular component =intracellular; Biological process=nervous system development
  Homolog annotation: Hit_ID=B9GWH9; Match level="QueryCoverage=56%, HitCoverage=5%, E-value=2e-27, Identity=64%"; Hit description =Jumonji domain protein (Fragment)
  Pfam annotation: Domain name=PHD; Domain location=75-123; Score=52.6; E_value=1.5e-12; Accession=PF00628.21; Description=PHD-finger
  Subcellular localization annotation: CTP_CleavageSite=45; ConfidenceScore=5.19e-01
MAEEVSGVRSWKRRNAFSKKSDRNSAASAGARKRKRRKPDAAVTVANEAPAGVRKQKRRKSDAGATVFNEAVDQVCEQCSSGLHGDVMLLCDRCDKGWHLYCLSPPLERVPPGNWYCSDCLNSDRDCFGFVHRRKSCL

SEQ ID NO: 113410 - protein, 48 aa, Setaria italica
  Transcript Sequence Number=SeqID_47436
GYTYGFLAVSLMYCCSLFVHITLFLELTCTSPVLFEENQCFLIFILLL

SEQ ID NO: 113411 - protein, 122 aa, Setaria italica
  Transcript Sequence Number=SeqID_47437
  Gene Ontology: Mol. function=nucleoside-triphosphatase activity
  Homolog annotation: Hit_ID=B9S3U3; Match level="QueryCoverage=82%, HitCoverage=10%, E-value=1e-10, Identity=35%"; Hit description =Peroxisome assembly factor-2, putative
HALPAPALRRLAVVTGTPVLVKNADNNVGRIVKALLFDHPSLDESGTEQTDHVACTSPHGHAGHAMGILPCRSFPATGFASVNEDAAYVSPLLAFNLGLHVSCLNLLIQRGGEPFKFCSQVE

SEQ ID NO: 113412 - protein, 143 aa, Setaria italica
  misc_feature (128)..(128): Xaa can be any naturally occurring amino acid
  Transcript Sequence Number=SeqID_47438
  Gene Ontology: Mol. function=hydrolase activity, acting on carbon -nitrogen (but not peptide) bonds, in linear amides; Biological process=metabolic process
  Homolog annotation: Hit_ID=B9SGY7; Match level="QueryCoverage=88%, HitCoverage=28%, E-value=3e-59, Identity=84%"; Hit description =Acetamidase, putative
  Pfam annotation: Domain name=FmdA_AmdA; Domain location=1-129; Score=- 86.5; E_value=1.5e-08; Accession=PF03069.7; Description =AcetamidaseFormamidase family
MEKELSCALYRCEIIRGGMKEYLTPVGPTPLHVNPIFEIGPVEPLLSEWLVFEGISVDESGKQHFLDASVAYKRAVLNAVEYLSRFGYSKEQVYLLLSCCPCEGRISGIVDSPNAVATLAIPTAIFDXRINVDADEIKFYTKH

SEQ ID NO: 113413 - protein, 175 aa, Setaria italica
  Transcript Sequence Number=SeqID_47439
  Gene Ontology: Mol. function=hydrolase activity, acting on carbon -nitrogen (but not peptide) bonds, in linear amides; Biological process=metabolic process
  Homolog annotation: Hit_ID=B9VXW6; Match level="QueryCoverage=74%, HitCoverage=28%, E-value=2e-64, Identity=90%"; Hit description =Formamidase
  Pfam annotation: Domain name=FmdA_AmdA; Domain location=3-139; Score=- 54.2; E_value=1.6e-10; Accession=PF03069.7; Description =AcetamidaseFormamidase family
MWTILFSIACSSKVLSCALYRCEIIRGGMKEYLTPVGPTPLHVNPIFEIGPVEPRFSEWLVFEGISVDESGKQHFLDASVAYKRAVLNAIEYLSRFGYSKEQVYLLLSCCPCEGRISGIVDSPNAVATLAIPTAIFDQDIRPKHLKGRPGPISKIGFTCSDVGPTGVMYSFIHLL

SEQ ID NO: 113414 - protein, 83 aa, Setaria italica
  misc_feature (51)..(51): Xaa can be any naturally occurring amino acid
  misc_feature (63)..(63): Xaa can be any naturally occurring amino acid
  Transcript Sequence Number=SeqID_47440
  Gene Ontology: Mol. function=hydrolase activity, acting on carbon -nitrogen (but not peptide) bonds, in linear amides; Biological process=metabolic process
  Homolog annotation: Hit_ID=B9VXW6; Match level="QueryCoverage=84%, HitCoverage=15%, E-value=2e-24, Identity=80%"; Hit description =Formamidase
QNLSCILYRCEIIRGGMKEYMTPVGPTSLHVNPIFEIGPVEPRFSGKWFSXGISVDESGKQHXDASVAYKRAVLNAISNRISL

SEQ ID NO: 113415 - protein, 53 aa, Setaria italica
  misc_feature (11)..(11): Xaa can be any naturally occurring amino acid
  misc_feature (19)..(19): Xaa can be any naturally occurring amino acid
  Transcript Sequence Number=SeqID_47441
  Gene Ontology: Mol. function=hydrolase activity, acting on carbon -nitrogen (but not peptide) bonds, in linear amides; Biological process=metabolic process
TLAIPYSNIDXDIRPKHLXGRPGPKLIRLPDLLSCSNDGHLPVTQDQSGRSVP

SEQ ID NO: 113416 - protein, 292 aa, Setaria italica
  misc_feature (270)..(270): Xaa can be any naturally occurring amino acid
  Transcript Sequence Number=SeqID_47442
  Gene Ontology: Mol. function=hydrolase activity, acting on carbon -nitrogen (but not peptide) bonds, in linear amides; Cellular component=cytoplasm; Biological process=metabolic process
  Homolog annotation: Hit_ID=B9VXW6; Match level="QueryCoverage=99%, HitCoverage=64%, E-value=1e-134, Identity=76%"; Hit description =Formamidase
  Pfam annotation: Domain name=FmdA_AmdA; Domain location=4-292; Score =344.1; E_value=2.7e-100; Accession=PF03069.7; Description =AcetamidaseFormamidase family
PPRLVVPINVKKQPWEQKVPLHNCWHPDIPPVADVTEGELFRVEMVDWSGGRVRDDNSADDMKSMDFTIAHYLSGPLRIVDSEGVPASPGDLLVVEICNLGPLPGDEWGYTAIFERENGGGFLTDHFPSARKAIWYFEGIYAYSPQIPGVRFPGLTHPGIVGTAPSVELLNIWNEREKRLAETSPETLKLCEVLHQRPLVHLPTPENCLLGKIQEGAAEWHKIANGAARTIPGRENGGNCDIKNLSRGSKVYLPIFVEGANLSTGDMHFXSQGDGEISLCGAIEMSGFLELK

SEQ ID NO: 113417 - protein, 251 aa, Setaria italica
  Transcript Sequence Number=SeqID_47443
  Gene Ontology: Mol. function=hydrolase activity, acting on carbon -nitrogen (but not peptide) bonds, in linear amides; Biological process=metabolic process
  Homolog annotation: Hit_ID=B9VXW6; Match level="QueryCoverage=94%, HitCoverage=52%, E-value=1e-117, Identity=85%"; Hit description =Formamidase
  Pfam annotation: Domain name=FmdA_AmdA; Domain location=1-200; Score =224.4; E_value=3e-64; Accession=PF03069.7; Description =AcetamidaseFormamidase family
IASIQKGTAEWHKMANEAARTIPGRENGGNCDIKNLSRGSKVYLPVFVEGANLSTGDMHFSQGDGEVSFCGAIEMSGFLELKCEIIRGGMKEYMTPVGPTSLHVNPIFEIGPVEPRFSEWLVFEGISVDESGKQHFLDASVAYKRAVLNAIEYLSRFGYSKEQVYLLLSCCPCEGRISGIVDSPNAVATLAIPTAIFDQDIRPKHLKGRPGPKLIRLPDLLSCSNDGHLPVTQDQSGKVKSSMYVTWNPEC

SEQ ID NO: 113418 - protein, 76 aa, Setaria italica
  Transcript Sequence Number=SeqID_47444
LHQHEITKSLATKVVQDGCLNLGDGMSLSVLKQPSWTTFTNMRITKSTCDEGVGLVPGFCFAGSACFILFGAEGIY

SEQ ID NO: 113419 - protein, 427 aa, Setaria italica
  Transcript Sequence Number=SeqID_47445
  Gene Ontology: Cellular component=plasma membrane
  Homolog annotation: Hit_ID=Q7XTT0; Match level="QueryCoverage=85%, HitCoverage=75%, E-value=2e-48, Identity=32%"; Hit description =OSJNBa0035M09.19 protein
  Pfam annotation: Domain name=Apolipoprotein; Domain location=90-316; Score=-42.0; E_value=0.023; Accession=PF01442.10; Description =Apolipoprotein A1A4E family
RPRWLLSRGRRWQARAEEAAEVAALRAELEQLRAKISGLESDMVERSKELKNKDGDIAKLEKAIEERSQKIASLQAEIASLQAQGSIAAEEQAGKANARAVELEKQIEKLKKDIETQSSQRTALESRANDAEKKVEELTAKLNVIQKESDDKKRKIKKTERALKVAEEELMRLQLEATAKAKQLTEVHGAWLPPWLAAQYAQYLEVVSGHWNQRGKPAMQNFLQKASEKSAQAKKWAEPHIETAKTKWIPFAKEKLVVLKKNAEPYVQKISTRSVELYESSRVAVTPHVVKVKELADPYYQEAKKFSKPYIDQVAEITKPHVEKARTALKPYTKRVVHAYGSFLESATTYHRQVQATILDNLHQHEITKSLATKELVWFLASALLALPVFIIFRLLIDTFCTKKNKRSRGGNGNHGHRRHKRRHTDK

SEQ ID NO: 113420 - protein, 130 aa, Setaria italica
  Transcript Sequence Number=SeqID_47446
VVTVFRVRRLGPHLHHGHGHRNHHHLHSIPANVQIRRPELPHPAHAAAAGPQERARDILVVVIGLLFGIACGALTAASAYLVWSMVAGAAAASPYDELYDEEDEASDTESPKKVGYVIIQELEVHDGGKN

SEQ ID NO: 113421 - protein, 178 aa, Setaria italica
  Transcript Sequence Number=SeqID_47447
  Gene Ontology: Mol. function=catalytic activity; Cellular component =chloroplast
  Homolog annotation: Hit_ID=B6UAW2; Match level="QueryCoverage=92%, HitCoverage=91%, E-value=1e-66, Identity=78%"; Hit description=Zinc -binding protein
  Pfam annotation: Domain name=HIT; Domain location=74-173; Score =165.9; E_value=1.2e-46; Accession=PF01230.15; Description=HIT domain
  Subcellular localization annotation: CTP_CleavageSite=55; ConfidenceScore=5.63e-01
MATRAAAATLTAATSSLIRRSASLRPHGLRVPRRLPPQRFVRHIASSTNEEAAAKAAAATADTEGPTIFDKIIAKEIPSSIVYEDDKVLAFRDINPQAPVHVLVIPKVRDGLTGLSKAEPRHVEILGQLLCAVKVVAEKEGLANGYRVVINNGPEGCQSVYHLHLHVLGGRQMKWPAG

SEQ ID NO: 113422 - protein, 111 aa, Setaria italica
  misc_feature (26)..(26): Xaa can be any naturally occurring amino acid
  Transcript Sequence Number=SeqID_47448
  Gene Ontology: Mol. function=transporter activity; Cellular component= integral to membrane; Biological process=iron ion transport
  Homolog annotation: Hit_ID=B9NAE4; Match level="QueryCoverage=41%, HitCoverage=9%, E-value=1e-17, Identity=84%"; Hit description=Nramp transporter
RPRPHAHPPLASRDLNESLLPGGGGXSAAAAASASHDEYEERAYDSDDKVSISISDSDAEADDGGPPSRPPFSWRKLWRFTGPGFLMCIAFLDPGNLEGDLQAGAAAGYQL

SEQ ID NO: 113423 - protein, 52 aa, Setaria italica
  Transcript Sequence Number=SeqID_47449
  Gene Ontology: Mol. function=oxidoreductase activity
  Homolog annotation: Hit_ID=Q7XYC0; Match level="QueryCoverage=96%, HitCoverage=33%, E-value=2e-12, Identity=72%"; Hit description=Enoyl- Acp reductase (Fragment)
  Subcellular localization annotation: CTP_CleavageSite=31; ConfidenceScore=5.27e-01
RTMGASVTAGMQMLAVRSCIPACKQVLGSTSALSAFGRTLSTRTGFASCSKP

SEQ ID NO: 113424 - protein, 87 aa, Setaria italica
  misc_feature (67)..(67): Xaa can be any naturally occurring amino acid
  Transcript Sequence Number=SeqID_47450
TTFIQGVPAPWSLSGSPASHEQMTLCVYRVLFVCGKKAVTALWYIFQYCNAHTSVYSCALICCPILXIHCLHRETCHVFVESSLTSK

SEQ ID NO: 113425 - protein, 108 aa, Setaria italica
  Transcript Sequence Number=SeqID_47451
  Gene Ontology: Mol. function=nucleotidyltransferase activity; Cellular component=chloroplast; Biological process=RNA processing
  Homolog annotation: Hit_ID=B9S6T6; Match level="QueryCoverage=94%, HitCoverage=14%, E-value=2e-29, Identity=60%"; Hit description =Poly(A) polymerase, putative
  Pfam annotation: Domain name=PolyA_pol; Domain location=34-107; Score= 1.5; E_value=1.4e-06; Accession=PF01743.12; Description=Poly A polymerase family
WRLFDSRAFGINQDAIPKDALAVLKKLRRQGFEAYLVGGCVRDLLLKRVPKDFDVITTASLQQLKKNVFRRCMIVGKRFPICLLQMRDSVIEVSSFRTVGNHVNKLKR

SEQ ID NO: 113426 - protein, 71 aa, Setaria italica
  Transcript Sequence Number=SeqID_47452
VNLKHRVFNNNTPLCLCYTLLRTPNAEETTNDNKSFQSMLQVLELCLYHNTVDEFLKKLLKSCDFLGSTKD

SEQ ID NO: 113427 - protein, 71 aa, Setaria italica
  misc_feature (42)..(42): Xaa can be any naturally occurring amino acid
  Transcript Sequence Number=SeqID_47453
  Gene Ontology: Mol. function=amino acid transmembrane transporter activity; Cellular component=integral to membrane; Biological process=amino acid transport
  Homolog annotation: Hit_ID=Q75G90; Match level="QueryCoverage=100%, HitCoverage=14%, E-value=3e-33, Identity=97%"; Hit description=Amino acid permease family protein, putative, expressed
AGFLLFALIWSIPEALITAEMGTMFPENGGYVVWVSSALGPXWGFQQGWAKWLSGVIDNALYPVLFLDYVK

SEQ ID NO: 113428 - protein, 104 aa, Setaria italica
  Transcript Sequence Number=SeqID_47454
  Gene Ontology: Cellular component=chloroplast; Biological process =transport
  Homolog annotation: Hit_ID=B6SPS8; Match level="QueryCoverage=100%, HitCoverage=15%, E-value=7e-45, Identity=86%"; Hit description=Salt -inducible protein
  Subcellular localization annotation: CTP_CleavageSite=43; ConfidenceScore=5.17e-01
DLAATLDAFFPQGSPPSPSDALLLLNYLHPSWRKSLSLLAWLRALPSAAFPLDTIFFNVALKSLRAARQWPHAERLALDMLDAGVPLDNITYSTLITAARRCRH

SEQ ID NO: 113429 - protein, 391 aa, Setaria italica
  misc_feature (128)..(128): Xaa can be any naturally occurring amino acid
  Transcript Sequence Number=SeqID_47455
  Gene Ontology: Mol. function=receptor signaling protein activity; Cellular component=small-subunit processome; Biological process=rRNA processing
  Homolog annotation: Hit_ID=B9S245; Match level="QueryCoverage=99%, HitCoverage=68%, E-value=1e-153, Identity=43%"; Hit description=U3 small nucleolar RNA-associated protein, putative
  Pfam annotation: Domain name=WD40; Domain location=130-168; Score =41.1; E_value=4.4e-09; Accession=PF00400.24; Description=WD domain, G-beta repeat
  Pfam annotation: Domain name=WD40; Domain location=2-40; Score=19.0; E_value=0.02; Accession=PF00400.24; Description=WD domain, G-beta repeat
  Pfam annotation: Domain name=WD40; Domain location=292-331; Score =7.2; E_value=5.6; Accession=PF00400.24; Description=WD domain, G -beta repeat
  Pfam annotation: Domain name=WD40; Domain location=335-376; Score =38.8; E_value=2.2e-08; Accession=PF00400.24; Description=WD domain, G-beta repeat
  Pfam annotation: Domain name=WD40; Domain location=44-82; Score=45.5; E_value=2.1e-10; Accession=PF00400.24; Description=WD domain, G-beta repeat
  Pfam annotation: Domain name=WD40; Domain location=86-126; Score =44.1; E_value=5.4e-10; Accession=PF00400.24; Description=WD domain, G-beta repeat
  Pfam module annotation: Pfam domain module=WD40::WD40::WD40::WD40::WD4 0::WD40; Domain location=130-168::2-40::292-331::335-376::44-82::86 -126
ASAIGEPVDGDSEAITALTLSPDSRLLFAAGHSRLIRVWDLATRTCIRSWKGHDGPIMAMACHASGGLLATAGADKKVCIWDVDGGFCTHFLRGHTGIVTTIMFHKDPKRLLLFSGSEDGTVRVWNLXNQKCVAVLKEHFSTVTSLTLSDDGQTLLSAGRDKVVTVWDVRKYSSKKTIPTYEMIEAVSFIGSGSELLACLGIELVNMKGGSDGYFLTVGERGVVRIWCLESGRCVFEQQSSDVTVNSENEETRRGFTSAVMLPNDQGLLCVTADQQFLFYCPKKTDEGTFQLSLYRRLVGYNDEILDLKFVGDEEQYLAVATNLEQVRVYDVASMSCSYVLAGHTEIIVCIDTCVSSSGKTLVVTGSKDNTVRLWDAERRRCIGTGKGHLG

SEQ ID NO: 113430 - protein, 67 aa, Setaria italica
  Transcript Sequence Number=SeqID_47456
SCSISGEALLFISGGFISVWGYEEGRCHCWVMILLNNSLKRMTRLLAISVMWNKRGRTVESFFSNYY

SEQ ID NO: 113431 - protein, 244 aa, Setaria italica
  Transcript Sequence Number=SeqID_47457
  Gene Ontology: Cellular component=plasma membrane
  Homolog annotation: Hit_ID=B6TK02; Match level="QueryCoverage=88%, HitCoverage=88%, E-value=3e-98, Identity=81%"; Hit description=Expp1 protein
MAATSPRRASVAAAVATAVLLLLASVAAGDDRNGVYDPCADTTVGRGDGFTFGVAFTGRDAFFSGGVQLSPCDSRLGLSNRAQVALFRPQVDEISLLTINSSSFDPSSSGGYMVAFAGRKYAARSAPVFVGNSSYTVTSFTLVLEFQKGRLENLFWKDGDCKSCSGRADFACVDKSCAVKTTSCKGKGGQADCSPGIQLAFSGTDKHEDVLNSWYEVSKLRQYSLFGLFSNLKDSLASQFSSFF

SEQ ID NO: 113432 - protein, 142 aa, Setaria italica
  Transcript Sequence Number=SeqID_47458
YYLFPPLDLEQFMPWCPQIPTKLTKQSDEITPNRRDEVQPSSDLGGRCGNIDRAPTCRMRQQQCVTKTATAFSPYIHGFVNEGKVTTTSPHHRRSTDTTFPKIIKNINKYHKNGLKDETIQIKSKLKYSHKPILIFQKKINK

SEQ ID NO: 113433 - protein, 255 aa, Setaria italica
  Transcript Sequence Number=SeqID_47459
QTTVRKKDSLFAELVTDHKYMSQENDHIGSPLVLSKVMYLSNINDSLSVAAVPVGARCDDFSTDPNLREEHWLASLRSSLRPPLLIKSHKYAGGLILRSKNFAVSLAELISVAGNPLNAGEASRFLTEFGQFSYQMPDDIKLTLSAAWHGPSVIPRKRKPTAGGCIDVELKIDEDSRIGAWIEINRKSNPRLLRWALTLSDTPEDDLGWGLSLRRGTEAKPQRFQVEGFLNLHLGKKAAVQPGIVFNVDGRDAHL

SEQ ID NO: 113434 - protein, 42 aa, Setaria italica
  Transcript Sequence Number=SeqID_47460
TYCNMEDVREKLMPVTHCILNHKVKSLVILFATCYEVVNINK

SEQ ID NO: 113435 - protein, 104 aa, Setaria italica
  misc_feature (34)..(34): Xaa can be any naturally occurring amino acid
  Transcript Sequence Number=SeqID_47461
  Subcellular localization annotation: CTP_CleavageSite=38; ConfidenceScore=5.58e-01
SKALAQALARAEAASSSPLASARSRRALSPLFPXDPVAAVAGPSPRQPSVRSPLDLSKILGYERISRLSGAQLPRWFSTGARASNRSSVQQVQEGASAKVTAFS

SEQ ID NO: 113436 - protein, 171 aa, Setaria italica
  misc_feature (49)..(49): Xaa can be any naturally occurring amino acid
  Transcript Sequence Number=SeqID_47462
  Gene Ontology: Mol. function=amino acid transmembrane transporter activity; Cellular component=integral to membrane; Biological process=amino acid transport
  Homolog annotation: Hit_ID=B6U8D2; Match level="QueryCoverage=100%, HitCoverage=29%, E-value=3e-56, Identity=66%"; Hit description=YfnA
FAKVHPKRRTPLHSQIWVGCVAAVMAGLFNVHMLSHILSVGTLVRNFSXIFQLEYLIPVVLTVRFLTLLSFWEQTSYSVVSACAITLRWNDKATSRRSLGIMSIWQEGVLCLVIVALCGFIVGLCYRYNYAIAFMVVAFLIAIAASFALQFRQVYVDPPGFSCPGVPLVPV

SEQ ID NO: 113437 - protein, 273 aa, Setaria italica
  misc_feature (7)..(7): Xaa can be any naturally occurring amino acid
  misc_feature (31)..(31): Xaa can be any naturally occurring amino acid
  misc_feature (78)..(78): Xaa can be any naturally occurring amino acid
  misc_feature (195)..(195): Xaa can be any naturally occurring amino acid
  Transcript Sequence Number=SeqID_47463
  Gene Ontology: Mol. function=amino acid transmembrane transporter activity; Cellular component=integral to membrane; Biological process=amino acid transport
  Homolog annotation: Hit_ID=B6U8D2; Match level="QueryCoverage=93%, HitCoverage=53%, E-value=1e-103, Identity=75%"; Hit description=YfnA
VSINILXPILLILLTAILCYGVKESSAVNTXFMTTLKIVIVIVVVFAGVFEVDVTNWSPFMPNGFKSVVTGATVVFFXYVGFDAVANSAEEAKSPQQSDLPIGILGSLLACVLLYVAVCLVITGMVPHTLLGEDAPLAEAFSAKGLKFVTVLISIGAVAGLTTTLLVGLYVQSRLYFGIGRDRLLPSIFAKVHPXRRTPLHSQIWVGCVAAVMAGLFNVHMLSHILSVGTLTSYSVVSACAITLRWNDKATSRRSLGIMSIWQEGVLCLSTIS

SEQ ID NO: 113438 - protein, 58 aa, Setaria italica
  Transcript Sequence Number=SeqID_47464
  Gene Ontology: Mol. function=amino acid transmembrane transporter activity; Cellular component=integral to membrane; Biological process=amino acid transport
  Homolog annotation: Hit_ID=B6U8D2; Match level="QueryCoverage=86%, HitCoverage=10%, E-value=7e-17, Identity=82%"; Hit description=YfnA
HFVAQLHEEAWYRFVILSLIAVGIYAGYGQYNAAPCSSDPSSIGYHEVPSEASIEMAK

SEQ ID NO: 113439 - protein, 101 aa, Setaria italica
  Transcript Sequence Number=SeqID_47465
  Gene Ontology: Mol. function=amino acid transmembrane transporter activity; Cellular component=integral to membrane; Biological process=amino acid transport
PTTRRPKSRRHQLPISSGAMEEADDHRPSSSSGRPFLSGLCSAALRRKPLGAHRRKPLGAHASAEASREDLERQLGVLDLVLLGIGASIGAGIFVVTGTVA

SEQ ID NO: 113440 - protein, 269 aa, Setaria italica
  misc_feature (18)..(18): Xaa can be any naturally occurring amino acid
  Transcript Sequence Number=SeqID_47466
  Gene Ontology: Mol. function=amino acid transmembrane transporter activity; Cellular component=integral to membrane; Biological process=amino acid transport
  Homolog annotation: Hit_ID=B6U8D2; Match level="QueryCoverage=100%, HitCoverage=56%, E-value=1e-108, Identity=73%"; Hit description=YfnA
  Pfam annotation: Domain name=DUF1634; Domain location=138-222; Score=- 34.3; E_value=0.049; Accession=PF07843.3; Description=Protein of unknown function (DUF1634)
AVANSAEEAKSPQSDLPXGILGSLLACVLLYVAVCLVITGMVPHTLLGEDAPLAEAFSAKGLKFVTVLISIGAVAGLTTTLLVGLYVQSRLYLGLGRDGLLPSIFAKVHPTRHTPLHSQIWVGCVAAVMAGLFNVHMLSHILSVGTLTGYSVVSACAITLRWNDKATSRRSLGIMSIWQEGVLCLVIVALCGFIVGLCYRYNYAIAFMVVAFLIAIAASFALQFRQVYVDPPGFSCPGVPLVPVISVFFNMVLFAQLHEEAWYRFVILS

SEQ ID NO: 113441 - protein, 556 aa, Setaria italica
  misc_feature (393)..(393): Xaa can be any naturally occurring amino acid
  Transcript Sequence Number=SeqID_47467
  Gene Ontology: Mol. function=amino acid transmembrane transporter activity; Cellular component=integral to membrane; Biological process=amino acid transport
  Homolog annotation: Hit_ID=B6U8D2; Match level="QueryCoverage=79%, HitCoverage=96%, E-value=0.0, Identity=71%"; Hit description=YfnA
  Pfam annotation: Domain name=AA_permease; Domain location=52-475; Score=70.0; E_value=9e-18; Accession=PF00324.13; Description=Amino acid permease
  Pfam annotation: Domain name=Spore_permease; Domain location=47-382; Score=-173.3; E_value=0.075; Accession=PF03845.5; Description=Spore germination protein
  Pfam annotation: Domain name=YibE_F; Domain location=184-408; Score= -157.1; E_value=0.086; Accession=PF07907.3; Description=YibEF-like protein
  Pfam module annotation: Pfam domain module=AA_permease::Spore _permease::YibE_F; Domain location=52-475::47-382::184-408
MEEADDHRPSSSTGRPFLSGLCSAALRRKPLGAHASAAASGEGLVRQLGVLELVLLGIGASIGAGIFVITGTVARDTGPGVTISFVLAGAACVLNALCYAELASRFPAVVGGAYLYSYTAINEITAFLVFTQLMVDYHIGAASIARSLASYLIQFLELLPFLKGHIPSWIGHGEEFFGGIVSINILAPILLILLTAILCYGVKESSAVNTFMTTLKIVIVIVVVFAGVFEVDVTNWSPFMPNGFKSVVTGATVVFFAYVGFDAVANSAEEAKSPQRDLPIGILGSLLACVLLYVAVCLVITGMVPYTLLGEDAPLAEAFAAKGLKFVTVLISIGAVAGLTTTLLVGLYVQSRLYLGLGRDGLLPSIFAKVHPTRHTPLHSQIWVGCVAAVMAXTSYSVVSACAITLRWNDKATSRRSLGIMSIWQEGVLCLVIVALCGFIVGLCYRYNYAIAFMVVAFLIAIAASFALQFRQVYVDPPGFSCPGVPLVPVISVFFNMVLFAQLHEEAWYRFVILSLIAVGIYAGYGQYNAAPCSSDPSSIGYHEVPSEASIEMATL

SEQ ID NO: 113442 - protein, 68 aa, Setaria italica
  Transcript Sequence Number=SeqID_47468
  Subcellular localization annotation: CTP_CleavageSite=31; ConfidenceScore=5.66e-01
YTENPLLVFAAPSAAILIPITPRTTSSRFFRNSHVLSSRFFLDSHVLSSRFFLNSLVLGSRRIFLVIC

SEQ ID NO: 113443 - protein, 108 aa, Setaria italica
  Transcript Sequence Number=SeqID_47469
QCTALRLCALSLMNCTRDNSVSASAVMLHKTVKEEPAAEHMTVKEEPAAEHMTVTEEPARSGPGGDGDNIAADGAANTTGGSQYKKGAEKSNKWKGGENFGGEKSNKR

SEQ ID NO: 113444 - protein, 81 aa, Setaria italica
  Transcript Sequence Number=SeqID_47470
MSGVQKKDYITLHSQNIREMFAVLQLGQGRNEHTNKAAPETSEKLQSAVWTTERACSWIRQLRMIDLRIIKLVSCSTLSTR

SEQ ID NO: 113445 - protein, 73 aa, Setaria italica
  Transcript Sequence Number=SeqID_47471
LFLVKLLVVWVKVLVVFHQTVLLSGLTIGATLRSIMKAMLLGSLLLLLLKIRKMLLTWALLLPNLLVTLLHLY

SEQ ID NO: 113446 - protein, 81 aa, Setaria italica
  Transcript Sequence Number=SeqID_47472
  Subcellular localization annotation: CTP_CleavageSite=58; ConfidenceScore=5.32e-01
PIPSCALPIPCYVSQLLSDSSPLLIATTTFVFARSTGRGRPAEGEPWRSMVVAWVQICGASRMQIRPRSDLGFPIYTDVKC

SEQ ID NO: 113447 - protein, 46 aa, Setaria italica
  Transcript Sequence Number=SeqID_47473
MGGDKESAKLKEEKKSKDEIHLKIKSKDKSSGDEDEKKEVEIEIEA

SEQ ID NO: 113448 - protein, 150 aa, Setaria italica
  Transcript Sequence Number=SeqID_47474
MPNIGFQCIKEEADLMCELLKHGAKPSDDIIQLSSVIRMCALSLVYLREPQSIASAAAMVGMANEAKRMCDWMKRENRLITLSLPQPRELHRSCVIRMKALDVMTRMLHECFFLPPSQILFALKPGSWRLLLEEHQDGPRLQQCEQCFFL

SEQ ID NO: 113449 - protein, 123 aa, Setaria italica
  Transcript Sequence Number=SeqID_47475
KEEADLMCELLKHGAKPSDDIIQLSSVIRMCALSLVYLREPQSIASAAAMVGMANEAKRMCDWMKRENRLITLSLPQPRELHRSCVIRMKALDVMTRMLHECFFSSSKVSGKYFFLVHGNRLT

SEQ ID NO: 113450 - protein, 205 aa, Setaria italica
  Transcript Sequence Number=SeqID_47476
SLLLVRFPNVLYGFVRQTSIIISPLVVYFFYLLVRKDLLEKLWGWDRLLPKATSVSLSVYITYLEEYHRRNVHAVTTDTSISALAETCLSNEKQLVSELKLRVTREQETSLMIRRSIILSCLIQEHARSVVHTADCSFSDVSGAALLCIAKEAGLMCELLRRGADPIDDYLINQGRVIRSCALSLMNCTSVYSSAAMLVRACLKT

SEQ ID NO: 113451 - protein, 215 aa, Setaria italica
  Transcript Sequence Number=SeqID_47477
MEPHDSPSAGRLNELVVAKPRKEDVAERSKEESERKYFSCLIKQMEMEKQMQMEEEEYFMPKPKIVKYHDLLEKLWGWDRLLPKATSVSLSVYITYLEEYHRRNVHAVTTDTSISALAETCLSNEKQLVSELKLWVTREQETSLMIRRSIILSCLIQEHARSVVHTADKSSFSDVSGAALLVCSFLPWPSCNTANISLIFDHAMLCSPFSAPRTF

SEQ ID NO: 113452 - protein, 92 aa, Setaria italica
  Transcript Sequence Number=SeqID_47478
QYTTKPHQKHQKSCNLLCGPLNVHAKEAELMFEFLRLEAPIDDELIIQCTAIRLCALSLMNCTRDNSVSASAVMLGMVKEAEMMCSWMRKNK

SEQ ID NO: 113453 - protein, 205 aa, Setaria italica
  Transcript Sequence Number=SeqID_47479
MGAAVAKFCLKMEEELLRCSLDDASTIIESSLIKERALKICGTRDIPSIVAFVCIKEEADLMCELLKHGAKPSDDIIQLSSVIRMCALSLVYLREPQSIASAAAMVGMANEAKRMCDWMKRENKLITLSLSQPRELYRSCLIRMKALDVMTRMLHGCFFSSSKQNTVRTAATSGHPDALPEEGASSQASVEDSPKPKRRPKPQQT

SEQ ID NO: 113454 - protein, 327 aa, Setaria italica
  Transcript Sequence Number=SeqID_47480
MGGDKESAKLKEEKKSKDEIHLKIKSKDKSSGDEDEKKEVEIEIEAKFVEKEEVEVKDSGDSAGSAGKGKEAKKDKEKEKSEKHEDEHKGEEDGEKVLKKKDKEKDKKKKEDNEDSGKVDKDKKSESKEKDKKDKKAKDKEKDGSESKGSNDEKQEKIKDKKKKKDDEDAGKEEKHKKSESKDKDKKAKDKDESESKHKEGQLENKNGEGAQKDVHGNKELAGASDLATREIKLTNDEPQKEDIDNEDAEVKKKNKEKKDKTDKKEDGKKKEKDGGGDDDEGEKKDKEKKEKKDKGDKKEDGKKNGKDGGEDEEGKKKDKEKKDKKK

SEQ ID NO: 113455 - protein, 489 aa, Setaria italica
  misc_feature (176)..(176): Xaa can be any naturally occurring amino acid
  Transcript Sequence Number=SeqID_47481
MEMEEEEEEEEEEEESGKITKERPLPHIVKYHDLLEKLWGWDRLLDLGIAVPLSVYTTYLEEYHRHNVHAATTFTSLSAPAGTCLTNEKRLVSALKLRVETEQETSLMIWRSIIPSCLIQEHARSVVHTADCSFSDVSGVALLCIAKEAELMFEFLRLEAPIDDELITQCTAIRLXALSLTNCTRDNSVSASAVMLGMVKEAEMMCSWMRKNNKPIDFSFYAAPSEMWDCNVIRRSTMEFMVNKLLKNSSAAKHKTVKEEPAAEHMTVKEEPAAEHMTVTEEPARSGPGGDGDNIAADGAANTTGGSQYKKGAEKSNKWKGGENFGGEKSNKRKRKEEDVLGKIWCWERLVIPPDSSVKWSDYRSYLEKYYESNASGFVAAAAAKNPQNVTDMGLAVAKFCLEMEEELLSVWNTQVLHRFGEPVAACAIVESSLIKEHALLICGTGAELDLPSAIAFVVCAPTLPEQTKQNMLFRIVPPECYSFLNPSD

SEQ ID NO: 113456 - protein, 292 aa, Setaria italica
  misc_feature (171)..(171): Xaa can be any naturally occurring amino acid
  misc_feature (189)..(189): Xaa can be any naturally occurring amino acid
  Transcript Sequence Number=SeqID_47482
MGMALLLMEQQTPQGAAWKKVFGRNYGVGKGLVPLCSYAKWSDYGRYLEEYYKHNANEFVAAAAAKNPQNTNTTDMGAAVAKVCLKMEEELLRCSLDDASTIIESSLIKDRALKICGTRDIPSIVAFVCIKEEADLMCELLKHGAKPSDDIIQLSSVIRMCALSLVYLRRXQSIASAAAMVGMANEAKXMCDWMKRENRLITLSLPQPRELHRSCVIRMKALDVMTRMLHECFFLPPSQILFALPQPRAILMLFQKKAPAPRLQSKTRPIPSAGPIPSRLKLAQNGKSSYKM

SEQ ID NO: 113457 - protein, 284 aa, Setaria italica
  Transcript Sequence Number=SeqID_47483
MGLGKAGPTIAVMLSGLTMADILRSITNTMLMSLLLLLLPRIHKIPILLIWVLLLPKVCLKMEEELLRCSLDDSSTIIESSLIKDRALKICGTRDIPSIVAFVCIKEEADLMCELLKHGAKPSDDIIQLSSVIRMCALSLVYLREPQSIASAAAMVGMANEAKRMCDWMKRENRLITLSLPQPRELHRSCVIRMKALDVMTRMLHECFFSSSKPNTVRTAATSGHPDALPEEGASSQASVEDSPKPKRRRKPNKPDALPEEGAGSQASVEDSPNPKCRPNPIKT

SEQ ID NO: 113458 - protein, 141 aa, Setaria italica
  Transcript Sequence Number=SeqID_47484
MGLEHLTSSANPSSGFTLYGNEAMEETKRLQGLRAETLMETCQSTESRDGMIRCPIPCKSSRWYRERELRAAQDLSDFILSKASPPYFVGSPPVRATNPLVHDAQFCAWKVQSVDQSLGIPIPTKGYNARYCAGKGSVTKA

SEQ ID NO: 113459 - protein, 83 aa, Setaria italica
  Transcript Sequence Number=SeqID_47485
PHNARVEVGCKSCLMGGCNTGIHCVCNVNLMLSCLFKSKKPNTWLSAVKDLVSVLITEYCKMVRDMEILCFRKFYVLNKCNWL

SEQ ID NO: 113460 - protein, 62 aa, Setaria italica
  Transcript Sequence Number=SeqID_47486
SFDIIQLFLSWRCSACGIKDGIARMDYDLREGKCPSNLMKPLVHQVCTLDVGVIFEVMVVKH

SEQ ID NO: 113461 - protein, 219 aa, Setaria italica
  Transcript Sequence Number=SeqID_47487
  Gene Ontology: Mol. function=oxidoreductase activity; Biological process=oxidation reduction
  Homolog annotation: Hit_ID=B3TM13; Match level="QueryCoverage=100%, HitCoverage=69%, E-value=2e-99, Identity=78%"; Hit description=Short- chain dehydrogenase Tic32
VRAFASEFVSRGLPLNILVNNAGVMAIPFALSKDGIEMQFATNHVGHFLLTHLLLDTMKKTSHESNVEGRIVNVSSEGHRFTYGEGIRFDKINDESVYSSIGAYGQSKLANILHANELARRFKEEDVNITANSLHPGSIVTNLLRYHSILDVLHRTLGKLVLKNAQQGAATTCYVALHPQVKGVSGKYFCDSNLYEPSEKAKDMALAKRLWDFSIELIT

SEQ ID NO: 113462 - protein, 151 aa, Setaria italica
  Transcript Sequence Number=SeqID_47488
  Subcellular localization annotation: CTP_CleavageSite=94; ConfidenceScore=5.28e-01
RKYVDMFGTSSNNSTVGSHITRKMTHLPVQLIDRTFFSTGTAIRSIAVSYGALVLRWLLSKTSVVQRTLLSRAIRSLYCWCDSLPFLVGVDVLMAMLCDCTMIHNHLYGQKFILGHNPNFQGESAMGMENNELCNEQPFLSSLLGNKRDYV

SEQ ID NO: 113463 - protein, 61 aa, Setaria italica
  Transcript Sequence Number=SeqID_47489
  Gene Ontology: Mol. function=acyl carrier activity; Cellular component=chloroplast; Biological process=fatty acid biosynthetic process
  Homolog annotation: Hit_ID=Q39514; Match level="QueryCoverage=96%, HitCoverage=14%, E-value=4e-16, Identity=62%"; Hit description=FatB2
RPDMLIDTFGFGRIIHDGLMFRQNFSIRSYEIGADRTASIETLMNHLQVRICYFSGVIVVN

SEQ ID NO: 113464 - protein, 65 aa, Setaria italica
  Transcript Sequence Number=SeqID_47490
  Gene Ontology: Mol. function=acyl carrier activity; Biological process=fatty acid biosynthetic process
GPFHLDSTDTCSEFARLFCCRGDTVEVDTWVSANGKNGMRRDWHIRDSITGNTILKATRFKSQPL

SEQ ID NO: 113465 - protein, 92 aa, Setaria italica
  Transcript Sequence Number=SeqID_47491
  Gene Ontology: Mol. function=acyl carrier activity; Cellular component=chloroplast; Biological process=fatty acid biosynthetic process
  Homolog annotation: Hit_ID=Q41634; Match level="QueryCoverage=90%, HitCoverage=20%, E-value=1e-13, Identity=49%"; Hit description=Uc FatB2
PYIHLYQSAPISILENHELASIVLDYKRECGRDSVLQSHTTVHTDCNSESGETTLHCEHLLSLESGPTMVKARTMWRPKGTKAQETVIPSSL

SEQ ID NO: 113466 - protein, 243 aa, Setaria italica
  Transcript Sequence Number=SeqID_47492
  Gene Ontology: Mol. function=acyl carrier activity; Cellular component=chloroplast; Biological process=fatty acid biosynthetic process
  Homolog annotation: Hit_ID=Q39514; Match level="QueryCoverage=76%, HitCoverage=45%, E-value=7e-51, Identity=56%"; Hit description=FatB2
  Pfam annotation: Domain name=Acyl-ACP_TE; Domain location=138-243; Score=11.3; E_value=4.9e-11; Accession=PF01643.9; Description=Acyl -ACP thioesterase
  Subcellular localization annotation: CTP_CleavageSite=50; ConfidenceScore=5.48e-01
MAASIAASAFFPGSPAPAPAAPKNGLGERPESLDVRGVAAKPGSSSNAVRAGKTRTHAAVPKVNGGGKSAVADGEHETVPSSVPRTFYNQLPDWSMLLAAITTIFLAAEKQWTLLDWKPKRPDMLIDTFGFGRIIHDGLMFRQNFSIRSYEIGADRTASIETLMNHLQETALNHVKTAGLLGDGFGSTPEMSKRNLFWVVSQMQAIVERYPCWGDTVEVDTWVSANGKNGMRRDWHIRDSITG

SEQ ID NO: 113467 - protein, 304 aa, Setaria italica
  Transcript Sequence Number=SeqID_47493
  Gene Ontology: Mol. function=acyl carrier activity; Cellular component=chloroplast; Biological process=fatty acid biosynthetic process
  Homolog annotation: Hit_ID=Q41634; Match level="QueryCoverage=84%, HitCoverage=64%, E-value=4e-72, Identity=51%"; Hit description=Uc FatB2
  Pfam annotation: Domain name=Acyl-ACP_TE; Domain location=24-290; Score=411.4; E_value=1.5e-120; Accession=PF01643.9; Description=Acyl- ACP thioesterase
YGTDRIVKKPKIEDSLVYKSLAHKCFHIHQLTLHSLNQHVNNVIACLMNHLQETALNHVKTAGLLGDGFGSTPEMSKRNLFWVVSQMQAIVERYPCWGDTVEVDTWVSANGKNGMRRDWHIRDSITGNTILKATSKWVMMNKLTRKLARIPDEVRTEIEPYFFERSAIADEDNRKLPKLPEDKSATAAKYVRTGLTPRWADLDINQHVNNVKYIAWILESAPISILENHELASIVLDYKRECGRDSVLQSHTTVHTDCNSESGETTLHCEHLLSLESGPTMVKARTMWRPKGTKAQETVIPSSL

SEQ ID NO: 113468 - protein, 155 aa, Setaria italica
  Transcript Sequence Number=SeqID_47494
  Gene Ontology: Mol. function=acyl carrier activity; Cellular component=chloroplast; Biological process=fatty acid biosynthetic process
  Homolog annotation: Hit_ID=Q39514; Match level="QueryCoverage=58%, HitCoverage=21%, E-value=1e-28, Identity=65%"; Hit description=FatB2
  Pfam annotation: Domain name=Acyl-ACP_TE; Domain location=74-155; Score=-109.0; E_value=0.0078; Accession=PF01643.9; Description=Acyl -ACP thioesterase
MAAAPRHLHLDDVPCVAARTSPPHCSGRWPAEVPKQMGTSKEDSRLRPSQSAAGNTIGLMLALAFGFGRIIHDGLMFRQNFSIRSYEIVADRTTSIETLMNHLQETALNHVKTAGLLDDGFGSTPEMSKRNLLWVVSQMQAIVERYPCWLTFCSD

SEQ ID NO: 113469 - protein, 80 aa, Setaria italica
  misc_feature (6)..(6): Xaa can be any naturally occurring amino acid
  misc_feature (37)..(37): Xaa can be any naturally occurring amino acid
  Transcript Sequence Number=SeqID_47495
  Gene Ontology: Mol. function=microtubule motor activity; Cellular component=microtubule associated complex; Biological process =microtubule-based movement
  Homolog annotation: Hit_ID=B9T1M8; Match level="QueryCoverage=100%, HitCoverage=8%, E-value=2e-23, Identity=68%"; Hit description =Kinesin heavy chain, putative
DNAPTXSLLSFVNSILDEIIENKNGEIPYVGYSKAMXHITCLLRKVILEIERRISTQAEHIRNQNNLMRAREEKYKSRIR

SEQ ID NO: 113470 - protein, 46 aa, Setaria italica
  Transcript Sequence Number=SeqID_47496
  Gene Ontology: Mol. function=microtubule motor activity; Cellular component=microtubule associated complex
  Homolog annotation: Hit_ID=Q93XF9; Match level="QueryCoverage=84%, HitCoverage=9%, E-value=6e-14, Identity=92%"; Hit description =Kinesin heavy chain (Fragment)
THYCKSHISHNRGDTIMYEFSVQMIEIYNEQIRDLLCSNGPEKKLV

SEQ ID NO: 113471 - protein, 569 aa, Setaria italica
  misc_feature (493)..(493): Xaa can be any naturally occurring amino acid
  Transcript Sequence Number=SeqID_47497
  Gene Ontology: Mol. function=microtubule motor activity; Cellular component=microtubule associated complex; Biological process =microtubule-based movement
  Homolog annotation: Hit_ID=Q93XF9; Match level="QueryCoverage=70%, HitCoverage=98%, E-value=0.0, Identity=80%"; Hit description=Kinesin heavy chain (Fragment)
  Pfam annotation: Domain name=Kinesin; Domain location=1-305; Score =468.6; E_value=9.1e-138; Accession=PF00225.15; Description=Kinesin motor domain
GDDGELIIANPTRKGNEGSKSFKFNKVLGPTASQDEVFKDIQPLIRSVLDGYNVCIFAYGQTGSGKTYTMTGPENATEKEWGVNYRALNDLFHISHNRGDTIMYEFSVQMIEIYNEQIRDLLCSNGPEKKLGILNASQPNGLAVPDATLHPVSSMSDVIQLMRMGLANRAVGSTALNERSSRSHSVVTIHIRGLDLKTGATLRGALHLVDLAGSERVDRSAVTGDRLKEAQHINKSLSALGDVIFSLSQKNAHVPYRNSKLTQVLQTSLGGHAKTLMFVQINPDVSSYSETLSTLKFAERVSGVELGAAKANKEGKDIREFMEQLSLLKDKIAKKDEEINRLQLLKTQTPRARTVKRADSPLKHSSSSPGISSLGSRIKHRRTASGGKAMNIGSRAGSDADNFSDISDRHSESGSMQSVDDIQPQRGIMGLPKISLGEMSQNSADPELACFGYAESEERLSDISDSGLSMGTETDVSVGSIVELTLFPEQEKXSSTLKEKEKAPKTPNDRLSKVATRVQRTTAPKPAQTSLWPKLRDPPAPRSPLSAARTSSTQAISAPRTSNTTKRWT

SEQ ID NO: 113472 - protein, 607 aa, Setaria italica
  misc_feature (32)..(32): Xaa can be any naturally occurring amino acid
  Transcript Sequence Number=SeqID_47498
  Gene Ontology: Mol. function=microtubule motor activity; Cellular component=microtubule associated complex; Biological process =microtubule-based movement
  Homolog annotation: Hit_ID=Q6H535; Match level="QueryCoverage=50%, HitCoverage=34%, E-value=3e-80, Identity=51%"; Hit description =Putative Carboxy-terminal kinesin 2
PPGGGWGTDVARFLAAVERMGLPTFAASDLDXDRFGSHVGEGLHCSLEENGRMPSMEFSIRENGHSTQNSGFGEESKQARGNLQKVSKSPGPSEPSSPMSRPELSSISRHAGHNFHEVFHLRHGVYSDVPTSKILEMMKSTNLDNAPTQSLLSFVNSILDEIIENKNGEIPYHITCLLRKVILEIERRISTQAEHIRNQNNLMRAREEKYKSRIRVLEALASGMSGQTQIHSNATNGKANVAADYVMKMAKSKGEERRLVDKDMPSSMKDKEDVTRLTKDKEDMARLLKDKEEIIRLMKEKEEIVTLIKEKEDIGTLKNGKVDDKDQSADVHAAKSMTYDDKIFRMMKEKEESNHTIMKLKLELETMKSSYEESQSMLKSVKEDMLKLLKDKDNSDIIISKLRQELAEAGKSHNRRIQELETRALQANEEFEQRIKAVELMLEDSRMRASDFEESLKSRIESWEQKEIMVNQFVGLQIQSVQDLRLSSVSIRHEIQNCQKRWCEEISGLGQSLNVLINDAENYHAALEENRKLFNEIQELKGNIRVHCRIRPFLPGEDRKSTTIEYVGDDGELIMQNPNTKKERREREEEERRKEEGKEEREEEERK

SEQ ID NO: 113473 - protein, 68 aa, Setaria italica
  Transcript Sequence Number=SeqID_47499
  Gene Ontology: Mol. function=hydrolase activity
  Homolog annotation: Hit_ID=B9R7H1; Match level="QueryCoverage=73%, HitCoverage=4%, E-value=5e-11, Identity=60%"; Hit description =Hydrolase, putative
MGSDKQGGSPRPLLGNLKMGRVRTILTHTYPYPHEHSRHIMTAVIIACLFFILLSNLCMSVCILSDDI

SEQ ID NO: 113474 - protein, 82 aa, Setaria italica
  Transcript Sequence Number=SeqID_47500
  Subcellular localization annotation: CTP_CleavageSite=13; ConfidenceScore=5.24e-01
SQVPSHRPHACCRPAAAVTRPLKRPVTSSRLVPPESGRELPLVRPLAVPPPFLILLYRGFGFIAELRDGNVLEERIWAASNH

SEQ ID NO: 113475 - protein, 110 aa, Setaria italica
  Transcript Sequence Number=SeqID_47501
  Gene Ontology: Mol. function=protein dimerization activity
  Homolog annotation: Hit_ID=Q2R244; Match level="QueryCoverage=92%, HitCoverage=24%, E-value=9e-29, Identity=64%"; Hit description=F-box domain containing protein, expressed
KLKGKTREVIGSSYGWIITADEISELQLVNPITGDQIALPSVTTIEQVEPIFDDAGTLCNYEYLWYTGEDWLYDKPSILDLSKLRDKFDKAFLSSDPSTGDYFVVLILLD

SEQ ID NO: 113476 - protein, 158 aa, Setaria italica
  Transcript Sequence Number=SeqID_47502
  Gene Ontology: Mol. function=binding
  Homolog annotation: Hit_ID=Q6K6B1; Match level="QueryCoverage=99%, HitCoverage=13%, E-value=2e-68, Identity=76%"; Hit description=CLIP -associating protein-like
  Pfam annotation: Domain name=HEAT; Domain location=109-145; Score =21.0; E_value=0.0049; Accession=PF02985.14; Description=HEAT repeat
  Subcellular localization annotation: CTP_CleavageSite=42; ConfidenceScore=5.12e-01
QQERKHCFSTPKKSAVSKEPRNSYTPNFRRPLLSKQMTNWFYASTKSDLDEKKLILGEMISNMDLPSSLTEALSLGLNPRSDWMMKVYALDFLKQCLLERGPKGIQEVAQNFEKVMRLVCRYLDDPHHKVAQAALSSLAEIMPAFQSKSERYLDKTLP

SEQ ID NO: 113477 - protein, 296 aa, Setaria italica
  misc_feature (188)..(188): Xaa can be any naturally occurring amino acid
  Transcript Sequence Number=SeqID_47503
  Gene Ontology: Mol. function=binding
  Homolog annotation: Hit_ID=B4FYX3; Match level="QueryCoverage=100%, HitCoverage=100%, E-value=1e-154, Identity=90%"; Hit description =Pollenless3
  Pfam annotation: Domain name=TPR_1; Domain location=158-191; Score =20.3; E_value=0.0081; Accession=PF00515.20; Description =Tetratricopeptide repeat
  Pfam annotation: Domain name=TPR_1; Domain location=192-225; Score =5.5; E_value=1.3; Accession=PF00515.20; Description=Tetratricopeptide repeat
  Pfam annotation: Domain name=TPR_2; Domain location=158-191; Score =19.8; E_value=0.012; Accession=PF07719.9; Description=Tetratricopepti de repeat
  Pfam annotation: Domain name=TPR_2; Domain location=192-225; Score =10.2; E_value=1.8; Accession=PF07719.9; Description=Tetratricopeptide repeat
  Pfam annotation: Domain name=TPR_2; Domain location=62-95; Score=1.6; E_value=21; Accession=PF07719.9; Description=Tetratricopeptide repeat
  Pfam annotation: Domain name=TPR_4; Domain location=158-183; Score =9.0; E_value=3.7; Accession=PF07721.6; Description=Tetratricopeptide repeat
  Pfam annotation: Domain name=TPR_4; Domain location=192-217; Score =18.8; E_value=0.023; Accession=PF07721.6; Description=Tetratricopepti de repeat
  Pfam module annotation: Pfam domain module=TPR_1::TPR_1::TPR_2::TPR _2::TPR_2::TPR_4::TPR_4; Domain location=158-191::192-225::158 -191::192-225::62-95::158-183::192-217
MASSKRRGGVGGEKKDLFHVVHKVPAGDSPYVKAKHLQLVEKQPDLAIVWFWKAINSGDRVDSALKDMAVVMKQQDRSEEAIEAIRSFRHLCSKQAQESLDNLLIDLYKKCGKVEEQIELLKQKLKMIYLGEAFNGKATKKARSHGKKFQVSIQQETSRILGNLGWAYMQQNNFEAAELVYRKAQTSXRPDANRACNLGLCLIKQGRHEEARQALEDVRLRRIYGSEDEKVVARAEQLLHELNLINCVSSPFDVGLSVHEEIMERLDLVMNEWTPFRSRRLPVFEEIATFRDQIAC

SEQ ID NO: 113478 - protein, 87 aa, Setaria italica
  Transcript Sequence Number=SeqID_47504
  Subcellular localization annotation: CTP_CleavageSite=30; ConfidenceScore=5.24e-01
MAAPLARAPLPRAPLRPAPAVQLVPRGRLRATAASGGGAAGPVLRTCKNCKQQYDPVANHPSACRYHTAHFGGETKRKFESVYAGGT

SEQ ID NO: 113479 - protein, 58 aa, Setaria italica
  Transcript Sequence Number=SeqID_47505
KMLVCGNMLLARCGAEDPFDRHTHRCSKLPSLPSPSALRSRRCQAERARPSCPPNQTP

SEQ ID NO: 113480 - protein, 80 aa, Setaria italica
  Transcript Sequence Number=SeqID_47506
  Subcellular localization annotation: CTP_CleavageSite=45; ConfidenceScore=5.07e-01
TTKLGLDNGNHTGCQVCFLFLSKFILLNMSNLFLLFALSVLHKVASSMLFPSHCFEIAILLSFRKSTQAPSAYYFTDPTI

SEQ ID NO: 113481 - protein, 43 aa, Setaria italica
  Transcript Sequence Number=SeqID_47507
KPCYDKITAADQTVRQPIQVQISNLASALLFCKHMMYQPHVSS

SEQ ID NO: 113482 - protein, 375 aa, Setaria italica
  Transcript Sequence Number=SeqID_47508
  Gene Ontology: Mol. function=DNA binding
  Homolog annotation: Hit_ID=O04697; Match level="QueryCoverage=14%, HitCoverage=8%, E-value=1e-14, Identity=66%"; Hit description=DNA -binding protein PD2
MVESFINSYRVANDGKFPSVNLTHKEVGGSYYIVREIVRDVIQENRVLGPGGLDSMALSFEDCPDSSEVSMKHELGQDNIESLAMSDDGQAGQGSVSESSSSEESFSLQNNSINTDILLGSSNILEAGVLKSIVQNGTASGTAFLETNLEKQDEVPSGGSIEVGLNSSEELNSQEDAHEGMGSVATDILPSEATDVYETNGALLREHEMLPNDSHGGSNDSVVDDGNLLAAANGALQEKQASFQEHDPSNESVQGDVQSLDCQISTTLSANPINGFDSEAEVTTKTIEASDTKGLLHTEDQHSVVQVDGSEFKKSTSGFTKEVVEATDARHEQGMSTTTVISRHALCLLTLQKDDNLFWLVLRAFVVAISKIWAK

SEQ ID NO: 113483 - protein, 44 aa, Setaria italica
  Transcript Sequence Number=SeqID_47509
LTSELYVFSSHRWAIQYKQSGHTLHRRSHVLAFASADVCIRLFE

SEQ ID NO: 113484 - protein, 152 aa, Setaria italica
  Transcript Sequence Number=SeqID_47510
  Subcellular localization annotation: CTP_CleavageSite=64; ConfidenceScore=5.61e-01
MACSTSLCFSASIPPPPASCSSGSSRFLAIQHVSSAPSLFRWAIQYKQSGHTLHRRSHVLAFASADAPQGKRNSGANVVMVDPLEAKRLAAKQMQEIRAKEKLKRRRQAEAINGALAMIGLTAGLVLESQTGKGILGQLAGYLAAISSLFEQ

SEQ ID NO: 113485 - protein, 100 aa, Setaria italica
  Transcript Sequence Number=SeqID_47511
  Subcellular localization annotation: CTP_CleavageSite=62; ConfidenceScore=5.71e-01
PTAADHRVKRAHRGAAQPHPATAMATTSLASSSRHHPHLFRSHRNPNSSFRTSSRGRLQPIRCSSPQPATGGEAEESERRRLSKQSSWKAKDADGDDYLY

SEQ ID NO: 113486 - protein, 129 aa, Setaria italica
  Transcript Sequence Number=SeqID_47512
  Gene Ontology: Mol. function=protein binding; Cellular component =extracellular region
  Homolog annotation: Hit_ID=B6TA85; Match level="QueryCoverage=79%, HitCoverage=22%, E-value=7e-48, Identity=88%"; Hit description =Protein binding protein
GIGGGGGGGQGGSSGSSPAPSPSGPRACDFENERLYRAYLVIQQFRQTVTCDPMGITPSWSGTDLCSSYKGFFCERPPNVTDRTIASVDFNGYMLRSDSLQGFINSLPDLALFHANSNDFGGAVPALGG

SEQ ID NO: 113487 - protein, 694 aa, Setaria italica
  Transcript Sequence Number=SeqID_47513
  Gene Ontology: Mol. function=protein binding; Cellular component =cytoplasm; Biological process=intracellular protein transport
  Homolog annotation: Hit_ID=Q8RZ91; Match level="QueryCoverage=100%, HitCoverage=73%, E-value=0.0, Identity=77%"; Hit description =Vacuolar protein sorting-associated protein VPS16-like
  Pfam annotation: Domain name=Vps16_C; Domain location=355-687; Score =211.7; E_value=1.9e-60; Accession=PF04840.4; Description=Vps16, C -terminal region
  Pfam annotation: Domain name=Vps16_N; Domain location=1-261; Score= -4.0; E_value=2.3e-13; Accession=PF04841.5; Description=Vps16, N -terminal region
  Pfam module annotation: Pfam domain module=Vps16_C::Vps16_N; Domain location=355-687::1-261
TDIEADDPHPRDLADPGVGDEEHVLCMAVVEPQFVMSGSPEVLLAVGDRVVAVDEDGVQVLGEELEIGPVQKMAVSPNGKLLAAFAHDGRLLVIPTDFSRIIFEYECDSALPPEQIAWCGLDSVLLYWPEVLLMVGPNGDPVQYNYDEPIKLIPECDGVRILSNSSMEFLHRVPDSTTLIFGIGSMSPAALLYDARDHYDRQSAKAYDNYQLISSSLPEAIEACIDAAGHEFDVSRQRTLLRAATYGLAFCSRFPHERFQEMCKMLRVLNAVRDPEIGMPLTIQQYKLLTAPVLIGRLINANQHLLALRISEYLNLNPEVVIMHWACEKITASASLPDTVLLEGLLDKLRLCKGISYAAVAAHADNCARRRLAAMLVDHESQSSKQIPLLLSIDEQDKALSKAIESGDTDLVYLVLFHIWQKVAIEKKAHLDFFGVINARPVARDLFIAYARHSKHEDLKDFFLSTGRLQDAAFLMLKESSELEKNPMASKGSHLQQVRPIEQAHRLFAETKEHVFESKASEEHAKLLRSQHELEVSTKQAIFMGSSVSDTIKTCIAMGNERAALKVKSEFKVPDKRWYWLKTCALATVGNWDALEKFSRERRPPGGYKPFVEACIDAGQKTEALKYIPKLTDPRERSEAYARMGMAKEAADAASQAKDSDELFGRLKITLAQNSAAASIFDTLRDRLSFQGAY

SEQ ID NO: 113488 - protein, 93 aa, Setaria italica
  misc_feature (83)..(83): Xaa can be any naturally occurring amino acid
  Transcript Sequence Number=SeqID_47514
  Gene Ontology: Mol. function=electron carrier activity; Cellular component=extracellular region; Biological process=response to oxidative stress
  Homolog annotation: Hit_ID=B6TMI9; Match level="QueryCoverage=100%, HitCoverage=27%, E-value=6e-25, Identity=59%"; Hit description =Peroxidase 1
DNSTTTTELDPGSSDTFDTSYYRHVARRRGLLRSDASLLDHRFTRAYVLQAASGRYDGHFYHDFAVSMAKMAAIGVLTGDQGXEIRRKCNVVN

SEQ ID NO: 113489 - protein, 84 aa, Setaria italica
  Transcript Sequence Number=SeqID_47515
QEAGGADLQQVRAKEEEEELVFATWDCGSPLYDSFELASLHHVLESHLMVLPFPGVVASRSRRLEHRGGTAAPPDATVRRRRKV

SEQ ID NO: 113490 - protein, 140 aa, Setaria italica
  Transcript Sequence Number=SeqID_47516
  Gene Ontology: Mol. function=transferase activity; Cellular component= membrane
  Homolog annotation: Hit_ID=B6T2U9; Match level="QueryCoverage=99%, HitCoverage=33%, E-value=2e-72, Identity=88%"; Hit description =Secondary cell wall-related glycosyltransferase family 47
LKWPFWNRTDGADHFFVVPHDFAACFHYQEEKAIERGILPLLRRATLVQTFGQKNHVCLKEGSIIIPPYAPPQKMQAHLIPPDTPRSIFVYFRGLFYDNGNDPEGGYYARGTRASLWENFKNNPLFDISTDHPATYYEDM

SEQ ID NO: 113491 - protein, 117 aa, Setaria italica
  Transcript Sequence Number=SeqID_47517
  Gene Ontology: Mol. function=transferase activity; Cellular component= membrane
  Homolog annotation: Hit_ID=B9RG08; Match level="QueryCoverage=100%, HitCoverage=46%, E-value=2e-51, Identity=84%"; Hit description =Catalytic, putative
VFGCIPVIIADDIVLPFADAIPWEEIGVFVDEEDVPKLDSILTSIPVEDILRKQRLLANPSMKKAMLFPQPAQPRDAFHQILNGLARKLPHTQRVYLQPGEKHLNWTAGPVGDLKSW

SEQ ID NO: 113492 - protein, 85 aa, Setaria italica
  Transcript Sequence Number=SeqID_47518
  Gene Ontology: Mol. function=transferase activity; Cellular component= membrane
  Homolog annotation: Hit_ID=B6T2U9; Match level="QueryCoverage=98%, HitCoverage=20%, E-value=5e-32, Identity=79%"; Hit description =Secondary cell wall-related glycosyltransferase family 47
GDVPKLDTILTSMPIDDILRKQRLLANPSMKQAMLFPQPAQPRDAFHQILNGLARKLPHPEGTYLQPGDQRLNWTAGPVGDLKPW

SEQ ID NO: 113493 - protein, 427 aa, Setaria italica
  Transcript Sequence Number=SeqID_47519
  Gene Ontology: Mol. function=transferase activity; Cellular component= membrane
  Homolog annotation: Hit_ID=B6T2U9; Match level="QueryCoverage=90%, HitCoverage=92%, E-value=0.0, Identity=85%"; Hit description =Secondary cell wall-related glycosyltransferase family 47
  Pfam annotation: Domain name=Exostosin; Domain location=57-355; Score= 367.0; E_value=3.4e-107; Accession=PF03016.7; Description=Exostosin family
MTAARAKVLLAVASLSCLLLSSPAASAAAGAEVAGGVAHRNIERIAGSAGDVLEDNPVGRLKVFIYDLPRKYNKKMVTKDPRCLNHMFAAEIFMHRFLLSSAVRTLNPKEADWFYTPVYTTCDLTNAGLPLPFKSPRVMRSAIQYISNKWPFWNRTDGADHFFVVPHDFAACFHYQEEKAIERGILPLLRRATLVQTFGQENHVCLKEGSIIIPPYAPPQKMQAHLISPDTPRSIFVYFRGLFYDTGNDPEGGYYARGARASLWENFKSNPLFDISTDHPATYYEDMQRAVFCLCPLGWAPWSPRLVEAVVFGCIPVIIADDIVLPFADAIPWEEIGVFVEEKDVPKLDTILTSMPIDDILRKQRLLANPSMKQAMLFPQPAQPRDAFHQILNGLARKLPHPEGTYLQPGDQRLNWTAGPVGDLKPW

SEQ ID NO: 113494 - protein, 73 aa, Setaria italica
  Transcript Sequence Number=SeqID_47520
QNIALLHEVVFPAQVIYDFIVKLGKNCRLKPSHRTKEQDHAIGYRNTTLANCTEPCKYIITLASSMPTEKRTS

SEQ ID NO: 113495 - protein, 89 aa, Setaria italica
  Transcript Sequence Number=SeqID_47521
  Gene Ontology: Mol. function=transferase activity, transferring phosphorus-containing groups; Cellular component=chloroplast; Biological process=phosphorylation
  Homolog annotation: Hit_ID=C5IHD0; Match level="QueryCoverage=86%, HitCoverage=8%, E-value=1e-35, Identity=87%"; Hit description =Cytosolic orthophosphate dikinase
  Pfam annotation: Domain name=PEP-utilizers_C; Domain location=1-89; Score=-175.6; E_value=0.0083; Accession=PF02896.10; Description=PEP -utilising enzyme, TIM barrel domain
ANFLPLYMSQGILQHDPFEVLDQKGVGELVKIATERGRRSRPDLKVGICGEHGGEPSSVAFFAKVGLDYVSCSPFRVPIARLAAAQAAL

SEQ ID NO: 113496 - protein, 156 aa, Setaria italica
  misc_feature (68)..(68): Xaa can be any naturally occurring amino acid
  Transcript Sequence Number=SeqID_47522
  Gene Ontology: Mol. function=receptor activity
  Homolog annotation: Hit_ID=B6T6I2; Match level="QueryCoverage=100%, HitCoverage=38%, E-value=2e-17, Identity=36%"; Hit description=F-box domain containing protein
ILMGSCNGLVLFLHSRRSEAHEREDYIVCNPATKEWVLVPGTGTQCDDELNYSVIAGYLIFDPAVSSXFKLVQFMFGTNMTLLQVHTYSSESRVWSGRSTECWSDVSIQTWVFSAIVNGMLHLVARLGSDYQVVIVAVDEEEGKHRIISWPEEERG

SEQ ID NO: 113497 - protein, 85 aa, Setaria italica
  Transcript Sequence Number=SeqID_47523
  Homolog annotation: Hit_ID=B9RG78; Match level="QueryCoverage=98%, HitCoverage=5%, E-value=8e-31, Identity=75%"; Hit description =Ankyrin-repeat containing protein, putative
EACRSMGIPNSQHKTPLHLCIETWNTAVVRRWVEVASLEEIAEAIDVPSPVGTALCMAAALKKEHEKEGRELVRTLLAVGADPTA

SEQ ID NO: 113498 - protein, 457 aa, Setaria italica
  Transcript Sequence Number=SeqID_47524
  Gene Ontology: Mol. function=hydrolase activity, hydrolyzing O -glycosyl compounds; Cellular component=chloroplast; Biological process=carbohydrate metabolic process
  Homolog annotation: Hit_ID=Q84L53; Match level="QueryCoverage=98%, HitCoverage=55%, E-value=0.0, Identity=88%"; Hit description =Isoamylase
  Pfam annotation: Domain name=Alpha-amylase; Domain location=170-448; Score=-31.1; E_value=1.1e-07; Accession=PF00128.16; Description =Alpha amylase, catalytic domain
  Pfam annotation: Domain name=CBM_48; Domain location=23-118; Score =114.7; E_value=3e-31; Accession=PF02922.10; Description=Carbohydrate- binding module 48 (Isoam
  Pfam module annotation: Pfam domain module=Alpha-amylase::CBM_48; Domain location=170-448::23-118
AEAVEERYALGGACRVLAGMPAPLGATALDGGVNFAVYSAGATAASLCLFTPDDLEADTVTEEVPLDPLLNRTGNVWHVFIEGEQVHEMLYGYRFDGMFAPERGQYYDASNVVVDPYAKAVISRGQYGVPGPDGDCWPQMAGMVPLPYSTFDWQGDLPLKYHQKDVVIYEMHLRGFTKHDSSNTKHPGTYIGAVSKLDYLKELGVNCVELMPCHEFNELEYFSSSSKMNFWGYSTINFFSPMARYSSRGNSGRDAINEFKVFVREAHKRGIEVIMDVVFNHTAEGNEKGPILSFRGIDNSTYYMLAPKGEFYNYSGCGNTFNCNHPVVREFILDCLRYWVTEMHVDGFRFDLASIMTRACSLWDPVNVYGGPMGGDMTTTGTPLVRPPLVDMISNDPILGGVKLIAEAWDAGGLYQVGQFPHWNIWSEWNGKYRDTVRQFIKGTDGFAGAFAECLCG

SEQ ID NO: 113499 - protein, 65 aa, Setaria italica
  Transcript Sequence Number=SeqID_47525
  Gene Ontology: Mol. function=hydrolase activity, hydrolyzing O -glycosyl compounds; Cellular component=chloroplast; Biological process=carbohydrate metabolic process
  Homolog annotation: Hit_ID=Q84L53; Match level="QueryCoverage=83%, HitCoverage=6%, E-value=3e-23, Identity=90%"; Hit description =Isoamylase
NCEIHNSLLFYHQSGGRKPWHSVNFVCAHDGFTLADLVTYNNKYNLSNGEDNRDGENHNLSWNCG

SEQ ID NO: 113500 - protein, 375 aa, Setaria italica
  Transcript Sequence Number=SeqID_47526
  Gene Ontology: Mol. function=hydrolase activity, hydrolyzing O -glycosyl compounds; Cellular component=chloroplast; Biological process=carbohydrate metabolic process
  Homolog annotation: Hit_ID=Q41742; Match level="QueryCoverage=98%, HitCoverage=44%, E-value=0.0, Identity=89%"; Hit description=Su1p (Fragment)
LGYYLLCLTRACSLWDPVNVYGGPMGGDMTTTGTPLVRPPLVDMISNDPILGGVKLIAEAWDAGGLYQVGQFPHWNIWSEWNGKYRDTVRQFIKGTDGFAGAFAECLCGSPQLYQSGGRKPWHSVNFVCAHDGFTLADLVTYNNKYNLSNGEDNRDGENHNLSWNCGEEGEFASLSVRRLRKRQMRNFFVCLMVSQGVPMFYMGDEYGHTKGGNNNTYCHDHYVNYFRWDKKEEQSSDLYRFCRLMTKFRKECESLGLEDFPTSEQLHWHGHQPGKPDWSEGSRFVAFSMKDETKGEIYVAFNTSHLPVVVGLPERPGFRWEPVVDTGKAAPYDFLADDLPDRALTINQFSHFLNSNLYPMLSYSSIVLVLHPDA

SEQ ID NO: 113501 - protein, 123 aa, Setaria italica
  misc_feature (9)..(9): Xaa can be any naturally occurring amino acid
  Transcript Sequence Number=SeqID_47527
  Gene Ontology: Mol. function=aspartic-type endopeptidase activity; Biological process=proteolysis
  Homolog annotation: Hit_ID=B2CSI3; Match level="QueryCoverage=81%, HitCoverage=31%, E-value=3e-28, Identity=57%"; Hit description =Putative nucellin-like aspartic protease
PTQLASRGXISNVFGHCMTTDPSSGGYLFLGDDYIPRWGMTWVPVRNGPADNVRRAQLQQVNHGDQQLNVQGKLTQVIFDSGSTHTYFPHEVYLNLIAAVSVNPWNHGTGQFCVPYVFLKFNS

SEQ ID NO: 113502 - protein, 215 aa, Setaria italica
  misc_feature (107)..(107): Xaa can be any naturally occurring amino acid
  misc_feature (144)..(144): Xaa can be any naturally occurring amino acid
  Transcript Sequence Number=SeqID_47528
  Gene Ontology: Mol. function=aspartic-type endopeptidase activity; Biological process=proteolysis
  Homolog annotation: Hit_ID=B2CSI3; Match level="QueryCoverage=94%, HitCoverage=60%, E-value=2e-55, Identity=54%"; Hit description =Putative nucellin-like aspartic protease
LGDDYIPRWGMTWVPVRNGPADNVRRAQLQQVNHGDQQLNVQGKLTQVIFDSGSTHTYFPHEVYLNLIAAVSLNGASPRFVHDDSDKTLPFCMKADFSVRSVDDVKXFFKPLSLQFKKQFFFSRTFNIRPEDYLIVSSCGIHFXDKGNVCLGVLDGTAIGYDSVIIVGDVSLRGKLIAYDNDENQLGWIDSDCTDPSEQSRIPFFLRKVLHNQLL

SEQ ID NO: 113503 - protein, 431 aa, Setaria italica
  misc_feature (20)..(20): Xaa can be any naturally occurring amino acid
  Transcript Sequence Number=SeqID_47529
  Gene Ontology: Mol. function=aspartic-type endopeptidase activity; Cellular component=anchored to membrane; Biological process =proteolysis
  Homolog annotation: Hit_ID=Q9M9A8; Match level="QueryCoverage=89%, HitCoverage=69%, E-value=1e-103, Identity=47%"; Hit description =F27J15.15
  Pfam annotation: Domain name=Asp; Domain location=60-407; Score= -67.2; E_value=1.4e-09; Accession=PF00026.15; Description=Eukaryotic aspartyl protease
RARRRRRRGRGGRKSFLLPXLYPKPHRGGGEARKRASGGAAENLTAAAFPSTGNVFSTGLYYTTVSIGNPPRGYFVDVDTGSDITWIQCDTPSRSCAKGAHSPYRPAQANIVPASDPLCERVQRDPNQCNYDINYADRSSSMGVYVRDNMQLISEDGERENLDIVFGCGYDQRGNILDTLENTDGVLGLGSREISLPTQLASRGIISNVFGHCMTTDPSSGGYLFLGDDYIPRWGMTWVPVRNGPADNVRRAQLQQVNHGDQQLNVQGKLTQVIFDSGSTHTYFPHEVYLNLIAALNGASPRFVHDDSDKTLPFCMKADFSVRSVDDVKHFFKPLSLQFKKQFFFSRTFNIRPEDYLIVSDKGNVCLGVLDGTAIGYDSVIIVGDVSLRGKLIAYDNDENQLGWIDSDCTDPSEQSRIPFFLRKVLHNQLL

SEQ ID NO: 113504 - protein, 128 aa, Setaria italica
  Transcript Sequence Number=SeqID_47530
  Gene Ontology: Mol. function=RNA binding; Cellular component =ribonucleoprotein complex; Biological process=mRNA processing
  Homolog annotation: Hit_ID=Q7XUX0; Match level="QueryCoverage=99%, HitCoverage=98%, E-value=1e-53, Identity=81%"; Hit description =OSJNBa0027P08.15 protein
  Pfam annotation: Domain name=LSM; Domain location=13-81; Score=78.3; E_value=2.7e-20; Accession=PF01423.14; Description=LSM domain
MSWAGPDEILLSTSLAGFLDKKLIVLLRDGRKLLGTLCSFDQFANVVLQGACERVIVGEQYCDVPLGLYVIRGENVVLIGELDREKDELPAHMTCVSEAEIRKAEKAEREARDLKGTMRKRMEFLDFD

SEQ ID NO: 113505 - protein, 232 aa, Setaria italica
  misc_feature (8)..(8): Xaa can be any naturally occurring amino acid
  misc_feature (165)..(165): Xaa can be any naturally occurring amino acid
  Transcript Sequence Number=SeqID_47531
  Gene Ontology: Mol. function=acetylglucosaminyltransferase activity; Cellular component=membrane
  Homolog annotation: Hit_ID=B6UEF2; Match level="QueryCoverage=99%, HitCoverage=56%, E-value=1e-125, Identity=92%"; Hit description =Xylosyltransferase 1
  Pfam annotation: Domain name=Branch; Domain location=1-110; Score= -21.4; E_value=2.1e-06; Accession=PF02485.13; Description=Core-2I -Branching enzyme
FSSSVPRXLNFIDHTSDIGWKESQRVQPIIVDAGIYLAGRNQFFQATEKRDTPDGFKFFTGSPWVILNRRFIEYCVFGWENLPRTLLMYFTNVMLPLEGYFHSVACNSDFRNFTVNNDLRYMEWDDPPQMEPHFLNVTHYDELVGSGVPFARKFKENEPLLDKIXDIKVLRRWRHRPVPGAWCTGRRRWFSDPCSQWSNVNIVRPGPQAEKFRRYINQILEESKSSNNSCKQ

SEQ ID NO: 113506 - protein, 200 aa, Setaria italica
  misc_feature (89)..(89): Xaa can be any naturally occurring amino acid
  misc_feature (91)..(91): Xaa can be any naturally occurring amino acid
  Transcript Sequence Number=SeqID_47532
  Gene Ontology: Mol. function=RNA binding; Cellular component=exosome (RNase complex); Biological process=rRNA processing
  Homolog annotation: Hit_ID=B8A4H5; Match level="QueryCoverage=93%, HitCoverage=94%, E-value=9e-34, Identity=43%"; Hit description=Novel protein similar to vertebrate exosome component 1 (EXOSC1)
  Pfam annotation: Domain name=EXOSC1; Domain location=76-147; Score =147.1; E_value=5.3e-41; Accession=PF10447.1; Description=Exosome component EXOSC1CSL4
MAATAMDHDGGGGDVVTPGELLGNSLTLVAGRGAYADGRSVRASVTGHRRIVPPAPGSDDQRSTVEVVGHKAHGAVPQPGSVVIARVTXVXPRMANADIMCVDSKAIKEKFTGLIRQQDVRATEIDKVDMYQSYRPGDIVRAVVLSLGDARAYYLSTAKNELGVVSAQSIAGGTLVPVSWTEMQCDLTGQIEQRKVAKVE

SEQ ID NO: 113507 - protein, 125 aa, Setaria italica
  Transcript Sequence Number=SeqID_47533
RHAKQKDTATHLNKCKTRISTVSKLGSTAMSLAHELQITRWTLLANNLGGRSPTYIHPGFSKKMLRAEEFGHRTTSSPQPRSWFRWSPCCTPSKTFIRMASTSIPPLQLSFVQFGQSSHIASQSN

SEQ ID NO: 113508 - protein, 58 aa, Setaria italica
  Transcript Sequence Number=SeqID_47534
KKTDRYTKLTKLRSSASLDVTHVYISDEVRISSSTRRPPPLQSYHPPCYVTVRWTVTV

SEQ ID NO: 113509 - protein, 112 aa, Setaria italica
  misc_feature (35)..(35): Xaa can be any naturally occurring amino acid
  Transcript Sequence Number=SeqID_47535
  Gene Ontology: Cellular component=integral to membrane
  Homolog annotation: Hit_ID=B0WGS0; Match level="QueryCoverage=80%, HitCoverage=78%, E-value=2e-12, Identity=40%"; Hit description =Transmembrane protein 93
  Pfam annotation: Domain name=DUF786; Domain location=3-112; Score =178.4; E_value=2e-50; Accession=PF05646.5; Description=Protein of unknown function (DUF786)
MAAAAGSGFADDVPIIHAENLVSNVKSINYSRTFXAIISGVVAGIWGFTGLMGFVFYFLVMMVASLGILVKAKFSVHTYFDSWNRIIIEGVLGGLMSFVLFWTFAYDIVHIF

SEQ ID NO: 113510 - protein, 66 aa, Setaria italica
  Transcript Sequence Number=SeqID_47536
ANLLRLRMNSGIKVDCSAIYAIKKLEEIIAFVMIRKQNSHSNLTTLPYFNAIRDLEVTIIPYQLCC

SEQ ID NO: 113511 - protein, 105 aa, Setaria italica
  Transcript Sequence Number=SeqID_47537
  Pfam annotation: Domain name=DUF786; Domain location=3-103; Score =108.9; E_value=1.7e-29; Accession=PF05646.5; Description=Protein of unknown function (DUF786)
MAAAAGSGFADDVPIIHAENLVSNVKSINYSRTFLSIISGVVAGIWGFTGLMGFVFYFLVMMVASLGILVKAKFSVHTYFDSWNRIIIEGVLGGLMVSLIGVVKK

SEQ ID NO: 113512 - protein, 335 aa, Setaria italica
  misc_feature (111)..(111): Xaa can be any naturally occurring amino acid
  Transcript Sequence Number=SeqID_47538
  Gene Ontology: Mol. function=ribonuclease H activity
  Homolog annotation: Hit_ID=B9T8F6; Match level="QueryCoverage=77%, HitCoverage=96%, E-value=7e-84, Identity=59%"; Hit description =Nuclease, putative
  Pfam annotation: Domain name=RnaseH; Domain location=196-321; Score =14.2; E_value=1.8e-05; Accession=PF00075.16; Description=RNase H
  Subcellular localization annotation: CTP_CleavageSite=59; ConfidenceScore=5.49e-01
MVIRSCSSFFRGLLISRAAWRRHYPLFLALRPPVPPPSIPQPPVRFSSSSSSSRRSTKRSAAKTPMDSSAAGEPFYVVRKGDVIGIYKTLSECQAQVSNSVCDPSVTVFKXGYSLLKDTEEYLAARGLRNALYAIDAADVRDELFDDLVPCPFQQPDGTASSTLKRSHEIETGPSKKHPKVDEQEQLPDSHLSCILEFDGASKGNPGKAGAGAIIKRLDGSVIAQLREGLGIATNNAAEYRALILGLKYAAKKGFKYIRAQGDSKLVCNQVQDLWRARNDNMVGLCKKVKELKGTFQLFQIRHVLREFNSAADAQANFAVELPVGEVQEQSNFSC

SEQ ID NO: 113513 - protein, 72 aa, Setaria italica
  Transcript Sequence Number=SeqID_47539
KWHTIIFQEILCRMMIAWPQACVAAYHVAYAENPHNPQLGTLIPEHLSELQAIAADRDRPRVVESKDDLDDP

SEQ ID NO: 113514 - protein, 155 aa, Setaria italica
  Transcript Sequence Number=SeqID_47540
  Homolog annotation: Hit_ID=B9SI60; Match level="QueryCoverage=86%, HitCoverage=28%, E-value=3e-37, Identity=55%"; Hit description=Gd2b, putative
  Pfam annotation: Domain name=DUF580; Domain location=1-145; Score= -138.5; E_value=0.081; Accession=PF04515.4; Description=Protein of unknown function, DUF580
MLGRANRWGFVHVGARGKAFCVASRDVWSLFVLRGIENLVDSDLTGSFCFLSSVTAGALASLVAGSWALATVDKDQKKLALPVSIYAFLIGYYMCRMMIAWPQACVAAYHVAYAENPHNPQLGTLIPEHLSELQAIAADRDRPRVVESKDDLDDP

SEQ ID NO: 113515 - protein, 114 aa, Setaria italica
  Transcript Sequence Number=SeqID_47541
SGYCQINPTTRFNNQLLVLLLRNPPLAIYCVIRPAACRRACAGPTSQNSGAGEYASAGAPRLRSSTTSTTSTPRAWAPLLTSSTTPTTSTPRAWAPRRTSAATPTTSFTRFQLL

SEQ ID NO: 113516 - protein, 106 aa, Setaria italica
  misc_feature (86)..(86): Xaa can be any naturally occurring amino acid
  Transcript Sequence Number=SeqID_47542
  Gene Ontology: Mol. function=ubiquitin-protein ligase activity; Cellular component=nucleus; Biological process=ubiquitin-dependent protein catabolic process
  Homolog annotation: Hit_ID=Q84JL3; Match level="QueryCoverage=100%, HitCoverage=32%, E-value=7e-55, Identity=87%"; Hit description=E3 ubiquitin-protein ligase SINAT3
  Pfam annotation: Domain name=Sina; Domain location=1-99; Score=31.6; E_value=2.5e-09; Accession=PF03145.8; Description=Seven in absentia protein family
VFSCFGQYFCLHFEAFQLGMAPVYIAFLRFMGDDVEAKNYSYSLEVGGTGRKMIWQGVPRSIRDSHRKVRDSYDGLIIQRNMALFXSGGDRKELKLRVTGRIWKEQ

SEQ ID NO: 113517 - protein, 109 aa, Setaria italica
  misc_feature (33)..(33): Xaa can be any naturally occurring amino acid
  Transcript Sequence Number=SeqID_47543
  Gene Ontology: Mol. function=hydrolase activity; Cellular component =membrane
  Homolog annotation: Hit_ID=B6SKJ2; Match level="QueryCoverage=88%, HitCoverage=23%, E-value=3e-20, Identity=56%"; Hit description =Nodulin-like protein
QFWGVNPAFSVEAINISTKDGILKVLGTVVYVXGAQLRAEHRGPSLIGSGGTNTANGIVTPGTWSSTPYLVQWLTSTMLEYGVETWHLGVLCLIGNCSLVAVYLVIQVM

SEQ ID NO: 113518 - protein, 87 aa, Setaria italica
  misc_feature (12)..(12): Xaa can be any naturally occurring amino acid
  Transcript Sequence Number=SeqID_47544
  Gene Ontology: Mol. function=hydrolase activity; Cellular component =membrane
  Homolog annotation: Hit_ID=B6SKJ2; Match level="QueryCoverage=89%, HitCoverage=19%, E-value=2e-25, Identity=72%"; Hit description =Nodulin-like protein
FMVLTGVLTNGXNDGQLTKTEIIAILYAGIVASCMCYATMTWANKILGPSLVSLYNPLQPACSTILSTIFLGDPVYVGRFDSTHCHI

SEQ ID NO: 113519 - protein, 405 aa, Setaria italica
  Transcript Sequence Number=SeqID_47545
  Gene Ontology: Mol. function=hydrolase activity; Cellular component =membrane; Biological process=auxin mediated signaling pathway
  Homolog annotation: Hit_ID=B6SKJ2; Match level="QueryCoverage=98%, HitCoverage=97%, E-value=1e-136, Identity=65%"; Hit description =Nodulin-like protein
  Pfam annotation: Domain name=DUF6; Domain location=242-369; Score =51.3; E_value=3.8e-12; Accession=PF00892.12; Description=Integral membrane protein DUF6
  Pfam annotation: Domain name=DUF6; Domain location=50-183; Score =44.5; E_value=4.1e-10; Accession=PF00892.12; Description=Integral membrane protein DUF6
  Pfam module annotation: Pfam domain module=DUF6::DUF6; Domain location=242-369::50-183
MGEEGDDGPTPLLKRRRSPPWSAIRRRLLSALADNKDAWRAHAGMAFVQLAYSGYHVLTKAMLDVGMNQVVFCVYRDLVALAVLAPVAFLRERRERPPVTPQLLASFALLGFTGLYANPLLFLVGLHNTNASYAAAFQPSIPVITFVLAAIVGVEAINISTKDGILKVLGTVVCVSGAILMALYRGPSLIGSGGTNTANGIVTPGTWSSTPYLVQWLTSTMLEYGVETWHLGVLCLIGNCSLVAVYLVIQAPVMIKYPASLSLTAYSYFFASIFMVLTGVLATNGLHEWALTKTEIIAILYAGIVASCMCYATMTWANKILGPSLVSLYNPLQPACSTILSTIFLGDPVYVGSIIGGVFIIAGLYIVTWARYNEARRTSSDGCLNPLLLGPPRVPKTQESSFMDP

SEQ ID NO: 113520 - protein, 90 aa, Setaria italica
  Transcript Sequence Number=SeqID_47546
FGSYLANDYLINLSSHGYPAVDRSEMMDPMMMGASHVALMSPNDFFSHPDQLHTALLLIDLQLVATCQLHLSTKINATTHGDRPEHSSDH

SEQ ID NO: 113521 - protein, 319 aa, Setaria italica
  misc_feature (215)..(215): Xaa can be any naturally occurring amino acid
  Transcript Sequence Number=SeqID_47547
  Gene Ontology: Mol. function=receptor activity
  Homolog annotation: Hit_ID=B6UEB9; Match level="QueryCoverage=71%, HitCoverage=57%, E-value=4e-25, Identity=34%"; Hit description=F-box domain containing protein
CKERLPPTTLEGFFYGCVYESCNEDRDDLSSDSWDESGSEGNDDDGSEDDKEGGSANNGKGGSEDGDEGGECKGEKSSCHACGHFINLLGRSVPLVDPSFSVLRKQPGIKNFTLLDSCNGLLLFGQAWCSRFSATTSYIVYNPATEHWVPVPSSGFSSNPLEYGEDCDDDVEESCVLTCLIFDPAISSHFQLIEFCHNPGVALVLAYSSETERWXDRPRERRRWKKGGKWDLHKTMSSMRGSTFFNKMLHLIVSLYSIGPELIAAIDGKGKTRKVIQWVENCGFPVFVGQSKGLLHCLSVSGHPDGDSCHNRTRRLIPI

SEQ ID NO: 113522 - protein, 93 aa, Setaria italica
  Transcript Sequence Number=SeqID_47548
RSLAAGEEVLLAAVFPPRDDLAPCRLTCNANQPIQAAENPRHNHTEPSNARQIQWRVATWSAPCEALVRSRRCSCAGPAWDDERRANPLLSCR

SEQ ID NO: 113523 - protein, 63 aa, Setaria italica
  misc_feature (33)..(33): Xaa can be any naturally occurring amino acid
  Transcript Sequence Number=SeqID_47549
  Gene Ontology: Mol. function=DNA binding; Cellular component=nucleus; Biological process=regulation of transcription
  Homolog annotation: Hit_ID=Q06944; Match level="QueryCoverage=98%, HitCoverage=24%, E-value=1e-14, Identity=66%"; Hit description=MybHv5
VDLNLDLSVGLPAADTPTSQPQPVVCLCYRLGXRAGEACGCQATDGGVAVFRYFRPLEQGQYI

SEQ ID NO: 113524 - protein, 583 aa, Setaria italica
  misc_feature (10)..(10): Xaa can be any naturally occurring amino acid
  misc_feature (188)..(188): Xaa can be any naturally occurring amino acid
  Transcript Sequence Number=SeqID_47550
  Homolog annotation: Hit_ID=Q9M1Y3; Match level="QueryCoverage=95%, HitCoverage=93%, E-value=1e-162, Identity=52%"; Hit description=F -box/ankyrin repeat protein SKIP35
MVEQGKPRGXPAKAKKSPLVEADEIGQASEVVLARESPLAPKNDQGCGVSHSDGDDETQESDGCVQNGWVDFGHSLQLLLFSRQWDLAESLVALADQQSLLDYGLSVALDAIWFLRTKRDLEGINGLIAKIVASGAKDFARAILRTSLLASCVAACQSKAISVGDSKEIVADRLHDRLRDCPGADHLXKIEAGVKVQKFMEWALQCIHMHHCSEETQRYRWNSNTLQEVQLHLSAFRAFLDIAGDNLSGKIFTEAFDAACFPLTLFSSLFEPGWSSGSSAVSIKGLLSLLVEGGADNVNQCFLEAARFGSTELVRILLEIGYQNSLAVDIDMALVYASHYCKLDTMACLVDEGNASSFLGPMIKAAERGCLQVVHWFVSRGVSEIETCLALTTAASSGHFMVASYLLEQIPQQVLEALSTQILKAARGQGSRSLDGVAFLLRSNFLKDAAATYEAADLIARGATNGEPPDLVAFLKEHWSQAAFAEGVSAGEAHFVNVMRVLRRGASPICLDNLPSQMVLGIAYLPLYQACVSESGGQLLPQRLRGEMVEAMSRLGEPIGAESQGKDLVMALERHMPSFLVGS

SEQ ID NO: 113525 - protein, 84 aa, Setaria italica
  Transcript Sequence Number=SeqID_47551
  Gene Ontology: Cellular component=nucleus; Biological process =nucleosome assembly
  Homolog annotation: Hit_ID=Q8L8G5; Match level="QueryCoverage=100%, HitCoverage=23%, E-value=2e-21, Identity=62%"; Hit description =Nucleosome/chromatin assembly factor group A
MTDRGDVLDLAAIDANTELTPEQKAALVMSLKNKLEALAAKHTDVLESLAPKIRKRVDVLREIQSKHHEIEAKFIEERAALEAK

SEQ ID NO: 113526 - protein, 140 aa, Setaria italica
  misc_feature (15)..(15): Xaa can be any naturally occurring amino acid
  Transcript Sequence Number=SeqID_47552
  Gene Ontology: Mol. function=binding
  Homolog annotation: Hit_ID=Q6K6B1; Match level="QueryCoverage=87%, HitCoverage=10%, E-value=4e-37, Identity=73%"; Hit description=CLIP -associating protein-like
RNTPKSKLAVLEFVXITSFVKCTINSESYSSSQFLKPWFGKLALLFKDKSKKLKEVVVVGFSSIYSHYDPASMLSFLVSMSMEEQKRLIRAMKQLIPKIESDIEEFLQQRRHKQRAPSFDIFTAKSPLHPASQSAKNTRL

SEQ ID NO: 113527 - protein, 126 aa, Setaria italica
  Transcript Sequence Number=SeqID_47553
YGRRERLRAARVLGKYAEPSAAKGASSTPSKSGKPEFGSGVLDALREADAKKGGAGGGRRGSRLPEAPGNLFDDSKRGMPKEGWTFELPFGVDVFLVLVSFTLITTIMFGTAFLVWKLGAIHFNEY

SEQ ID NO: 113528 - protein, 185 aa, Setaria italica
  misc_feature (173)..(173): Xaa can be any naturally occurring amino acid
  Transcript Sequence Number=SeqID_47554
MDEVPGRSSSVRATRSIFGESIGGSGRKLEKDRPRDVLGLENLSPEIKQLAKSSMDRLNERKAAVDKERTGAESELSRARAVAKELERQIEQTKARATSKRSEAQAMRATGASKKGTDAPGSQEERDAAEIEEVARELDRAKQELRRLRLEVRSAAEAKAKAESDIVASAINXQLNLRAADEMKR

SEQ ID NO: 113529 - protein, 250 aa, Setaria italica
  Transcript Sequence Number=SeqID_47555
  Gene Ontology: Cellular component=plasma membrane
  Homolog annotation: Hit_ID=Q2QXB2; Match level="QueryCoverage=87%, HitCoverage=48%, E-value=2e-76, Identity=66%"; Hit description=Tubby- like F-box protein 14
  Pfam annotation: Domain name=Tub; Domain location=1-244; Score=292.1; E_value=1.2e-84; Accession=PF01167.10; Description=Tub family
FFVCLVLTLVLCSYLLLVGLEYHRLQTLCQGFYSKKASTKVSRSRYSIAQVSYELNVLGTRGPRRMNCVMHSIPASCLEAGGSVPCQPDSIVAHSLGGSFSSVSLSKSSVMDHSMHFSSARFSDVATGLGLGSEGRALFDDEECNDRPLILRNKAPRWHEQLQCWCLNFRGRVTVASVKNFQLVAATQPAAGAPTPSQPAPAPAPDQDKVILQFGKVAKDMFTMDYRYPLSAFQAFAICLSSFDTKLACE

SEQ ID NO: 113530 - protein, 347 aa, Setaria italica
  Transcript Sequence Number=SeqID_47556
  Gene Ontology: Cellular component=plasma membrane
  Homolog annotation: Hit_ID=B6TJQ5; Match level="QueryCoverage=98%, HitCoverage=77%, E-value=1e-153, Identity=78%"; Hit description =Tubby-like protein
  Pfam annotation: Domain name=F-box; Domain location=51-106; Score =28.9; E_value=2e-05; Accession=PF00646.25; Description=F-box domain
  Pfam annotation: Domain name=Tub; Domain location=117-344; Score =217.8; E_value=2.9e-62; Accession=PF01167.10; Description=Tub family
  Pfam module annotation: Pfam domain module=F-box::Tub; Domain location=51-106::117-344
MSFRSIVRDVRDGFGSLSRRGFEVRLLGHRRGKSHGAVHELQDPVPVVQSSCWASLPPELLRDVIERLEASEDTWPSRKNVVVCAAVCRTWREMCREIVKSPEFSGKITFPVSLKQPGPRDGTIQCFIKRDKSTQIYYLYLCLSSTVLVENGKFLLSAKRNIRPTCTEYIISMNSGNVSRSTNTNTYIGKLRSNFLGTKFVIYDTQPPYNAASATQSGKTSQRFYSKKASTKVSRSRYSIAQVSYELNVLGTRGPRRMNCVMHSIPASCLEAGGSVPCQPDSIVAHSLGGSFSSVSLSKSSVMDHSMHFSSARFSDVATGLGLGSEGRALFDDEECNDRPFVFLPSN

SEQ ID NO: 113531 - protein, 65 aa, Setaria italica
  Transcript Sequence Number=SeqID_47557
KGIILLVLTRSANAVYSKKEKKRQCFHDITSLLQKHMRSHKIIFIKHNKRPISFEHLTMQLCKDA

SEQ ID NO: 113532 - protein, 83 aa, Setaria italica
  misc_feature (24)..(24): Xaa can be any naturally occurring amino acid
  Transcript Sequence Number=SeqID_47558
  Homolog annotation: Hit_ID=UPI0001A7B04F; Match level="QueryCoverage =91%, HitCoverage=5%, E-value=1e-14, Identity=51%"; Hit description =REF4 (REDUCED EPIDERMAL FLUORESCENCE 4)
SQYQLYLFQSLVNMLASTPAPSSXLDGSLAEVEKLFEVAVNGSDDDNVSAASVLCGATLLRGWNFQEHTVRLVVKLLSPCDPK

SEQ ID NO: 113533 - protein, 91 aa, Setaria italica
  Transcript Sequence Number=SeqID_47559
  Homolog annotation: Hit_ID=UPI0001A7B04F; Match level="QueryCoverage =93%, HitCoverage=6%, E-value=1e-22, Identity=61%"; Hit description =REF4 (REDUCED EPIDERMAL FLUORESCENCE 4)
RSHLQFLASALDGKISLGCDPSLWRAYVAGFLGLVVECTPCWVQEVDLPVLKRLSSGLRQWGEDELAVALLRRAGPEAMGTAAELILGSEW

SEQ ID NO: 113534 - protein, 1032 aa, Setaria italica
  misc_feature (929)..(929): Xaa can be any naturally occurring amino acid
  Transcript Sequence Number=SeqID_47560
  Homolog annotation: Hit_ID=UPI0001A7B04F; Match level="QueryCoverage =99%, HitCoverage=79%, E-value=0.0, Identity=54%"; Hit description =REF4 (REDUCED EPIDERMAL FLUORESCENCE 4)
SVTYVSSTLQNSAISLEPFQQLILGDCNVYGEIKHNMRKGFHPILASNPLSSPNGRCLGASYSAQWIPIDLYLEDCLDGSIAATNSIEILSGLVKALQSVNRSTWHDAFLALWVASLRLVQREREPIEGPVPHLDTRLCMLLSITTLVVADIIGEADSLCNEKELNSHAKEKKSIGNLRDELMLSLQILGDYESLLAPPPCVIQAANHAATKAAMFISGISINNGYIENVNGMNYAGNMRHLIVESCISRNLLDTSAYYWPGYISNHVNSVSHTLPSQLAGWSSFMKGAPLTQSLVNMLASTPAPSLAEVEKLFEVAVNGSDDDNVSAASVLCGATLLRGWNFQEHTVRLVVKLLSPCDPNDYSGRESQLIKLGPMLNVILSGISAVDYAPIFSFHGLIPELAAALMAICEVFGCLSPSVSWTLRTGEEISAHTVFSTAFILLLRLWKFNHPPLEYCVMGDGAPVGSQLTPEYLLLLRNSQVLSSSSLAKQRNGQRQLQIPTSHPSCEHPIFMDSFPKLKLWYRQHQACLASTLSGLAHGTPVRNNVDSLLNLMFRKANKGGTSIGSLSGSSSISNSSGPGGDDSHLWPQLPAWEILEAVPFVVDAALTACSHGRLFPRELATGLKDLADFLPASLATIVSYFSAEVTRGVWKPAFMNGSDWPSPSVNLSMVEEHIKKIVATTGVDVPRLVAGGSSSGTLPLPLAAFVSLTITYKLDKASERFLNLAGPALENLAASCPWPSMAIVAALWTQKVKRWSDFLIFSASRTVFHHNNDAVVQLLRSCFAATLGMSSTSVCGCSGVASLLGHGYCPGGFSPVAPGILYLRIFRCIKDCSILAEDILNLLMLSVKDIAETTVPKQRSDKLKKTKYGMRHGQVSLSAAMTQVKVAASLGATLVWLSGGTALVQSLIQEMLPSWFLSVQDLDKGGXSGGMVYKLGGHALAYLAVYSGMFAWGIDPTPVSRRRERVTRSHLQFLASALDGKISLGCDPSLWRAYVAGFLGLVVECTPCWVQEVDLPVLKRSCSLVGSYGS

SEQ ID NO: 113535 - protein, 108 aa, Setaria italica
  Transcript Sequence Number=SeqID_47561
  Gene Ontology: Mol. function=ATPase activity, coupled to transmembrane movement of substances; Cellular component=integral to membrane; Biological process=transport
  Homolog annotation: Hit_ID=B9SN54; Match level="QueryCoverage=100%, HitCoverage=7%, E-value=2e-26, Identity=52%"; Hit description =Multidrug resistance-associated protein 1, 3 (Mrp1, 3), abc -transoprter, putative
AIFEKQLRLSGEARKRHGAGEVANYIAVDAYRLGEFPFWLQWAWCMPVQLALAITMLFWTVGAGALPGLAPVAVCGVLNVPLARMLQRYQSRFMSAQDERQRATAEVL

SEQ ID NO: 113536 - protein, 247 aa, Setaria italica
  Transcript Sequence Number=SeqID_47562
  Gene Ontology: Cellular component=endoplasmic reticulum
  Homolog annotation: Hit_ID=B6SQ11; Match level="QueryCoverage=100%, HitCoverage=100%, E-value=1e-131, Identity=92%"; Hit description =Seed maturation protein
  Pfam annotation: Domain name=Reticulon; Domain location=61-227; Score= 209.9; E_value=7e-60; Accession=PF02453.9; Description=Reticulon
MSERSESATEKIMSSIIDTIADNLPKQKSGQFGPGSVSDKVKNKLFGRQKTLHGALGGGKPADCLLWRNKKISSSVLAVATAIWVFFEWLDYHFLTIVSFALVLGMVVQFVWSNFSNMLSGSPSQVPRVELPDELFVNIAVAIGAQINKFLSFLQDLSCERNLKHFVVAIAGLWAAAVIGSWCNFLTVIYIGFVCAHTLPVLYEKYEDQVDNFLYSLLGLLQDQYQKLDQGVLSKIPKGNLKAKKNE

SEQ ID NO: 113537 - protein, 164 aa, Setaria italica
  misc_feature (54)..(54): Xaa can be any naturally occurring amino acid
  Transcript Sequence Number=SeqID_47563
  Gene Ontology: Mol. function=peptidase activity; Cellular component =membrane; Biological process=signal peptide processing
  Homolog annotation: Hit_ID=Q9SSR2; Match level="QueryCoverage=85%, HitCoverage=78%, E-value=2e-69, Identity=88%"; Hit description =F6D8.18 protein
  Pfam annotation: Domain name=Peptidase_S24; Domain location=36-108; Score=36.3; E_value=1.2e-07; Accession=PF00717.15; Description =Peptidase family S24
SPSVIVFVYLLVYLYSIIGKGFVLVCCTGSESPVVVVLSGSMEPGFKRGDILFXHMSKDPIRTGEIVVFNVDGREIPIVHRVIKVHERQDTAEVDILTKGDNNFGDDRLLYAHGQLWLQQHHIMGRAVGFLPYVGWVTIVMTEKPIIKYLLMGALGLLVITSKD

SEQ ID NO: 113538 - protein, 180 aa, Setaria italica
  Transcript Sequence Number=SeqID_47564
  Gene Ontology: Mol. function=peptidase activity; Cellular component =membrane; Biological process=signal peptide processing
  Homolog annotation: Hit_ID=Q9SSR2; Match level="QueryCoverage=100%, HitCoverage=100%, E-value=3e-77, Identity=77%"; Hit description =F6D8.18 protein
  Pfam annotation: Domain name=Peptidase_S24; Domain location=52-124; Score=42.8; E_value=1.3e-09; Accession=PF00717.15; Description =Peptidase family S24
MGFVGDTLESIRSMQVRNVLSQIISLGMIVTSALIIWKGLIVVTGSESPVVVVLSGSMEPGFKRGDILFLHMSKDPIRTGEIVVFNVDGREIPIVHRVIKVHERQDTKEVDILTKGDNNFGDDRLLYAHGQLWLQQHHIMGRAVGYLPYVGWVTIIMTEKPFIKYLLIGALGLLVITSKE

SEQ ID NO: 113539 - protein, 368 aa, Setaria italica
  Transcript Sequence Number=SeqID_47565
  Homolog annotation: Hit_ID=B6T2R4; Match level="QueryCoverage=96%, HitCoverage=88%, E-value=1e-128, Identity=67%"; Hit description=IQ calmodulin-binding motif family protein
RFLDDHPSCPLGFTSPSPIDTFHLDLDLDLDLLLPPRAAAPPCPAFFDPFLLDALGHRVSALERALAPPPPAPRRKYTYAAEADGRKVKWVAEDKPAGGKAYKWEAELKTPNDDGFDRKWKWESKASAAGTTKVKWAKEIKGKGWLEPWSNSYSVEETYGDDDDQDKAATAAVNKVKEENKPKDMKKKKGNVEIVEIEDNTKGCVAIRKAFEMSHAKGKKKELSQQDAALLIQMSYRAHLAHRSQVLRCLRDLAVAKAKLKEIRSFFYNISYRRRIAHDSEERQRFAEKIIVLLLTVDALEGPDYMVRNAKRSMLEELEGMLEIVDPQPPGKPRTLSRRKFDLPEGGAIPKEMRDGVKNVVRIVEEGK

SEQ ID NO: 113540 - protein, 75 aa, Setaria italica
  misc_feature (37)..(37): Xaa can be any naturally occurring amino acid
  Transcript Sequence Number=SeqID_47566
  Subcellular localization annotation: CTP_CleavageSite=33; ConfidenceScore=5.20e-01
MDLVAGGVLHGRLPIRAPRFPPVLRSLPAPTVAVSAXRPCPPIVRRNAPAVVPFAKKKRKGYRDDPPDEEAGAAE

SEQ ID NO: 113541 - protein, 147 aa, Setaria italica
  Transcript Sequence Number=SeqID_47567
  Gene Ontology: Mol. function=RNA-directed DNA polymerase activity
  Homolog annotation: Hit_ID=Q7XNY0; Match level="QueryCoverage=87%, HitCoverage=12%, E-value=5e-12, Identity=35%"; Hit description =OSJNBa0035M09.1 protein
LSKNKLLTRDNLAKRRKLEDNTCLFCAETETVHHLFFGCVVAQQIWVGLAEIDGTDGFRDFESVARFWISDKKHCVMNMFCAAAMWAIWKLRNSLCFQNYRWKDLSQLWWSMSGMLKNWSLLCPAKTSGEIQCVAEQLGGTGGDGRG

SEQ ID NO: 113542 - protein, 106 aa, Setaria italica
  Transcript Sequence Number=SeqID_47568
  Subcellular localization annotation: CTP_CleavageSite=75; ConfidenceScore=5.38e-01
SDPCPPFPAPYQITFTTYSTGFRIAFALPARSTRPRLYTPDPVHIPMTRAGVVIAGAVITAARRPPGRESNRPCRATEPATKSTDGANETAQERRRTRVGVTTGRL

SEQ ID NO: 113543 - protein, 256 aa, Setaria italica
  Transcript Sequence Number=SeqID_47569
  Gene Ontology: Mol. function=metal ion binding
  Homolog annotation: Hit_ID=B6SIT0; Match level="QueryCoverage=99%, HitCoverage=99%, E-value=2e-65, Identity=53%"; Hit description =Protein binding protein
  Pfam annotation: Domain name=zf-C3HC4; Domain location=208-248; Score= 34.1; E_value=5.7e-07; Accession=PF00097.17; Description=Zinc finger, C3HC4 type (RING finger)
MATVGQPGALRRITVHYANSPTRSTGEADLEDLDDDLLQFVIADLLPNQEGLHRSFLEEPYSNHNHMIGAPSDNSQSQHYHHHGESSTAAAEAATASGISGTEEQIASDFEYAKRLQEMEDQDDDISCVPSPSDSDDDDDHDHNDEEADRQDGNDDDPDNMTYEQRQALVESVGTEDRGLSDELISYLQKWKYKASGFFYRKTNHEDCTICLSTFRHRESMITLPCKHYYHAACVAKWLKVNKTCPVCKYEPFGPS

SEQ ID NO: 113544 - protein, 70 aa, Setaria italica
  Transcript Sequence Number=SeqID_47570
VMFCVQLGQKFTIFYVTFVKNIVIILMFLRCSCSCNFYVCTNVKFCVEFAVITQISLILCTRVQLVKKKK

SEQ ID NO: 113545 - protein, 455 aa, Setaria italica
  misc_feature (53)..(53): Xaa can be any naturally occurring amino acid
  misc_feature (440)..(440): Xaa can be any naturally occurring amino acid
  Transcript Sequence Number=SeqID_47571
  Gene Ontology: Mol. function=protein dimerization activity; Cellular component=nucleus
  Homolog annotation: Hit_ID=Q7XRI2; Match level="QueryCoverage=97%, HitCoverage=26%, E-value=0.0, Identity=74%"; Hit description =P0076O17.10 protein
  Pfam annotation: Domain name=DUF482; Domain location=91-455; Score =751.8; E_value=5.1e-223; Accession=PF04339.4; Description=Protein of unknown function, DUF482
  Subcellular localization annotation: CTP_CleavageSite=16; ConfidenceScore=5.37e-01
MASPAAATRHPSPTVLASTPRHRLRLHRRGYPPSKLGYQTSRLKVNALFGWLXGDTAMRELIPPAESYTLSGSASEVGAEPREVSISVASSIMDIPAADWDACACDPADPEKFNPFLTHAFLSSLEESGSAVKETGWLPFHVVARDETGHIIGVVPLYLKSHSRGEFVFDQSWAEAYYSYGLEYYPKLQSCVPFTPVTGQRILLRSTPYRDQVFDALIKGLKSLTTKMNVSSLHITFPSEGEFSKLKDNGLLQRIGLQYHWRNRNYKSFDEFLMDLKQPKRKNIRQERKKIPAQSLQMKRLRGDEIKSSHWDTFYKFYRNTTDNHWGRPYLTREFFHLLGEKMGGNVMLVVAENDDKVVAGALNLIGGDTLFGRLWGCLPDAYFPNLHFEACYYQAIEAAIELNLSKVEAGAQGEHKIQRGYLPVTTYSCHYFSDPGFGXAIGNFLARETAQVKH

SEQ ID NO: 113546 - protein, 81 aa, Setaria italica
  Transcript Sequence Number=SeqID_47572
PRIQCHKQNYMCMYSMNNWLNGEKCANNRLAHNNKVLSSPQPETNACLWKDQQRAGFVRNRSSNLALPAIQLSLSQSSCSA

SEQ ID NO: 113547 - protein, 72 aa, Setaria italica
  Transcript Sequence Number=SeqID_47573
  Gene Ontology: Mol. function=protein dimerization activity; Cellular component=nucleus; Biological process=regulation of transcription, DNA-dependent
  Homolog annotation: Hit_ID=B6U2P4; Match level="QueryCoverage=88%, HitCoverage=16%, E-value=2e-11, Identity=55%"; Hit description=DNA binding protein
RQLRDALNEALTTEVQRLKLGDTSSSSNLSQQMQLRCQDQMMEMHKQQGEQIPFYQLEQREQNGAPRNRDSK

SEQ ID NO: 113548 - protein, 147 aa, Setaria italica
  misc_feature (73)..(73): Xaa can be any naturally occurring amino acid
  misc_feature (112)..(112): Xaa can be any naturally occurring amino acid
  misc_feature (124)..(124): Xaa can be any naturally occurring amino acid
  Transcript Sequence Number=SeqID_47574
  Gene Ontology: Mol. function=protein serine/threonine kinase activity; Biological process=protein amino acid phosphorylation
  Homolog annotation: Hit_ID=Q5QLM8; Match level="QueryCoverage=96%, HitCoverage=22%, E-value=2e-37, Identity=51%"; Hit description =Receptor protein kinase-like
LRYLKYFAKRDSTSFNFTHMRGTMGYMAPEWALNLPLNAKVDVYSYGVVLLEILTGIRVSNGIMLKERQIDFXEFVQEAKHILSSGNVSDIVDDRLHGHFDTEQAIAMVKIXLSCLEERSKRPXMDEIVKVLMSCDDEDDYHPAYSY

SEQ ID NO: 113549 - protein, 127 aa, Setaria italica
  Transcript Sequence Number=SeqID_47575
RRGRRRRRRLLLRRPRLHLRVAESEQVGRRRHVCRLGSQLMMGVDSIGTAPTTRPAGSLSCAGVETEKKQASYRPVTLASPSHAAVWQLDCVLLCVCISLLLDTSLAYLMTTLLASGFFCTADRSDD

SEQ ID NO: 113550 - protein, 350 aa, Setaria italica
  misc_feature (252)..(252): Xaa can be any naturally occurring amino acid
  Transcript Sequence Number=SeqID_47576
  Gene Ontology: Mol. function=phosphotransferase activity, alcohol group as acceptor; Cellular component=cytoplasm; Biological process =metabolic process
  Homolog annotation: Hit_ID=B9SBD4; Match level="QueryCoverage=99%, HitCoverage=39%, E-value=1e-131, Identity=69%"; Hit description=ATP binding protein, putative
  Pfam annotation: Domain name=GHMP_kinases_C; Domain location=255-339; Score=41.5; E_value=3.4e-09; Accession=PF08544.5; Description=GHMP kinases C terminal
  Pfam annotation: Domain name=GHMP_kinases_N; Domain location=111-178; Score=43.4; E_value=8.6e-10; Accession=PF00288.18; Description=GHMP kinases N terminal domain
  Pfam module annotation: Pfam domain module=GHMP_kinases_C::GHMP _kinases_N; Domain location=255-339::111-178
HPRKAFVELPVRVDFVGGWSDTPPWSLERPGCVLNMAISLEGSLPVGAMIETTEDHLGVSIEDDAGRNLYIDDLASISSPFKESDPFRLVKSALIVTGILGHKILSKSGLNIWTWANVPRGSGLGTSSILAAAVVKGLFQVMEDDGSDDNVARAVLVVEQIMGTGGGWQDQIGGLYPGIKCTQSFPGQPLRLQVVPLLASPELIQELEQRLLVVFTGQVRLAHQVLQKVVTRYLRRDNILISSIKRLAELAXKIGREALMNGDIDELGNIMLEAWRLHQELDPFCSNKFVDELFAFADPYCCGYKLVGAGGGGFALLLAKNPSCAKELRQALHESTFDVKAYDWNIVMPR

SEQ ID NO: 113551 - protein, 93 aa, Setaria italica
  Transcript Sequence Number=SeqID_47577
RNFCLHSCINGEPSITPRVTACLVARVFNTFPAWPHSPRDNAFLVARLVFYRLALLDCFLFCSVDADQRHQLAVRGDERPVRDGGQQGHHGRY

SEQ ID NO: 113552 - protein, 60 aa, Setaria italica
  misc_feature (29)..(29): Xaa can be any naturally occurring amino acid
  Transcript Sequence Number=SeqID_47578
  Gene Ontology: Mol. function=structural constituent of ribosome; Cellular component=ribonucleoprotein complex; Biological process =translation
  Homolog annotation: Hit_ID=P50888; Match level="QueryCoverage=96%, HitCoverage=53%, E-value=1e-14, Identity=53%"; Hit description=60S ribosomal protein L24
  Pfam annotation: Domain name=Ribosomal_L24e; Domain location=3-45; Score=53.0; E_value=1.2e-12; Accession=PF01246.12; Description =Ribosomal protein L24e
MVLKTELCRFSGAKIYPGKGIRFIRADSXRKQHKKDIHAEAAKKRRRTTKKPYSRSIVVP

SEQ ID NO: 113553 - protein, 74 aa, Setaria italica
  Transcript Sequence Number=SeqID_47579
ILAPLKRHSSVLQNRNSVAYYVSKYPSIIVIEDITNNINMSKEGKYILENHLYCCLDKSSMSLGLQQTLAPPPP

SEQ ID NO: 113554 - protein, 129 aa, Setaria italica
  Transcript Sequence Number=SeqID_47580
  Gene Ontology: Mol. function=electron carrier activity; Biological process=electron transport chain
  Homolog annotation: Hit_ID=B6UDV3; Match level="QueryCoverage=79%, HitCoverage=78%, E-value=9e-45, Identity=82%"; Hit description =Chemocyanin
  Pfam annotation: Domain name=Copper-bind; Domain location=33-127; Score=-12.8; E_value=0.02; Accession=PF00127.12; Description=Copper binding proteins, plastocyaninaz
  Pfam annotation: Domain name=Cu_bind_like; Domain location=44-122; Score=138.5; E_value=2.1e-38; Accession=PF02298.9; Description =Plastocyanin-like domain
  Pfam module annotation: Pfam domain module=Copper-bind::Cu_bind_like; Domain location=33-127::44-122
MAQGRGSAARGSVAAMVALVLLCVLLHGEVAESAVYTVGDSSGWGFNTVNWPRGKRFRAGDVLVFRYSPKAHNVVAVNAAGYGSCGAPRGARALTSGNDRVTLKRGANYFICSFPGHCQAGMKIAVNAA

SEQ ID NO: 113555 - protein, 184 aa, Setaria italica
  Transcript Sequence Number=SeqID_47581
  Gene Ontology: Mol. function=alpha-1,4-glucan-protein synthase (UDP -forming) activity; Cellular component=plant-type cell wall; Biological process=cell wall organization and biogenesis
  Homolog annotation: Hit_ID=P80607; Match level="QueryCoverage=98%, HitCoverage=53%, E-value=7e-92, Identity=85%"; Hit description=Alpha- 1,4-glucan-protein synthase [UDP-forming]
  Pfam annotation: Domain name=RGP; Domain location=1-176; Score=190.2; E_value=5.7e-54; Accession=PF03214.5; Description=Reversibly glycosylated polypeptide
NYFCLHHGLWLTPFFGFRYVDAVMTIPKGTLFPMCGMNLAFDRDLIGPAMYFGLMGDGQPIGRYDDMWAGWCVKVICDHLSLGVKTGLPYIWHSKASNPFVNLKKEYKGIFWQEDIIPFFQNVTIPKECDTVQKCYIYLSGQVKEKLGKIDPYFAKLADAMVTWIEAWDELNPTTAAAENGKAK

SEQ ID NO: 113556 - protein, 226 aa, Setaria italica
  misc_feature (94)..(94): Xaa can be any naturally occurring amino acid
  Transcript Sequence Number=SeqID_47582
  Gene Ontology: Mol. function=alpha-1,4-glucan-protein synthase (UDP -forming) activity; Cellular component=plant-type cell wall; Biological process=cell wall organization and biogenesis
  Homolog annotation: Hit_ID=P80607; Match level="QueryCoverage=93%, HitCoverage=57%, E-value=1e-119, Identity=97%"; Hit description =Alpha-1,4-glucan-protein synthase [UDP-forming]
  Pfam annotation: Domain name=RGP; Domain location=9-226; Score=401.9; E_value=1.1e-117; Accession=PF03214.5; Description=Reversibly glycosylated polypeptide
MLFCHINHMSLFVIQVAKDPSGKDINALEQHIKNLLSPSTPFFFNTLYDPYREGADFVRGYPFSLREGAHTAVSHGLWLNIPDYDAPTQLVKPXEEGNERYVDAVMTIPKGTLFPMCGMNLAFDRDLIGPAMYFGLMGDGQPIGRYDDMWAGWCVKVICDHLSLGVKTGLPYIWHSKASNPFVNLKKEYKGIFWQEDIIPFFQNVTIPKECDTVQKCYIYLSGQAK

SEQ ID NO: 113557 - protein, 150 aa, Setaria italica
  Transcript Sequence Number=SeqID_47583
  Gene Ontology: Mol. function=alpha-1,4-glucan-protein synthase (UDP -forming) activity; Cellular component=plant-type cell wall; Biological process=cell wall organization and biogenesis
  Homolog annotation: Hit_ID=P80607; Match level="QueryCoverage=100%, HitCoverage=41%, E-value=3e-77, Identity=90%"; Hit description=Alpha- 1,4-glucan-protein synthase [UDP-forming]
  Pfam annotation: Domain name=RGP; Domain location=1-142; Score=53.5; E_value=8e-13; Accession=PF03214.5; Description=Reversibly glycosylated polypeptide
CGMNLAFDRDLIGPAMYFGLMGDGQPIGRYDDMWAGWCVKVICDHLSLGVKTGLPYIWHSKASNPFVNLKKEYKGIFWKKGMMSSCQNVTIPKECDTVQKCYIYLSGQVKEKLGKIDPYFAKLADAMVTWIEAWDELNPTTAAAENGKAK

SEQ ID NO: 113558 - protein, 166 aa, Setaria italica
  Transcript Sequence Number=SeqID_47584
  Gene Ontology: Mol. function=structural constituent of ribosome; Cellular component=ribonucleoprotein complex; Biological process =translation
  Homolog annotation: Hit_ID=B3TLK8; Match level="QueryCoverage=72%, HitCoverage=70%, E-value=6e-52, Identity=82%"; Hit description=60S ribosomal protein L24
  Pfam annotation: Domain name=Ribosomal_L24e; Domain location=3-78; Score=157.8; E_value=3.2e-44; Accession=PF01246.12; Description =Ribosomal protein L24e
MVLKTELCRFSGAKIYPGKGIRFIRADSQVFLFSNSKCKRYFHNRLKPAKLTWTAMYRKQHKKSFVLKDIHAEAAKKRRRTTKKPYSRSIVGATLEVIQKKRTEKPEVRDAAREAALREIKERIKKTKDEKKAKKAEMAKSQKTAGKGNAPKPGKGPKLGGGGGKR

SEQ ID NO: 113559 - protein, 318 aa, Setaria italica
  misc_feature (12)..(12): Xaa can be any naturally occurring amino acid
  misc_feature (82)..(82): Xaa can be any naturally occurring amino acid
  misc_feature (167)..(167): Xaa can be any naturally occurring amino acid
  Transcript Sequence Number=SeqID_47585
  Gene Ontology: Mol. function=alpha-1,4-glucan-protein synthase (UDP -forming) activity; Cellular component=plant-type cell wall; Biological process=cell wall organization and biogenesis
  Homolog annotation: Hit_ID=P80607; Match level="QueryCoverage=94%, HitCoverage=81%, E-value=1e-170, Identity=97%"; Hit description =Alpha-1,4-glucan-protein synthase [UDP-forming]
  Pfam annotation: Domain name=RGP; Domain location=13-314; Score =742.8; E_value=2.7e-220; Accession=PF03214.5; Description=Reversibly glycosylated polypeptide
MAGTVTVPGANXPSTPLLKDELDIVIPTIRNLDFLEMWRPFFQPYHLIIVQDGDPAKTIKVPEGFDYELYNRNDINRILGPXKASCISFKDSACRCFGYMVSKKKYIYTIDDDCFVAKDPSGKDINALEQHIKNLLSPSTPFFFNTLYDPYREGADFVRGYPFSLRXEGAHTAVSHGLWLNIPDYDAPTQLVKPKERNERYVDAVMTIPKGTLFPMCGMNLAFDRDLIGPAMYFGLMGDGQPIGRYDDMWAGWCVKVICDHLSLGVKTGLPYIWHSKASNPFVNLKKEYKGIFWQEDIITSSGLCHTPWGWSRSGRRG

SEQ ID NO: 113560 - protein, 107 aa, Setaria italica
  misc_feature (105)..(105): Xaa can be any naturally occurring amino acid
  Transcript Sequence Number=SeqID_47586
  Gene Ontology: Mol. function=peroxidase activity; Cellular component =glyoxysomal membrane; Biological process=hydrogen peroxide catabolic process
  Homolog annotation: Hit_ID=B3TLT1; Match level="QueryCoverage=100%, HitCoverage=36%, E-value=3e-49, Identity=85%"; Hit description =Peroxisome type ascorbate peroxidase
  Pfam annotation: Domain name=peroxidase; Domain location=1-104; Score= -45.0; E_value=2e-06; Accession=PF00141.15; Description=Peroxidase
RKDSSVCPEEGRLPDAKQGASHIRDVFYRMGLSDKDIVALSGGHTLGRAHPERSGFDGAWTKDPLKFDNSYFVELLKGDSEGLLKLPTDKALVEDPEFRCYVEKXAK

SEQ ID NO: 113561 - protein, 342 aa, Setaria italica
  Transcript Sequence Number=SeqID_47587
  Gene Ontology: Cellular component=vacuole
  Homolog annotation: Hit_ID=Q7XV19; Match level="QueryCoverage=92%, HitCoverage=71%, E-value=5e-72, Identity=48%"; Hit description =OSJNBa0064H22.7 protein
GRFLCLSSSFRRIGLRRLLYLDKLRTKSDRVRFHYTARLAFSFRLLASLVAPCFVAEAAYKAWCYATSADRVPFFANDVLSDVLACSLEMASWMYRSAVYLLTCVLFRLICHLQGLRLEDFAGSLLEDVEEGRTGVASVLREHLDIRRQLKVISHRFRKFIVAALLITTASQFASVLLTTRRDSVDNLLTTGELALCSVVLMSGLIIILNSAAKITHQAQALTGHTTKWHACCTIAPVQDEEGEPGSNQNSMIEQDPSSDSDTESDEYTGDDEDLLENTKIHLPHAHVISFQKRQALVTYLENNRAGITVFGFTLDRSYLHTIFMLEWTLFLWLLGKTIGFS

SEQ ID NO: 113562 - protein, 42 aa, Setaria italica
  Transcript Sequence Number=SeqID_47588
GERAFPNPYVYLAIKSMHNHTNVSLIHSQEQKDKIRCIGPKH

SEQ ID NO: 113563 - protein, 180 aa, Setaria italica
  Transcript Sequence Number=SeqID_47589
  Gene Ontology: Mol. function=ceramidase activity; Cellular component =extracellular region; Biological process=sphingolipid metabolic process
  Homolog annotation: Hit_ID=A9YFM2; Match level="QueryCoverage=100%, HitCoverage=24%, E-value=8e-76, Identity=71%"; Hit description =Neutral ceramidase
  Pfam annotation: Domain name=Ceramidase_alk; Domain location=1-180; Score=-450.7; E_value=0.014; Accession=PF04734.5; Description =Neutralalkaline non-lysosomal ceramidase
EMTLIKFLDNELGPLGSFNWFATHGTSMSRTNSLISGDNKGAAARFMEDWAEENVSPNQAAHVSSGNPRRVSALVSEPNEITDDLIRLASSYKASGGREIPSSSITRRIRSTQQKKPKFVSAFCQSNCGDVSPNVLGAFCIDTGLPCDFNHSTCNGMNELCYGRGPGYPDEFESTRIIGN

SEQ ID NO: 113564 - protein, 71 aa, Setaria italica
  Transcript Sequence Number=SeqID_47590
  Homolog annotation: Hit_ID=Q2QQ88; Match level="QueryCoverage=71%, HitCoverage=20%, E-value=1e-08, Identity=62%"; Hit description =Ureide permease 4, putative, expressed
GCFLVAAILGSLVHSSNAIDNQEKLANSGVVNYSKNTRNSAYEDLAEHLLEKGGSGINEPTFLNKTKTDLV

SEQ ID NO: 113565 - protein, 327 aa, Setaria italica
  Transcript Sequence Number=SeqID_47591
  Gene Ontology: Mol. function=nucleotide binding; Cellular component =integral to membrane; Biological process=transport
  Homolog annotation: Hit_ID=C3SA43; Match level="QueryCoverage=100%, HitCoverage=80%, E-value=1e-133, Identity=73%"; Hit description =Ureide permease 4
  Pfam annotation: Domain name=FAE_3-kCoA_syn1; Domain location=1-275; Score=340.0; E_value=4.7e-99; Accession=PF07168.3; Description=Fatty acid elongase 3-ketoacyl-CoA sy
MAGGVTLSLGTLATQYGWAFVGLSVTEVMASSLKVVIGTTLNYFLDGRINKAEVLFPGVGCFLVAAILGSLVHSSNAIDNQEKLANSGVVNYSKNTRNSAYEDLAEHLLEKEGQKDLEEAKLDAPEAKLEKVQAGTAEFLVHLEEKRSIKVLGSNTLLGLGIVVFAGVFYALFTPAFNIATNDQWHALPAGVPHLVVYTAYFYFSLACFAVSVGLNVWLLYHPMVGVPRSTVAAYLRDGEGRGLALLAGMVCGLGNAFTFMAGQAAGYAAADSVQALPLVSTFWGVVLFGEYRRSSRRTYTLLASMLLMFAVAMVVLMASSNHRKPL

SEQ ID NO: 113566 - protein, 127 aa, Setaria italica
  misc_feature (53)..(53): Xaa can be any naturally occurring amino acid
  misc_feature (74)..(74): Xaa can be any naturally occurring amino acid
  Transcript Sequence Number=SeqID_47592
  Gene Ontology: Mol. function=phosphatidylinositol phosphate kinase activity; Biological process=phosphatidylinositol metabolic process
  Homolog annotation: Hit_ID=B9RJA3; Match level="QueryCoverage=92%, HitCoverage=15%, E-value=5e-29, Identity=56%"; Hit description =Phosphatidylinositol-4-phosphate 5-kinase, putative
  Pfam annotation: Domain name=PIP5K; Domain location=5-123; Score= -107.6; E_value=0.00023; Accession=PF01504.10; Description =Phosphatidylinositol-4-phosphate 5-Kinase
GGGDVCELCFMESGCKDRDFIVDSRKPLVQLGKNMPAQAERRSRRVLDKFLLXNERHLFITTPSGGSWDVYLFXGIIDILQDYDITKKLEHAYKSFQVNPGCISAVDPKLYSRRFQDFIRRVFIREQ

SEQ ID NO: 113567 - protein, 192 aa, Setaria italica
  Transcript Sequence Number=SeqID_47593
  Gene Ontology: Mol. function=RNA-directed DNA polymerase activity; Cellular component=cytosolic ribosome
  Homolog annotation: Hit_ID=B9SHK0; Match level="QueryCoverage=88%, HitCoverage=29%, E-value=7e-50, Identity=53%"; Hit description =Pentatricopeptide repeat-containing protein, putative
  Pfam annotation: Domain name=PPR; Domain location=122-156; Score =33.2; E_value=1.1e-06; Accession=PF01535.12; Description=PPR repeat
  Pfam annotation: Domain name=PPR; Domain location=20-54; Score=39.7; E_value=1.1e-08; Accession=PF01535.12; Description=PPR repeat
  Pfam annotation: Domain name=PPR; Domain location=87-121; Score=26.0; E_value=0.00015; Accession=PF01535.12; Description=PPR repeat
  Pfam module annotation: Pfam domain module=PPR::PPR::PPR; Domain location=122-156::20-54::87-121
GRGKMLVRTMEEKKVAPDTATFNSLIGPLCKARRVQEAMELFDAMLRRGLSPSVRTFHALLNVARDPIEVFDLLDKMKELRCEPEMDTYIMLIRKFCRWRQHESVEKLWSAMPANGLSPDRSAYIVLIHGLFLNGRLEEAAKYYEEMKAKGFAPEQKTEEMIQAWLAGRELAKASALVRSKGGSVSLRLPRK

SEQ ID NO: 113568 - protein, 66 aa, Setaria italica
  Transcript Sequence Number=SeqID_47594
HYSAEPLPRGRGPAPLSILSSYALSISCLTLEEHLRTLTQFFLSSNFSLMFLSVRGNPFFPYLDSI

SEQ ID NO: 113569 - protein, 73 aa, Setaria italica
  Transcript Sequence Number=SeqID_47595
ASDIWGPGWEEHSTVDSLPFDMINTHEDQRFAGNSSQQVDVRTVDDMLNSPDYEIQNSMRYISAQYRKTTTGR

SEQ ID NO: 113570 - protein, 192 aa, Setaria italica
  misc_feature (135)..(135): Xaa can be any naturally occurring amino acid
  Transcript Sequence Number=SeqID_47596
MFPAGSAFSIGELAVLPRSPPPPPLPPLLPPENINGPDPHRRCPVIRGGLHSAISSPECLLPPAIPAFDGTGDLADPDDEDDDVATLARGRSGDTGEPRSAKTFALASGLSLTPSSCSASAAARRRTRSASDITXSPRASSAMPVPAPLNSHWSASSSPPRQATRHRTTHTRTTRSCELLLPPPTTTTQQEP

SEQ ID NO: 113571 - protein, 62 aa, Setaria italica
  Transcript Sequence Number=SeqID_47597
SLYLTIANQNLSAGVVQGTYWLRLCAKLHLSEDDQEHLILACQCSRDGDFAFLHFTWVAFHF

SEQ ID NO: 113572 - protein, 215 aa, Setaria italica
  misc_feature (174)..(174): Xaa can be any naturally occurring amino acid
  Transcript Sequence Number=SeqID_47598
  Gene Ontology: Mol. function=nucleotide binding; Biological process =defense response
  Homolog annotation: Hit_ID=Q6WSR3; Match level="QueryCoverage=98%, HitCoverage=18%, E-value=1e-70, Identity=60%"; Hit description =Resistance protein T10rga2-1A
LILKKCHGLPLAICTIGGFLSDKPRTALEWKKLNDHISAELEINTELQMIKTILMKSYNGLPYHLKSSFLYMSIFPEDHKIRRKRLVRRWIAEGYSSEMRHMSAEEVGDKHFAELYDRSMILPTNRVTHSTGEIDSCQLHDLIRDISISKSMEENLVYILEEGCSSKVQGTIRXTVSVSSNCAREKDVYESTLDFGHIRSLTVFGEWRSFLILTR

SEQ ID NO: 113573 - protein, 106 aa, Setaria italica
  Transcript Sequence Number=SeqID_47599
  Gene Ontology: Mol. function=RNA-directed DNA polymerase activity; Biological process=RNA-dependent DNA replication
  Homolog annotation: Hit_ID=Q7XU53; Match level="QueryCoverage=96%, HitCoverage=8%, E-value=2e-31, Identity=62%"; Hit description =OSJNBa0006A01.18 protein
EITWKFTLSGQYTTASAYKAQLLGTVKTPNLATVWQTWAPAKCKVFAWLILQNRVWTSDRLAKRGWDHTPTCTLCRCTMETAHHLLADCRYTKQIWKLVAQWLSQE

SEQ ID NO: 113574 - protein, 52 aa, Setaria italica
  Transcript Sequence Number=SeqID_47600
PDTYIDFLETLNHLINPKDVVEELFSATDSPFNYFIIFLYRYTTTSSYFSAL

SEQ ID NO: 113575 - protein, 60 aa, Setaria italica
  Transcript Sequence Number=SeqID_47601
  Gene Ontology: Mol. function=oxidoreductase activity; Biological process=metabolic process
  Homolog annotation: Hit_ID=B6U607; Match level="QueryCoverage=100%, HitCoverage=19%, E-value=6e-26, Identity=90%"; Hit description =Carbonyl reductase 1
RHPELRVNCAHPGYVKTDMTRHSGLLTPEEGAANVVKVALLPEGGPTGVFFALGQEAPFV

SEQ ID NO: 113576 - protein, 147 aa, Setaria italica
  misc_feature (12)..(12): Xaa can be any naturally occurring amino acid
  misc_feature (100)..(100): Xaa can be any naturally occurring amino acid
  Transcript Sequence Number=SeqID_47602
SFYRTPGAWQKXSYGGNGRNSKYDQGQGYWGMVEVDEAESRLSEVGYIGSSSYSRGSPYYMDDASSNGPRQEKTSYHARQRTSGRSAAFNLHQHDGHSFXWRTESSDQNFFDGEAEGRREQGRGSSENQQKHAGRTEAGPSGGIGLH

SEQ ID NO: 113577 - protein, 226 aa, Setaria italica
  Transcript Sequence Number=SeqID_47603
  Gene Ontology: Mol. function=binding; Cellular component=cytoplasm; Biological process=regulation of translation
  Homolog annotation: Hit_ID=B9RG44; Match level="QueryCoverage=96%, HitCoverage=55%, E-value=2e-60, Identity=57%"; Hit description=Sil1, putative
  Pfam annotation: Domain name=Fes1; Domain location=37-132; Score= -0.1; E_value=1e-05; Accession=PF08609.2; Description=Nucleotide exchange factor Fes1
WATGKDEGEILAEAEARGSGGGEESVTGDQGREFDSLDGMLQWAIGNSDPDKLREKAAELERLSADELLKRQMEIKELMEKLKMPSDADLMKIAIADLNNSSVSLEDRQRALQELLVLVEPIDNANDLDKLGGLLPLIQELNNADEGIRTTSAWVLGKASQNNALVQNQILGYGALERLVSMGYSSSAAEAAKSLYAISSLIRDNEHGQELFLSANGMQCSHTVNS

SEQ ID NO: 113578 - protein, 159 aa, Setaria italica
  misc_feature (101)..(101): Xaa can be any naturally occurring amino acid
  Transcript Sequence Number=SeqID_47604
  Gene Ontology: Mol. function=cysteine-type peptidase activity; Biological process=proteolysis
LEKDSYTIDSIVAEKVACSEWIDFESDNDRRILLDDEKHQDQHEQYKVDQTYDYLPQDYEMTDLDYCALITIETSFKDDILVKIDDIFVRQAQLSCLLDSXKFLNDDVISAYICCIKDQAHLESRNDVKFYFENPFISILLKRDGKLGVGEDGNHITKI

SEQ ID NO: 113579 - protein, 97 aa, Setaria italica
  Transcript Sequence Number=SeqID_47605
TQLFTERVWPVRVSSRQTDYGCEPISCRVGSGSVTASVPHVHEVTLHCRSGFLARKHYPGKQSACASVARANGRSPGRKSTAAWAAGTHDGTTPTTV

SEQ ID NO: 113580 - protein, 325 aa, Setaria italica
  Transcript Sequence Number=SeqID_47606
  Gene Ontology: Mol. function=protein kinase activity; Cellular component=integral to membrane; Biological process=protein amino acid phosphorylation
  Homolog annotation: Hit_ID=B6UCN1; Match level="QueryCoverage=92%, HitCoverage=44%, E-value=1e-112, Identity=70%"; Hit description =Atypical receptor-like kinase MARK
  Pfam annotation: Domain name=LRRNT_2; Domain location=29-66; Score =46.1; E_value=1.4e-10; Accession=PF08263.4; Description=Leucine rich repeat N-terminal domain
  Pfam annotation: Domain name=LRR_1; Domain location=118-140; Score =11.9; E_value=1.6; Accession=PF00560.25; Description=Leucine Rich Repeat
  Pfam annotation: Domain name=LRR_1; Domain location=142-164; Score =16.3; E_value=0.13; Accession=PF00560.25; Description=Leucine Rich Repeat
  Pfam annotation: Domain name=LRR_1; Domain location=166-187; Score =9.0; E_value=5.8; Accession=PF00560.25; Description=Leucine Rich Repeat
  Pfam annotation: Domain name=LRR_1; Domain location=188-210; Score =9.1; E_value=5.5; Accession=PF00560.25; Description=Leucine Rich Repeat
  Pfam annotation: Domain name=LRR_1; Domain location=69-92; Score=5.7; E_value=24; Accession=PF00560.25; Description=Leucine Rich Repeat
  Pfam annotation: Domain name=LRR_1; Domain location=94-116; Score =14.1; E_value=0.58; Accession=PF00560.25; Description=Leucine Rich Repeat
  Pfam annotation: Domain name=SKG6; Domain location=257-293; Score =33.9; E_value=6.6e-07; Accession=PF08693.2; Description =Transmembrane alpha-helix domain
  Pfam module annotation: Pfam domain module=LRRNT_2::LRR_1::LRR_1::LRR_ 1::LRR_1::LRR_1::LRR_1::SKG6; Domain location=29-66::118-140::142 -164::166-187::188-210::69-92::94-116::257-293
MAAMPPPAVGLAVLVLFAAVLPAILADDLNSDAQALQALRSAVGRSALPSWNSTTPTCQWQGVTCENGRVVELRLPGAGLMGSLPSGALGNLSALRTLSLRYNALTGPVPDDLSSLSELRAIYLQHNGFSGEVPASLFGLKNLVRLDIADNKFTGEISPDFNKLIRLGTLYLDGNSFTGEIPKLDLPALEQFNVSYNQLNGSIPTKLRKMPKDAFLGNTGLCGGPLGLCPGETAPTPAGSPEAQPGAGGAADIGGGKKKKLSGGAIAGIAIGCVFGVLLLLALLFFLCRKRSSAARPAAAVEKGRDIGMEPLDVEPKGQNGSAAG

SEQ ID NO: 113581 - protein, 167 aa, Setaria italica
  misc_feature (124)..(124): Xaa can be any naturally occurring amino acid
  Transcript Sequence Number=SeqID_47607
  Gene Ontology: Mol. function=RNA-directed RNA polymerase activity
  Homolog annotation: Hit_ID=B5M060; Match level="QueryCoverage=97%, HitCoverage=14%, E-value=8e-53, Identity=64%"; Hit description=RNA -directed RNA polymerase 1b
MHHGRTIQVSGFALTDSAEYVKDFLERIAGAGTVYALKLRHPRNITATSKAFAIVQFQTQECASLVENAAQRNALRSRCIYLKARPADRDIVPRPRIAMFSLDAAALHLGCLVKENILYTLFSXLRNISVQFGFDMKKIYFYLSYNLIKYKLELSYESIWEMQLHSS

SEQ ID NO: 113582 - protein, 69 aa, Setaria italica
  Transcript Sequence Number=SeqID_47608
MSYQAEAGYPPPGQQAYGAPPPPAYVAPPPAYPPTQDAGAYGQQQQQQHETTSRGGDGFWKGCCAAICC

SEQ ID NO: 113583 - protein, 134 aa, Setaria italica
  Transcript Sequence Number=SeqID_47609
  Gene Ontology: Mol. function=DNA binding; Cellular component=nucleus; Biological process=regulation of transcription
  Homolog annotation: Hit_ID=B9SPR1; Match level="QueryCoverage=79%, HitCoverage=27%, E-value=4e-46, Identity=82%"; Hit description =Transcription factor, putative
  Pfam annotation: Domain name=NAM; Domain location=28-134; Score =193.9; E_value=4.4e-55; Accession=PF02365.7; Description=No apical meristem (NAM) protein
SEHGRVSSSICCCRRWGGGGGSKKEESLPPGFRFHPTDEELITYYLRQKIADGSFTARAIAEVDLNKCEPWDLPEKAKLGEKEWYFFSLRDRKYPTGVRTNRATNAGYWKTTGKDKEIYTGQLPATPELVGMKK

SEQ ID NO: 113584 - protein, 77 aa, Setaria italica
  Transcript Sequence Number=SeqID_47610
KDKVSCELSKMFCLRILVDMGTEGQDVLRIVKKYLMLGSRAISYLALLQTRQALDLTPSSCFSRLMVCGSMWRKMEF

SEQ ID NO: 113585 - protein, 122 aa, Setaria italica
  Transcript Sequence Number=SeqID_47611
  Subcellular localization annotation: CTP_CleavageSite=44; ConfidenceScore=5.28e-01
AVRRENGGSGQPNHRTPSFSDRTAQTRLGPPPCPTGSLAHAHVHARTWSNCWRRRERSQNLKVQTELIEPSDTLSLTVWSGDSQSEGCCLLAGLLQEATPLALGTRPPAIKTAAGPRILFVV

SEQ ID NO: 113586 - protein, 168 aa, Setaria italica
  misc_feature (155)..(155): Xaa can be any naturally occurring amino acid
  Transcript Sequence Number=SeqID_47612
  Gene Ontology: Mol. function=protein kinase activity; Cellular component=integral to membrane; Biological process=protein amino acid phosphorylation
  Homolog annotation: Hit_ID=B6SY66; Match level="QueryCoverage=85%, HitCoverage=16%, E-value=2e-53, Identity=76%"; Hit description =Receptor protein kinase CLAVATA1
  Pfam annotation: Domain name=LRR_1; Domain location=112-134; Score =9.9; E_value=4; Accession=PF00560.25; Description=Leucine Rich Repeat
  Pfam annotation: Domain name=LRR_1; Domain location=12-35; Score=1.0; E_value=2e+02; Accession=PF00560.25; Description=Leucine Rich Repeat
  Pfam annotation: Domain name=LRR_1; Domain location=137-159; Score =12.0; E_value=1.6; Accession=PF00560.25; Description=Leucine Rich Repeat
  Pfam annotation: Domain name=LRR_1; Domain location=38-61; Score =16.9; E_value=0.086; Accession=PF00560.25; Description=Leucine Rich Repeat
  Pfam annotation: Domain name=LRR_1; Domain location=63-86; Score =13.3; E_value=0.87; Accession=PF00560.25; Description=Leucine Rich Repeat
  Pfam annotation: Domain name=LRR_1; Domain location=88-110; Score =10.7; E_value=2.7; Accession=PF00560.25; Description=Leucine Rich Repeat
  Pfam module annotation: Pfam domain module=LRR_1::LRR_1::LRR_1::LRR _1::LRR_1::LRR_1; Domain location=112-134::12-35::137-159::38-61::63 -86::88-110
RSLVFVRRLPRRLRGSLDLSGNSIEGQVPTGLAALGSRLEVLNLGGNRLSGVLHPALLRNLTGLHLLDLSGNQFTESELPPEIGEMSSLRWLFLQGSGFAGAIPESFLGLEQLQVLDLSMNSLTGAVPPRFSVRFQKLMTLDLSQNGLSGPFPEXIGKCLMLQRFEVH

SEQ ID NO: 113587 - protein, 174 aa, Setaria italica
  Transcript Sequence Number=SeqID_47613
  Gene Ontology: Cellular component=chloroplast
  Subcellular localization annotation: CTP_CleavageSite=51; ConfidenceScore=5.45e-01
MAAAAVAVSTSPCSGSGHLGLLQASQAHHLRRTLLGGRMAGRCGRSRLAVLAAAGKPPGEAEEQVPAWAKPGADEPPPWEREGGAVQGQEAGQVPFYAYLLASAVTAIAAIGSIFEYTNQRPVFGIVGSDSALYAPLLGFFVFTGIPTSAFLWFKAVQTANRDAEEQDRRDGFL

SEQ ID NO: 113588 - protein, 47 aa, Setaria italica
  Transcript Sequence Number=SeqID_47614
PIYFQHESTGDPEHGSSFSGFLIGTDSLGLSGLLANSLDAFQNFSVS

SEQ ID NO: 113589 - protein, 154 aa, Setaria italica
  Transcript Sequence Number=SeqID_47615
  Subcellular localization annotation: CTP_CleavageSite=18; ConfidenceScore=5.14e-01
QIPATCDSFDAAIASLIACQQASSQPRVSNPSLWEAEDTCHAFAFQNQASRRASSSIPGNGGAAMTSSVLGAIPETGTDDDQQCSTNGKEREASTEPSVLGSDLNAKPETSVHESTGDPEHGSSFSGFLIGTDSLGLSGLLANSLDAFQNFSVS

SEQ ID NO: 113590 - protein, 61 aa, Setaria italica
  misc_feature (54)..(54): Xaa can be any naturally occurring amino acid
  Transcript Sequence Number=SeqID_47616
  Gene Ontology: Mol. function=transcription factor activity; Cellular component=nucleus; Biological process=regulation of transcription, DNA-dependent
  Homolog annotation: Hit_ID=B6T5Z6; Match level="QueryCoverage=73%, HitCoverage=21%, E-value=7e-20, Identity=100%"; Hit description =Ethylene responsive element
  Pfam annotation: Domain name=AP2; Domain location=14-61; Score=57.2; E_value=6.4e-14; Accession=PF00847.12; Description=AP2 domain
MTENLHSRKMVQPKKFRGVRQRHWGSWVSEIRHPLLKRRVWLGTFETAEEAARXYDEAAVL

SEQ ID NO: 113591 - protein, 700 aa, Setaria italica
  misc_feature (602)..(602): Xaa can be any naturally occurring amino acid
  Transcript Sequence Number=SeqID_47617
  Gene Ontology: Cellular component=plasma membrane
  Homolog annotation: Hit_ID=Q6Z3H8; Match level="QueryCoverage=79%, HitCoverage=59%, E-value=0.0, Identity=61%"; Hit description =Putative bzip-related transcription factor
  Pfam annotation: Domain name=DUF632; Domain location=285-585; Score =534.9; E_value=9.9e-158; Accession=PF04782.4; Description=Protein of unknown function (DUF632)
QSYGGMGGGGGGSGGYDPGYGGMGSGGGGGGGYDPGYGGMGSYGQSFFNISYARSQPPPPSVAREQRLQATNARVHYYSGDGEPQPPPRGYGGGYPYPPQSSSSYNQYAYGGYFGAGGAPAPPADIPSSSREPAAPPPPPSPPRVSTWDFLNPFETYESYYEQPTAAAAPYTPSRSSKDVREEEGIPDLEDEDMEVVKEAYGDEKHLVKGYGGNGKAAKEEGRSSTGDELPRKSKSSEASSSGSSLEHDVHVVEKSVVGEQVQRSEPRQHVAGLPSTGPEKIYVDDTEVVVEIRTQFERASESAGEVSKMLEVGKMPYYQKSSGFKVSAMMICGIPTMEEEFLRFEEDKAMGCGNLSSTLQKLYMWEKKLLEEVKTEERMRVLYDRKREELKMLDEKGAEADKLEATEIYIRKLSTKISIAIQVVNTISQKISKLRDEELWPQTCELIQGLMRMWSVMLECHQIQLHAISQAKNIDSMIDAAKFGDAHMDLIKRLELQLLDWIACFAAWVNAQKNYVNTLNDWLRKGVDYVPEETEDGAPPFSPGRLGAPPIFVICNNWAASVARISEKEVVEAMQAFASKVLNLWERHRSEQRQGMMANKXMDRDLRVMERDEQSMRKALEAQNKKLVLISNQSGVSLSAQVLHEAGPGAEIGSLQTSLRNIFEAMENFTAASVNTYKDLHLRAEEEKARVAQESGRVS

SEQ ID NO: 113592 - protein, 36 aa, Setaria italica
  Transcript Sequence Number=SeqID_47618
  Gene Ontology: Mol. function=pyridoxal phosphate binding; Biological process=cysteine biosynthetic process from serine
  Homolog annotation: Hit_ID=B8A367; Match level="QueryCoverage=100%, HitCoverage=9%, E-value=3e-11, Identity=97%"; Hit description =Cysteine synthase
VPRNLDSDVLDEVIEISSDEAVETAKQLAVQEGLLV

SEQ ID NO: 113593 - protein, 351 aa, Setaria italica
  Transcript Sequence Number=SeqID_47619
  Gene Ontology: Mol. function=pyridoxal phosphate binding; Cellular component=chromoplast; Biological process=cysteine biosynthetic process from serine
  Homolog annotation: Hit_ID=B8A367; Match level="QueryCoverage=92%, HitCoverage=81%, E-value=1e-157, Identity=86%"; Hit description =Cysteine synthase
  Pfam annotation: Domain name=ADH_zinc_N; Domain location=94-274; Score=-16.0; E_value=0.016; Accession=PF00107.18; Description=Zinc -binding dehydrogenase
  Pfam annotation: Domain name=PALP; Domain location=38-326; Score =473.8; E_value=2.5e-139; Accession=PF00291.17; Description=Pyridoxal- phosphate dependent enzyme
  Pfam module annotation: Pfam domain module=ADH_zinc_N::PALP; Domain location=94-274::38-326
LTRGPGFLTRIGSASVSSSARCRAVAAEVEGLNIANDVTQLIGKTPMVYLNNIVKGSVANVAAKLEIMEPCCSVKDRIGYSMINDAEEKGLITPGKSVLVEATSGNTGIGLAFIAASKGYKLILTMPSSMSMERRVLLRAFGAELVLTDAAKGMKGALDKATEILDKTPNSYMLQQFDNPANPKVHYETTGPEIWEDSKGKVDIFIGGIGTGGTISGAGRFLKEKNPEIKVIGIEPSESNILSGGKPGPHKIQGIGAGFVPRNLDSDVLDEVIEISSDEAVETAKQLAVQEGLLVGISSGAAAAAAIKVAKRPENAGKLIVVIFPSFGERYLSSVLYQSIREECENLQPEP

SEQ ID NO: 113594 - protein, 36 aa, Setaria italica
  Transcript Sequence Number=SeqID_47620
GRLINICFGAQGLTVEDSVSGQPTSKMFKQQCLRVS

SEQ ID NO: 113595 - protein, 718 aa, Setaria italica
  misc_feature (429)..(429): Xaa can be any naturally occurring amino acid
  Transcript Sequence Number=SeqID_47621
  Gene Ontology: Mol. function=ubiquitin-protein ligase activity; Cellular component=ubiquitin ligase complex; Biological process =positive regulation of I-kappaB kinase/NF-kappaB cascade
  Homolog annotation: Hit_ID=B9RMN1; Match level="QueryCoverage=81%, HitCoverage=86%, E-value=1e-151, Identity=51%"; Hit description =Ankyrin repeat-containing protein, putative
  Pfam annotation: Domain name=Ank; Domain location=141-174; Score=6.7; E_value=4; Accession=PF00023.22; Description=Ankyrin repeat
  Pfam annotation: Domain name=Ank; Domain location=19-51; Score=6.7; E_ value=3.9; Accession=PF00023.22; Description=Ankyrin repeat
  Pfam annotation: Domain name=Ank; Domain location=227-259; Score =21.5; E_value=0.0035; Accession=PF00023.22; Description=Ankyrin repeat
  Pfam annotation: Domain name=Ank; Domain location=260-293; Score =28.8; E_value=2.2e-05; Accession=PF00023.22; Description=Ankyrin repeat
  Pfam annotation: Domain name=Ank; Domain location=294-337; Score=0.8; E_value=28; Accession=PF00023.22; Description=Ankyrin repeat
  Pfam annotation: Domain name=Ank; Domain location=342-376; Score =17.5; E_value=0.055; Accession=PF00023.22; Description=Ankyrin repeat
  Pfam module annotation: Pfam domain module=Ank::Ank::Ank::Ank::Ank::An k; Domain location=141-174::19-51::227-259::260-293::294-337::342-376
MEQSCYFPLRWESTGDQWWYASPIDWAAADGHYDIVRQLLHLDPNLLIKLTSLRRIRRLEALWDDDARFADAARHRASVARSLLLECECRNHHPAGGGENTLLRAGYGGWVLYTAASAGDVAFVQELLERDPLLVFGEGEYGVTDMFYAAARGGSADVFRLLLDHAMSPRCSTNCRDGEGGSGRGSVFRLEMMSRAVHAAARGGSVEMLRELLEERRSGVSVYLDVRGSTVLHAAAGRGQLQVVKYLLASFDIINSTDNHGNTALHVAAYRGHQPVVEALVTASPSTLSAINNAGDTFLHSAVAGFRTPGFRRLDHQLELMRYLIRERTTDIQKIINLKNDAGLTALHLAVVGCAHPDLVELLTTTPSIDLNAEDANGMTALALLKQQLRSATSDRLIKQIVSAGGILNSSILRTRSAIASQIKMQGGXASSPGTTFKVSDAEIFLFSGIGAAESQRPSSCSSNGKDDPAHADASGGENHRSSEKRLSSASRAKDRLKMMLRWPRHKEKMSKTPKKSEESSPLDSIKRLGEHGVETPAPLRQKFTKTTALNGKRTLAVKSSTPSSSSATKKKLNTKLIHGIMEAMPQLAAPSSAARSRATSDTLPRSSMSSTAPPPTLAKLKDICLDDEISMVTPPPVGRLKDIILDSDDAAEEPSCSNSSMDDGSGGDTGESAARKHGCGNGRLINICFGAQGLTVEDSVSGQPTSKMFKQQCLRVS

SEQ ID NO: 113596 - protein, 73 aa, Setaria italica
  Transcript Sequence Number=SeqID_47622
NRQRGNIKMLGTLQLSRSSVICEGWRKNLTPTYALYKDSTFKDGSSGVLNVLDLNLVMIMGQQCKSIPCRYII

SEQ ID NO: 113597 - protein, 148 aa, Setaria italica
  Transcript Sequence Number=SeqID_47623
  Gene Ontology: Mol. function=oxidoreductase activity, acting on NADH or NADPH, quinone or similar compound as acceptor; Cellular component=integral to membrane; Biological process=oxidation reduction
  Homolog annotation: Hit_ID=Q7GEL4; Match level="QueryCoverage=77%, HitCoverage=62%, E-value=1e-40, Identity=76%"; Hit description=NDH-A protein (Fragment)
  Pfam annotation: Domain name=NADHdh; Domain location=24-148; Score= -80.6; E_value=1.2e-07; Accession=PF00146.13; Description=NADH dehydrogenase
MIIEVETINSFSKSELLKEVYGLIWILPILTLLLGITIEVLVIVWLEREISASIQQRIGPEYAGPLGLLQAIADGTKLLLKEDILPSRGDIPLFSIGPSIAIISVLLSFLVIPLGYRFVLVLILVLVFFIGIAISSIAPIGLLMSGYS

SEQ ID NO: 113598 - protein, 127 aa, Setaria italica
  misc_feature (2)..(2): Xaa can be any naturally occurring amino acid
  misc_feature (12)..(12): Xaa can be any naturally occurring amino acid
  misc_feature (40)..(40): Xaa can be any naturally occurring amino acid
  Transcript Sequence Number=SeqID_47624
  Gene Ontology: Mol. function=metal ion binding
  Homolog annotation: Hit_ID=B9SJF7; Match level="QueryCoverage=51%, HitCoverage=5%, E-value=6e-14, Identity=65%"; Hit description=Ran GTPase binding protein, putative
  Subcellular localization annotation: CTP_CleavageSite=54; ConfidenceScore=5.28e-01
TXQVPVALQLKXPFISAPDLQNSYTVANQYPYDSRSTFTXFLRMPYLNYSSSLSSESLESLRDANELLKQEVQKLQAEVNSLRQEREQQDAELQKSEAKAHEAMTLATEEASKLKTAKDVIKSLTAQ

SEQ ID NO: 113599 - protein, 116 aa, Setaria italica
  Transcript Sequence Number=SeqID_47625
  Gene Ontology: Mol. function=nucleic acid binding; Cellular component= ribonucleoprotein complex
  Homolog annotation: Hit_ID=B6SXV2; Match level="QueryCoverage=97%, HitCoverage=21%, E-value=2e-39, Identity=73%"; Hit description=RNA -binding protein AKIP1
  Pfam annotation: Domain name=RRM_1; Domain location=39-108; Score =64.6; E_value=3.8e-16; Accession=PF00076.14; Description=RNA recognition motif. (a.k.a. RRM, RBD, o
EPLSREQLVSLLRTAAEESPVTMAAVRRAAEADPASRKLFVHGLGWGAGADDLRSAFSRFGELEDCRVISDKQSGRSKGYGFVLFRSRRSALRALRRPQLQIGGRLAFCHLAALDR

SEQ ID NO: 113600 - protein, 147 aa, Setaria italica
  Transcript Sequence Number=SeqID_47626
  Gene Ontology: Mol. function=transaminase activity
  Homolog annotation: Hit_ID=Q5Z6X3; Match level="QueryCoverage=90%, HitCoverage=43%, E-value=7e-19, Identity=38%"; Hit description =Aminotransferase-like
PTARRRCTSFGEAASAFPGCLYSATKVAEYFRCFYNSFNEDATVWFPYRRDDPIFELPTCFDSTTGRFDEDLTDELIKPGILPANFFSGKDAPTYEFYNPSAAARQLGMGQLPIQVYFAGRAKFKDGLTTGLDYNRLQDRYSVVLPT

SEQ ID NO: 113601 - protein, 100 aa, Setaria italica
  misc_feature (69)..(69): Xaa can be any naturally occurring amino acid
  Transcript Sequence Number=SeqID_47627
  Homolog annotation: Hit_ID=A2Q3Z1; Match level="QueryCoverage=96%, HitCoverage=31%, E-value=2e-35, Identity=72%"; Hit description =Tac7077, putative
FQDGIQPIPGARDALQNLSSFCSLSVVTSRQDAIKSHTLDWIERYYPGLFEQIHFGNHFALEGQSRPKXSEICRSFGAQVLIDDNPRYAMECANDGSNEL

SEQ ID NO: 113602 - protein, 362 aa, Setaria italica
  Transcript Sequence Number=SeqID_47628
  Homolog annotation: Hit_ID=A2Q3Z1; Match level="QueryCoverage=59%, HitCoverage=71%, E-value=5e-80, Identity=64%"; Hit description =Tac7077, putative
  Subcellular localization annotation: CTP_CleavageSite=41; ConfidenceScore=5.09e-01
MLSRGAVRSLLDRLRPPPRGWKQNPSPAMPPAAVNRPCLCRCSHSVAHNEGRATPLGKMGFLNLAGGRRFAPSGALSLKGCLGWQDGGSGGGGFKRRVDGEAAGFKAQVLTRQRQLMRDPEVLPLEEAAASAKTLSGNGACRRGKPLGFPEQAVAAKMVVAVDVDEVLGSFLAALNKFIADRYSWNHTVSEYHVYEFFRIWNCSRERANFLVHEFFTTHYFQDGIQPIPGARDALQNLSSFCSLSVVTSRQDAIKSHTLDWIERYYPGLFEQIHFGNHFALEGQSRPKSEICRSFGAQVLIDDNPRYAMECANDGMRVLLFDYDNSYPWCKTGVDESHPLVTKVHNWEEVEEKLLSWVVTES

SEQ ID NO: 113603 - protein, 85 aa, Setaria italica
  Transcript Sequence Number=SeqID_47629
  Subcellular localization annotation: CTP_CleavageSite=45; ConfidenceScore=5.85e-01
MAAVRASPRLRSLPLLFSQPDAAAAVRRSFSCASASPSPAPTRAMASPSSSSATPTPYTTLVGRVSCEREIKRSKFIAIAAPVST

SEQ ID NO: 113604 - protein, 71 aa, Setaria italica
  Transcript Sequence Number=SeqID_47630
KGSTISNIERFNDQDMLQKLTILFQHKCKYYFPNSHIHITTTNSHGTITSCWSCPSRVVSSSFGPLSLPSP

SEQ ID NO: 113605 - protein, 229 aa, Setaria italica
  misc_feature (35)..(35): Xaa can be any naturally occurring amino acid
  Transcript Sequence Number=SeqID_47631
  Gene Ontology: Mol. function=protein serine/threonine kinase activity; Cellular component=integral to membrane; Biological process=protein amino acid phosphorylation
  Homolog annotation: Hit_ID=Q01M94; Match level="QueryCoverage=93%, HitCoverage=58%, E-value=1e-104, Identity=85%"; Hit description =OSIGBa0146N20.6 protein
  Pfam annotation: Domain name=Pkinase; Domain location=12-229; Score =108.9; E_value=1.7e-29; Accession=PF00069.17; Description=Protein kinase domain
  Pfam annotation: Domain name=Pkinase_Tyr; Domain location=12-226; Score=43.6; E_value=1.3e-16; Accession=PF07714.9; Description =Protein tyrosine kinase
  Pfam module annotation: Pfam domain module=Pkinase::Pkinase_Tyr; Domain location=12-229::12-226
NLVVLRAATNNFSEENKLGEGGFGEVFKGTLQDGXEIAVKRLSQDSSQGFQELKNELVLAAKLKHRNLVQLLGVSLQEEKLLVYEYMPNRSLDTFLLDPVRRHQLDWSKRFTIICGIARGLLYLHEESRLKVIHRDLKPSNVLLDADMNPKISDFGIARAFGGDQSRDITRRPVGTLGYMSPEYAYWGHVSTKSDMFSFGVIVLEMVTGRRNNSAYDSAVDSVSVLSHV

SEQ ID NO: 113606 - protein, 129 aa, Setaria italica
  Transcript Sequence Number=SeqID_47632
  Gene Ontology: Mol. function=DNA-directed RNA polymerase activity; Biological process=transcription
  Homolog annotation: Hit_ID=B8AHU1; Match level="QueryCoverage=99%, HitCoverage=6%, E-value=9e-60, Identity=85%"; Hit description=DNA -directed RNA polymerase
  Pfam annotation: Domain name=RNA_pol_Rpb1_2; Domain location=1-71; Score=-31.6; E_value=2.6e-05; Accession=PF00623.12; Description=RNA polymerase Rpb1, domain 2
VDGDVVFLNRPPSTHKHSLQAFYAYVHDDHTVKINPLMCSPFSADFDGDCVHIYYPQSLAAKAEALELFSVEKQLISSHSGQVNLQLGNDSLVAMKAMSSRTMLSKELANQLAMFVPFSLPAPAVIKSI

SEQ ID NO: 113607 - protein, 99 aa, Setaria italica
  Transcript Sequence Number=SeqID_47633
  Gene Ontology: Mol. function=ubiquitin thiolesterase activity; Cellular component=nucleus; Biological process=ubiquitin-dependent protein catabolic process
  Homolog annotation: Hit_ID=Q2R2A3; Match level="QueryCoverage=100%, HitCoverage=6%, E-value=2e-33, Identity=73%"; Hit description =Ubiquitin carboxyl-terminal hydrolase family protein, expressed
MTMMTPPPLEQQQEDEEMLVPHQELPVAGPEPAPQPMEVVAQTEPANTAESQPAEDPQTSRFTWTIESFSRLNTKKHYSDVFVVGGYKWRVLIFPKGNN

SEQ ID NO: 113608 - protein, 106 aa, Setaria italica
  Transcript Sequence Number=SeqID_47634
  Gene Ontology: Mol. function=ubiquitin thiolesterase activity; Cellular component=nucleus; Biological process=ubiquitin-dependent protein catabolic process
  Homolog annotation: Hit_ID=Q2QQM3; Match level="QueryCoverage=48%, HitCoverage=4%, E-value=5e-23, Identity=98%"; Hit description =Ubiquitin-specific protease 12, putative, expressed
GRGVAGGRRNKGLEEQYGGEEELPQINPGFNNTPFKFTKYSNAYMLVYIRESDKEKIMCNVDEKDIAEHLRIRLKKEQEEKEHKKKEKAEAHLHYEQEHCEAYKGF

SEQ ID NO: 113609 - protein, 91 aa, Setaria italica
  misc_feature (22)..(22): Xaa can be any naturally occurring amino acid
  Transcript Sequence Number=SeqID_47635
  Gene Ontology: Mol. function=ubiquitin thiolesterase activity; Cellular component=nucleus; Biological process=ubiquitin-dependent protein catabolic process
  Homolog annotation: Hit_ID=B6V765; Match level="QueryCoverage=100%, HitCoverage=8%, E-value=5e-35, Identity=75%"; Hit description =Ubiquitin specific protease 12
ETLAEVKKRIKSKLQVSAEEFXKWKFAFISMNRPDYLQDSDVIAPRFQRREVYGAWEQYLGMEHTDTAPKRAYTVNQQNRHAYEKPVRIYN

SEQ ID NO: 113610 - protein, 264 aa, Setaria italica
  Transcript Sequence Number=SeqID_47636
  Gene Ontology: Mol. function=ubiquitin thiolesterase activity; Cellular component=nucleus; Biological process=ubiquitin-dependent protein catabolic process
  Homolog annotation: Hit_ID=Q2QQM3; Match level="QueryCoverage=94%, HitCoverage=22%, E-value=1e-124, Identity=87%"; Hit description =Ubiquitin-specific protease 12, putative, expressed
QEEKEHKKKEKAEAHLYTIIKIARDEDLKDQIGKNIYFDLVDHEKVRSFRIQEQLPFTSFKEEVAKEYGIPVQFQRFWLWAKRQNHTYRPNRPLTAHEEAQSVGQLREVSNKAHNAELKLFLEVELGPELRPIRPPEKSKEDILLFFKLYDAEKEELRFVGRLFVKALGKPSEILTKLNEMAGFSPNEEIELYEEIKFEPNVMCEHIDKKLTFRSSQLEDGDIICFQKAPVPDGDTQVRYPDVPSFLEYVHNRQVVHFRSLDKP

SEQ ID NO: 113611 - protein, 945 aa, Setaria italica
  Transcript Sequence Number=SeqID_47637
  Gene Ontology: Mol. function=ubiquitin thiolesterase activity; Cellular component=nucleus; Biological process=ubiquitin-dependent protein catabolic process
  Homolog annotation: Hit_ID=Q2QQM3; Match level="QueryCoverage=97%, HitCoverage=81%, E-value=0.0, Identity=89%"; Hit description =Ubiquitin-specific protease 12, putative, expressed
  Pfam annotation: Domain name=MATH; Domain location=36-156; Score =87.6; E_value=4.5e-23; Accession=PF00917.18; Description=MATH domain
  Pfam annotation: Domain name=UCH; Domain location=171-495; Score =275.0; E_value=1.7e-79; Accession=PF00443.21; Description=Ubiquitin carboxyl-terminal hydrolase
  Pfam module annotation: Pfam domain module=MATH::UCH; Domain location= 36-156::171-495
LWRSKREVEQQASFSQAQAAGEEGEITQTSRFTWTIESFSRLNTKKHYSDVFVVGGYKWRVLIFPKGNNVDHFSMYLDVADSGNLPYGWSRYAQFSLAVVNQIHPKYTIRKDTQHQFNARESDWGFTSFMPLSDLYDPSRGYLVNDTVVVEAEVAVRRMVDYWTYDSKKETGYVGLKNQGATCYMNSLLQTLYHIPYFRKAVYHMPTTENDMPSGSIPLALQSLFYKLQYSDNSVATKELTKSFGWDTYDSFMQHDVQELNRVLCEKLEDKMKGTVVEGTIEQLFEGHHINYIECINVDYKSSRKESFYDLQLDVKGCRDVYASFDKYVEVERLEGDNKYHAEQYGLQDAKKGVLFLDFPPVLQLQLKRFEYDYMRDTMVKINDRYEFPLQLDLDRDEGKYLSPDADRSIRNLYTLHSVLVHSGGVHGGHYYAFIRPTLSDQWYKFDDERVTKEDTKKALEEQYGGEEELPQINPGFNNTPFKFTKYSNAYMLVYIRESDKEKIMCNVDEKDIAEHLRIRLKKEQEEKEHKKKEKAEAHLYTIIKIARDEDLKDQIGKNIYFDLVDHEKVRSFRIQKQLPFTSFKEEVAKEYGIPVQFQRFWLWAKRQNHTYRPNRPLTAHEEAQSVGQLREVSNKAHNAELKLFLEVELGLDLQPLPPPEKGREDFLLFFKLYKPEKEELCFMGRLFVKALGKPSDILAKLNEMAGFSPDQEIELYEEIKFEPNVMCEHIDQKLTFRSSQLEDGDIICFQKAPVPDGDTQVRYPDVPSFLEYVHNRQVVHFRSLDKPKDDDFSLELSKLHTYDDVVEKVAHQLGLDDPSKIRLTSHNCYSQQPKPQPIRYRGVEHLLDMLVHYNQTSDILYYEVLDIPLPELQCLKTLKVAFHHATKDEVVVHSIRLPKNSTISDVITDLKTKVELSNPDAELRLLEVFYHKIYKIFPPHCSKY

SEQ ID NO: 113612 - protein, 311 aa, Setaria italica
  Transcript Sequence Number=SeqID_47638
  Gene Ontology: Mol. function=ubiquitin thiolesterase activity; Cellular component=nucleus; Biological process=ubiquitin-dependent protein catabolic process
  Homolog annotation: Hit_ID=Q2QQM3; Match level="QueryCoverage=99%, HitCoverage=27%, E-value=1e-176, Identity=95%"; Hit description =Ubiquitin-specific protease 12, putative, expressed
SSVLDKPKDDDFSLELSKLHTYDDVVEKVAHQLGLDDPSKIRLTSHNCYSQQPKPQPIRYRGVEHLLDMLVHYNQTSDILYYEVLDIPLPELQCLKTLKVAFHHATKDEVVVHSIRLPKNSTISDVITDLKTKVELSNPDAELRLLEVFYHKIYKIFPPHEKIENINDQYWTLRAEEIPEEEKNLGPHDRLIHVYHFMKDPNQNQQIQNFGDPFLMVIREGETAAEVMERIQRKLRVPDEEFSKWKLAFISMNRPEYLQDTDVVSARFQRRDVYGAWEQYLGLEHTDTTSKRSYTANQNRHTYEKPVKIYN

SEQ ID NO: 113613 - protein, 77 aa, Setaria italica
  Transcript Sequence Number=SeqID_47639
SKSLECMTDHFPTCGPKDEPSFFSILCRDVNTYMNPFISTALGPSRCISSLTDSSYSILSFKNTHRINVLKKQNTFV

SEQ ID NO: 113614 - protein, 68 aa, Setaria italica
  Transcript Sequence Number=SeqID_47640
RVMINLSKELRRYQIIASIQGSHHQLPQTPYHGNYIIILALNYEALFKMMSILLLALSKMWMVMFLNL

SEQ ID NO: 113615 - protein, 48 aa, Setaria italica
  Transcript Sequence Number=SeqID_47641
KSISSCFPLTSGSVQLPRPLIFEFSTNIQYCHISMLVTKAFKMDSGSV

SEQ ID NO: 113616 - protein, 52 aa, Setaria italica
  Transcript Sequence Number=SeqID_47642
GSGCGSGWGCGLSPGCGWGCGRGCGGLSPGCGFGCRNQIQTHSHSRCRSQTR

SEQ ID NO: 113617 - protein, 40 aa, Setaria italica
  Transcript Sequence Number=SeqID_47643
YRLVLRMTICGFSFFLYHDCVPDRLLRFFTRVLVLAYTTT

SEQ ID NO: 113618 - protein, 85 aa, Setaria italica
  Transcript Sequence Number=SeqID_47644
DQPHLMIRLPKEMLCENSFENEPLHVLKSRFTANKLYPYPCYILCIFLLVSPFVVEVGLVDYFCTHPCFVASEKDPDFIAEDFRS

SEQ ID NO: 113619 - protein, 82 aa, Setaria italica
  Transcript Sequence Number=SeqID_47645
  Homolog annotation: Hit_ID=Q2QP06; Match level="QueryCoverage=95%, HitCoverage=11%, E-value=3e-22, Identity=63%"; Hit description =Calmodulin-binding protein, putative, expressed
DAGLFFDEIYQLVGVKFGDYYKSIDQLDQIEKNLVDSLKQAAYQNIDGIQSNYKMVNNYPVPHRFPAQGTSLLSPVLPISRY

SEQ ID NO: 113620 - protein, 87 aa, Setaria italica
  Transcript Sequence Number=SeqID_47646
QRKHITYNTFGRLKWWPDTRNTAKYRTEGTQISILELLPGCWRSLNNSTNYRLNYGFVLHKTRTLKIISSSIREANMKRKSIPEVPN

SEQ ID NO: 113621 - protein, 48 aa, Setaria italica
  Transcript Sequence Number=SeqID_47647
  Gene Ontology: Mol. function=sequence-specific DNA binding; Cellular component=nucleus
  Homolog annotation: Hit_ID=Q9LEE6; Match level="QueryCoverage=66%, HitCoverage=4%, E-value=1e-09, Identity=96%"; Hit description=OCL5 protein
RWQGARTGVTASAAHQWTTLSGSGAEDVRVMTRKSVDDARSVLVLGFV

SEQ ID NO: 113622 - protein, 108 aa, Setaria italica
  Transcript Sequence Number=SeqID_47648
  Gene Ontology: Mol. function=sequence-specific DNA binding; Cellular component=nucleus; Biological process=regulation of transcription, DNA-dependent
  Homolog annotation: Hit_ID=Q9LEE6; Match level="QueryCoverage=93%, HitCoverage=12%, E-value=7e-52, Identity=98%"; Hit description=OCL5 protein
LLRDETSRSEWDILSNGGAVQEMAHIANGRDHGNCVSLLRVNSANSNQSNMLILQESCTDASGSYVVYAPVDVVAMNVVLNGGDPDYVALLPSGFAILPTGHQALLPQ

SEQ ID NO: 113623 - protein, 39 aa, Setaria italica
  Transcript Sequence Number=SeqID_47649
  Gene Ontology: Mol. function=sequence-specific DNA binding; Cellular component=nucleus; Biological process=regulation of transcription, DNA-dependent
  Homolog annotation: Hit_ID=Q0J9X2; Match level="QueryCoverage=100%, HitCoverage=4%, E-value=2e-13, Identity=100%"; Hit description =Homeobox-leucine zipper protein ROC2
VDSVPTAKLSLGSVATVNSLIACTVERIKAAVSGESNPQ

SEQ ID NO: 113624 - protein, 113 aa, Setaria italica
  misc_feature (35)..(35): Xaa can be any naturally occurring amino acid
  misc_feature (47)..(47): Xaa can be any naturally occurring amino acid
  misc_feature (95)..(95): Xaa can be any naturally occurring amino acid
  Transcript Sequence Number=SeqID_47650
  Gene Ontology: Mol. function=sequence-specific DNA binding; Cellular component=nucleus; Biological process=regulation of transcription, DNA-dependent
  Homolog annotation: Hit_ID=Q0J9X2; Match level="QueryCoverage=99%, HitCoverage=14%, E-value=8e-54, Identity=93%"; Hit description =Homeobox-leucine zipper protein ROC2
LDSLRPGSVLKCRRRPSGCLIQEMPNGYSKVTWVXEHVEVDDRSVHXNIYKLLVNSGLAFGARRWVGTLDRQCERLASVMASNIPTSDIGVITSXKGRKSMLKLAERMVMSFW

SEQ ID NO: 113625 - protein, 78 aa, Setaria italica
  misc_feature (60)..(60): Xaa can be any naturally occurring amino acid
  Transcript Sequence Number=SeqID_47651
  Gene Ontology: Mol. function=sequence-specific DNA binding; Cellular component=nucleus; Biological process=regulation of transcription, DNA-dependent
  Homolog annotation: Hit_ID=Q0J9X2; Match level="QueryCoverage=91%, HitCoverage=8%, E-value=1e-27, Identity=87%"; Hit description =Homeobox-leucine zipper protein ROC2
SRRGTWPSMMIGRGSDPLGDEFESKSGSENVDGVSVDDQDPNQRPSKKKRYHRHTQHQIXQEMEAFFKECPHPDDKQR

SEQ ID NO: 113626 - protein, 65 aa, Setaria italica
  Transcript Sequence Number=SeqID_47652
  Homolog annotation: Hit_ID=B9RVD2; Match level="QueryCoverage=93%, HitCoverage=5%, E-value=9e-19, Identity=72%"; Hit description=WD -repeat protein, putative
KNVQNGDTRGLVDVKPRITDESLDKSKVWKLMEITESTQCRSIKLADNMRASKISRLIYTNSGVA

SEQ ID NO: 113627 - protein, 80 aa, Setaria italica
  Transcript Sequence Number=SeqID_47653
  Homolog annotation: Hit_ID=Q8H6S5; Match level="QueryCoverage=97%, HitCoverage=7%, E-value=3e-27, Identity=74%"; Hit description=CTV.2
  Subcellular localization annotation: CTP_CleavageSite=62; ConfidenceScore=5.22e-01
QPVPPLAGWMSNPPAVTHPAVSGGAIGFAALLKHPRTPTTANPSMDYPSGDSDHVSKRSRPVGMADEVNLPVNMLPVTYP

SEQ ID NO: 113628 - protein, 136 aa, Setaria italica
  misc_feature (120)..(120): Xaa can be any naturally occurring amino acid
  misc_feature (133)..(133): Xaa can be any naturally occurring amino acid
  Transcript Sequence Number=SeqID_47654
  Homolog annotation: Hit_ID=B9RVD2; Match level="QueryCoverage=94%, HitCoverage=11%, E-value=6e-59, Identity=80%"; Hit description=WD -repeat protein, putative
MERYSHALIFPSKAVEKMKAWLYDNLGSRVDYDAPGHWCTTMAYSADGSRLFSCGTSKEGESHLVEWNESEGAVKRTYQGFRKRSMGVVQFDTTRNRFLAAGDEFMVKIWDMDNTGLLTXIDADGGLPASPRXRFN

SEQ ID NO: 113629 - protein, 58 aa, Setaria italica
  Transcript Sequence Number=SeqID_47655
  Homolog annotation: Hit_ID=Q8H6S5; Match level="QueryCoverage=77%, HitCoverage=3%, E-value=1e-19, Identity=88%"; Hit description=CTV.2
  Pfam annotation: Domain name=WD40; Domain location=7-47; Score=20.4; E_value=0.0076; Accession=PF00400.24; Description=WD domain, G-beta repeat
YNGGDDIRQHLEIDAHVGGVNDIAFAHPNKQLCIITCGDDKTIKVSYCDGLANHVAKI

SEQ ID NO: 113630 - protein, 45 aa, Setaria italica
  Transcript Sequence Number=SeqID_47656
GGATNLGQAASKGLVDGALNKASSTRPLEAAWPRLVAPPFEAHLG

SEQ ID NO: 113631 - protein, 46 aa, Setaria italica
  Transcript Sequence Number=SeqID_47657
  Homolog annotation: Hit_ID=Q9LMQ9; Match level="QueryCoverage=97%, HitCoverage=3%, E-value=2e-11, Identity=66%"; Hit description=F7H2.9 protein
HNATFSCDSQLIYASFMDATVGIFNASSLRLQCRILPASYLPPSIS

SEQ ID NO: 113632 - protein, 147 aa, Setaria italica
  Transcript Sequence Number=SeqID_47658
  Gene Ontology: Mol. function=protein binding; Cellular component =cytoplasm; Biological process=ubiquitin-dependent protein catabolic process
  Homolog annotation: Hit_ID=B4G0B1; Match level="QueryCoverage=65%, HitCoverage=25%, E-value=1e-46, Identity=96%"; Hit description=F -box/LRR-repeat protein 2
CGCVRAASDRALQAIACNCGQLQSLNLGWCDGITDKGVTSLASGCPELRALDLCGCVLITDESVVALANGCPHLRSLGLYYCQNITDRAMYSLAANSRVRSQAGLGRRRRRGQDGQRNREPGTGLRRRPRNNTRPSRQRTTRTPTGR

SEQ ID NO: 113633 - protein, 65 aa, Setaria italica
  Transcript Sequence Number=SeqID_47659
  Gene Ontology: Mol. function=protein binding
  Homolog annotation: Hit_ID=B4G0B1; Match level="QueryCoverage=95%, HitCoverage=16%, E-value=6e-29, Identity=98%"; Hit description=F -box/LRR-repeat protein 2
KQSSQCTALTPPAVQAVCDSFPALHTCPERHSLNISGCLSLTSVHCACALHPHRAGRAILSNHAY

SEQ ID NO: 113634 - protein, 113 aa, Setaria italica
  misc_feature (103)..(103): Xaa can be any naturally occurring amino acid
  Transcript Sequence Number=SeqID_47660
  Gene Ontology: Mol. function=protein binding; Cellular component =cytoplasm; Biological process=ubiquitin-dependent protein catabolic process
  Homolog annotation: Hit_ID=B4G0B1; Match level="QueryCoverage=100%, HitCoverage=29%, E-value=6e-53, Identity=92%"; Hit description=F -box/LRR-repeat protein 2
CSNFSDAALVFLSSQCKDLKCLNLCGCVRAASDRALQAIACNCGQLQSLNLGWCDGITDKGVTSLASGCPELRALDLCGCVLITDESVVALANGCPHLRSLGXYYCQNITDRA

SEQ ID NO: 113635 - protein, 61 aa, Setaria italica
  Transcript Sequence Number=SeqID_47661
  Gene Ontology: Mol. function=protein binding
  Homolog annotation: Hit_ID=B4G0B1; Match level="QueryCoverage=96%, HitCoverage=15%, E-value=5e-27, Identity=98%"; Hit description=F -box/LRR-repeat protein 2
LSTALTPPAVQAVCDSFPALHTCPERHSLNISGCLSLTSVHCACALHPHRAGRAILSNHAY

SEQ ID NO: 113636 - protein, 63 aa, Setaria italica
  Transcript Sequence Number=SeqID_47662
  Gene Ontology: Mol. function=protein binding
  Homolog annotation: Hit_ID=B4G0B1; Match level="QueryCoverage=98%, HitCoverage=16%, E-value=6e-26, Identity=95%"; Hit description=F -box/LRR-repeat protein 2
MLQAIACNCGQLQSLNLGWCDGITDKGVTSLASGCPELRALDLCGCVLITDESVVALANGCPH

SEQ ID NO: 113637 - protein, 47 aa, Setaria italica
  misc_feature (18)..(18): Xaa can be any naturally occurring amino acid
  Transcript Sequence Number=SeqID_47663
  Gene Ontology: Mol. function=DNA binding; Cellular component=nucleus; Biological process=regulation of transcription, DNA-dependent
  Homolog annotation: Hit_ID=P93831; Match level="QueryCoverage=70%, HitCoverage=3%, E-value=2e-09, Identity=90%"; Hit description =Histone-lysine N-methyltransferase CLF
RFKNSVNKHEYLGEYTGXLISHKEADKRGKIYDRENSSFLFNLNNEF

SEQ ID NO: 113638 - protein, 56 aa, Setaria italica
  Transcript Sequence Number=SeqID_47664
RPSEFLQSACWICFVCCCIVCQKRSTVLTDAYLPTSLGSIRFDVWDWLSWDGASPH

SEQ ID NO: 113639 - protein, 59 aa, Setaria italica
  Transcript Sequence Number=SeqID_47665
  Gene Ontology: Mol. function=metallopeptidase activity; Biological process=proteolysis
  Homolog annotation: Hit_ID=C4WRH6; Match level="QueryCoverage=71%, HitCoverage=4%, E-value=1e-17, Identity=85%"; Hit description =Putative aminopeptidase
MAHPIAPIPISRWTTSILYKSTGNFCTQCEAEGFRKITYFQDRPDVMAKYTCRIEADKT

SEQ ID NO: 113640 - protein, 116 aa, Setaria italica
  misc_feature (46)..(46): Xaa can be any naturally occurring amino acid
  misc_feature (105)..(105): Xaa can be any naturally occurring amino acid
  misc_feature (107)..(107): Xaa can be any naturally occurring amino acid
  Transcript Sequence Number=SeqID_47666
  Gene Ontology: Mol. function=metallopeptidase activity; Biological process=proteolysis
  Homolog annotation: Hit_ID=B9RCE0; Match level="QueryCoverage=100%, HitCoverage=13%, E-value=3e-35, Identity=62%"; Hit description =Aminopeptidase, putative
MFIPVAVGLVDSTGKDMPLTSVYSDGTLQTLSSDGQPVFTTVLQFXKKEEEFIFQNVPEKPVPSLLRGYSAPVRLDSDLSESDLFFLLANDSDEFNRWEAGQVWXVXVMLSLVADF

SEQ ID NO: 113641 - protein, 81 aa, Setaria italica
  misc_feature (48)..(48): Xaa can be any naturally occurring amino acid
  Transcript Sequence Number=SeqID_47667
  Gene Ontology: Mol. function=metallopeptidase activity; Biological process=proteolysis
  Homolog annotation: Hit_ID=Q9CAJ3; Match level="QueryCoverage=79%, HitCoverage=14%, E-value=6e-28, Identity=89%"; Hit description =Putative aminopeptidase, 3' partial; 76469-79469 (Fragment)
YFCFTYLFLPVRLIVNYFRIWTPAQDLPKTAHAMYSLKAAMKWDEEVXFGLEYDLDLFNIVVVPDFNMGAMENKSLNIFQS

SEQ ID NO: 113642 - protein, 34 aa, Setaria italica
  Transcript Sequence Number=SeqID_47668
SRQVTLFPVQLWKYSCPTTPNLDLCWHHLRLPLM

SEQ ID NO: 113643 - protein, 77 aa, Setaria italica
  misc_feature (49)..(49): Xaa can be any naturally occurring amino acid
  Transcript Sequence Number=SeqID_47669
  Gene Ontology: Mol. function=metallopeptidase activity; Biological process=proteolysis
  Homolog annotation: Hit_ID=B9RCE0; Match level="QueryCoverage=76%, HitCoverage=6%, E-value=7e-21, Identity=77%"; Hit description =Aminopeptidase, putative
VLLSNGNLIQQGDLEGGKHYALWEDPFKKPSYLFALVAGQLGCREDSLXTCTGRNVTLQKFRNYLDPKNLTKKTKNN

SEQ ID NO: 113644 - protein, 72 aa, Setaria italica
  misc_feature (11)..(11): Xaa can be any naturally occurring amino acid
  Transcript Sequence Number=SeqID_47670
  Homolog annotation: Hit_ID=B9SVG7; Match level="QueryCoverage=90%, HitCoverage=10%, E-value=2e-19, Identity=67%"; Hit description =Nuclear matrix protein, putative
QVYCWKGLRFXSARQDLDGFARFSDYGIEGVVPSELLPPEVNAKFSSKPAEKVKRVKREDSKGASAHPRCHL

SEQ ID NO: 113645 - protein, 92 aa, Setaria italica
  Transcript Sequence Number=SeqID_47671
  Subcellular localization annotation: CTP_CleavageSite=44; ConfidenceScore=5.68e-01
GYFPTCFRVFLVFGSSKVRGCFLPSGTYVFLSLSSRKTSLPSCRASRISMTHSWRNTRATPGCEEEHHSKGRIGCQILCFSLSAIKHLQGHY

SEQ ID NO: 113646 - protein, 92 aa, Setaria italica
  Transcript Sequence Number=SeqID_47672
  Gene Ontology: Mol. function=transferase activity, transferring nitrogenous groups; Cellular component=cytoplasm; Biological process= biosynthetic process
  Homolog annotation: Hit_ID=Q45RS3; Match level="QueryCoverage=91%, HitCoverage=17%, E-value=8e-38, Identity=85%"; Hit description=AlaT1
  Subcellular localization annotation: CTP_CleavageSite=42; ConfidenceScore=5.07e-01
NPPKPGDISYLKFAAESKSILDSLRRRARMMTDGFNSCRNVVCNFTEGAMYSFPQIRLPPRAIEAAKRAGKAPDVFYCLKLLEARHDGREVF

SEQ ID NO: 113647 - protein, 97 aa, Setaria italica
  Transcript Sequence Number=SeqID_47673
YGAIRGLLQDVKRNITAKEGSAVRFSVSVSARSSIYKDIINRKLISCNSLKETIAAFDMYRGSKFCGNFWIPVRCLLLLPYWLSCNLLEDVCDSCMA

SEQ ID NO: 113648 - protein, 55 aa, Setaria italica
  Transcript Sequence Number=SeqID_47674
SDANLSSDLSLQTVDEIYKVASIALSPNVPGQIFVSETEPLFDSLSFCSSLNPLL

SEQ ID NO: 113649 - protein, 46 aa, Setaria italica
  Transcript Sequence Number=SeqID_47675
SFLQRKTSLPSCRASRISTVPGSGFGQKEGVFHLRTTILPAGKSSS

SEQ ID NO: 113650 - protein, 78 aa, Setaria italica
  Transcript Sequence Number=SeqID_47676
  Gene Ontology: Mol. function=drug transporter activity; Cellular component=membrane
  Homolog annotation: Hit_ID=Q9LE20; Match level="QueryCoverage=94%, HitCoverage=14%, E-value=3e-12, Identity=50%"; Hit description =F14O23.25 protein
  Subcellular localization annotation: CTP_CleavageSite=30; ConfidenceScore=5.19e-01
PGPSVRSVGAGVLIQTTSLMYTVPMALAACVSTRVGNELGAGKPRRARMAAMVALACALAIGAVHVAWTAALSRQWVE

SEQ ID NO: 113651 - protein, 75 aa, Setaria italica
  Transcript Sequence Number=SeqID_47677
TRQDDYQQMPQQYMSNMGCAPRPGLPASSSAMMKPLHQLIPTQQQQQMWQYHVSQYQPRPDATPPAAWYGMPTLR

SEQ ID NO: 113652 - protein, 104 aa, Setaria italica
  Transcript Sequence Number=SeqID_47678
  Subcellular localization annotation: CTP_CleavageSite=26; ConfidenceScore=5.11e-01
RLSSQATCIDKVVGRTNSIPYVNPVPGATDQSSSINPPSTENEQMQGTVVNLPSPSKDSSNNSTLKQHKVQFDDSQSYPAQKPEAPLWLVLHCYLSESTDVLSV

SEQ ID NO: 113653 - protein, 85 aa, Setaria italica
  Transcript Sequence Number=SeqID_47679
GVVARGGRARGRGRGDEVVESVERENAKNSSTQEIVPLVQTPLPHTPDGYLIKPSSSKLAAHKNTISEASKFIAPGNQGKSYLQH

SEQ ID NO: 113654 - protein, 88 aa, Setaria italica
  Transcript Sequence Number=SeqID_47680
NLKLPNSTLIDWWLSIRRTMINAKARGLDSTVILVCWRLWKERNGRAFATDIARTPQQLLPLIIDEASLWVQSGARNLEAFGWKPPDR

SEQ ID NO: 113655 - protein, 88 aa, Setaria italica
  Transcript Sequence Number=SeqID_47681
  Gene Ontology: Mol. function=heat shock protein binding
KNKKEGKQRKPSRRGFGKSFWIEQTPLPGLAENVLEKTRCMACMASSIFRASMMYLVEQSKRSIDRNRPTIDAYMAIVNKGRAYVFCF

SEQ ID NO: 113656 - protein, 78 aa, Setaria italica
  Transcript Sequence Number=SeqID_47682
RRRGREGGNVRRCRTPPHFHRTPWAGEGSRKQRTSGRFVWGCLTEEDANKLREGNQDWFTSPNQVCPRYQIHIGLRGF

SEQ ID NO: 113657 - protein, 56 aa, Setaria italica
  Transcript Sequence Number=SeqID_47683
NGERLSTSDGPTKSRGGPDNTVGHNDELESYIAAFVQRSLSQARQMVDKAMKVVAT

SEQ ID NO: 113658 - protein, 49 aa, Setaria italica
  Transcript Sequence Number=SeqID_47684
YRLPPEVVSMLDLQSKGTLLRCAYPRMFSLLLIKQTLITCFLFHCASIY

SEQ ID NO: 113659 - protein, 91 aa, Setaria italica
  Transcript Sequence Number=SeqID_47685
  Gene Ontology: Mol. function=protein serine/threonine kinase activity; Biological process=protein amino acid phosphorylation
  Homolog annotation: Hit_ID=B9S555; Match level="QueryCoverage=94%, HitCoverage=6%, E-value=8e-37, Identity=80%"; Hit description =Serine/threonine protein kinase, putative
  Pfam annotation: Domain name=Pkinase_Tyr; Domain location=1-74; Score= -171.7; E_value=0.026; Accession=PF07714.9; Description=Protein tyrosine kinase
VDVFSFGIVLWEILTGEEPYANMHCGAIIGGIVNNTLRPPIPENCDPDWRKLMEQCWSANPDVRPSFTEVTDRLRAMPPVLQSRGQAPGNR

SEQ ID NO: 113660 - protein, 70 aa, Setaria italica
  Transcript Sequence Number=SeqID_47686
HTIITNESMKLPHRMHDNGHMNVPVIVEDVTDNMPSGIPSSSSVIPQVVIAAEERQEVINVQYNKKERIE

SEQ ID NO: 113661 - protein, 36 aa, Setaria italica
  Transcript Sequence Number=SeqID_47687
SISVTKEKSNNTFLGLSRYSYKVFSSQTTALFYYSH

SEQ ID NO: 113662 - protein, 84 aa, Setaria italica
  misc_feature (18)..(18): Xaa can be any naturally occurring amino acid
  Transcript Sequence Number=SeqID_47688
WCDARRGKEGRLVCCRRXKKLGWSPSTRAYVALVDLWCWERMVDEAEKMMEGDGLAADQYTCNVLEDALVADVEPPEVEFVEFS

SEQ ID NO: 113663 - protein, 135 aa, Setaria italica
  misc_feature (80)..(80): Xaa can be any naturally occurring amino acid
  misc_feature (118)..(118): Xaa can be any naturally occurring amino acid
  Transcript Sequence Number=SeqID_47689
  Gene Ontology: Mol. function=aspartic-type endopeptidase activity; Biological process=DNA integration
  Homolog annotation: Hit_ID=O23864; Match level="QueryCoverage=62%, HitCoverage=8%, E-value=4e-20, Identity=44%"; Hit description =Polyprotein
  Pfam annotation: Domain name=zf-CCHC; Domain location=48-65; Score =25.1; E_value=3.8e-05; Accession=PF00098.15; Description=Zinc knuckle
NQDHVMAIQNKPSFKKKGNSWKKKGKAGTSKPNPPPKVKAGPGPAPDKECFYCHELGHWKRNCKQYLASLKNGGSKSTSXQGMIRSRSVERGEVDFRMGNNARVAALTVGTMQLHLPXSGFIMELNNCYFVPSLS

SEQ ID NO: 113664 - protein, 51 aa, Setaria italica
  Transcript Sequence Number=SeqID_47690
RPKADRRPVFRRQASKSPPLLSAGRRHPIPKTSQLLKWNSWNSAGDGHHSR

SEQ ID NO: 113665 - protein, 73 aa, Setaria italica
  Transcript Sequence Number=SeqID_47691
  Subcellular localization annotation: CTP_CleavageSite=30; ConfidenceScore=5.05e-01
GTSVAAAATMLAAAAAIFITFVLCFYLFLCAKRYRGAAPTIGGGGGRAGEAALSFFFLICLLRSSCSSSSRAI

SEQ ID NO: 113666 - protein, 113 aa, Setaria italica
  misc_feature (21)..(21): Xaa can be any naturally occurring amino acid
  misc_feature (36)..(36): Xaa can be any naturally occurring amino acid
  Transcript Sequence Number=SeqID_47692
  Gene Ontology: Mol. function=transferase activity, transferring glycosyl groups
  Homolog annotation: Hit_ID=Q5NA53; Match level="QueryCoverage=84%, HitCoverage=15%, E-value=5e-53, Identity=97%"; Hit description =Glycogenin-like protein
  Pfam annotation: Domain name=Glyco_transf_8; Domain location=1-106; Score=-48.2; E_value=0.0047; Accession=PF01501.12; Description =Glycosyl transferase family 8
WQLTDYDKIIFIDADLLILRXVDFLFAMPEITATGXNATLFNSGVMVIEPSNCTFQLLMDHINEITSYNGGDQGYLNEIFTWWHRIPKHMNFLKHFLGRVVTLFVRLNLLRFL

SEQ ID NO: 113667 - protein, 80 aa, Setaria italica
  Transcript Sequence Number=SeqID_47693
MDAAVEILLPQPATALDHVGRPVSRLTTGRWPAAVFIIGTQQVNRAIVVSLAPSDPPAVVGGVPQGWRSRSGSRSPASRG

SEQ ID NO: 113668 - protein, 84 aa, Setaria italica
  Transcript Sequence Number=SeqID_47694
  Gene Ontology: Mol. function=ubiquitin thiolesterase activity
  Homolog annotation: Hit_ID=Q25AN5; Match level="QueryCoverage=69%, HitCoverage=10%, E-value=8e-17, Identity=74%"; Hit description =H0811D08.10 protein
CLSCAAVFCPSHAASHASASAGPGHQIAVDVDRAELFCAACGDQVYDPDFDHAVFLAQSTSSPTHQNPSRRRRGISGKQERPPP

SEQ ID NO: 113669 - protein, 89 aa, Setaria italica
  misc_feature (13)..(13): Xaa can be any naturally occurring amino acid
  misc_feature (21)..(21): Xaa can be any naturally occurring amino acid
  misc_feature (27)..(27): Xaa can be any naturally occurring amino acid
  misc_feature (36)..(36): Xaa can be any naturally occurring amino acid
  misc_feature (38)..(38): Xaa can be any naturally occurring amino acid
  Transcript Sequence Number=SeqID_47695
  Gene Ontology: Mol. function=dihydroorotate dehydrogenase activity; Cellular component=cytoplasm; Biological process='de novo' pyrimidine base biosynthetic process
  Homolog annotation: Hit_ID=Q8H6B5; Match level="QueryCoverage=70%, HitCoverage=18%, E-value=1e-15, Identity=58%"; Hit description =Putative dehydrogenase
FEINVSCPHGMLXEVCGWINXEGRCAXWATVTPNIXIXQPARIATNPGCEGVSAINTIMSVMGDYFVDTNPQSRGAFKIQEVQWIRKCI

SEQ ID NO: 113670 - protein, 62 aa, Setaria italica
  Transcript Sequence Number=SeqID_47696
TETNSHPLQQFRFDSKLLYVESGGAVDQEVHLRFRKALEGTDVVQEDTSVQSSHLKDTTGMP

SEQ ID NO: 113671 - protein, 44 aa, Setaria italica
  Transcript Sequence Number=SeqID_47697
  Gene Ontology: Mol. function=dihydroorotate dehydrogenase activity; Cellular component=cytoplasm; Biological process='de novo' pyrimidine base biosynthetic process
  Homolog annotation: Hit_ID=Q9LVI9; Match level="QueryCoverage=90%, HitCoverage=9%, E-value=4e-14, Identity=85%"; Hit description =Putative dehydrogenase
DNRRLIERVEESGVDALEINFSCPHGMPERKMGAAVGQDCDLLE

SEQ ID NO: 113672 - protein, 38 aa, Setaria italica
  Transcript Sequence Number=SeqID_47698
SLQSPIPPTVLQLVTKPRSSCSRKECKTFASFWCAKFI

SEQ ID NO: 113673 - protein, 66 aa, Setaria italica
  Transcript Sequence Number=SeqID_47699
  Gene Ontology: Mol. function=protein serine/threonine kinase activity; Cellular component=plasma membrane; Biological process =protein amino acid phosphorylation
  Homolog annotation: Hit_ID=Q0Z839; Match level="QueryCoverage=87%, HitCoverage=14%, E-value=2e-25, Identity=93%"; Hit description=DSK2
HLDFHSCREMIQHRPYDQKVDVYSFGIVLWELITGMLPFANMTAVQAAFAVVNKGVRPAIPQDCLP

SEQ ID NO: 113674 - protein, 83 aa, Setaria italica
  Transcript Sequence Number=SeqID_47700
  Gene Ontology: Mol. function=protein serine/threonine kinase activity; Cellular component=plasma membrane; Biological process =protein amino acid phosphorylation
  Homolog annotation: Hit_ID=A9RAA9; Match level="QueryCoverage=73%, HitCoverage=14%, E-value=2e-25, Identity=85%"; Hit description =Serine/threonine protein kinase 1
GILKILVLTFFVFVLVVLNSYLSISLVLLELARIEVKTEGMTPETGTYRWMAPEMIQHRPYDQKVDVYSFGIVLWELITGMLP

SEQ ID NO: 113675 - protein, 85 aa, Setaria italica
  Transcript Sequence Number=SeqID_47701
  Gene Ontology: Mol. function=oxidoreductase activity, acting on the CH-OH group of donors, NAD or NADP as acceptor; Cellular component =mitochondrial matrix; Biological process=oxidation reduction
  Homolog annotation: Hit_ID=Q337F0; Match level="QueryCoverage=83%, HitCoverage=13%, E-value=7e-32, Identity=88%"; Hit description=Malic enzyme
  Pfam annotation: Domain name=Malic_M; Domain location=1-85; Score= -139.2; E_value=0.01; Accession=PF03949.7; Description=Malic enzyme, NAD binding domain
SSKQHVLLGLSGVGGIFNEEVLKAMKESDFPRPAVFAMSNPTTKAECTPDDVFKHVGENAIFASGSPFSNVSLSVMYDARHSAAA

SEQ ID NO: 113676 - protein, 47 aa, Setaria italica
  Transcript Sequence Number=SeqID_47702
  Gene Ontology: Cellular component=integral to membrane
MNIGTGIAYESCIVILGQILALLVVGFGFWMSTHNDECRRSLTIPVI

SEQ ID NO: 113677 - protein, 90 aa, Setaria italica
  Transcript Sequence Number=SeqID_47703
  Subcellular localization annotation: CTP_CleavageSite=49; ConfidenceScore=5.40e-01
SEQKHPVLPSPPTSPAPPPQLPLAVPGRILRPVRWDRTLPTRRDPCMCLLALDVAQGFSCLRRAAEHHAAGHLLYRSLSLWAGFFAHLSS

SEQ ID NO: 113678 - protein, 91 aa, Setaria italica
  misc_feature (89)..(89): Xaa can be any naturally occurring amino acid
  Transcript Sequence Number=SeqID_47704
PSKNIRSSRHRRPRLRRRRSCLSRCPDESCGRCGGIGPYQPGETRGRFSLLVWGGDPSVRDCEGLISFWFWFSSSSPYKQDSTCSYLFXVR

SEQ ID NO: 113679 - protein, 75 aa, Setaria italica
  Transcript Sequence Number=SeqID_47705
QNLLKLQNFTSPELHEVQSFVLPDQQLDTAPCMLLTEYTLNLYSTMHKRGKQRKATEGQYYCQTQGELHVHLDCL

SEQ ID NO: 113680 - protein, 72 aa, Setaria italica
  Transcript Sequence Number=SeqID_47706
LVGQNQDIYNNPETCNVHRGSVPNFKWVQQTNWLGRIRASTKNPVTCSQGKSVFAGIVPFGWFCKFVLGIVV
